United States Patent Application Publication US 2011/0014706 A2 - sequence listing, part 43

SEQ ID NO: 130687 - DNA, 1198 bp, Arabidopsis thaliana columbia
  unsure (1)..(1198): unsure at all n locations
aagaggaggagggagggagagagcagagagaaaaagaaagaaagcgagggggagagaagagaagagagagagagaggagagagaaggagagagagagggagagagggagaagagagagagaggagagagaaagcaaggagagagagagaaaagagagaaagaaggagagaggaaaaggaaaggagagaaagagagggagcaagaggagggaagacgagagagaaagagtagagagagagaggagagaggacaggggagagagagaagaggagaagggggggagcaaaaagggaaggagaaggaagacagatgatgagcgaaagatgggagaagacgaacgtaagcgaagagagatgaggggagacgatgaagccagacgtgactgaactgcaaagtatggcgggaacagatacngccagaaggaagtgagatgtagagatatgaggagaagcgcgagagtgcatgtgagagatcgatgagaaggagtgaaaaagggaggagaataaagcggggggaagagagagaaggagaagagggaagagagagacagagaagaggcaggtagatgaagatgaggagcgacgaaacgatcgcgagaaggaagaggggaagaagaagggaagaagaagagagaagaaggaggcgggaaggaggaggagagaaagaggggggtagaaaaagagagaagggaaaagagaagaagagaggaaggagggagaaaaaaaggcggagaaaaggaggagagagagaggggagaaaaagaagagaggagaaagaagagaaagaagggagagagaaggaagaaggaagggggaggaggaaaaaggggaggagggaagagaagggagaagaagagagagggggaagaggagaagaaaagaagagaagggaggcggaggggagagagaggggagagaggaggagaggaagagaaggaggggggataaggaggaagagggaggcggagaaagagagaagggtagaggaaggagaaggagagagaagatgggggagcaagtagggaagaagacaggagagaagtagaaggagagacgtggagaagagaatagaaagaaggaagaagggggtacggaaggaagtgcgtaggagagagatgaganggaaganggggaaagagaagaggaggagaggagaatagaaagttgagagaagatagaatgaggaagagatgaagatg

SEQ ID NO: 130688 - DNA, 491 bp, Arabidopsis thaliana columbia
  unsure (1)..(491): unsure at all n locations
ccgggtcgacccacccgtccgtgttttaaggcaaattaagatcatcttcaaaatcttctcagatttcttccaattctctagaaaaaacatgtcttgctgtggtggaagctgcggttgtggatctgcctgcaagtgcggcaatggctgcggaggttgcaaaaggtaccctgacttggagaacaccgccaccgagactcttgtcctcggtgttgctccggcgatcaactctcagtacgaggcttccggcgagacttttcgtgcccagaatgatgcctgcaaatgcggatctgactgcaagtgcaacccttgtacctgccaatgaagaacttcataaaccctaagtctgtaataaccctaatggtatgtcagggatgctcatatgtaaaaaattggctgatttttcccggcagtttttgcccggccgaccgggngggcctttccttcttccttagttccttcctttcctgggggtggggggactccctcatggg

SEQ ID NO: 130689 - DNA, 663 bp, Arabidopsis thaliana columbia
tgcagttccgggccggaattcccgggtcgacccacccgtccgggagatcaaagcttccgctgagaagttccatcacatgttcgctgggaaaccacaccatgtctctaaagcaactccaggaaacattcagagctgtgatctgcacgaaggtgactggggcacagtcggctctatcgtcttctggaactacgttcatgatggggaggcaaaggtggcaaaggagaggattgaggcggtggatccagagaaaaacttgatcacgttcagggttatagaaggtgatctgatgaaagagtacaagagcttcgtaatcacaatccaagtgactcctaagcatggaggttcagggagtgtggtgcattggcacttcgagtatgagaaaataaacgaggaggtggctcatcctgagactctcctccagtttgccggcgaagtcttcaaagaaatcgacgaacatctcttggccgaggaatagaggagaatatttcttgggtgactatctattatcctgtccgtacatgtatggtgtgatttgaaagcatgcccgattttttattaactcttttgaaaggtgggaaaaaaatcaaaagagtttggtggttgggattttttttggagaaggtcccttggtttgggaatggttttttcttaaaaaagggggcc

SEQ ID NO: 130690 - DNA, 674 bp, Arabidopsis thaliana columbia
ccataccgcttcccttgacttagactaccggaggaacttccttgtacttgccatcttatttgcaatattatctcaacgactgctccgactcgtaagacgagtaattggaattctaaatggcaggaattggccattaaggatgctctcggacgctgcttgaagcatgatattaaccacacctaacgactgtgacatactagattatcctgcgtgagaaggatgtgaacctgcgtacaaacgatagctagcgtccactccacctgctcagctttgactttttcctgcacaatggactgcatggcactcttgctggtacactcgtcctggtcagagacccgactaacacgacctaagcgcatggtaaaaccaccatgtcggattatgagagaaaaacaaggatttacgaattccatgctgtgagctatccatcgatgtggcgactggaaaaaggggtcacagacctggatgatcgtcaaccgaaagaggcctgcccaatacggaacgaacataaagaagagagtgaaaagggcaaggccctgggagattgacactcacgagaaaaggaagaatgcgggactttgaaatggagattaaacagacaggagagttgctccctaaacaggcccccatagaattttgccttcaaagtgcaacccggagaatgggcccccggg

SEQ ID NO: 130691 - DNA, 1197 bp, Arabidopsis thaliana columbia
  unsure (1)..(1197): unsure at all n locations
tgttagaaagggggtggatcttgcgccggtatctttcgactctagccccagcttcgctctccgtttgggccaaaccattttctcagctgcttcgtggatcttcaatgggcctttggaattcccgaaattttccctattggaattttcccaccttacccttttttcttggcttaatttttaaaagcccgaaaatggggttgggatattggggccccaatattgtggttaaaacctttctcccatttgtggggagggccaaattctttttttaactcttttggccccccttgtgggacccccagggaaaccccaacccatagtagccccttctctttgggggcccctcttttaagggttgggaaaaaaaaacccttttcccccttttttcccccttttcaagaaggggaaaatattttttaaagaggaaagggttttttctcttttttttctccccaatatttcgggtnttttttttcgcgggcccccgggggttggaatatttttctccgcgttaaactcttttcttttccggggagttttccctttttttccttccctttgggggctgggggttggccctttgggttggccttgggtaaggcctttaggtgggcccaacaccttggaaacactttgggctttgggcgggtcccttggccttgcaatgggggaaaaaaggaaatcccttggttgcaatgggggtaaggccccttcctggtaatttcccaaaattaccccaaaggttccttcgggccttggcatttggggcctttttcctttggtggatttggggaatttccttggttttaaccttttggccttttacaaggccttctttttcttcaaaatttttttttgggggaaggtttttaacccctttcctttttaataaccttaatttgggaccaatttaaaacaaccaggaacttttaatttattggaatgggtcctttcctttaatagggtttattaaggaatggattcaggggaaattcaataaattcattaggggaccatggggattggtacattttttttatattaccaaacttcttaggaggactttgtcctttgtttccaaaaacaaaaccccgggtccatggcctccttaccaaggggcgggccgcttctagaggaacccaagctttacgtacgcgtgcctgccaagccataacttttttataggggccccctaaa

SEQ ID NO: 130692 - DNA, 915 bp, Arabidopsis thaliana columbia
aaggctcagatctatgcttgaccgatgttctgacttcgcgaaacaagcgggaatacaccgtatcttaatctccggctccgatctcgaacgaaaagtcgccattcttggagccaacagtgagaattgtgtcaacacctcttgcttcctcgctgaatgaaaggcttaaaattgctgattaagacaacttttccccctaattcccgctacttacagaaataaaatgcccttaaatcaacattaccaaaggagagttatcggcttggcttgaatagaaatggaaacaaaaaaaaaaaccaccccaaaattcttgaaggggttggtatgagattaacaagtggggtcgaaagaaataaactatgggccgaaaggctttctttggaaaggaaaactggatccttcagtttaaggaatttcccagtttttgggtggttacccaaaaaggaaaagcccctgtggtaatggaacccccaggggggacggaaatgctttttattcaaaaccattttacaatggcctcttcaaaaattggattcaaaaggaagaaccctttttgtcggagctatttccattttgccctctaatttaacttgagcgcaaacgaatgtcggcctttaatttaaattaaagaaacataggcaaacccgcttggggaaacaccttaccgtgggtcccaaatttggcaggctgggggaaaattttttaaaaaaagggttgggtattgtcaccgattgaaaaaagaaaaaattggctttgggagggttaaccaccttgtttgaaagttccttcaaaggggccaggaaatttttttatttttttggaaaagggacaaagtttcaaaagggcgccaaaattaaagggtcccggagaaaagaagggctaaggcttggggttaaaaaataattgcattctttttta

SEQ ID NO: 130693 - DNA, 770 bp, Arabidopsis thaliana columbia
agccaagaaatacccgaaacgaacccaccccgaaccgcccgaaactcccagcaacacccggcccaaccacaaacctatttgccaaggggcaataagcgaaccgggcaatcaggcaccggacggaccgagggcggacccaggggagggacgcgcaataacgacaaaaacgcacccgaaagcgccagaggcaaagacggcacccacacaaggagcggagagcacaaaaaggggagccacgctgacaaaaagaagccgcaccaacgcaaaaccatccacacgaccgagggaccgacagaaacgaacaccgagccaaaggaacccggagcacagacaaaacaaagaacccggggaagcaccaacccaggagcgaggggccgacgcaagcgaccaaaaacccagcggcggaggagcacaccaggcccggcgggagggaaaccaggcaacaccaaaagacccaacgcccccagggccggccgagtagaaccgcacaacaagaaaaagcggccaccagaaaaacaggaagggcccaaccaagagacaaggagggaaacgacccgcacaccgaaacgcaagagggggggaacgccagaacaaccgcaccagggaccccgaaacaccccgagaagcacaagaccgaaaagagggaggcggacgcagacccaaagagcccccacacgcgagcccaaaacagagaggcgcaaggggaaacccgacaacacaaagaagggcccgggcggcccacccgcgagaggacgcacagaggaaacaag

SEQ ID NO: 130694 - DNA, 624 bp, Arabidopsis thaliana columbia
agaaaaaaaagaggagagaaggacggcccgacaagaggagaaaggcaggacaagagcccgacgaagcggggaagggcgacgcagaggagaccaacgacggacacggaagaggagagacggaacgagaaagaagaaagcggcgacaaagaacaaggacgagaaagagcaaagagagaacaagaagagagacagggagggaggggagaggatgaagaaagcaaagagacgagcaggcgcgaacacaagcggcaggaacaaggagcccagaggcaagaggaagacaacgaacaggcgagaggaggagagaggcggaggaggagcggcctaacaaacacaaagaggagaggcgggaaggaggggaccaacgcagggagaggggaaggggaagacaacaagagagcgcggacaaaggcggaagaaacaaagcggcggcccaggaaaagaaacagagaccccaggaggaggaggaccgcgcacaagaaagggggcacaaaaaacaaagggcaaacagaggacaaggaggagaagaggcgcccgcccaaaaggggggggcccccaaaagacacagaggggaaggcgcagatagaggggcgcacccgcaaaagacagaaaacaccccggggg

SEQ ID NO: 130695 - DNA, 796 bp, Arabidopsis thaliana columbia
agctggcccttctgaggtaccggtccggaatacccgggtcgacccacgcgtccgagctaatccgcatcttcaagatcgggacggtgcacctccgattcattatgcagttcaagttggagccttgcagactgtaaaactactattcaagtacaatgtagacgtgaatgttgcagataatgaaggatggactccgttacatatagctgtacaaagccgaaatcgagacattacaaagatattgttgaccaatggtgctgataaaacaagacgaacgaaggatgggaaattagctttgtacttggctctgtgctttggaagagatttcaagtcatatgatctggtcaagctattgaagattatgcccaccggggatatatagaaagagctggcgagattttgaatgatcagggtgagattactaaactgcatttgccattgcttggtttgattgttatctacaccggtataagtggttaatgtagaagaaaccccattgagtttgtaattactgcttttatatattcgaggatgaacttgttattcgggtgtgtgtatcataatgtgcataacaaagatacacattggtatgtgatatattttaaaaaaaaaaaaaaaaaaaggggcgggcgatcttagaggaatccaagctttaccgtaccccgttgccttgcgaacggaaataagcttctttcttataagttgggcaaccttaaaaattccaattttaacctgggcccgtttggtttttaaccaaccttttttttgaactgggggaaaaaaccccctggactggtta

SEQ ID NO: 130696 - DNA, 710 bp, Arabidopsis thaliana columbia
ttggatggccgtgtgcagtaccggaccggaatatccgggtcgacccacgcgtccgagcaaaagcaagagaaatgcaagctatactgtgagggatcgttttcaaaaggctaagggccagagaagctggtgaagcaccaaacgacgatttactgggaatacttcttgagtcgaatttggggccaacgacaggaaacggaatgagtaccgaggatctgatggaggagtgcaagttgttctatttcgtcgggcaagagacaacatcagtacttctggtttggacaatgggtctgttaagtcaacaccaagattggcatgctcgtgcacgagaagaagcgaagcaagtgtctggcgataaagaacctgatgcagaaggacttaaccagctcaaaagcatgacgatgatattatatgaggtccttaggctatatcctacaatacctcagctgagcagagccattcacaaagagaaggagcttggagatctgacactaccaggcggcgtgctgatcaatctaactatccttctagtccaacgcgacacggagctgaggggaaacgatgccagaagaggtcaaagccagaagaagattccaaagaacgggtcgtttcataagggcgagcaaaggaagacccaagcgctccctttcttttttcttttttggcggtgggggggaccccgaggggaatcttggcaattttggggccaaaga

SEQ ID NO: 130697 - DNA, 271 bp, Arabidopsis thaliana columbia
tggcccctcggcaggtatctcgggccagaattcccgggacgacccacgcgtccgaggttattctcgagacaggccagaatacctgttaggaggagtttttcaacaggcaaaagggcaacaaaacgctgctagaggtaatgaacgggacgattttacttgggtatataacttcttggagaccaaatcatccgagagtcaccacagtaccaggaaaggatgtgccctgtgttactcgtagcgcaccagcatgagattggagcagtctaagagt

SEQ ID NO: 130698 - DNA, 785 bp, Arabidopsis thaliana columbia
ggccggaattcccgggacgacccacgcgtccgagaagggacacaacctcgagctaaagtgacatacacaggtgtactttgatgtggacactgcaggtgaagcagctggaagaaatgtgatggggctctctggagaagcagtgcctaaaaccggtgaaaactcccgcgccttgcgcaccggcgagaagaaatacgggaacaagggtgcctctttccatcgccttcttaaaagattgcatgatccaaggaggcgatctcgccgaaggcaatggtcctggaggcattcttatttacggaggcaaagtctaagatgaaaactgcaccctgacgcatactggacctggaatctagagcatggcaaacgctggtcctaatgctaatggaagccaggtacccatttgcaccgccccgacttcatgggtagataacacgcatggcgcgaccggaccacaaattgaggggctgaagcttgctaggactcttgagtctcaagagactcgcgctccagatgatcccaagaaaggggtgtagcaccttatgcctgcggagagctcccggaaagaaggcctgaacataaccatccacccgagcattggccctgcccaattgtgactgggattcgcccttaagaccacctggggaccccaaactttcaaaaaggccccagactttcaaaacccgggcctttgccttaagaccataaggccgggaaccatgaaggtttttaaagcccctttcttaatcccaaggcgggggattgccctggttaacacccccaaaaaggcc

SEQ ID NO: 130699 - DNA, 921 bp, Arabidopsis thaliana columbia
gaccgggctcatcctagaggcaagacaccctatctttcagatcagtttttacacgggttaactacggaatcgttgcagacatgggaccgtggctcaaactctctgtacttctggaggcatccccagaaccaagtgagcaaggattctacttcaacagtcgccccaaagattaccaaatcgggagaaatgctgcccaaaagaacagaagtatgacattggccgtctacccgtggcaggctccgctttttacttccactctggcttcggaaggggtgagatgcatcgggacatgagcccatctgcgcctaagaacaaggcggggtaggatcccccagaagacatcttggatactcaagatggatgagaggtgacgatcctcgctatgagagcccttgactctaacgctagttgaccgaacaaggtctcatgagcgatctggaatcacttcgggacagcccgggaatgctgaatgattgctgcctgggaggagcggtcgcttggttattttgaacttggaaggggtcggccttaaggtatcggggaaactacctatgcgcggaccgagccatattgggggggtcactcataggggagtgggtgtctccatatccccacaggggaaccgcctttgctgggggcactcacatctggggcaccctaccccggagactcttttctagtaggaggggctcttgccattacaccgttaaacagggagacccataggctatttcctccccgtgaggcaaggaaataaaagaatcccgccctacataaacatagggggggcttgtataacccccatttggcaatcctatgcgctatttgcttgatagcaaggtctttttttaaggggaaggccccccagctgaaaaaggggctcttaacatttaaagggggatctcccatctttaaaccccc

SEQ ID NO: 130700 - DNA, 560 bp, Arabidopsis thaliana columbia
  unsure (1)..(560): unsure at all n locations
ggaaaaatgagccaaaaaaacccacncgaaaagggggacagganaaacagagaaaattacacggattgggacacaccaacaaaagaggcggggggaaacacaagaagacagacaacccccagaccaaaaaaaagaaacccagacaacaccacacaagaccacggagagggggaggcgccagcaagagaaagcagggaacgacacacgcgcggggagcgccgaggcgaaacaaccacggatacgaagaggagaacggaagagaaacaagcggcggcgaaaaagaacaagggagggcgggcaacgcgagaagaccgggggaggaaaaacagaggaccaggacgagaaccaatgaacggaccggagcaccacaagggccaggacaggccgaggacgagcagaagaccaaagaggggcaggacagaagacagcggccgaacccgaacccagagaaagagcgagaagggcgcgaggggaaggggaaccagccgaggcccaggaaacacggggagggagcaacaccaggggggggggggaacccaaggggccgcagagaaacgaca

SEQ ID NO: 130701 - DNA, 519 bp, Arabidopsis thaliana columbia
aaaaaagcccccccgacggaggcaaagagcacaagcagaaacacgagcacgacggatatagcacaccatttacagcagcccgccagcggcaaacagaggggcgagaaggggggaaccgtccagaaggccacagcaggaacccccgacacagcccgacagggagaaaccagcgaacacggaacgcaagcccaaaggacccgcaccgccgagagacaaacggagccgaggcgaccggacaaaggacaagcaccgaaaccccggggaggacaacgcgaccagaagcacaacgaaagacaggggggagacgcggcaaaaaagaacaccaggaggcggacggaaacgaccaagggcggacggacaggcaggaaggacagcggggagccgaaaccgcgcgggcgaggaaggaagaaacgcaggagcaggcgacccagcgcgccaacaaggaggcacaagagaccagcaaccgcgacggcgggaaaaccagcgcgcgagggggaccacgccgcagcggaggacgag

SEQ ID NO: 130702 - DNA, 675 bp, Arabidopsis thaliana columbia
tcggaccagaattcccgggtcgacccacgcgtccgggctgaaacgctacataagacccgcttcatttttttttcgaatttgaacgcaatccaagcaggagacgtggtagaggagagatgtagtcttggattgcgggactgcccggaaggacgcaaatgaaaacggaggcagccctttcgacccctaacgtggacaacgcagacaccgacactgtagaaatgggcgtcgctccagcaagtgactaacaataagaggcgagcgagggaaacttcgatgattattccagaccttgctattgaagagcctacatgcaagtgggaccggggcacctgtcgaggaggacgccctagagaaggaactttgcaagtaacactaaagcttgcgcaggatggagtaatatatcactaatccgggcgatagatccccgcttgtctttcaaggcgtatcggggaccattcataagcttaataacggggacaaagatgacccctatgacgggcccagagaaactaggccttttctggctaggcaagaacctaaacccctgggaaactgcaaactaggggcctgatcacacaaggggggcggggcttggaactcggagaagaactagggggtctggagaggggtctcctattacccagaggacagggctctccggggacctatttgggg

SEQ ID NO: 130703 - DNA, 761 bp, Arabidopsis thaliana columbia
gtccgaggactctctacggaaacagattttttaaagttttaaacacaaactccaacaaacgggctagattagagcagtagttctactcccttctactctccgcaacaatcaccaaatcccaatacacaaagattccctttatatctcccaccacaaaattcccattaaagggctaaatttctccatcaagatcgaaactttacaacaaccctatacgcgtggaagcgccgccgactatacccacttcggattcggaggaggagaagcggaacgaaaaagaatacggcggcgataacgaacaagaaaggtctgagttcaagaggagagatcattggtatccagcttctttggtagaagattagaatcccaatgagccgaccccgctccatctctaggcgccagaccgtggcctctggctcgaacggaatgaacagaagagggctgactttgtgatctctgccctaaccggctccctccttatctaaaagaaggttggatgagaatggaccctagccaagctcggatcatggaatggcatcccagtgggcgggggccaatggccccgaggattcccacaggccgcctactctttaaaggcccctggaagacctccgcggcatggaaaaaaaacccccccgcaaaaaggccctggggggcccaacataaaagtccattgcccacaccccatccgcgcatggttacccacacaaggagagactctccttcctttatatgtgtggtccgcgcgccccctgggtaaa

SEQ ID NO: 130704 - DNA, 507 bp, Arabidopsis thaliana columbia
gaacgccgccattggcgaaagttgaggccgtagtctatctttaccattttttctacactttacaccctcataccaaacactataggagcccactgtccacccggctgaaacccccgccacaactaatcaaaccctctccaaaaagcagacctgtggatccaccacccctggaatccgaattcagggcaatggggcccaatctgagcaagacgagttaactaccataagaccgtggcggcgcccccgaacatgcccactgatgacgcgaggggaagagaagcaccccaaataaaaccctagcggcgaacaggtacaacacgggtcagatctcataccgagagatccgcgacatccagctaccttggccgaggatccggattctacagagaggcgctccaatcccaatgagacatcagcaacagttctcatgatcaacctggatggactcaaaccggccgacaatcatgagctctgcgataacctgaaagatggtgaactcgaaggagg

SEQ ID NO: 130705 - DNA, 723 bp, Arabidopsis thaliana columbia
tccgggggcgattcacgcgtccggcgtccttctcgtagctggaaatactatttatcagaagagtttttaaacatgttaattcaacaaaccaaactagaaaaatgtcggtagctttactctcttgtacttctgcaacaatcaccaaatcccaatccaaaaagattccctttttatctcccaccacaaaattcccattaaaggtctcaatttctccatcaagatcgaaacttttaaacaaccctttacgcgtggcggcgccgccgtctatacccacttcggattcggcggaggagaagcggatcgaagaagaatccggcggtgataaagaacaagaagggtctgagttcaagtggagagatcattggtatccaggatctttgggtgaggattaggatccgaatgagccgacccggttccaactctaggggcgagaccttggcctctggttcgatcggaatgaccataaacgggctggctgtgatgatctctgccctaaccgggtcccttctttatctgaaagaagggcggatgagaatggacactagcaatgctcgggtcatggatggccattcagagggtgtggatcttgcactaagaattctaaggctgctacttcaaggccctgaagctcgggccggataaaacccccgaaagcttgggggctttaaaacctttggccaacaataggcgggtgttcaaagaggagctttttctttttggggt

SEQ ID NO: 130706 - DNA, 735 bp, Arabidopsis thaliana columbia
tttggaaaattccgcggaaaagataattcccgggatacagacccccccgcgtcgcggggagtattctctcgttcaagtcaacaacagacctttttttcataatatattttgaggagcagcataagacagccttagaggaggatccttctgctttttcatatgatgaagtttatgatgatatgaaacagaaagctgttcttcctcgaatgcaagatcgtgaagaacgcaagccaaggtatatacagaatttgatgaaacaggcagatcgtacagagaaagaacatgagatagtttatgagagaaagcttgcgaaagagagggagaaagacgaacatcttttttcggataaagaaaagtctgttactggcgcttatacaaggaaacttgaggaacaaaagaaatggctggcagaagaaagattgcgtgaacttcgcgaggaaagagatgatgctactaagaaagaaagatttgagtgatttctacttcaacattggaaacaatgtccgctttggagctcgagaagccgaagctaaagaggcagagaacctcgaggaaccaaagaaagggccaagaaagctcggggaaccaaagaaagggccggagaacgctcgaaggagcctgagaaaaaggaagttaccaaggggtagtgagaagtaaaacgcaaaaaatccccccgggaaaaaagggaaagtttctcttccctggactttcggggaaggaaaattttggggattc

SEQ ID NO: 130707 - DNA, 773 bp, Arabidopsis thaliana columbia
ggaccgaatctccgggtcgacccacgcgtccgtcgtgaaacgttcgaaggccattctctttggactaccatcgtttttaaggagagagcttagatctcgtgccgtcgtgcgacgttgttttccggcttgatcaaaatggggttgtcattcggaaagttgttcagcaggctctttgcgaagaaagagatgcgtattctgatggttggtctcgatgctgctggtaagacgactatcctctacaagctcaaacttggagagatcgtcaccactattccaaccattgggttcaacgttgagactgttgaatacaagaacatcatcttcaccgtgtgggatgttgggggtcaagacaagatccgtccattgtggagacattacttgcagaacacacagggacttatctttgttgtggacagcaatgatcgtgaccgtgttgttgaagcccgggacgaacttcacaggatgctgaatgaggatgaattgagggatgcagttctgcttgtatttgctaacaagcaagatcttccccacgcgatgaacgctgctgagataactgacaagcttgggcttcattcttttcgtcaacgaacactggttcattcagaggacatgtgccccctctggggaaggactctcttaaggacttggctggcttttcaaacacatttgcaggcaaaggcataaattggaattgttagcccagaaattcctcttttttggttggttttgggtttaccaaatcaaaagacacggagggtcttgtttttttttag

SEQ ID NO: 130708 - DNA, 734 bp, Arabidopsis thaliana columbia
caaacgatcccactctcaccggcttcatttcctcgatctccgtcttctttcttctccgtttgtcgcagagcatcgctcgaattagggtttctgctgagagaagatgagggaaatcattagcattcatatcggacaagccgggatccaagtcggaaattcctgctgggagctttactgtctcgaacatggaatccagcccgacggaatgatgccgagtgatactacagttggtgttgcacacgatgcgttcaatactttctttagcgagactggtgcagggaagcatgttcctagggctgtcttcgttgatcttgagcctactgttatcgacgaagttcgtactggtacttaccgccaacttttccatccagagcagcttatctctgggaaagaagatgctgctaacaacttcgctagaggacattacactgttggaaaggaaattgtggatctatgtcttgaccgcgtgaggaagcttgccgaccactggactggcttacaagggtttttggtgcccaatgctgttggtggtggaactggctctggattgggccctctggggctcgaacgtttggctgtagattacgggaaagaagtcctaaccttggattcacccatttacccccttcttcctcaagggtttcttacctggctcggttggaaaaaggccccttacccacccaggggggtttccttgttccaaccgccatttttcccttttcttttggaaccca

SEQ ID NO: 130709 - DNA, 624 bp, Arabidopsis thaliana columbia
caaaacccgacaaccaacgaaagagagaccggacgggggcacccggcagaaacccctgcaacaaccaccaaaacccaaaccaaaaagaagcaccggggatcgcccaccacaggaagcccaagaaagggcgacaggggccccatcaagagggagaacaggcaacaaccatacacgcgggggggcgccgccgaccatacccacttaggattcggcggaggagaagcggaccgaagaaaaacacggcggcgaacaggaacaacaagggtcagaacccaagcggagagagccgcggcaaccaaggacctaggctgaggaccgggaaccgacagagcggacccccaacccacaggagggaccagacccagggcgatggcccgaccaggaaaggacagagaagggccggcaatgaagagctccgggcgaaccggcaagcacgtgaaactggaggaagggcgggagagaatggaccccaggggcgcccgggagcacggaaggagcaaccaatagggagagggagccaggcacaaccgaaggggctccagggaagccaaaccgaaacgggccccggaaaagcaccgggggggcgggggaaaaaaaccccccccaggagaggccaggggaggc

SEQ ID NO: 130710 - DNA, 227 bp, Arabidopsis thaliana columbia
tccggggacgactcacgctaacgtcgcccttctagaacctagaatcatgacctgtgaaaacactctttatacgtttttttccacagacgctctagaaaaagctgtcggtattcagggaaatacttgtgcagaaaaaccccaaactcctgaatgacaacagaggatagccctttttattgttcctgaaccacaacaatgtaccccatcaaaagggggattacagacgg

SEQ ID NO: 130711 - DNA, 615 bp, Arabidopsis thaliana columbia
cgggccggaattcccgggtcgacccacgcgtccgagctaatcctcgtcatcgagatcgggacggtttttctccgattcattaggcagatcaagttggagccttgcagactgtccaactactattcaagttcaatgcatacatgattgttgcagacaaagaaggatggactcctttacatataactgtacaaagccgaaatcgagacatttccaagatattgttgaccaatggtgctgataaaacaagacgcacgaaggatgggaaatcagctttgtacttggctctaggctttggaagagatttcatgtcatgggaactggtcaggctattgaagattatgcccaccggggatttatcagacagagctggtgagattctgaatgatcagggtgagattactaaactgcatgtgccattgctaggatcgatagtgatctacaccagcattacgtgttaatgcaaaagaaacccgattgagtgtgaaattactgcttttatatatccggggaagacccttgttattcgggagaggtgataatattgtgcatcacaaagatgcaccattggtttgttggtgcttattcaaaaaaacccccaaaaggctgggggaagcc

SEQ ID NO: 130712 - DNA, 782 bp, Arabidopsis thaliana columbia
gccctccgcagtattcgggccggaattcccgggtcgacccacgcgtccgattttttctccgacgttgcttaatcctcgatttttccggcgatgggtgggtgcgtctcctccaacctccttactccgaccgatgacagcagcttctctcacctcaccagctcctccttaagccaacatttcgtcaagctaacttccaccacttacggtcttctcaatctcgactcttcttcaccttgtgctccggctccttcctgctcctcctccgccaaatccgttatcacgccaatgactccgcctgagagattcactatcaacggtcaggaggcggcgatgatgatggctaaatctgagccgacgacggagggttttaaccttctgggagctaatgtcagggttagacggcgatacttgtcgattctctccgattccggtgaaatgtaatggattttccggcggattaaagaaagagaactccgaacctaatctgaataaccctaacgattacgaggttttgaaaccggtagatcccgaattaacggaggaaaccgagagggtttgtgacggccggatagaaacacgttgtgaattaattcgacgtccgtagccccgggggtctacgggccgtttgaggccgtgtaaccgccccggagagagctcgcgaatggaacagcttttgggtggtacctcggtctttggtggaaaaaaaaaaagagctgttccaattggggattaggggggaatattcaagcaataaaaggagggtttattccccgaatacctaa

SEQ ID NO: 130713 - DNA, 508 bp, Arabidopsis thaliana columbia
gaaaaaaatccccgacgaagaaatatgaccggaaaaagaaaagccccccgagcagagcagagtagaaatcgtaaacaatcacacgcgcaactatgccacagctttttcagaagcacatcttctatgccaaatcgccaatgagacaaacaaaagggagagacccagaaaggagagaaaacgcacgcaacagacggcgtacagaaacgccaaaaaaacacaagcacaaacaaatagagacacgtgaaccacaccaaagagaatcaaagccagaaacgagccaaaaaactgcaccaaggtacaaagaaacacaaaaagcacgaaacaacccaagagaccagacctcggagtcatacacagccaagcgcgatgcaaacgcgacacaaggagaaacgcgacctaacaacaagtaaccaagtgcaccgcataaccagaagtaccggcagcaaccgcatgaagaaacagcagcggcagcacagagcaagagtcacgtagcagcacgcagcatgca

SEQ ID NO: 130714 - DNA, 754 bp, Arabidopsis thaliana columbia
ccgggacgactcttcgcgtacgatctcactctggccggcagaatcggctcgttctccgactctttctttctgcgtttgtcgcagagcagctgtcgaatgaggcatctctgactgtcagaagatgagggaaatcattaacatccatctcggacaagccgggatccatgtcgataattcctgctgggtgctatactgactaggacatgcaatccagcccgtctgagtgatgccgacagatactacagccggtgatgcacaccaggctgccaatactttctctatcgagactggtgcaagaaagcatggtccttgggccgtcttcagtgtacgcgcgcctactgctttcgacgacattcagtctggtactaaccgcccactgttccatccagagcacttgatttctgggacaggaaatgctggtaaccacctccctagaggaccttccactggcggagaggaaattgggcgaatctactgtgtttggccccgtggaagaagctggcccgaccacgggtactggcatcacaaggggccatttggtgttccaatgctagcagacggcgtgacctggccctgttattgggggcctaccgtttgcctcgggaccggtagggtccctggcgtattttccaggcaaagggagctcgcttataacctcgtgtagattatcacccctatgttcacccccctttcctttcgttaaaaaggtattccttgccctgaaatcgggttgataaggaaggccctttgaccc

SEQ ID NO: 130715 - DNA, 985 bp, Arabidopsis thaliana columbia
attccccggatacaacttcccccgtaacgagctcctccctcgacatgcagacatcgtgtacggtgcaagatccgtttttattatgtcattttaagactggagcgctttgctagactgtgcacacctactgattcaaagtacaattgacagacgtgtaatgttgcccgatacatgaaagatggaactccgttacttatagtctgtccaacgcacgaacgtccaaccattacaaagatattgtttgaccaaatggcgcatgataaatacaagacgatccgacggatgggaaattagctgttggacatggactctgcgctttggcagagattacacggcataagagactggtcaagctatggaagattatgcccaccggcgacttttagaaagagctggcgagatcctgaacgatcagggtgatattactcaactgcgtatgcccttgcttggatccgattgtatccacaccggccttaacggtgaaggtagaagaaaccccgatgagtatgtaactaccgcttttatatattttgggaatgaacctggtttttcgggcgcgatggatccataagtgcgtcctgacccaaagatacctccaatcggtttattgtccattcattctctcttcaacgattgacactcgcctacacaatttaggggcgccgagtcacgggatactcattaacacggggaaatcttccataagggcttttaaaacagtgtaaccgcgcggttgatcactatgtgactgagacagagttgcattatagaagcccctctctctccatagatagacggtatggtctcagagccccttataaaactatttcacatattgtcccaccttgtggtgcccgcctttgttttctataaacacacacctttctctctgtaacctgggcggaaacaaccgccacttggaatgtctgtggcccccgcaccttttaaaacccgactttgtcctactcccataccccccttttgg

SEQ ID NO: 130716 - DNA, 1045 bp, Arabidopsis thaliana columbia
ttgtagagcaccggagatatagacccgtccgagcagagtttttatatgcacgactgcgttttttagacaagaaccgtggagagcatgctactcgccgtgtaagggtagcaccgatggaggagagacccaggcagcgacgcgaaccacgcaaggtcctgatgcgtcggacggggacatgcgactgggggggccgtgatactcaagagatgccgctggcggggcgcccactggccgcgtgaagctccgtccgagggggacccgggggggccaagccaggaacggagcgcgaggggacgggggcgcagggcaggagaatccggcgcggcaaaggcataagcgagggacggccaacgcgagcgacacgaagcagcagcgacaggaaaaggctccagactaagcactgtggctcacacggagagaggagagagtgtccgagtgtaggcaatgacaagcacatagaggaagaggcgaggcactctagaaacgctcctcacgcgcacgtcgactcactagtggtcagtccccgaggacgcagccgcacacacagaggatgtcgtagctaggagctcagctacggactgagttcgacgctcataccggcatattatcgctgatagcacgtgatgcagcacgagaaatgctctctcacacgccgatactccacggtcgtgcgcgaacgcaaacgacacgacacgccaggatgtgagcagggcgaggcgagcggtgaggcagagcacaacctaggcgatcaggcgatcgagcggagtcgcgggcaggcgaaaagtcgcacacagtagtgaaaagccccgaagtgtataacagcgagcagagatgtggcaagaagcgacgagcggggagacctgaagtgcaggcctagctcatggatatagccaatgctacgcgcagtcgaggcatgaggaattcgagccggacccgctccacgagacacgacacccggtcgtggcccagcgcagagtccaccgatgcactggagcacctgagtacagaggatatcgaaatgcgagcgagcgtcgcaccggtcgac

SEQ ID NO: 130717 - DNA, 1264 bp, Arabidopsis thaliana columbia
  unsure (1)..(1264): unsure at all n locations
tgccctttgaaagtccctggcaaaaattcccgggacgactctacgcgtaccgagtccatcctaaataggaaggacgctggtaaggtgcatctctgattttttgcgctttttatgagggacactcgcagactgaggaacttactttgatagtacattgttgaccaggatgacccccattaatgaatgaaggactactaccacttatagaacgcacgactgccgggctaataaacattcagttagagattactgcttgacccaaagaggggctgaatagaaaccatatgcacagtaggcgaatgcggatgggatgaaaaattacgcaattggtttacctatgggacctattcgcgcgccatgtttgggcaccatggaaggaatatgggccatagcgttcaaaatcattagtgcacctctgcggatctctgcataacgctcgcgtatctcgtagaacgaagagaagtgttaatgtcggcccacgtcctacaacctgagacgaggataaattaatatcctctagtccgcatataagacatgttccctagggtttagataggtagtttacgttttagacatctggtatttcccagatgggtctcgacacctatagggacttaattgagctgaggcgagttcataggaaccaggccggcctttggagaatccaacacagcgcataaaattgtaacccagcccaagtcaatgtgcacacttgaccttcaacgccaaaagtagaaaagcctcattctgggagctgccagagaacttacaggctccttacagagtctgctcagagtgccgtaaccatagagcattgtcaggatgggagtggaattcatacccaggtgcctgagcactcataggatcacaccctttgagtcactcatactcttataaattatcattgcgagaatcatctgtcgaaaaatattggggggaggagcgcgtgcttctataagagtggagctccgctatggagctttagactatctacccgcgtggtgttgtatctgtccacgataaggagccttattggccggatccttctcctactaactaagacaagtgacgagacccctttaacttatgtccacaaagtgcntacacttgtgtccaccagatctgtgtatcgacttaacctagcgtctcatcttgatggtagctgtgggagaatatcacatcactacccttagcagtgctgggcggccctgacaactcttgataaatgatttcgactatcttgcaaagacatagcaataatcct

SEQ ID NO: 130718 - DNA, 989 bp, Arabidopsis thaliana columbia
  unsure (1)..(989): unsure at all n locations
tacccggaccgagaatacccggatcgacccacgcgtccggtcggatactcttcagggggcgcgaatgtttttacaaaaggtttttaacgtcaaccaacccggagaatcatggaggagacattcggtaatggatgctgggaaaacaaggcaagaatcacgtgaagaagctaacatcattctcatccactatgcagaatcatgggagagatatgagtggtttatgggggcctcctcaaaaaatgttcctattaaaaagtcatgagagttttagacttagaagacttttccagcctagggttatcatgtggattcttgtgaatgggctagagacgcactaaactgacgcaggataagggaaaactttatgaacaaaagaattggggggcgcagctctaaaggatccaaccttacgacccaaagatgcgacctccaagcactactataggggcgactaagtcctcatcattggccgaagatgttccatcttggagcactggaaaaaaccattgtctaaaaccccaccagtaattctcctcatggaaacaacaaaaatacggcccctttattagagccctagagtagggggtgccaaacacataacaagagacttagtggcccaccactcctcccccaggagtaagggncctcttcatttttcactacagatacaagagtttttagcccgagggaggaggctctttggggaacaatcgtgtgctaacaccatgtagggaggaactcgcgcctctccgcccctctagatacaggccaagagtgcactccattcttaatggccccctccggaggggaggaaaatcagcggtggatcaacacgccacgcccagagctgacataacctgttttacaaacctcccccacaatacagccctctatagcaaggcccgcgccttccttttaaaagatgatgaatgcccctttccatatattttgacctgacgggatacaaaaggggatctttccccctcgaa

SEQ ID NO: 130719 - DNA, 321 bp, Arabidopsis thaliana columbia
aaaaaaaaaacaccccacgtaaacgaaacagagagaacatcaaaagagaggagaaaagaccgagaaaccgcagaatataaaaacaaaaaaaatctaagaaaagagagacaatcacagaaaaaaaagaagggggggacagaaagagagagaaaaactggagaaaaaggagaggacacacaaacgagagagaaacggcgacgacggaagaagagagaaaatgaacgcaacggacggagacagaggagcacaggacgaagaatacagaggacaaagaagaagtgaacaaatgagaagcgagcaaaaaacagaacacacaaggag

SEQ ID NO: 130720 - DNA, 667 bp, Arabidopsis thaliana columbia
tggccgtctgcaggtaccggaccggaattcccgggtcgacccacgcgtccgagctaattctcatcttcaagatcgggacggatcagctccgattctttatgcagttcaagttggagccttgcagactgtaaaactactattcaagtacaatgtatacgtgaatgttgcagataatgaaggatggactccgttacatataattgtacaaagccgaaatcgagacattacaaagatattgttgaccaatggtgctgattaaacaagacgaacgaaggatgggaaattagctttgtactcggctttgggctttggaagagatttcacgtcatatgaactggtccagctattgtagattatgcccaccggggatatatagaaagagctggtgagattttgaatgatcatggtgagattacttaactgcatttgccattgcctggtttgaatggtatctacaccagcttaagctgttaatggagaagaaaccccattgagggtgtaaattctggtttcttatatttcgggggatgaaactttgttatttcggggggggtgggattcaaaaatgggggcgtgaaccaaaaggatgaccgccctttgggtttttgggggattgtttttcttttttaaaataaagacttttcctagaaattcttttgggggcggg

SEQ ID NO: 130721 - DNA, 975 bp, Arabidopsis thaliana columbia
gaaagaaatccggggcaaaaatttcccccgaaaggaacgacccgtacgggggggaaacgacacaacgagaagcgaaccgcaatttcaaaaggaaaggaggagcaacaacacgagaagggggacaagggagaaaggggaggaagccggaagggacgacaagaacgggggaacaggcgcaacaagggaggaacggggaagagagagagcaagaaggagaagaggggcagaacgagggagaggaagagaaaaagaaccgaggggagaaagaaggaggaggaaacgggaagggaaagcaagggggacccccgagaacggaaaaggaggaaccacggaagaagagcgagaacaaaagggggggaaggagaccggcgcagggggagaaacagacagagcggggggacaagggcaccgaggggaaagagggacgaactaatgagagacggacgaaaagggcaggagcgaggaggaaccggcaagagaaacgaaacgaaaaggcgcaggacggaacaacccacaagagcaccaagaaaggaaaaccagggagaaagcacagaaccggcgagacagaacggagcaggcggcagggaggaaaacaacagaaagagagggcacagcacagcgagcgcagcagcaagaaagcccacaaagtaaagaggaacggaaaagcagacagcgaacagaggaggagagaaggcaagaccagcgacagagaagcacggggcagacgaaggaaggaagacagagcgacggaaccagcagacgagccaccagaaacgcagggacacagggaggagaccgcgagagagaccaaaacgggaggggacccccaagaagcggcgagggagacgcgaggacaagcgaggggagagaaagagaaaccggcgagcacaagggggaaagacaccaggaacccaaagaggggaaaaggcagggggcaaaggagaagcaaagggagcaaacaacagaagacagagg

SEQ ID NO: 130722 - DNA, 969 bp, Arabidopsis thaliana columbia
gccgagccccccgttgaacacccaattgaactggcccttctgcggtaccggtccggaattcccgggtcgacccacgcgtccgcggatctacgctactgtgaaggtgatttcgttcagagatggtttttgccgtcaaagccctccatcattaatcgacgaatggtgtgtattccacaactgcttatatatctcactatctattagtccctcttcctctgagctccatatcttcatccacctcactagatgaatgatatgctatatctttctagagcaatcgaggctttgcgacaacccataccacgtgttagctctgccatctatgcccacgatatgatttgaagcggatactatttatctatatggattccgcttagataaagaagaacaagggtctgtggccgcctctatagaggatcggagtccacgtactcgggcttgcgactaggatcgctattgtttcgagccccctaaatttcttgcgctggccgcttgttctacagccctcgtcactggtgaaacacccctgtgggctgccgcaaacaaaaaacgtcctggccctcaccatgccctcgcttttctttcaatcttggacgggacatgtttcggaaataagagacccgggcaccaccatatccgcaccttgtcccccaaacaaagttaggcctccgcccccttgtaaaaggggacggaaggtgggggaacctctggccccctttgttggcatgtggcagtccaattaatatccctcacgttgggaagggttcctttgaaagaccacccccgcccggttgttgaagcccggcctaacaacattcgccccaaggcgcactctaaagcgctcttccgcatccctttgtcggctttttacataaagccccttttctttttttcttgggctcggggcctgcggcccagaaattttgcccccgggaaaaagacgcctcaaatattggggggggcatcccc

SEQ ID NO: 130723 - DNA, 976 bp, Arabidopsis thaliana columbia
accggagaatttctccgggatacgaacacccacgaccgtaccggatcgtgaatcacttcttacgagaggggcaaatacagtagttatctagcaaaaaggataatagaacttacaacacaacctcgaacaatcactagaagaagagattgggtatatggatgctgtgaacacaaggcacaatacaagagaagaactgacatcagactcaacaccatgcacaatcatgggagacatatgagaggtctacaggggtcccacctcaaaaaggatcttataaaaaagccttgagacgttgaaactccaaagactattcccacctctgattctcatgaggatacttgtgacagagaagaatacggcctagataaagcagaagaaggggaagagctcaaacagacagaaaaatgggcgtccagactaaaggatcgaagattaggatcccgatgatccgaccccgataccactctatagtgcagactaaagtcaatgcactggatcggaatgaacaacattgggcattgcgaaaaaccattgtctagacacccaacccagaattcggttactttttaatcaaaaaaacggacacgttttagggatctgaggagggccgggaccaacataacgcgagaaatagggtctcccccactaccaaagagaaaatggccctctatttctctaaaaaacaaaggtatgagcgggggaaatccctttggaatctagggggggcacattaggagtaaaatcggcccccgcccttactatgactaagggcgccccattgaaaagacctaccgggggcagaaaaaataaaggggccccaacaccactcaatggcgaggaaaacccaaaacaattctccgcaccaaaagggccacttaattgaaacggggactttctttcttaaaaattgtataaaggccccctatgccaaataattcgcccgaggggataggggaggcggttttttcccaatggg

SEQ ID NO: 130724 - DNA, 571 bp, Arabidopsis thaliana columbia
atgcgtgaggccaaccctggagagggattgcttatcctgggaaccgataagtgcagggtgtgcaaacgggggaggtagggggagaagtggaggtgtgtaaaaatcattaagtgggatatcatatgataaaggtagcgggggttaggtgttgtagtttggctaatgaagcctgcaatgtgtcatcccgtttgtagcccggggttgagagcaaggaagggaggaaaaaactagatagttgatcgagtgagaggagactggggcgacagaggaaggtgtgttacaaatggaggcggtgctctcacgtggtgagaaacgagttacaggaaggtgttctggatctaagcattgtaaacagacagtggcacaatagtatgctatttgatcccatgggattgtggttaaaaggtgggtatatacggggaccggtggagggggatgattgtgggttgcatgtgatcgggttattatttttttagaaataatagtgaggatggttatgggtagagggcattttgttgtaggcaagatctctacttgatagggttagatgaggtcccttaaaggctttaaa

SEQ ID NO: 130725 - DNA, 641 bp, Arabidopsis thaliana columbia
gccaaaattccggggaaaactcacccgaccgggcccatcctcgaaaggagacgcgggacggagcagatcagattttttatgagcttcaagcgagaccctagcaagacggagcaactactattcaatctcaatgagtacatgaatattccacacaatgaaggagggactccggcacgcaaaatcgtgcaacacccaagccaaggcataaccatgatgtggtcgaccaagggcgccgataagacaagaaccacgaccgatgggaagacagcagggtactcgacgataggcataggaagagacgtcacgccacgggaacagataaggctgtggcagacgcatactccacgcgaagacttacagaaagcagcagacgggaggctgcaagatcatggcgtgatcactaagctgcaagagacgatgctccggaggaaaaatattcgacacgagcctgacgctgagcaaggcaagaagaaaagcccgattggaggagcctcgaataaactggctaatctataaagcaggccgaggggaaggacacctgggtgaaacccacagggaacagggcgaggatcccaaccctttgggtggcgatgccaccagaaaaagaggggccccgcatagtacggggtcttcggaggggg

SEQ ID NO: 130726 - DNA, 476 bp, Arabidopsis thaliana columbia
gaagagagacggaacaaagccacagagagcagcgcagcgccacggagaaggagaagtaaaaatgacaggaagagacgaccgacgaacgcaaaggagctgataaccagacgcaaaacaggggacacgcaacgagagcaagaaaggggacaaaagcaagaaaagaacgcagcagaggagaaagaagagagagcagcgagggagaggacgaaagggagagcaaaaagaaaggagggcaaagaaaaagaaggccagagaagagaaagggcaaaagcagaagagcgagaaccgagcgacgaaaacagaacaaggggacagcgagagaggacgagcaaaaagaagaagggcaagacagacacaacgacaatacagacacgcgatcaaccgacgtagaggaagaggacaaggcgggacgaggaggatgcagacgaggagacgaaggagaagaagagagcggaaacggaggaggagagaaatac

SEQ ID NO: 130727 - DNA, 635 bp, Arabidopsis thaliana columbia
gcgggtacgtgtgtcagccttccgtatttatttatgcttttttcaagtcatggagcccttgctagacatgtgaaaactatctgattcaacgtacatatgtactacgtccaatgtttgcacgataatgcaaagtatgtgacattctgttacatattaagctgtgccaacagcgcgaattctcacatcattacaatagattttgtctgaccaaatggtgcctgatcaaaacacagacgcaacgacaggatggtgaacattagtctttggtatcttggcttctgcgcttctggatagagatttacaaggcatagtgatctaggtcaacgctattgtaagatctatgccccaccggtgatactataggaaagagactggcgatgatttttgaatagatcaggggtgaggatttactaaaacctgcatttggccacttgccttggttttgatttgtaagtcttacaccgcgtataaagctggttaaaggtagaaagaatacccccgcattgaggtgttgcgcatttactagcttttttattatatttccgagggaatgaaacctttgtttatctccggggtagcgcttgtaatcactaaatggtagcagtatccaacatgaatgccagccttttgtctta

SEQ ID NO: 130728 - DNA, 687 bp, Arabidopsis thaliana columbia
caccatagacgagctatgacgtcgcatgcacgcgtacgtaagcttggatcctctagagcggccgcccttttttttttttttttttttgctcctataacttggaattgtaaggtaccacttttggtttaaacccacaaaagggcctaaaaaaacatcaaacataaaagagaaaccctaggcttttggggtcttacgcttaaaccctttgtctcctttgcccatcttttttggggggatattctcccaacatgcttattcagcttatctttctaatgctcatgcaggcaagaacgccaatggctaaaaagtcccattccataacaagttacttttcatcactacttttcctattcttcactacctgtggccttggttttgctaaacggtacccgcctccccatagagatcagttagaggtttttatgaaaccccgtgggtcgttgaggagccctttttcgccatcttgagcgatttatggcacacttgattatcccggtgctgaagttcagctgttccgttcaaacatttacccttaggccaagcctaattataacttgagatgtattctaagaaggccaaacccggtcgtttttacactcggtttggcaatacccccccattgaaaccacataccccggggatccatggtgttttatatggaggcccataccccattttatttggcca

SEQ ID NO: 130729 - DNA, 631 bp, Arabidopsis thaliana columbia
gctatgacgtcgcatgcacgcgtacgtaagcttggatcctctagagcggccgccctttttttttttttttagatcaaacaatacatactactgatttataaacaaccatcacttgtttttgtttctttttgcacatattttattgagtttttgagcaaacaccaaatccaaaatattttagaagagaaactaaagaaagaaagtcatcatcttttttcttcttatggactagtctctttagttaatatccacttgaggaactataccaccagcttgaatgatctgtttctcaagattgaacatatcttgaagctttgtctttaacgccttgtactcaatatccacttgctgcaaacattttacacacccttcgtagttcttagcttcacaacattccttgaagctaacacacaaagttttgaccctcttggcaccaacacttgagctactacccttcaattgatgcacactagcacctacctgactaaaatctacagttcctgtcgggtccaaagctctagccatgttactgataagcttcacacaatctttaaagaaaagtgaaagcccttcagacacaaaatcaggacttccatcatcttgtagctttttcaactcagctaaatgatca

SEQ ID NO: 130730 - DNA, 659 bp, Arabidopsis thaliana columbia
  unsure (1)..(659): unsure at all n locations
tccnnnnnnnnnnnnnnnnnnnnnnnnnnnnnnnnnnnnnnnnnnnnnnnnnnnnnnnnnnnnnnnnnnnnnnnctttttttttttttttcgtaaaaacatggataattttgttgcaaatctataaagtgcgcaagaacagtgcacgctcaataatcttgactccaccttcatatctaatatacaaacaaatccctcgctcccaaatcacaacattcataacgcagctgcatctacaacaaaaccgacgcaggctaatgacctcctgggtacttttagccgagcataagtccctaacagtaatcagaatgagaatcatcgtagtaatcgataccagaagaaggtgacatgacttcttgctaaagcaactgagccacctggttaatagccggcctgttctccgggttagcatttgtacatctctcagctatgtggagcaatgcctcaacagacttttcgtcgacatcgatgcatttctggtctatgacatcctctaatcgattctctttcaacacagtgttaattcatccgacgacgttcatgcctgttttaacgaatatcggatgtgccggactttttccggtgacgaagttcacgggggtagaagctccagggctgtagtacctcggaccttcccctgtggctcttcccattttggca

SEQ ID NO: 130731 - DNA, 596 bp, Arabidopsis thaliana columbia
gacgttcgcatgcacgcgttcgtaagcttggatcctctagagcggccgcccttatttcattttttttttttttttttttttttaatcaaattaaattgaaaattaaggtcctacccccaaaagggtattgtttaaatgtgaaagtcttccttggaaaagggcattgtttaattgtgtaaactatacatggtgaatctttaaaaaaacaaggactgggactcaatacatcccaaggggattcctaatacttttcaattttgcaaaaaataggcttaatcaaacccacaatcccccgtttctgcacaaaacccgtttgttctaaccattgtttgccctgactgtcacgagggtgaccctgattaaatactaagggcctttactcctttttgaagtgttcaatgatgactcggaaagcactgactcacaaatattttaggcctcattgcatctttttattcaatctatacgaatcgggtccatactcatttcccctttacagccggtatttttttacacccacggtgggacccctacttaatggtcttcttcccctcttgttgaatatagcgctttcccacaaaataattcttttccct

SEQ ID NO: 130732 - DNA, 641 bp, Arabidopsis thaliana columbia
  unsure (1)..(641): unsure at all n locations
tagacgagctatgacgtcgcatgcacgcgtacgtaagcttggatcctctagagcggccgccctttnttttttttttttttttttttttttttttttttttcccagggatccatcatcaatttaaacaaatcaaattgaaaaaaaaaaatccaataaccaacaaagggataactttaatccgacgacaaagagatttttagggggcaaaacttgaccttagaaagaaggaaaaagaaaaccgagaccagggaaaaagattctcaatctttcattcaaaagctttttttggttttctacagaaaatcatatgcttcggaaagaaaattccagcctcaccacctttggtcaaataatcagcagtcttaaacaacattttatgaacatcaacagttcctttaggagcacccccattagcagaaagaatcacacccccaacatggtttctccaaataagcaatccttcccatttttaaccggttccaccacggtttaaacgggggtttagccaaatttttctcctttactacctaaaacccaatttttttcgccgtcacggttatatcaaggaagtttccggacgcgtgggtcgacccgggaatttcgggccggtaccttgaggggtaccagctttccctataggg

SEQ ID NO: 130733 - DNA, 595 bp, Arabidopsis thaliana columbia
  unsure (1)..(595): unsure at all n locations
tttcnnnnnnnnnnnnnnnnnnnnnnnnnnnnnnnnnnnnnnnnnnnnnnnnnnnnnnnnnnnnnnnnnnnnnncttttttttttttttttttttttttttttatttttttttttggccccaacaataacccccaaatttcttgggacctttgatttatgaaaaaacgcgttgaaaacaattcattggccttggtaaacccgattaaatcgccctttgtccttaccctaaattttccatggggcaatttttttttttttttttcccattaggggcaacgggggcttaactggttttccactggggttaaaaccatgggaaaatatttgttttggatggccagatactataacagaggggtcacttagcctgcccacatactgaaataactccgttagtaaagaggggcaactttttttcaaatgatgaaacccatgtgtttgcatcccagctttaaggtctttgggccgggccacgaatttggaaaccactgtttttagttgcaaacaatgatgctgttttgttagggccaaagtttttggaaccgggtttatggcaacccctttccagagtgttgactcccagattgttttaac

SEQ ID NO: 130734 - DNA, 644 bp, Arabidopsis thaliana columbia
  unsure (1)..(644): unsure at all n locations
nnnnnnnnnnnnnnnnnnnnnnnnnnnnnnnnnnnnnnnnnnnnnnnnnnnnnnnnnnnnnctttttttttttttttttttttttcatttttttttgtttttttttttttgttttttttttttttaaaggccccaacccttttttttttttttttccggcggaggggttcagggaattaacaacccctgggtcccctttcccaagggggaaccaagggattcaaaccccgaaaaatcattcccccaagggaaggggtttttcgattcccgggccctctgggagccccagggggtaccggtctggtacaaaaaacgggaatcgggcccccattgggacccctttagctaagggggaaaccccctgggtgggcccaggatcttcaaacaagggggaatcccaaggccggggggactttaacccccaaaaacgaagccggggggaccttaacccccagaaactaaagcccagcctgggggggccggaaaggaccttaaaccttaagagggcctacctttttggaaagggtttgacccagaaaaccaaatttttttcttcccgggccacccgggaacgcaaaacatggcggggggcggcacaggaggggggcaccaggcccaaaaagctccggggccttccctctcct

SEQ ID NO: 130735 - DNA, 465 bp, Arabidopsis thaliana columbia
gagtttgacgtcgtatgcacgcgtacgtaagcccggatcctctaaagcggccgccccatctacgtcttttctttttacaaaaacaaacttttacgtggcgcttcaaacacacagaatatggttttttatccctatctaaactgataattaagctcaaacgaacagaccctaataaacgctttctaggattgcctccgcacttctgtccgcccactttaaacagtccactccgactgtgcccaagaactggccacattcttttacgcgccgcctcttttctcccggcgcggaacacaactcccccgggttccttctcggatcggccgtctccttataggcaagcgaaaatccgggttaaccgggggatctacggtcaaccccctggggcttttgtcaatccacaatctcttcggccaggctttttaaaccccccgggctcaccaaacccggtagaaaaccccgagt

SEQ ID NO: 130736 - DNA, 644 bp, Arabidopsis thaliana columbia
ttacactctacaagagctatgacgtcgcacgcacgcgtacgtaagcttggatcctctagagcggccgcccttttttttttttttttttttttttttttttttttttttttttttttttttttttttttttttttttttttttttgccccccctcggggtttttgggcaacattttgggcaccccaaaaaaaggaaggctccctttttttaaaaagttttttgggggggggttggggcaacttttttcttggggcccccacccaaaaggggataaagggggcccccccccaaaaaaagggggggggaaaaaacaaacggggggtcccaaaggtccttttaataaccgggccaaaccggaaaaccccccccccgaaaaggggggccccattgaaaaaaaaaacccttggtggggggaaaaagccccaaattttgaaaaaaacccctttgggccccaccgggataatttggcccagggggaaaggaacaaccccccccccgggggggtttttaaaccaaaccttaaaaaaaacgggtaaaaaaggggaccaaaccccacaggggtggaaccccttataaagggggccccaaaaaaaaaattttctgggggtttccccaaggggataaaaaaaccccctgtggggggg

SEQ ID NO: 130737 - DNA, 640 bp, Arabidopsis thaliana columbia
ctatgacgtcgcatgcacgcgtacgtaagcttggatcctctagagcggccgcccttttttttttttttttttttttttttttataatatttttttttttttttgatttgtttttttcaagggccccaaccccttttttttttttttttcgggggaaagcatcaggatattaaccaccaccgggtcccaattcccaaggggaaccgaaagccttcaacctccaaaaaatcattccccccggggagggggtttttcaactccaagccccctctggacccaaaaggggagacgctctgtttcaaaaaacaagcatcgggccccctttgggaccccttttgctaaaaggaaaaccccttggatgggcccaaactctttaaacaagggggaaaacaaatgccggggggacttttccccccaaaaaaaaagcgggggggaccctacccccccaaaactaaatcccccccttggggggcaagaaaagacctcaaacctttaaaaacctaaccctttttggaagggttgtaccccaaaaacccatatttttaccccccggaccccccgggaaccgcaaaacaagggcgggggcccccaaaggaacctccccccccccccaaaaaaatccgggcttcctgcccccactg

SEQ ID NO: 130738 - DNA, 654 bp, Arabidopsis thaliana columbia
  unsure (1)..(654): unsure at all n locations
ttccgtggnnnnnnnnnnnnnnnnnnnnnnnnnnnnnnnnnnnnnnnnnnnnnnnnnnnnnnnnnnnnnnnnncttttttttttttttttttttttttttttttttttttttttttttaacaaaaagcaaacgatgctagggcattacaccaaattgttttgacaacctaaattactacaacgatttgatggggctttaaaaattgatccctaaaaacctattatcattggggggggcattttcgaaaaaaaacccgctttttttatttttacaagggtgacaatgaaagatgcaatgaagggataatcaacgttcttattaacagggacggaaaaatggtcctttccaaaaaaaaagcctcgcattggttgttttccgaacatgggggcaaaaatggggtcaaaatcgccggggtaaacaacacaagagtggttgagccaggcccctttgactttgaaaacacatattttttcctttacgtgggtaggcaaaaacccctcaagtttaggggctagctgaattatcgaaaattttttcaccggggttaggagaagcaccttctccgaactcccttctataaaaacttggcacctgacaggcagggaaataattttccctttaaagagtaaaaccttatcttcaaaaaaatccag

SEQ ID NO: 130739 - DNA, 654 bp, Arabidopsis thaliana columbia
  unsure (1)..(654): unsure at all n locations
tccgtttnnnnnnnnnnnnnnnnnnnnnnnnnnnnnnnnnnnnnnnnnnnnnnnnnnnnnnnnnnnnnnnnnnctttttttttttttttttttttaagctgcaaagagagattgtgattctgaggcaaccaaatattacaattaaaccttataattacaacggaacaacaatcaattttagaaggaataatgaattcaaagggattttgtatatatgtacacacagcgaactctatacgaacagtagtggtttatgcctttaagccgatcacatcaactcaatttatgaaaccaatagattatagtgacaaatctgactcaactgattcggctttttagaacgctcaataatttggctcttccaatgatttcagccttgtggtgtcttgagtgcctgtctattgaattcctgaagctgtctgtcatgttcttcaagcatctggtccactctgcttggctgagccaacaatggtcctgacatgtaaatcttgctatcactaggattataccaagatgggtcaattggtgctgtcatatgtctactatccatagtatcagcttttttgtatgctcgccgatctttttttctttggttcgtgactggttgatcttgccgttctaataatggttttggaagagactgagccctgtaac

SEQ ID NO: 130740 - DNA, 675 bp, Arabidopsis thaliana columbia
  unsure (1)..(675): unsure at all n locations
nnnnnnnnnnnnnnnnnnnnnnnnnnnnnnnnnnnnnnnnnnnnnnnnnnnnnnnnnnnnnnnnnnnnncttttttttttttttttttttttttatgaattttttttttttttgttttttttacgcttcttacaacgatttatattttttttttttttttttgcggccaaaaaggaaaaaggataaaaagggggaccaacttttcaaaagagcagctaggacttttttccctgtgttcccaaaggccggcggggggggagcaaaaacggaccccctattgaagggtaattataaagggcccataggaagaagacacctttaggggggggggggtttgactatctttggcctggggggcaccccaaaaccaatgggggggagacgccaaaacggagtggaaggcacactggggccgcgtataaatggaggattggaggactgcctacacggcttttgaaaaatcctttttggggctgagaggggccctaaacgtgggccttggttaaaaaaaacaaggcccaccctacttttggaggaaaagagaggtaatcggggcccaaggtttctcccgcaccaaagaggagcaggtcccaaacaaattggggggcgcggggggtttcaaccccccctttataaatcccgggcccccgaggcccatggggagggggcctcccc

SEQ ID NO: 130741 - DNA, 662 bp, Arabidopsis thaliana columbia
  unsure (1)..(662): unsure at all n locations
cctttcgttnnnnnnnnnnnnnnnnnnnnnnnnnnnnnnnnnnnnnnnnnnnnnnnnnnnnnnnnnnnnnnnnnnncttttttttttttttttttttgcacaagaaatgttttacatttcttaaaccctcaaaaacatcacaaacaggccaaatgttatctttttggcttttattacatcactttttatgaatataaaatatttccagaaacaaaacagttacaaacacgaaatttccatgaatttatttaaaaatcaaagaagtttccatctttctccttcttctcattagatatcagcagaaagtgattcttcttgaggcttgaacctgcacagtctgcaagtcggcgagaacagagaaggcgtttggtatttgtcttctcctcccaatacaggcattgggactccagtcttggcagagctgacgtaatcaggacggtaggttttccccaaaacaccctcgacgagctcacttaggtctaagaacttgaactgagtctcgagatgggcaaaagcgtcatcctgcggcaactgatagttgtgaactctgttctcttctttccctataggtctcactctgatgtccatctgaacaagatcagagacaagtactcttacgctgtttctctcatcagttctttcgatgatgatatccttctttt

SEQ ID NO: 130742 - DNA, 597 bp, Arabidopsis thaliana columbia
tagacgagctatgacgtcgcatgcacgcgtacgtaagcttggatcctctagagcggccgccctttttttttttttttttttttttttttttttttttttttttttttttttttattttttttttttttttatttttttttactttatttcttttttatttttcggcgggggaaaaaggggaccaaaaaaaagaaaaacacccaacacacgggggagagctgaaaaaaaaaaaactaacattttgggggggggtttgaaaaaccccccataataaaacaaaaagccccggggggggttttttaacaaaaaaaaaaccccgggggggagaaaaaaccccaagggggggggttcccaacacccagaaaggggggcacaacaaagacatatatgagccccttccccccaaaaagttactcacaccacaacccaactggtctttaataaaagaaaccaccaagggcgtgagaagggtgtacgcccgcccgcaaatacaaacacatgcaccgaacgaggaaccacgaccccaacaacaaaacaaaggaggcggaacagacgaaacaagcaaacctagcctgtgtggcggaaatgagccagacc

SEQ ID NO: 130743 - DNA, 931 bp, Arabidopsis thaliana columbia
aactccgaacgtggaagacacatgtaccgagagcgaaggaaacggataacaagggagcggccggcactaggacgcagcttttttttttccccggcgaaacacacgaagaggaggaggggtgatgacacacaaaacgctgaaagccacaggtgcaaaagcgcagagaataaggaaaaggacaggaccccgaccaatggggccagacgggaaaaggacagaaaaggggacagaacagcaaagcagggctccccgctaactggacatagcgggagagtggcaaatagaaacgcacacagacagcgacataggacaaaaggacgcctggagcgccacgcgaagaatcaccatttaacgcagtgaaaatccgaaacacatggggccatgcaatacacctaataagaggagatccgatacgcatggtgtccacagaccgtggacctaccccctcttgagcaagtcactagtgcgcctacccgacaccatggaactaatggaacatggggtctgtccgaagggtgggctgtaaaaatccaatccaagtagtggaaaagcacaggagccaggccagaataacccaaaaaaggtggaggaaggcaccaaggccttcggaaaaaccaacgcaaggaaccttactgggaggcaatacccgtcacgaagcacttagggaacacggcggcaaggggccagaggtgggacaactggcacgaaaacaatgcacctttgaatagagaaacccaattcaaaggggctccggaccataagagggaccgaaaagggggcaaaaaaacggtgaagagaccaacacaaccttgggaggaccaaaacccggcaagggggagtagccccttggaactaaaatatgagaaagcatacgggggagaaaaaagcatatattgaaacactaatcagttacatgggaaaacgccgactc

SEQ ID NO: 130744 - DNA, 663 bp, Arabidopsis thaliana columbia
aacatagcccagttatgatgtagcatgcacgcgtacgtaagcttggatcctctagagcggccgcccttttttttttttttttttttacagcaaaacaaatagtaccatcatatgcacacaccaaagtgtttgattcacatcacacccaaatacaataaaagagaattctttcaaaattgcaaggtaaaaaaaagaggtgcaaatgtatatattactaaactagagaagcctcctcctgaaggttctggtagttgattgataagtacgaacgagaagaccgacaccattcccaagaccaacacagacaccaagttctatcccaacaccaacccttacacctgcattaaaccatgacatctccccatcaatgcactcacttctccaatacatgtgttctttgaattcctctttgtaattccccgactctgctgttgcctgaagaacaagtgcataggaggtgtctttttgaggctctgcagtttcatacttaagaattgcattcaatgccattcttctactctgcttctttttcaaaccaatttgaaaagtcttggtttaaaaagatggggtgtttcctgagaaagcaacccagtaaaaattgtaccttccatggttcttgaaatgggagaaccaataacttttttgacccgtttcatggctctt

SEQ ID NO: 130745 - DNA, 636 bp, Arabidopsis thaliana columbia
gagctatgacgtcgcatgcacgcgtacgtaagcttggatcctctagagcggccgcccttttttttttttttttttttttttttttttttttggccacaagggttttattaatgttacaaagccaagggaacagacccaattttccttagccaaagaaacaagcctacattttaaaaaccaaacttaccccataaaacaacaaaagcccaaagcccaaataaattcttttgccaaaaggaaaagtgacgtgaacagcgcaaagagcacggggcaggtcgaaaagagatggaaaacccgtgggaagttgaaaaggaaaaaatttccgatcaccggaaagtaaaggggaccccggaattttctttccaagcaaaaaaggtccaaaattttattcatttttttcgcccgaagaattagaggcgaaattccaattgcggacccgtgggttgtaagaaaacaaatttgaaacaaaatcaatgtatcaaaatatcccatttggggattctgaaaatggaaaagaccaaaaatttaatcctcaaaaccctattttagaaaagaaaactttagagtcgagggaaaaatttggagagaaaaaagaaacttttgggttttttagaaacgaccaataccccaaacctt

SEQ ID NO: 130746 - DNA, 306 bp, Arabidopsis thaliana columbia
ttgcacgcgtccgtaagctgggaatcctttagagcggaccgccgccttccctctcacttcttcttttttttttttcacacacagatacaggacacaaaagaacttgtagcgggtgtctatatacaccataagtgtaatcttgactccctgacaacacagactgcacgacaaagacgtatgacccgtggctggacataaacaatcctatgcgcggcacgtcatgaaacacacccacatacacattacgaatcataatacgaggtcgatataccttgatctgcacgcgacactatctgagactcacgc

SEQ ID NO: 130747 - DNA, 682 bp, Arabidopsis thaliana columbia
  unsure (1)..(682): unsure at all n locations
annnnnnnnnnnnnnnnnnnnnnnnnnnnnnnnnnnnnnnnnnnnnnnnnnnnnnnnnnnnnnnnnnnnncttttttttttttttttttttttttttttttttttttttttttttttttttttttttttttttttttttttttttttttttttttttttttttaaaaaaaaaaaatttttttaaaccaaaatgttacacgggaaaaaatttttctttccacaatttatgggggaaaaaaaaattttttggggaggggaaggggcacttcccttttccaaggttttaaaatggggaaaaaacaccatacccggggtttggggacgacccccccgtggcaaaaattcaaaaaaattgggggggggttccccccaccccttttttttaaaaacctggcgacttttttttgggactgggggaaagcgactggggggggccaaaaaaaaatgtgggaggtggccccacagggaaaaaaaaaccgggggaagaacaaaattcgcgggggccttccctgggggtaaaaaaaaaaaaaatttttggcccgcctgggggagaccccaaacactatttgtgggaacaccccggggggggtttcccgaaaagtctttagggggggggggggagaacacccttgtgggggggggggaaccacaaaaaaaaaatatctcctccctaaaaaaaaca

SEQ ID NO: 130748 - DNA, 737 bp, Arabidopsis thaliana columbia
ctatgacggcgcatgcacgcgtacgtaagcttggatcctctagagcggccgccccaaaaacaattttttttttagaaaagcccaagacagaggccacaactgggggaagaaccccccaggcgaaccaacaagacaccaccgcaaatacgacacgaaaacccagggagagcggcccccaaagagacacctccaaaaacgaacgcacggacgcgccacaacgcggaaaccagcatccgaccgagcacgactcaacagcaaccccacacgacaaacggccagcccaaacagcccccacgacaagagcaccgaccaaccgggaaaccaccagacgggcacgcgcaaacaggcacaggccaagaccagcgagacgggccgaccccctaagggaacgagccaagcggggagagcagccagccagagcaccgaaaacaccgcacaagacacaaagcgggagaggactcgggaaaactgcacacccaaggaaggcgagcggaccctcacaaaacggacaacaacgcaccgcggggcacgggacaacggaggccttcaccacagcggggagcaagaacgcacacaaccaacaggagcagcgagcaagaagcgcccgccaagcagccaggccccggggcgaacgcacgtcccaagaacaccgacccggagatcggaccgcgacagaaacctgcaggagaaccggccccaccacgagcacaaacaatcacgaccgcaagggcatgcaa

SEQ ID NO: 130749 - DNA, 635 bp, Arabidopsis thaliana columbia
ctatgacgtcccatgcacgcgtacgtaagcttggatcctctagagcggccgccctttttttttttttttttttcaagagaattaacaagagtttacaaatagagaatattcttgtaacactgtttcttcacctcttaaatcgaacagtcaaatgatcaaacatatgatcatcagaactaatacaaacaatattaacagaatcgaatctctgagaataaaggcgaaacaatacaacatcctatttttaacacttgagaagataaaacagagctttggctcatgttctgttccaaacctaaccgcgtcctagtgctcgttggcttttgttctccgagatttgaatctttcatccacagactgacgactcttaagatttgattcgtggttaacttatagttttgtttacgagtgtctagacgcgtcctcatgcaactgcgtagtcctcacattaggatcatcccggatgtcgtaagaaaaattggcaggcctgaagaaatctactccctgtccatggatgccttgctgaggaccgtagtaactgccgtagcttggtgctatcgagttcaactggcgcaatccttgcattgtttgttgattccccataaaaattatcgcgagttggccccattaagttc

SEQ ID NO: 130750 - DNA, 681 bp, Arabidopsis thaliana columbia
actagcgagcttgacgtcgcatgcacgcgtacgtaagcttggatcctctagagcggccgcccttttttttttttttttttctttgaaagaaaagctaataatatataatacatttttaaaaatcggactaattctatacaaaggcagttccaaagagtccacagagagaagacaaataacaacaaatgagtctatccatttttcatggagtctctatgagacaagactccactctgtttctaatatattagtcatgttttacatttgagactctagaaactccaagatggccaaaccggctgcaccaacatggtcatccaatacatgttctgccggagaaggacttattcctccacgacaccggacaaacaacattcccaccttggttaagggggccatagccattgaataatgtcctgctccactcattaacacggggaccctgttttgaacctttcctgtcatcttttttaagtgcactctgagctgttggttttaaactgtaaacttaattgggggttctgacataagtgggtctggatttgggctttctatccattggaaccgaaatagtcggaccttttatgaaaaacaaggattggctcccttcctggaaatggacaaaggttcatgggaaaaaaaaagctctttggcgggcccttacacattcatttctattgg

SEQ ID NO: 130751 - DNA, 1019 bp, Arabidopsis thaliana columbia
gagactaggacagcacttacactcatagtacacgaccacgacaacactttttcgatatttttgacgcacacaagtaggtaggacgattatgcatgaatccgtatagtcaggtcatgcggcaccccgtaccgagacaacaatgtactgtgtctggcaacacaccgtgcgtacgtctgtgcctcgaccacacgtttataagttaaggcgtatacacaatggcagacaaccacactaccatcgcacatgggtgacaatatagacagaccacagcatcactcaatcgatctggcatgcttcctcacatagaccacacgacaacattcttccaccagcgtatcactctatcgttccaataattggacgatcgtctcacccagcaagtagaatccagctggaatcgataggaccaacatgccttacaacacacgacgtagcgtacgcagtgccatgccgccgcaaacatatacacgccgactctccgtcagtcgagctcagccaatagaacagtgagcctgacaatagctgcgacggtcaatgcaacagcgacacacatatctgtcccggacgcgtccggcacgagctgcgtgcaccgagccagccacgtgattccaacagatcctgcccgtcataccgtggacggacgccaacacctgtctttcagactccaattcgatgggaacttcacatgagcaacaccactatgcattcacttacgatcactagctaacctccagtagcctagaagcatactcaatcatatcatctgactggaacatcacgatcacagatgcaagccaactcccgtctgtaatgcttgctacagtacgaccgaaccaggatgagccgtatcccggccagacattcattgatacagacgtactttccttgcgattcgatctcctacggacgcgggcagccatgctggtcaattcagccgacgagcatgcgacacgcctagtctttacagcctacgcacagctgtagtcgatactagaactcgactgtccgtaaatcactat

SEQ ID NO: 130752 - DNA, 923 bp, Arabidopsis thaliana columbia
  unsure (1)..(923): unsure at all n locations
aactatgatatgcacacgcaccgctaacctcggcatcctactacaacggaccgcccacttccacctctctcatttttctttttttcctcatgaccgccgccagcaaacacatctggcattaacatctctcactcttaaaacacacagctcccccaccttgtcaacttttcgaaaacaccttctcattataatcgctatttgacccccttcaagaatgggattccacgactaccctcaactctagacatatctcctcaatggggcaacaaccttcctcgtgaagcttaggcggcccggatagccatcgacaacccatccactcccacttgccgcgatgttgctccaactcgactgaccccttatgaaagcggcaccggcgaccctccttctttgatttctctcaacactccctcaacactttgcgccggtctcggtgcctttctgaccaattggcaatcctcccactattcgcccctgctttctcgtcctctcattaagggatctccgagcatactgtctcctcatctgtcttccactaggtaaccataatcatctaccgcctggcacctcacaaaaactcgactgaattttaccatcaaccacccaactagacataatctcactaccttctccttctatacgctagctcatatggagggagattgtctctattctcnacacagaattctatctctcctctaagactcccgtaacattcttcgactatcacgtgattcatactctattagatggccctcaactgcgttacagtggattcatacccatagataaatcacatccacttgtgcacagagtctgtctgcttccacacttctcaccgcagatgtggcagtggggtggctaccccctctttgtctacttgtccgctctctaactaactttattctatctaccgtacgcgc

SEQ ID NO: 130753 - DNA, 655 bp, Arabidopsis thaliana columbia
  unsure (1)..(655): unsure at all n locations
cgttnnnnnnnnnnnnnnnnnnnnnnnnnnnnnnnnnnnnnnnnnnnnnnnnnnnnnnnnnnnnnnnnnnnncttttttttttttttttttttttttttacaaaataaaacagattcttctctgtttagtttatcattacatagaagatctatggaccaaacgacgtccaccaccatttaaaccacaaaggagactagcttggggtcgtttagattttccttgaccgttactaacaccgtcaacgaccttttgaacattggaggtaaaatcatgtacgggagtgactgtcagagaagcggagtcgccggtacgagcatcaagccaattgacaatgtcagcaaaaacgaggtcaacgttagcatcaggctcaccagaagttaatccatgccacattcctgggtaaagtttaatggttttgtcgcgtgtgcttgccttctcgaacaaggctttgcttatctctggatcagtcacaatgtctgcttcaccgtgaaggacaaagaaaggcaatgtgatctcgtggagagtgttttcaaggtccatgctcgttctaagcatttcaagtgcggttttaagtcttggcttggcttgaaatattagcttgttggcggacgcgtgggtcgacccgggaattccggaccggtacctgcaggcgtc

SEQ ID NO: 130754 - DNA, 626 bp, Arabidopsis thaliana columbia
actatgacttcgcatgcacgcgtacgtaagcttggatcctctagagcggccgcccttttttttttttttttttttttttttttttttttaaaaaagtaacataatcaattaaaaagtatatcaaatacaacgaaatctgtttggaaacaaacaatacaaaatataacaggatacaattatacaagtataagtgtatagtctttacccaaaaaaaaacaagaactatgactatgagaccaaccatacgacatggtttttactaaggaaacaatgatgtagacagacataagtgcatctctgcaaatagacaaatggtataacggtaaaacggtactttaaaattgtgggatgggcttcaaagtaactgggccttcttttcgcttaaggagttccgggaacttttgggaattccggcaacttgggaagttgaggcatcgtcggtagctctggctttggaatctctggaactgcaggttttgtaatttctggaaccttgggcagttcaggttttggaacttctggaatcttcggcagttcaggctttggaatctctggaaacttaggagcctcagactttggaacctttggaaccgttggcaattcgggctttggaacctctggcacct

SEQ ID NO: 130755 - DNA, 702 bp, Arabidopsis thaliana columbia
ctatgacgtcgcatgcacgcgtacgtaagcttggatcctctagagcggccgccctttatttttttttttttttttttttataaggaacacatatttctatttttacattcattaggtgaaagggataacaatatcgccaatgttgttgtgccatggatccgccaagcgagttgccaagatctccaatggtcctgtccccgggtaagccgactgttgcacacagaatcttacaaacgccaacagcgcaagccgcccgttcttgatctctttaacttccaattcctcgagcttcttggggacctttgagcttccaagagggtcaaatgcgcctcccgggtacctttttcttttcagggcctttctccctacttctttggggcttaacaaacgcaatggctaataactcaatggccaaaaatgggggcaaagtaccccacgggactgggtttcccaagtaaagtggcttggccccccttggaagtgcttgaccaattccttgagccctttaaccccagttctccccatatttcctaaaagggcttttctgggtcgccccaaaaaattctccctgcgtataaccagcggagggccattaaggcccctaattcttaaccagggtgggtatatgaaagactctcatgggacctctctcttttgggacaatctcttcctttcacaaggggttatctcgctttgtgggaa

SEQ ID NO: 130756 - DNA, 488 bp, Arabidopsis thaliana columbia
  unsure (1)..(488): unsure at all n locations
atttcgtgtcnnnnnnnnnnnnnnnnnnnnnnnnnnnnnnnnnnnnnnnnnnnnnnnnnnnnnnnnnnnnnnnnctttttttttttttttttttttttcacgtacaaaaaggcaaggggtccatgagaggatcttataacggaaagggggccccaatttggacccttcgtagatgaacaccctggttctttcccggtcgctccccattccttcttaaaaacgagaccagttaccctaacactttggacaacacaactacggttgcgaggttctaatgttcccaaaaaatcttccatgtatggaccagtaccgaactgattttgccatctagatcggtcctgatttaaaaacacagagagatggccggcgaataactaaatgttgcgccgtgaactccatcatgcgaaatgcgggcgacttctggaacttgaccggtcagtctatcatggagggaacccatacattgaatgcctccgtatgatcctctg

SEQ ID NO: 130757 - DNA, 613 bp, Arabidopsis thaliana columbia
  unsure (1)..(613): unsure at all n locations
gacgtcgcatgcacgcgtacgtaagcttggatcctctagagcggccgccctttttttttttttttttttttttttncntaaaccaattctaattgattccaaagagctcaaatgtttccaagttcaactaacaatgatactttttgtacaagaaatcaaaaccactcaaccaaatttgacctaaaaaaaaaaaacaggaaccagaaactcacgccccttaggttatgaaaaaaaaggcttgataagaggctgagatgttttaccccattcttcaggactacacttaacctccattaacaacgtcacaacttccttcatcgttggtctctccacaggcgacggattcacacagaacatggggattcctaatgtctgaagcatcttttgaactatctgatctggtaatccctgaagcttcacgccaaggactgataaagctggttcaaaggttcccattttcttcttcacccattccactatgtgaagcccgtcgccgatttgtggctccacggcgctccggccacttagaatctctaataaaacgacgccgtagctgtgcacgggactcttctctggtatactcatcgcggatccctattctggtgcgatgttt

SEQ ID NO: 130758 - DNA, 561 bp, Arabidopsis thaliana columbia
gacgtcgcatgcacgcgtacgtaagcttggatcctctagagcggccgcccttttttttttttttttttatgaaaaactagaaatggacaaggaaatactgacatgatgcttatacgagcttgtttaggggtacagaagatggtttaagggggatatcttttagactgacgaaagaaagacatgaactctgcaggatgtataaccacgctgtttttaggagtgttatagggagtgctttggaaatacatgaatatttgcactaaagctacctaaaaggctgtatatgggcctggccttacgagcgaccttggagtaatattaaaacacgacgtcattgactgtcactgccttatgaatttgggaagaatcaccgggccaatattatggacctgaccctagattctgggcggatggatacatgagacagttatagacccatgctaggagtaccgtatggcccgataccaagttgccctctgcttgaaccaccttaccaaggttgcggatgcagaaaaccgcctgagaaccctggtgagaggaccttacccgatcattgtgccc

SEQ ID NO: 130759 - DNA, 685 bp, Arabidopsis thaliana columbia
  unsure (1)..(685): unsure at all n locations
ttacactatacacgagctatgactgcacgcgcacgcatgcttgaatcctgtagagcggccgccctcgnccttttttttttaagatatttcacactacatattatcgactattcaattttaaaaaaaaaactatggagtgaaaacaaaaatacaaatccccatatgagaaaaaaatatttaagagcttaccacgcatttaaaggggtgcgtaaaaagtacactattttcgtgacttttactcccttcacttgtacgaacactgaacacgcaagaagaacaaacttttttaagaaccctccacaaacgcattagaagaaccctgactcgatctctcaaagacggaggtgtaaagcggagaccggggcatgggcggccgttgcagctggttaacattggtaacacttggcaaagagaccaatggggttgcttggctaacaaagttggttacactagcccatccaccgaacccaaattcgactataagaaccctaacctccacgaaagcatctaacacgtacatggccgtccactcggcataaaaaacggaggttttttcctccgcatttttgactatctgaggcactaaccggtacattttaagccattggtgaacccaagaaaatggggatataatttttaaaaccgggggtaaagcctttaaccaaagtatagtagagcccctctg

SEQ ID NO: 130760 - DNA, 673 bp, Arabidopsis thaliana columbia
cttagacgagctactgacgtcgcatgcacgcgtacgtaagcttggatcctctagagcggccgccctttttttttttttttttttttttaacaacagattctgctaagctttttctcttgggttaaaaaggagtcaagagatatataacatacagtttttccgcgtatgtcatatgcacaaaccaaccgcaggaatagaggaagaacctggatttgacctttaatatctcactcattattgattacttgctgccagttgtccctccaacaacaacattggtcaccaactttccgctttcatcaacggacatggggttttctacaacaccggtctgggactcagagggcggtgtctaagctgatgtataggggggacaagctgttcaatttggccggctaggtgggagaggaacccttgcattgctcattttaacgcaagttaccaatcgactaccggtacatttggcggttgacgcaccccaaggatccctgaggtgcgtccgatcatgcccacacttgtacctgcgcaacctgtcatggagggcgcctgggcccctcttttttggaacgccgccggccccaaggggcccgacgccttggtcatcccaagagcattttttcccgctgcttcagcccccaccctttatttcacttacggacttggctctttcaaa

SEQ ID NO: 130761 - DNA, 558 bp, Arabidopsis thaliana columbia
gaagagctactgacgtcgcatgcacgcgtacgtaagcttggatcctctagagcggccgcccttttttttttttttttctctaaatccgacagaaagacctacatggctctgcgattccactgacagggtcacgaaccaaaaaaatcaacgcacttggtttggactgcatcgttgacatttttctaataaaatggtttccttaacgaaattttcgcatcgtatatatgctgggatagggcattcttttactcgatcaccttaaaagatccgttaccggcctgaccgatccttaagaatgaagatttcattatctctagtttaaagttcacaatcaaactcatggggcctcttttttccggtctcaccgtgctacgcggacatattttagatcagctgtgcatacgtgaaatggggatcatccggggaattgttttctgccaattttcagatgcgcaaataaacacccgtttgaaacacttggtttctccacgcattgaccaactggatgattccatcttcaggagtgttgggcaaccaaaaaggcatactctttgaatg

SEQ ID NO: 130762 - DNA, 574 bp, Arabidopsis thaliana columbia
  unsure (1)..(574): unsure at all n locations
cttgacgtcgcatgcacgcgtgcgtaggaccgtatacactgagacgggctgtnccttttttttttcatttgtttctaggtaaaatactacagggctcttcgaatccacacacatagtcacggacaaagaaaaagcaactcacttgctttcgcactgaccattaacaccatctacaaaaataggcaccttgaagagaccattgatcctgagatacgatttgcgtgagcccttttgtatgcttggatcagggtgtaaaagatcctctactaactctgagcaatgtctacagagtgcaggttgcttcatcctaccttgacttgtccaatctcgacgaggcggactcattttctcgtcaaccgcactcaaagaactttctagagcctcgtacataatgaaatgagctattctagcttctattgttcaatcttgatcggattaaacccgcggaacagagctttaagcatagccagtaggtccattaatctctagacccccggattcttgtacatcttgtatcgggcaacccacgggcccaacacaaagaatattatggttacccgcctctttttgcccc

SEQ ID NO: 130763 - DNA, 619 bp, Arabidopsis thaliana columbia
ctctgacgtcgcatgcacgcgtacgtaagcttggatcctctagagcggccgcccttttttttttttttttctcatggaccaaaaaaaaaagcaacagatttcttaaacgcctcaaccagtgtcacggacgataaaaagcaaatcacttggtttgggctcgccaggtgacagcaattacatccataggcctcacgaagcgaaatttgaacctgacactccgctctgaaagagcattgtctagctggaccacctcgtaagatcctttcccgacctgaccaaacctaaagaatcaagatgtcgtatttataccttaaaatgcacaaccccgacgcgacggtcttatctgccgatccaccgattcttggaacagatttggagctttgcggatactcaattgagctaatccggtttagatgctccaattgctatcataataaaaacgccgcacccagttagaagtataacctcttggaccattacactcttgaccctgggcttttcccattgcttgaccgggacaacccctgggaccggaccaaagaggatccatgctaagagcctcttccatgaagatccgatccttggttatgaacctttcagggataaccgctgcagggcc

SEQ ID NO: 130764 - DNA, 644 bp, Arabidopsis thaliana columbia
  unsure (1)..(644): unsure at all n locations
agacgagctctgacgtcgcatgcacgcgtacgtaagcttggatcctctagagcggccgcccttttttttttttttttttaaattaattnaattcatttaataaaaatttaattcaattatttaatcctttcgtactaaaataatttattttttaaaagatagaaaccaacctggcttacaccggtttgaactcaaatcatgtaagaatttaaaggtcgaacagacctaatacttaaaattttgcacctaagattaatcttaattcaacatcgaggtcgcaaactaatttttaaatttgaacttaaaaaattaattacgctgttatccctaaagtaactttttcctttaattaaaaattttaattcaaatactcattaaataatgtaaaattttaaaaaaagtttaataatttttttatcaccccaataaaataaataataaaattaaaatatttataaatccaaaaaaaatcaaaattaatatttataaagttttatagggtcttatcgtccctttaaataatttaagcttttttacttaaaaataaaattttaattatataaataataaagtttatttctcatcaaatctttcatacaagtcctcaattaaaagacctaatattatgctacctttgcacagtc

SEQ ID NO: 130765 - DNA, 615 bp, Arabidopsis thaliana columbia
gacgcatgcacgcgaacgaaagcaaggaccctcaagagcggccgcccaaaaaaacacaaagggactcacgatcaagacaaaccctggcaacaaagaaaaaagagaaacagccccggcaacaaaaagccagaggataacctacagcgaagacgggaaactgaaaaaagctaaccaaaactaagaactggcaaaaagggccacaaaccaatacacagcaaagaaacagccccaagaggtaactttcaaacaaaaacccactgggcggagcaatactacaccaaccccctaaaccgaaggaaggaaccaaaccccggaaactccaacagaggcacgaaacgaaggataaagccaacagctaacgcacccaccacaacaacagcgacctccaccggcgaaactctcggcacttacaccgacgcaggacggcgagccaccacggagaaaccaccctccagaaagagagagaacggagaactggaactagcagaaatacccatcacccaaggaagctccggagggcaaacaccagcagccggaccagagccaaaaacagacccagcgaaacgggaaaaaacaagcaaaccaaaaaccccccacaagacaccggagcaacca

SEQ ID NO: 130766 - DNA, 651 bp, Arabidopsis thaliana columbia
agacgagctctgacgtcgcatgcacgcgtacgtaagcttggatcctctagagcggccgcccttttttttttttttttttttttttttaagaaatatagtaagagatttgcttattgcataaacttagctaatcaattttatagatagaaaaacattgaaaagcaaaccgaggggatgcgataacatcatgaagcatcacaaagcaaaatagaaaacttacaccaaaaccctaaagaagttcgaccaacgtgccaaaaccctaacttccttcccagccataattattattaattttattaataagtactagccatacttcattaaacaagtccccgacacgataatccatcaagcgaaaccaacattccttggaacagccttgcacttcaacggattcttcatctccatagacagcttcagaacctcagcgagctcaacatcacaagaacccttcacccattcaaaattctgaattagttgaccaatccagagatgaacagtagctagacccattgctttaccgggacaaacccgacgaccggatccgaatggagccaatctaagatccgagcccatgatgctcacatcctcactaatgaacctttcaggcataaacgcttcagggtcggtccagattttagcgttgtgtgt

SEQ ID NO: 130767 - DNA, 768 bp, Arabidopsis thaliana columbia
ctgacgtggaatgcacgcgtacgtaagcttggatcctctagagcggccgcccttccacttttttttctttttttttttagaaaaaccctcaagtgaaagaaatttttggtcccttaactccatccggacatccattggttacacttaagagaaaaccagacttaccgataggggtttactaccaaaacaaacataaaagctttgatattccgctattattagattcccccggggggaacctaaatcgtaaaacgggttctggttggggaatgggattgggaaggcatacaacatgattaacagtcacccccaataatctacctatgaaaatcactaaatgctaactgctgctgacccgtttgcctgaatacttcgcttcattcatggctttcacaagattagtttaacttcactccctcaaagctcttagaggtgtaactctcttctatattgctaatgtaactcctcggtcgttcggcctcctatgtctcttccccctactattcattctcaatctccatttgctaagtatccacccctccaactgctgaaaacccctttttttgaatataatccccccgagggtttcacaataaaggcgggtgatttacaatcatatgtctcacgcatgagataatatctctcgacagtattacgccgccgttactcctatgcctattcgaagtcatcactcttacaatagagaatgttctctgagcatactctcaccggtcgcctgtgtacactgagcgtctctgcatgtctcaa

SEQ ID NO: 130768 - DNA, 1247 bp, Arabidopsis thaliana columbia
  unsure (1)..(1247): unsure at all n locations
ccccccgaaagccgcgcccnccgcgccccgacacccccccttcttcccgcccccccgcacacgacccccccaccacccacacacggcgcgcgggcaccccccaccacccccgcacagccccccccccccncccaagcccccgcgccccccccacccccaaccccaccccgcccccgcccccccgcccagccacccacccccccgccccacccccccccccaccgccccgaccccgccccctcccgcccccccacccgccccccgcccagcgccaaccaaccccccaccccgcccacccgccccgctccccacgcacggcacccccgaccccgccaccccgacccgcccccagaccccgccgaccccagaccacgccacaccaccagcggcgcacgccacgccacctcctgcngacgancgcctcgccatccgtcctcttcatcttgatctctacctccagactcctctgctcctgctcctctactcgttctcgcagtctgtctatacactctgcactctctatctcgtatctgtttatctccttctctcatgctcgtctcgtacctcgatcacagcatatctctcctcatccgcgcgttactctgttgtacgactgacatcgcgttgccttatcctcatcctccatctctgatcatatagctctctcacagtcgctccactcgcaacacctacgtcgccgagtctggttattgatcgctcgtcctcgctgctgcattacgatcacgtatcctctccctactcctagatactgctgcttaatctttatcactcactctgttccactatcatggatttctctgtcttctcgctctcccgtcagaccgttgatctctcacactcctctatctctaattacctcactcctcctctgatgccattctctgtcgcgatgctctctactccctatgtctcctgctatcttcactacactgtgcgcccttgctcccactcctctctccatgccctgtgtctcatgcctttatcactcttcttcccgatctctcctaccagccatctccctctaacctcatcccctcacgcctcttcaccaatcacgtccctctccttctctcctccttccgattcttctctcctccactctctccagcatttctgattatctcctttcatctccttctctcaaatcattctctccctctcttccacatcatctgatatccccctacacacctccgctccctttctcttccaacttcctctcatcc

SEQ ID NO: 130769 - DNA, 836 bp, Arabidopsis thaliana columbia
gagaagacgaaacccaggaacaactacaaagagcggggagagagcagaggcgcaaggaggccgaagcagaggcgccgaggggcgagcacgagaagcaaggagagagaagcggccgagaagaatcacacccctaagggggaagctgatgcttcttggaagccggagagggagcacccccgaaggagggaggccccgcggggggcatagtttaacgaggaaaacaaaggggaaggggaagagcgaaacgggggggggagggaacaagaggagcgggcagagaggaaggagccagagaggggggaagagagcagacggcaaaaccgggaggcagagaaagaggaaggcgaaaggacggcggagggagcgcagcaaaaaggagaacacaccagaaagagggagcggagagaggagggaacagcaggggaggaaaaggagaccgagaagagaacccggcgagcggcgaccagagggacaaagcggagacgaacgagcaggcaagggccaactggggtacacccaaagggggcccggggacgcgggaaacccaaacacgggggcaaaggcaccaaaacgagggggaggccctgggacaaggaggggcaagggaataaggaaaagagggcgaagaagagggaaagagacaaaggcaacgaaacaaggccgagagcggaggccgggacaaagaaaggggggagagagcgagtgggcagaggtgcagcaacggacaaaacaagaagaaggaggggacgggaacaagagaggggacccgagagagagggcggcgggggagcaaggggaccgggaggggggaagcgcacaagggggaggaaaaggaa

SEQ ID NO: 130770 - DNA, 726 bp, Arabidopsis thaliana columbia
gcacagagacgaatgcaagaggacgccccagccacaaccgaccgaccaacgcaacggccacggaggagcaacaggcacgacacggacaacaacgaacaaccggcgaaagaacaccccagagggaaggtgatgcttcttgacagccgtagagagagagcgccgaacggcccaccaggacagacaaacctatctttacaccacgccaagcacggggacatagacaaaagacggccacacgcccccataaacaaaggaaactgggcgcagaactgggccaaacgacacacgagcagggcaaaccgcacgacgaaaaggagcccggcagctaacaaagacatgcgaaaacaggacgaggagcggccccaaagcaaccacccccgaccggaaagacggggacgcagaaccacagcagccaccagaaaaggaggcccggaacaggccacaggggggcaacaacccgggagggccccccaaaagggcaaggggaaaaccctcacggagaagaacgcacaaaaaagagaccgcgacgagaaatacgcatcctaaaagaagaaacagggacggcgagcgtgcgaaacacaacagacgcgaacggcacggaggagcgagagtgcaaaaggagggccgcacgacagaagaggaccggacgcgaagtggcaaacggctgagagacggtaacccccgggggggagacaacccgggggcacaccgggtgaacccagagaa

SEQ ID NO: 130771 - DNA, 767 bp, Arabidopsis thaliana columbia
  unsure (1)..(767): unsure at all n locations
accggtccttattcccgggtcgacccacgcgtccggaccaagatgtgacaattgagcatgcgcgttactaaactgtttgtacgacctcaaagatggctcttaaggccctttgtgatcacccggaagctttttaagaactaatagctgatcatatggcattcaaggatagaaatcgaccctaccacccactcggtcttgagcgacgtgaggtcaatgaaaggacatcgctctgcgattaatgagacattactattggcgacgatcgatagtggggtcctgagggaagctactcgcgactaggaaatgaatgggtattgtatcacaaaaggagtggaaattattgttacacggaggaaatcaattacgatgcaacatcttatgaatacccagggatacttaatgcatggagatggatgaagaagagcttggagtcacacaacttatgctgtgcctggggaggtggcacatggccttgtactggtaaggacactatggatcagatgagatcactagctctactcattactgatttacaagatacagaatggtggaaatgggacgggataaataatggcgtgggcgagagtttacgcccacactgctttcatgttcagatatcactctactaaattggaggtttgtaaatttgctgacctangttttatgcacgccttaggttacacgacgaacctctatgaaacaagacccgaagccggattttgtatcaagatttttttattttttttagacggaataattttttggct

SEQ ID NO: 130772 - DNA, 653 bp, Arabidopsis thaliana columbia
actgtcctgtgcagtaccggtcctgaatttccgggtcgacccacgcgtccggaccaagttgtgactagcgggtattcgggttactaaactgtctctaccacctcaaagagggctcttaactaccttcatgatcacaccgaagctttttagagaactaacacctcatcatttggctttgagggaaagaaatcgacaagacgacccactcagtcttgagcgacgtgaagtcaatgaagtgagctcgagctgcgatgtatgagacattaacattggcggctatcgttagaggggtgctaatgaaaactacttatgacgaggaaactaacggtcattttatcccgaaaggatggagaatgtatgtatacgcgagggaactccattacgatgcacatctttatgcagacccattgatctttaatccatggcgatggatgaagaagagctctgagccacacaactcatgctttgtctttggaggtgggacctggacatgtgctgcgtaggaactatggattgtagacatcgtcagctctatccatcactgtgatacaagacacagattgcaggagatgggacgggatgaatgactcgtgtgtcctaacgtttttcgcacacaaagtgctgggcatcttaaacgcatttcaccccctacc

SEQ ID NO: 130773 - DNA, 769 bp, Arabidopsis thaliana columbia
gccgtctgtgtgccggtccggaatttccgtgtcgacccacgcgtccgagagttagggttttctaatgtgttttactacaaaccaaagtggcttataagtgttgatcatagtgggttcatcagatttgttgttaatggtcgacaagaatcgtcaaaggagacgttgacagacgaggaagaagaaggagtttttattttaaggtcaatggataggtttcttgaaaagcaaaatgctgaatccatcagacatacaatgcaagcccaagaagatatttttaagcaacaggtacgagagctacatagagtatataatacacagaaaatgatgatgactcaactcaaacatagaagccactattggactgttaacaacaaagaccaacccggttcaagagagagaaccggaagttgttcaggcatagacctcgaaaatgtggttagagcaacacaaacgacgacggatcatatcgaagagagcgaactcgaattgacattgagcattggattgtcttcttcatctactactatgaccacgacaacgaacaaggacatggactactcgtcaacaacgtcaatgagatcatcatcggataattgtaataatcagagcaataataatctatataataacagcaataataaccaagaaagtagcggaccaaacacgcctatgagcagctcaagtacgacgtcgttggatcgagagaagaagagacctcattggctctttcaaggacttagtattaaccgaacctcttcttgatttttgt

SEQ ID NO: 130774 - DNA, 767 bp, Arabidopsis thaliana columbia
  unsure (1)..(767): unsure at all n locations
cacccctccgctccgaaacaaatgaatccacgcaatgacgcaaagaagcctgcttttttattgaactctggtagggcgcacgttacttattggtaactatgggagnctatctttgaagctctagacaccatgtctactagacacttacccgagagctcttgcaccaaatcttcttccgtagaccagccctatcggagcggctgacatttccaaccccccaaaaataggatgaacgaccctaatgggcctatgatatacaaatgaatatatcatcttttctaccaatggaacccgaagaggagccgtgtggggtaacatcgtgtgggcgtattccacgtgaacttaattgatgaattgggatccacatactccagctatcttcccatctgcacccttccatgatcaacggaggctggtccggttcagcggctaatatccgtaaaggaaaatcggatgtcctcttttccgggatcgaccctatgaaccaacaggtgcgaaacataggtcgaacctagcaatctcctcgaaccttatttacgataatggaaaaagtcttcgcttaaacctgtcatgggttcctgaacgccggttaacggtaatcaaacgccccgcattgtttaccgtggaccccaaacccacccggaattgggttttaggggccaaaaaaacaattaaaaattgggagaaatttggatttcattccgagaaatgcccaaagaaatttccaccccgggtaccggtgaacttttaactctatattaccttta

SEQ ID NO: 130775 - DNA, 764 bp, Arabidopsis thaliana columbia
tggccgttctgtagtaccggtccggaatttccggttcgacccacgcgtccgcaaaccacttgcaaaattcgaatcagatcttctcttcaatcgataaaaaagaaaggatttgctctagattgttgaatcgaagatgtcgacaagggaagagaatgtttacatggcgaaattagccgaacaagctgaacgttacgaagaaatggttgaattcatggagaaagttgcgaaaactgttgatgttgaggaactttcagttgaagagaggaatcttctctctgttgcttacaagaacgtgattggagcgagaagagcttcgtggagaatcatttcttcgattgagcagaaagaagagagcaaagggaacgaagatcatgttgctattatcaaggattacagaggaaagattgaatccgagcttagcaaaatctgtgatgggattttgaatgttcttgaagctcatcttattccttctgcttcaccagctgaatctaaagtgttttatcttaagatgaagggtgattatcataggtatcttgctgagtttaaggctggtgctgaaaggaaagaagctgctgaaagcactttggttgcttacaagtctgcttccgacattgccactgctgagttagctcctactcacccgataaggcttggtcttgcactcaacttctctgtgttttactatgaaatcctcaactcgcctgatcgtgcttgcagcctcgcaaagcaggcgtttgatgatgcaatcgctgagttagatacat

SEQ ID NO: 130776 - DNA, 760 bp, Arabidopsis thaliana columbia
gccgtcgttgtaccggtccggaattcccggttcgacccacgcgtccgaaagaggtttcttcttatagaaatgaatttctctaattcttccttgtcaactggaacaaccctaatgacattgggttgtcttctgcttcatttatccatttccagtgctcagctaaccccaactttctatgacaatacatgtccaagcgtctttaccatcgtacgggataccatagtaaacgagctaagatcggatcctcgtatcgctgcaagcatccttcgtcttcacttccacgactgtttcgtcaatggctgtgatgcatcgatcctgttagacaacacaacatcctttcgaacagagaaagatgcggctccaaacgcaaactcggctcgaggatttccagtgattgatagaatgaaagcagcagtagagacagcatgtccaaggactgtttcatgcgcagatatacttaccatcgcagctcaacaagctgtaaatttggcaggaggtccttcttggagggttcctttggggagaagagacagcttacaagcattctttgctctcgctaatacaaatcttcccgctccattcttcactctcccacaacttaaggccagttttcaaaatgttggacttgaccgtccctctgatctcgttgcactctctggtggtcacacatttggtaaaaaccagtgccaatttattatggatagactatacaactttagcaacactggtttacccgaccctactcttaatactacatacc

SEQ ID NO: 130777 - DNA, 409 bp, Arabidopsis thaliana columbia
  unsure (1)..(409): unsure at all n locations
aacgccccacacaccccgaccgcccgagacaatccacacagagcgcacccaggcgccgccacaaccccgccgaaaaagccccaatacaatagcccacccaccccccccacgccagaaaagggggcgggaggccntgcggccaacggcgcgccactcccaaaacagcgaaccgggcgcaaaaccaagggccaccaacacgggcaacaccgggccccccacgggcgcccaaagcccacccggtgagacccgcggggccccaacaaccgcagagcgccgcccgccaccggaaacgcccacaccgcgcacccacgccaacgagggggcggcccactcaaaaggggccgccccacaacggcaccaccgccgccccggccccaacaacaacaaacacccccccaccacccgcgga

SEQ ID NO: 130778 - DNA, 556 bp, Arabidopsis thaliana columbia
agctattgtatagatagaaccttaagtatagacattcttgactgtcttttagacaaagaaaagattttcaactagaccgatattagtatttgctgatgagctgaatttaaagagaatactcagatttgattataacactaatattgatgttaatatcgagacatttgttaatggatacaacttattactatgaacctaacgtgctttctaggtatataaggatggagtatgcactgatacttgaagatactgaaatatgatacaaatattcattaattatcttgggtattcaatgacgctagatagttgaagaagatatcgtttcttaacaaatctaactgtgcctattgaggtgacatcttgacatctgatactaagtacatttggaataaaaaatatgatatctttagtaatcactgtgttatgatatacagactgtttgtgaatgtacggcatgcatgactcatgtggctaatgttatatgaacaaggtgcagggatgataagcatatactctgcatatttgtggctcgtgcatatctagacaatgtaaatat

SEQ ID NO: 130779 - DNA, 862 bp, Arabidopsis thaliana columbia
  unsure (1)..(862): unsure at all n locations
ccacccgtccgaagaatatctttaattgccggcactatcaactctgtgctcttttttttcccctnaaacattgcttacgttccaagggttctaaatcactttagtgatggagttctacatcaccacaaactatggccatctttttgttgaattagagaagatcgagctatggaactccacggagtagttctcctttggaatattctgcttatttctctgagtcgaacagccagacccttgttacatacaaacctgaacgcctcgtatgcgtatacacacagttgtacacggacgatctatatcgtgttagcagtacccttcggtggcgacttacatgcntcgtcatctgggtatgttcctactcacgtatcgacattatcgacgtagtgccgacatctagactggctctaagaagactcaacctatacgacgctaatcacacgagtccactctgagcattctttgtgtggttcagactaaagaacactgttaccttgtaagcagattttagtttttcattctcacatctcataagatctgtgataacactgaatctgatttctattctaagatactactgtctaacaaccacgggttgagctgatattgtagtaggttattcaagtaaggaactaaattcacattagtctagatatcctcccttacgtaggtaacgtccctccgttttgtcaagttagctagtatatcggagccccccaaaaaactccagggggtaatcgataattgctttacagcagttttggggggcaattaacccatattttacacgcgaactttatttttaattaaagaagcaattatttcaacaatgtgaatagagtccaatggtctggatttctga

SEQ ID NO: 130780 - DNA, 596 bp, Arabidopsis thaliana columbia
gcagtacccgtcctgaagtcccgggtagacccacccgtccgaaacctattgtgataactaagagaccagagaagccagctctgttatgagctctggttatagaccacgcttcttattgtgctccacgggagctctttaagaactaagaactgagcattctgtattcatggaaagaaaactatccgacgaaccactctgcgtaaaccagccctaccggaccggcttacatttccgcgccctcaaaaataggatgagcgatcctaatgggcctatgagatacgaaggaatatatcctctcttctaccaatggaacccctattgatccccgtagggtaacatactgatggctcactccaccggaacagacttgatgcactgagatccacaaactccagcgatcttcccatcagcaccctgacatagcaacggatgctggtccgctacatctgcttttcgtcctaaaggaaaaccgggtgttctctattccgggaatcgacccctagaaccaaacacggtccaaaaacttaggcccgatcctatacaaaagatattcccattcccttaatgctccctaagaaaacccacttccctttaaa

SEQ ID NO: 130781 - DNA, 910 bp, Arabidopsis thaliana columbia
ttttattttttttttggagcgctccggcttcaaaacacaaccaataggtggtggggtgtttttctttcgtaaaagggggtgtgtttccacaaaaaacaactttttttcttttttttccttcacggctagactcaaaggttttttaagaaatttttaatatttctaaaagaaaaccaactgaggggtcagtcatcatccttaacgggtggaacctaaacacccgtgaactataaaactcctcccaatcctttctttggtttttttccccacaggacgacatggccgatattaaattttaagggtggatccaccccttgtgtcccttattcgaatgatttttacctctcgaaaggtatctataatttctctttatttataatatacccggtgccttaaaacgtttctcccggtgggggctttttaataaagaccccccgtttgggcccaggaataaaaatttcccgaaaagaaaggttttttaacccagggcccctccaaaaaaacggggttttttttccttgaaaaaagggccctgccaaaagaaacctttgggagggagaaaattttttggtgaaaacctggatctttttaaaaaaaggatgtccccccttcttaagtaaacctcaggtattctttttttcatcgcgcaataattgtgtgttggatcatatctcaaaaactctttggtttacccacccccccttaatattatgaaaattgtttcctctctcacttacttttcttctgggcaccataacacgcgagcgcattagtgagaacctatctatacatctttggtgtggggcgccctcttaagactgtctcaaatcccccgctccctcccctctaatgtcgaagtacccaaagtttttttttttaggtggcggcctaaaaaactaaaaatatgtgg

SEQ ID NO: 130782 - DNA, 703 bp, Arabidopsis thaliana columbia
gttgtaccggtccggaatttccggtgtcgacccacgcgtccggagagacggacagcacatattcaaattgttgttgatacacaagtttcatgctcgacacctgtgcccaacacgctgcgggccaggccgccaacgtccatagtgctggattcaggaacgatggagatctatcccacaaggacccgactgcaatccacgagggacaagatcccatctccatgcatatcgaggagagtgctggaccataagatgccatgaatgcgttcacagcctgcgaagacgctaggttgatcgcttgcgacgctcatccaagacctcctgtggatctggtcacataccgggatcggggatccaggcgagctttgtactcgactgtgtaatgactggactgggcgagcaaaggtcatctctccacctactaaactgtgggttgatgattgaacaaccctggatgtttattgctaggaagctcattatgcatcgaaaatttccgatggcattgatcttctagcactggagaacaacgtactcatttaaatgatagaaaggacccgcctcgtgtcttgtaagattgttgtcctccacgtcctatcccttatggggcggggcggttctgggggaacccaagtcttgccttccgcagtgcaacgctcctaacaaaaacttatgttttttggtcgtccccaccccaaattcaaatatc

SEQ ID NO: 130783 - DNA, 726 bp, Arabidopsis thaliana columbia
gcagtaccggtcctgtaattcccgggtcgacccacgcgtccggaccaagatgtgacaaattagcattcgcttaacgaaattgtttgtaccacactaagagatggattttaatgccctttatgataacccggaagctttttacgaactaatagctgatcttgagtgtttcaacgaaagaactcgacaagtatgaacctctcggtcttgacgacgtgaactcaattaagtgcaatagctctgcgatcattgaaacattactattggcatcaatcgataaaggggtctctaacgaatactactcacgacattggccctcgatgggcatgtcatccattaaggagtggaaatgtactgttactcggaggagcatacttacgatgcaactctttatgaatacccttcgatccttattccatggagatggatgcagaagagcttggagctacaaaaattatgctgtgtctgtggaggtggcacatggctatgtcctggtatggacactatggattagagagatgttgagctctactcattactgtgccacgagatacagattggtcgaacatggacgggatgaattactggtgcgtccaagagttattgcactacgatgcttgcatgtcagatctactctcctcattggggctctaaatatgtgacaaagaaaatgccgcttagtaccgtcgacttgtgagaagccgagagatatgacagtatttcttatag

SEQ ID NO: 130784 - DNA, 755 bp, Arabidopsis thaliana columbia
tgcagtaccggtccttaattcccgggtcgacccacgcgtccgcgatcttcgccgacaatcgcgaggtgtggatcccaatatcgataccaattggctacacaggaactgatccttataagataaaattccaagttggaagtgagaaatttctgattcactggcttttggtaattaatcgaaagagctcaaaagttccgatgatcgatgtaaattagagatattctggaggagatctgcttggagtcacagatcaagttattgacatgcctcatagctatctgaatacacacccggagatccgcatacagttttgggatcctcaacactggccaaaacatgttcttgttagatacacgtggaaggagcagtcagagattgatgtatcctcaggattctatgtcctgtttggctcagctctcacattttcttttgtactctccatttacgtcttacaatcgtcacgagagaagctggcaatgtttgtcagagagacggtggtggagagcatcatcatgaatgttggagaatttggcaagggggattgagtcacatagtcaagtatatgtatgtttctacaactttagatacttggaatatggaattggccgttcaactctcagaaaggattcttcatcatacatgaatagtccagagcagaaactttgtccttgtcacattatggtttaatatatttacgtttgctgaacctaatgccaaactaacaaaagggcggcctgtctagaggatcccagctt

SEQ ID NO: 130785 - DNA, 749 bp, Arabidopsis thaliana columbia
  unsure (1)..(749): unsure at all n locations
tgccgtaccggacctgaatttccgggtcgacccacgcgtccgcgaagcacaaaagatgcagatcttcgtgaaaaccttgaccggtgtgaccatcactctcgaggtcgacagcagcgacaccatcgacggtgtcacggccaacagccaagacaaagaaggaatccctccggatcagcaaagattgatcttcgccggatagcatctcgaagatggccgcactttggctgactacaacatccagaaagaatctacacttcatcttgtgttgaggcttacaggaggtattatcgagccttccttgatgatgcttgctcgtagggccaatcaggataagatgattggccgcaagtgctatgctcagcttcacccaagagctgtcaactgcaggaagaagaagtgtggtcacagcagccagttggagcctaagaagaagatcaagtagagagactgttatcaagaatcccatctcttgcttgctatattttgatgtcttccctttgatagggctatgattgcttgcttcagggactatctatgttagaagatcatgccagtcaaaggaggcggaaatctattattctgaatccattacggaagattcttgctcagaaaggaaaaaaaaaannnnnnnnnnnnnnnnnnnnnnnnnnnnnnnnnnnnnnnnnnnnnnnnnnnnnnnnnnnnnnnnnnnnnnnnnnnnnnnnnnnnnnnnnnnnnnnnnnnnnnnnnnnnnnnnnnnnnnnnnnnnn

SEQ ID NO: 130786 - DNA, 1057 bp, Arabidopsis thaliana columbia
ccaccccgccgggctaataaggaaggccgttatataaagaggcacacaagcccacccctatttttttcacgccaaccaaaacacaactcaaaatgaggagcggcaaggaaccaaatccacggggggcgggaggaaaacacaaagtacgaaaacgggaaaaaaagcggggggctacacccgaaaaaaggcttgaaaggggggccagcccaacaatctcccccgtatgcggaccaagcccggggccggtgaacaaagccaaaaaagaagggcccccgcacacccgaatcggcccccttcccaaacaagattgagcccagccccggaaaagggaaaaaaagggaacgccaccccaggaagcgggcgcaataaaaaccgccggccggggtaggcggggtagggaataaacaaccgagccaaagggggagggaacaccgcggcatcaacaaatatagggccccaagggagccacccccaaagaccgccccccggggatcccccaattaacgagctttagaaaagtaacccacatcacccatattgcttcggcacaacggggaacggcgcgggcataaccccccccgggcaaaggcgtccaaaaaaaccgggggggccaccccaattcaagggggtccccggataataagtgggtgacaaaagggaacccttcgaaaaaaccaaaaaaaaacggaggacaaggagacgaacgggtttcaacggaagggggggcccaaaaaaaaccccggaaagaaaccggcacattacgcgcccttaggaacgggtggggaggccccacggcaatctgaaaagaggggggcaccccaaaagagcccccaaaacaagggaaacgaaacaaccgtcaaacccttaaggggcgggaccaaaatccccttaggggaacttaattcagggaaaaataggggaaaaacaggaacgtgcgtaaaaaggaaaaaaaaaaggggccgcccgaactctaaaacaaaaagaagggaacccccgaagatcctaaaaaaaaagaaaaaaaacccccttaccaaagagaagggcgggcacccttttc

SEQ ID NO: 130787 - DNA, 987 bp, Arabidopsis thaliana columbia
aaacaaaaagaaaagaagggaaggggctcgcaagagaaaaataaaggagagagggggacacagggagggaagaaagtggagaggaaaaaaaacaaggagaagaaggaaaaccaagggaaaggcgaggaaagagaaagagaggagagacagagagggagggagcagaaggaaaaagggagagacggagggaaaaaggggcgaaaaaaggggagaagaaaaggaaaaagaagaagaaagtagtgaaaaaagagagaagagaaagaggagacggtagcaggaggaagagagcgaagaagaaagaacaaaagaagaagatgagaatagtagaaggggggagtgaagagtggagaagagcaagggagagaaacatacgaggagggggaagagaaaacacaatagggagggcggcaaggaaaatgagaggagataagcaggcacattaggagcgacgggaggagagagataaaagagagaagagaagaggagggaaggagaacgaaagagggcgagaaaaagacctaggcgaacaccagggggaatgaggaggagctgatatacaggagaagtctgagtgcaagcaaaaagagggacaaaacaaaaacaagagggggaacagattggaaaggaaggcccgggggaaaagaaaagaggcagatggaagaaaaaaagagggaagggagaacgaaaaagggggggggtaaaaaaaaaaaaaagggacatgaggccggggggaggcgggaaaaaaaaaaagggcgaaggaaaagaacgggggtgggacatcaaatcaagagaaacgaggggggcaaaaaacggtgccctaaaaaaaaaaaaaaaaaaaaaaagagcggggccgggactaagaaggaaaccaaaggttaaaggacggcggggcaaggggaaggacaaaaagttctttgtaaaaggggacaaaccaaaaaatacaaatcaaacttgcgcggggcggtattaaaaaaaaggcccggggaa

SEQ ID NO: 130788 - DNA, 759 bp, Arabidopsis thaliana columbia
actgtccgtctgcagtaccggtccttaattcccgggtcgacccacgcgtccgcaatgcgaaaaaagaatggggtttcggacaattgattcctcgatcaacattctacaacgcgaacgaaggttaccttgaccaggacactggttcttttggtgctgagatctttattgttaaaccggctcaacaacaagagaaagttacattcatatcaaaccctccaaacaatgttttcacttggaagatacttcgtttctctaccttggaagataaattctattactccgatgattttctcgttgaagaccgatactggagactaggatttaacccgaaaggggatggaggaggaagaccacatgcacttccaatcttcctatttgctcaaggccataaggcaaacgcagttgctacaaacacttggggagcggttaatctgcggttaaagaatcaacgaagtactaaccatagacaaatatattctgcagcttggtacccgattggaagcggttatggtgtgggagtgaacaatatcatactgttagctgatttaaacgatgcatcaaaaggatatttggtgaatgatgccattatctttgaagctgaaatggttaaggtctctataaccaacatcgtctccgcttaaatatctgcacttctttgtctacgatcaatcaaccttatgaataaagagatatttgatgagtttgtataagaaaacgttatgtttggaattgtgaagtattacttctgtcttctgagtt

SEQ ID NO: 130789 - DNA, 659 bp, Arabidopsis thaliana columbia
ctctgccctaccggtcctttattcccgggtcgacccacgcgtccgaaaaaaacatggcatcgagtgcatctaccatggccagttctctaacgagcaggtcatccttcgctactctatttcaccgtctagccgccccgaaaggcatctcccgtgctcctttcggtgtgtatccgaccaaaagagtctcttccttcacatgacgagctgttaaatccgacagagtatctactttgctaaccatcggacacccaatgaatatacaaattatcagtcatgccggtgaatatcgtaggaaataacatgttgtttgataaatcaatgaggttaggataaaaccgccataatacacacaacgtagctgtgaatattggccatcatctttacttcgatactttatgttttggtattacatacaatatccatagatatttataacgatgtctatataacctcatttgtggaattgatacgatcgaaaaacaataaatatttaggttctcgatttatgcaatgacaagctatgtatagaagaatagaacttatgtataatgagtgtgctctaaccactaatatctgtaatatgacagacaacaatccatgttgttcaaccaatcaacggtgattcattcatctgaaggttgggaacttcggagacgtcg

SEQ ID NO: 130790 - DNA, 769 bp, Arabidopsis thaliana columbia
gctgtccgtctgcactaccggtccttaattcccgggtcgacccacgcgtccgcaacgatggattcacctattgtgttggtgcggctgattttgctgtgaggcctatatccatgttctttttggcctgagtgaacaaccatattctcatgcgaaatggtgatggaaacgttgcaactgctcgggcagacagctagaatacggaccatggctcttagctgacagaacgtatgcgatattgcatggatcattctgataagatacacaagcatgctcaggtgacggcgcaggtgtcctaaggtaaaggtgtcatgactgaaaacattgcgaatgttcttgaccgaggtgagagaaaatatctttttgcgcacagaaccgaaaatactatgtcacaggctctgaatacccgaacatcttgaacgcatatgaaaagaaaaatgaggctttggaacatgaagatctaacttatagtgctcgccagtgttactcggctgagtcttatcatcgagctctggattggccatgggtctaagtgtttagctcacattattcagagattctgatagcatgtcactcggggcatgaagtgccttctctttaatggtctatgctccatctagcgttctttgcttagaattgatcctgcttagatcgacactttttgaatgctacttcatttggcttttttgctcgcattaggattacattgaaccccttgcgaaacactccataccttgcctagagaaccgtaactttttaaaagactttgttg

SEQ ID NO: 130791 - DNA, 686 bp, Arabidopsis thaliana columbia
tgcagcaccggtccttaattcccgggtcgacccacgcgtccgataacaagaaaggcatcgaggtcaaaaaacagagttattttttttgatcgcaggggctcctacggatatctgatgcggcgttgagcccttccgaagagcatctcttaaggctcacttgtctgaattcatcccaactcttctctttgcgtttgcgggcgtcggctctgctcttgcttttgccaagctcgtctaccattcgacaccgaacgaatatacaattgctgatgcctcctggggtaactccttggcccttcccgttggtgttaccataccacgtcaacatggacagaggacaccttataccccgccgtgacactcggacatggcgcagtggctacatcgcagcttaaccggttggttttactggatagaccaatgccttggctccatcgtcccgtgtctcctttttttgtggaatttatacgatcgaaaaagaataaatctttaggttctctgacttattcaagggctatgtatggatagaaaaagaaaatcgtgggaacctttgctctggtctaccacagtcacccccccaaacggctggatacaaaaaatttccgttgttttccggaaacccatttgcattcccaatatggcttaatccgggtttcccatcccgttggggaggcccaaacacattccct

SEQ ID NO: 130792 - DNA, 1029 bp, Arabidopsis thaliana columbia
  unsure (1)..(1029): unsure at all n locations
aaacccccccgaccaaagcaaaacgacggccgacaagacagcagcccttgttttacgcaccacccgcgaccgaaaggcacgggggggggcacaaccggcaaccaaggggccagaacccacaaaaaggaaaagcgcccaggagagcagaagcccagcaaaagaaaccagcacggaaaccaaccaacgcaaccgcgaaaacaaaagcggcgacccacaaagcggacaaggagcaccgcctagacacgacccaccgcaaataccgggacgaccaacaagaccacagcgaacgcgaacaaagccacgccaggaatgacaagacacccacccgccggaccaccaaacagaaagccagcacgaacgaccaggcgcacgccagcgacaacaccaccacttgcagcacggacacgccgagaaagcggggaccgaaccgggcagacggacaggagtgaaacaccagacaccacccaagggacgcaccagtcggaccgagcccgccacacaacgcgccaacagatgccgcaccgctaaaagaggcccgcacacaaccggcgnaacggaccacgacaccgcacacgagcagacggaaacaagcgacccctcagagaggggagaggccaggccgccccacagaccgaccgggcccaaacgagaagaacggcgaccgcagaagaccaccagagaacacaccccctagacagacgagagcaaaagaacccccgcacagccgaccgggacacccacggccggcaacacaacacagaacaacacggggagggggaaaacgacacacaagacaccaccagcgagacggccgggaccaaaacccaaagagaccaaaaaagacaaggcggggagcaacgaaacccccagcaacaccacccaccccaagcggaacacaccagaaaaaacaccaccagcacccggaaagaaacaagcagccagcagaggacacacaaaaaacccccagaacaaaagcaccacaccccagcaacagccaaaaacaaaccggcccgcggcagcacaccacgc

SEQ ID NO: 130793 - DNA, 601 bp, Arabidopsis thaliana columbia
  unsure (1)..(601): unsure at all n locations
tcatacttcacctacttctcaattccactcacccagaacccccatactccactccatacacctatccctcttcccatttcctattacctctctcttatcccttctcaatcatcccatccactacttctatcctctatctcactttcccatctcctcctatactcgaccaccccaacatttccctttccttttgaaccaacaccccccttttaaatttncggggnncccctccccacccgctctctccaaaagaattcttctcccaacaaaaatactacctggcgtctcttttatggactccctatattcttctctctttttgccccccacaacacagtggtcttttccaccaaaatatattcttaaacggggagaaattttcacattccccctttaacaccaaatatcccaaagggattctcacctctgttttgccttgtgctttcccccaaatgggggcccgctctccacgaagacaaaggcttcccctcttttgtctcgtaaaacaaaacaccttcgcaaagaatagtcttaatcctcttggttctttttagcaagcggctaatctcatcgaaaaaggcgtgtggttgacctttttcaa

SEQ ID NO: 130794 - DNA, 786 bp, Arabidopsis thaliana columbia
cccccttgattggacgtccgtccgcacgtaccgcgtcctgaattcccgggtcgacccacgcgtccgaccgatctgtcgttttccaagaacctcgattcgtcgagtattttcgcctcgctactccggagctggagtatggacgtatgaatattggaagtagaccttcaaagcgaaaaccaagcggtgggatcgaatctctccgtgcaatcccatggatctttgcttggacgcaaacaagattccatcttcctgtatggttaggtttcggagcagcatttaggtatgcgatcaagaaggatgtgagaaaccttcacatgctgcaagatatgtataaacaatggccctttttccgagtcaccatcgatctaattgaaatggtgttcgccaagggagaccccgggatcgctgctttgtacgacaaacttcttgtctcagaagatttatgggcttttggagagaaactcagagccaactttgatgaaaccaagaacctcgtcctccagactgctggacataaagaccttcttgaaggagatccttacttgaaacagagactaaggctacgtgactcttacattacgaccctcaacgtttgccaagcctacacattgaagaggatccgtgatgcaaactacaatgtgactctgcgaccacacatttctaaagagatcatgcaattcagcaaatcagcacaagagctcgtcaagcttaaccccacgagtgaatacgcgcctgtacttgaagacacacttatcttaaccatgaagggtattgctgcaggattgc

SEQ ID NO: 130795 - DNA, 695 bp, Arabidopsis thaliana columbia
caggtggtaccaattttgtttccgggttccaaacctgttttttttacttcatgaagggtttttagatccctcaatgatcacccaaaagctcttcaagaactagaagctgagcatttggcattcagggaaagaaaacgacaagacgaaccactcggtcttgaggacgtgaagtcaatgaagttcactcgagctgtgatttatgagacatcaagattggcaacgatcgttaatggggtcctaaggaaaactactcgtgacttggaaatcaacggttatttaatcccaaaaggatggagaatttatgtatacacgagggaaattaattacgatgcaaatctttatgaagacccattgatctttaatccatggagatggatgaagaagagcttggagtcacaaaactcatgctttgtgtttggaggtgggacaaggctttgtcctggtaaggaactagggattgtcgagatctcgagctttctccattactttgttacgagatacagatgggaggaaataggaggggatgaattaatggtgtttccgagagtttttgcaccaaaaagctttcatcttaagatttcacccttactaattttctaaccttttttaaataaaaataaattttagattttttattgcccccgcaggaaggaattaccaggaaaggaacgttatttattggaaaggaaaaaccc

SEQ ID NO: 130796 - DNA, 1015 bp, Arabidopsis thaliana columbia
ggaaaccccccccgggcggggaaaaaaaggaggaggcaatgccccaggaaaagccgttatttttcgacgcaggcgaaaaccacaaccacaaacgagggggggggaaccacacaacgaggggggagcccccacgaagaaggacacagggcaaacgaagagggcacacaaccacaaagcacacgaacgcaacggaaagggaggaaaaaagaaagcacgcccgaaggggtggggaaaaacaaacgggagaagaaggaagcagaggggacaagggagcccaaaagacaacgcggacacgagaagggacggtcgaaaaaacgcgaacagaaaagaacaaaccagccaaaaccggcaagaaaagggaaaaaaccaaggagggcgaagggcgagcgcaggagaaaagaggcagtggggaaaaaccgcggaggaagagcaggaaaaaccaaccggggggaggacacaagcagggagacaggaagcacaccggagataacagggcgcgggcaaatcaccacgaagcaagggggcaccgcgcgaacggcgaacacagacgccgacacggcgaacggagggagagacgaagaacaaaggaagacatcgaggacgaagacaacgagacgaacggagagagagcggggaacccccgccccgaaggcggccgcaccgcccgggtggacgcgaaccaaaaaccggagaaaacacacgaagaagaccaacaaacgcataacaaaaggagcagaacacgcggagaacaccggacagcaaaaagccccacaagaagggccccccaaaaaacggaaacgcggaagagccagacaggcagcccgatcgggggagaaaacgcagcaggggggacaagaagggaaagaggagaaacgaagaggcgcacaagacaaaacccgaaaaaagaagggagaagacgggcccaaacaaagacgagggaaaacagaaacggccccaaacacgaaaaaaagggggcagagagcacacccagaagacacgcaagagaaaaaaaaaa

SEQ ID NO: 130797 - DNA, 1080 bp, Arabidopsis thaliana columbia
  unsure (1)..(1080): unsure at all n locations
gaggggagaaaagagagaggggagagganagggaccggggggagaagaaaatatttttttttttgaaggagggaaagaaagaaaaggaactgaaataagggggtgggtatttaaagaaaggaaggaggggtataatgaatttagggggagcggaggggattgtgagttttttggttggtggggggagagagaggaaggtggatgatgtgttgggaagggataggggatatgaagttgagaggagattgtgttgggatggaatgagattaggtgatatgatgatatgggtatgaaggataggtggggatgattatgtttggagtgatagggagagggggatagtaatggttggtgttgaaaattttaagtgagaagtaggattaggtgatctgtgggggttttatttgtgggtatattaaagagggttaacaatgagagttggcgggataatttcgtggattgggattgggttatgaggttaataaggggagagagaagtagggtttgtggtgatgtgtatttttcgaaataaggtgtaagtagaggtgtaggtatagatatggtgcaaggagattatgtggttggaatgtgactaagtggtgagtaaagatggagtnaggagtggggagtgagtggaataggggaagttatggaaatagggagtggttgtatataaagtgtagagatgttacgttgtatgagatgttatatagtagattcgaaggatgataaagtttatttggagaagatggatatattgaatgatgtgagaaagtatgggagcatgaattgttatgattatgtagtgaatttgtaatatgattataaggagaatgggagtaagtgtatatagagtgtgtgtaatagagagggaggttatatagagtggttattaatgtatttagaaggtatggtatgtgagtgatggatgaatttatatgtgtggaaagagttttagaaatgggatggatgggaaaagtggggattgtttagagggaatggtgtagtgtttgttggattgtaataagtgtggagtgggaatggtgttggtgtggtaaagttagaaatagttggtttagt

SEQ ID NO: 130798 - DNA, 1323 bp, Arabidopsis thaliana columbia
  unsure (1)..(1323): unsure at all n locations
tttttttttttttgacagaaggaatgagttgaagtgattatttgatgtgtgtaagggttgggggggggtgttgttttgggagaatgtgtgtgttggtatttgttgtggattgaggttattgagttgttggttggtgatggtgaatggaggttggttgggttgaggggtttaatgtgtgggtggagggttttgtgggtggtatggggggataggtggttggtgtttggatggtgggttttgtttagttggatgtagttgttatttatggtgtaaagggattgtttatgttatttgtgaatggttttttgttatgtatagtgattaggagagtatgttgtgtttggtgtatgtgttatgtgtatgtgaaagtgttgagaattgttagtgggtgttgagtgagtgatggtgttgaggatggaggtggtgtgtggtatatgtagtgatgagagttggtgtgatagtgagataagatgttgatgagtgagtattgtgatgatgatgatgatagagtatgatgaaagttttaatagatggttattgtacgtgagtggtgatgatgtagntatgatggtgatggtaagaggttggagggtgagttgtgttgaaagggataatgtgtcgggatggtgacgtgttatgatgtgtagattgatgtgtgtggaggtgtatgttagtgggtgttagggtggagtgatatgtgtgttgcttaatgattaggagtgtgtaagtgtgattggatttagtggagtgagtgttggataaataggataagttgtttatgaggtgggggtgtagtgatggtgagatatgatagagtagtgtggatttatatgttgagttagttggtgtagatgaagatagttttggggtgtggtttttagtttgtatgtgtggagtatgagaattatttttgttttatatggtattggagttggattgagtgggtgtggtagtagtattgtgagtgggtgtttgttagtgttttttgtggtgggttattcttaatgtgtgaatgttatattatgttgtgttgagtagggagtttatagattggggatgggattatgggatgtttgagtagatgttgtgtagtgttgctttattagtgattatggtagatatatataanttgagatgttggcggtagttgatgttggtgtgatatttgtatatagtgtatgttgatttgtgtagatgatagtgagtatgagtgtgatgagatagtatatgatgaagtggtgaggagtatatggatgataaggatgatgtagagttagagtaggtgggtgtagatgatggtgttattattgagtatgtgtgtat

SEQ ID NO: 130799 - DNA, 768 bp, Arabidopsis thaliana columbia
  unsure (1)..(768): unsure at all n locations
gccgtctcgtcgtgccgtaccggtcctgtattcccgggtcgacccacgcgtccgaggtggtggtgcggccaagccggacaagacgtgttgtttggcgctagcggggctagtggagagctcgccgcaatgcttatgttacctcctctccggtgacatggcggcacaacttggaatcaagattgataaggcaaaggctctcaaacttcccggagtttgcggcgtgatcactcccgatccttcactttgttctctttttggaattcctgttggagcacctgtagctatgggagacgagggagcctccccagcctatgctccaggttcgatgtcaggtgcagaatcaccaggaggatttgggtcgggtccttcggctagtagagggagcgatgcaccaagcagtgcaccttattctctttttctcaatcttataattttcccattagcttttgcattttacatcttttgctgatttcattctcttccaaccattaacaacaccattatttgttatgtattttcttaaaagagtattattgcttttgtaggctatgttcttgaatttaaaaaaaaaaaaaaagnnnnnnnnnnnnnnnnnnnnnnnnnnnnnnnnnnnnnnnnnnnnnnnnnnnnnnnnnnnnnnnnnnnnnnnnnnnnnnnnnnnnnnnnnnnnnnnnnnnnnnnnnnnnnnnnnnnntggggaaaaacccccttggcggttacccccaaattttaaattcggccttggccaaccaacaattcccccctttt

SEQ ID NO: 130800 - DNA, 778 bp, Arabidopsis thaliana columbia
cgtctgcagcaccggtccgtaattcccgggtcgacccacgcgtccgagtaactacaaaagcgaaatgtcgccattgatgaaacttttcttggagctaaagtgcacgcttacagactcacggcttgctagcaacggcctgacaccatttatccaacgactgataggttgagctaatcaccacgcactgctatacacaaaggagagtgcggacctagggaagattttggctaaccggataacaaacaacactgagccgcatatccctctgcattgtgagatatgagaacgacctgcttgcctttacaggatgcgaccacaatcttacaactgaggaagcagaacagctgagaatcatgaggtccagtgtcaaacaccggaaggagaacgagattgatatccccgagagactgattcagggcggatgaccaatgtctccgcaagaaccagttatatctcttagagccatgggatatccgccctacacgactgtatatatagtctgctggggaaatctatggactcgagagtgtggatgctttacgagcatagtacccaaatgtcttctctcattcgaccattgcgactgaagaagagttagagcctgttactcaagaccacaatcgccttgctgtattggactacattgtgggccttgaaagcgacgatcacgtgtatacatatgatgggaataatagcttaaggccgtacaaggggcacccaacaggtttgaagggttcaagaagtcccattaaatcccataccacgctggaatttttcc

SEQ ID NO: 130801 - DNA, 645 bp, Arabidopsis thaliana columbia
  unsure (1)..(645): unsure at all n locations
accccnaatttttttttagaggtaaacccgaccctggttaccgatagtgttgcgtcaacaaccctgctataggtcggggaccaacacattttctttttacaaccgcgaaacctgttagttttcccagacatgagtgggaacttcatcttgcatatccccgaagtaattgtgatcaggacattcacttcctcaattgtaatggacctctatctctaaccaatactatctgacttactcactaactctaacaaacttggagagactaggatgtcgtgcccggcccgtcaaccctgggatcacagaatctacctcgtcgaacaacaacgaagaaccgagctaatgctcgaattgtaacaccttccggcctggggaacacggaaggcctcgttttccaactagggccctgaacggaaatcctatcacccttggggtggctatcccaaatccttttgaagacccttttcatcagactgtgggggtgcttccaatatgggggaaaaatatgttcgtgcagtataatcacccgattagacttctttatgccaccatctaaaaacgccggctctgcctcaggccagctcgcccgcgtttgtcgtcgtgaccctttcactaaaattctctccgctagtctgctacaaatttttc

SEQ ID NO: 130802 - DNA, 769 bp, Arabidopsis thaliana columbia
aaaggaagagaaccagggtacaaacgcagaccaaacacttttaaggtcccaaggccgacggacaaccaaaaaaaacggaaccacaaaccgaaaaccaagaaagaacctcaataaaaaagccgaaaaacaaaccgagaaaatgacacacagagggacagaaacaaaaccagaaagaacaccaaacggaataaaaccagaggaaccaaaaaagagcaaaaaacaagacagaccaacacgccaaaaaaaaacccaaagcgcaagaaccaaaaaaacacaaaaaacactgaagcaacaaaaagagcaggaaacgaaacaccaacaaaggacacacgaagaaaaagggaaaaagaaaccgacaagccaggaagctacgaaaaaaaatcaaaacaaggcaagaactaaaccacaaaaggcccgcaaccagcaaacgaacacaaaaaacaaacaacaaaaaaccaaaaaacaaaaaaaaaagaaacagccgaacgcaccagacgaaaaaaagacaacacaaggaaaaaacaaaagaacaccagaagaaaaagagacacaaccaaacgaaaaaaacacaaaccaaaacaaccaaaagagaaaaaaaaaaaaaaaaacggaaaaacaaaaaaaaataagaagaacgacagaaaaaacaaaaagaagaaaaagagaaaaccctaaaaaaacagcgaacacacaccggacgaaaaaaaagaaaaaaaacccacaaataaaaccagaagaaaaccaggaaaaacaaaaaagacatcacaaa

SEQ ID NO: 130803 - DNA, 798 bp, Arabidopsis thaliana columbia
ggtccgtctgttgtaccggtccggaattcccgggtcgacccacgcgtccggttactgttggtgggaaattaactgcattggaggaacatattgtcgctgcaaagtcgaattgtttgtttgaagggactgacttcaagcttgcatcttgccatcatcccttgaatgacaaagttgctgaggaatgtgggtttacatcactctccatccgagttgttgaggagttagtgacctttagtccttgccctccccttaaacccccagaaatttcaaatgctgggaagcatctctctgctgcagagtttcattcggtcctgcagagtgccaatgggaagtctgagaataaggaacttgttttgcttgacgcgaggaacctgtacgagacacggattggaaaattcgaatcagaaaatgtggagacccttgatcctgaaatcaggcaatatagcgatttgccaacctggattgatcagaatgccgagaaaatgaagggcaaaaacgtgctcatgtactgcactggtggaatcatatgtgaaatggcctctgcatatatcagatctaagagtgctggatttgagaatacttttcacctctatgggggcatacaaagataccttgaacaatttcccaaggggtgggttcttttcaaagggaaagaacttttgtgtgttgatccacccgattctttagtttggggaggcttcaaaaaggagggatattatattggggccaaccttggcctttttttctttccaaacgaattcacccttttggtacccaacttatttccttccacccctt

SEQ ID NO: 130804 - DNA, 787 bp, Arabidopsis thaliana columbia
tctgcagtaccggtccggaattcccgggtcgacccacgcgtccgacacactttctcttctcttattttctcagatcttttaactcttttctctacctatattcaaatggccaccgtcgaggttgaacaagtgactcctctcttctcagcgatcctctacattgctctctcctcctttcttgtccacatcctccaacttcaagcgtctaaaatcgagctcaatcttgggagattcactacgactagcaccaaaatcgcaacttaaagccgcaaaggctaagagtaatggtgcttcaactgtgaccaaatgtgaaattggtcgaagcttggaaaattttgtggatcaagaaacatctgaaaagggattgagaactttgctgatgtgtatgggagaaacattgacaacaataacttttaaagctaaaaacagttcttgcggtggaacagcttgtgttaattccctttggtgatgaacaactcgctgatgatatgcttgctgataagcttctctttgaggctttgcaatactcgcatgtgtgccagtatgcttgctctgaaaaaagacctgagctttaagacatgggaagtccaatggaaggggggtttagtggtggcgtttgatccaattggatggaatcaagcccttgggggatccaaaatttcaattgggggggaacaccatatttccggtgttttggcccctgggaagacaaaattttaaacccgggaagttcacttgggtaaggaagattcaaagtgtggcttgcaagtcccattgggggaaattt

SEQ ID NO: 130805 - DNA, 798 bp, Arabidopsis thaliana columbia
acaacgaacacaccagaacaaaaaatacaaaaaaaacaaaatacagaaaaccaaaaaaccaacaaaaaagacaaacacaccaaaaaaaacaagaaaaaaaaaaagaaaaggacgagcaaaaaaacaaaaaaccaaaacaacaccccccacagcgagacaaaaatgatgacattgccagggccggagcgaaggcagggaaaacccagacatccaagacccggccgagagaaaacgcagaagaaacccaaacacagccaccacactaaccgaaactgaaacagagaagcaaagagatgcctcaggaggagataacgccgaaaaaaaagaaggctagcgaagactacaacaaggcaagacccgctagcaccgccaagagcggagccgacaaaaacgaagaagaagcggataaaaaagaagcggaagaaaggaagcacaataacaaatgaacgagaaaggacccactggttaacacgaaaaaaaacaggaacttccaaatacaccctgaaacaaggaaccaaagccaatgaccaaagaaagagcagattcagaagcaacaaatcaaagaaagaacggcaaactaacacctgaacaagagcctgaagactaacattgagaaaaaacaaaggcgaagaaaggaaagagagaccccgaagctcgaaaaaacagacggcgaaaaggacacaatgctgggaaagagaaaacttgccacgcaaaacacaggaaagaaaacatggcgaaaacgcaaaaaaacacacagccaatgtaacacgaaaccacagagaacagaaaaacagaaac

SEQ ID NO: 130806 - DNA, 200 bp, Arabidopsis thaliana columbia
cccgggttcgagcccacgaccgtccgcagtaggtactgggcaaaggaggtagacgttcattagtcacagctccagctgagtggttattgtattttattgactgcgtactagcagacgacgcgcagacagtgatagtcatgtccgagttcctgatgagaaggatcggagcaatgaatcccactcctctagtatatcatgca

SEQ ID NO: 130807 - DNA, 201 bp, Arabidopsis thaliana columbia
acgtttatcgtgagccgcaccaacctatcacatccgaaggtgtctagtctctcaacagtcacacatagtgggcttctgcccagcacatggatcgcgagactggaacgacgatacacaccacgggcgcagtcaatcaacgattcatcgctgactctgctcatgtcgacaacatataattatgatgcgtgccgcgcactccat

SEQ ID NO: 130808 - DNA, 707 bp, Arabidopsis thaliana columbia
  unsure (1)..(707): unsure at all n locations
gtgactacaagtagtctcacagaccgtattttcccgggagcacagttaccaccgttagtccctattctctctaactaactccccccctcagccnccgggcacacacaatagaaatttcctttggcggtaccggagcggaattgccgggacgaccccgcgtccgcgaggcggggctcaaggggaggtccatgcgcaatcactgggggaggtccattgatgcgtcacagcgcgggagcgctagacagacgctactcgggagcacggaaagaaccctcgggtagtggcacgaccagaggggtgtgctaagacggatgaaatggcggaagcagcaactgaggaaaaccgagctgaactctgccaagaaccgggattaagagagtaggccggagaagctacgctggggatggggtaaggacgtctgagaaacggaggccgacctcaacggcgaaaaccagggggagcgagctaccgatggcggggaaccccagggggccaagcttggacgcggacaagagtcggccctcccgggtgggtaggtgtccgagccggaaccatgggtgcggccaaaagagcagagagaaaccttcacaagctgcatgagatgtgtacacaacggcccggtgtacgagtaagcggtgctactagctgagtaggcgcatcccaagggggacgcccgggaccgttggcaatggacgacaaaataggaa

SEQ ID NO: 130809 - DNA, 635 bp, Arabidopsis thaliana columbia
tcccatctgccgtaccggaccggaattcccgggtcgacccacgcgtccgcaagactctgtttgtgatcaacttctaggcccaccattttttttctcgcaactaggcgaggcactttgagccgtatggtcaaatggttaatgatagcatcatatggactttcgcattcatccaatacgaggcacaagaagattcttccatagcactgcatgctacacatctcagtaagctgatgttatacggcgatctcaaaggagtatgcagtgaaagatgatgatctacgaggatctggatacaggtctgaacgactgcgtgatgggatcacctgctttgatatggcgaccacccggtgcttacagaacataaagggcaagtcctggctatggccgttgggctagtccagcatctcacaaatcggaaaggactagttttgttatagacgtggaatacgcatcccccaacgttacaagagacccttgcttaccccacattacaagagggatgaccgccttagggagagagtggcttgtccaaataatggagctgttaggacccggagaccccgtaaaggacttgttgaaagcacgaatcctcctccataatagaagaggagggtatagaggagacctcccccttc

SEQ ID NO: 130810 - DNA, 639 bp, Arabidopsis thaliana columbia
gccgcaccggaggggaattgccgggacgacccaggcgtccgacaactggtggtcaacgatacatggtgtaaacagattgttcatttatggctgcgaaagttgcgttattattgtctgaccgacgagttctgtaagctctctattacatcacaaagtccgattcctaccttcttaatgcacgtggagagatggggcgaaagcgaggccccaagtcccgggaagctaggagctgcctgcaataaagacttttatgtactcccacatatggtatgattattgaaccagggctgacagaggactcttgacagtgctgccccgtgctccgccatgagggggaagaatctctgccgcataatgttatgctaccaacgcttatgaatccgggttcgtgaccgagcagaacatgtgccctaactcaatgcaggcaatgctgctcatgccataggcatcagtgtctgtactgcatggaggacagccccaggactagagcccactgatatttcggcgcacgaagctaaacgcgccagggtactgcttagggtacgcgcgtcatgaaactgaggggcttgagaagacatgcttatcaaacgacaccaaaactggctgatgcttggaaagacggtagacagatggcttgtt

SEQ ID NO: 130811 - DNA, 641 bp, Arabidopsis thaliana columbia
ccgtacccgactggaattcccgggttcgacccacgcgtccggtcttcctacttgttcctttttctctcccactccattttctttttttaatcatgaacctaggggtcggcttggtgccataaccctacatatagtggcatccatcctatattgttttcatttctcctcctccgctttagctcatctcccgctgcatatcgctttccatggtgggagcgggagagactacgacggacggaggggcatgtgacttcgggagcagcttttgcggaagggggaattcaagacggttgtgatgatgctcgtagcaattggcttgaatccttctgcgatagcgatccttctactctgactagacgcacgcatgagtatcatttcctacgcagtcttgagtggtgtcaaagaagctcacagtgccctatgcggtggcgaccaattagcggaaagaccctacagttaggagtagttgaggctgtgggacaggagaggcaatttccgctcaaattccaacctgcaaatgccccccataatattggacactcccacctacttgggggaatttttggcaattattcaacctttttttcgcaaatggtgggggcgggggatcaaactcgcctcggaggtatctgtaaaacgaa

SEQ ID NO: 130812 - DNA, 1030 bp, Arabidopsis thaliana columbia
acggcgggcgccgaaaaaaaaaaacagagacgaacgtggagggaccgaagaagcgacgtaggaagcgggacggaaggaagacgggaaccaaccacattgagtcagccgaagaggaggagaagcaagcagcgcaggacgcgaacagcaaataaggcagagggcagcgaagaaacagagagaacgcagacacccgaaccaaagaggggggggagacaatgtatgacattccaatggaccaagccgggagaaaaaagaggaaggggaaacaaacaggagaagaacaggagaggagaaaagaaggattattttaccgggcggcacgaagaaagaaacaaggaggggagagaaaagaagggagaaaaaagaagcaaggaaagacaatgagggggggaaaagagggaggaggaggaacaaaagggggggaaaaaaaggaagcgggggaggccacaacggcgacaggcgaagaaagagccagaaggaaaaaaagacgagacggggaacagaggagacgaagggacgaaagggaagggggaagggaagagggacgcagaggtaagaaaggcagaaggaggcagaaagggaagcgaggaaagaacggcgaggggagcagcagaaaaaggaaggaggacaacacgatggggagcagggaaacgaaaagcagagccaacgagaaagaagacggaacacacgagacgaaaacggggcagaccaaaaaatacacacaggcgcggcagagaaaacaagagtgcaggaggaagacgaaaagaagggagcgagagcgaaacacgaaaaaggagggaggaagaaaacaaaaagaggagacgaggagagagatagcaaaacaaccgtgaaccagaaagcgagaaacaaaagtggacgagaacgaacgaggcaaagagagaaggaaaggaacggcagaggcaaacagacaacacgcagggagagaggcggcaaagacgaggatgaggagggaagagaggatggagagaaaagcataactgagcacaacagagcgaggacagccgacgac

SEQ ID NO: 130813 - DNA, 748 bp, Arabidopsis thaliana columbia
  unsure (1)..(748): unsure at all n locations
ggacacggacacgcgaattacccgggatcggacccacggcgtccggacgtgtagcatactgaatgttagtcctgctgggatagcgcagacatgcttttattttactctgcggnggagagatctgtccatctggagaggagagagtaatgagctagccctctggaaagaacgcacgctacgagtgcactatcatggcgcattggtgcatcacagaggagttaggctaaagccagagtctggaccgaactaacagcagttcgagtggcctgtagaacacaacggagcgtaagcgttgatgtacaagtcgccagcgacaggaagcacacattggtggacggaccgtcactacgtaaacagacctacatcgaccagggagggcttaagaccggacacttagcacaccacctcacgatgcgcacgtgatgggtggaatatacggcgctggagaggaacagcatcgagcggatggggggcatcacatagctggcgaatcagcctacatgtaatcaactctcgtcaaggaaaggagcatgctctttgcgtactccccaaaggagcttgggccagtgtccaggaagaacaagtggggaagtcccctggtggctgttaagtgaagcgtttcaatttgttaggcttcctgggaactgaatcctcttgggtgctactcttgggggggtgctacagctacaggtgcctgagaaacagctggggctcagcacgtccagactatttgcggaacctggttagc

SEQ ID NO: 130814 - DNA, 1421 bp, Arabidopsis thaliana columbia
  unsure (1)..(1421): unsure at all n locations
gaacagcagagcaaatccataccagtgcacgtatgtgaactggcgcgcaccacccaccgagttagggcgcacgacttccatgagaaactcgaagaactgcgcaaggtatccacttattgacactgctacactacaactacatcccccagggaggagcaacccattggaatggccctttccctatnggaaccagggcccactatggcgggctcagagacaataccacaactcagacacaaacaaaatccagagcatcgtaatagcataaaagcgtaagaacggcaccacaatttttttatttttcgtcccacaacaggcggcgacgcatacacattgccccaacaaggagagtgtcaatcactgcagtgcaaccataacgctcagcacatacatcgccaacctgagccgcactgaatacacagcctagtaacgcccagacagtaaaccgtgggacgaaataaaaaacgcactgagcaagctcgaacatgtcactggcgagaaaaaacacatctgaacggacataaacagaggggggagcgaaaaaacagcgccaagaaggtgaagaaagttcgagaagagggggcaagacggcgcacggatggctagacatgcggtcaagaggaaaaagaaaaatatagtgatgcgtcaacgaattacgcagccgacaaatatcaacttaaaagcggacggacgagagactctaggcgcacacaagaaaagtctggaaccgttgcgacccacacacggtatcgaaagacgacgacagcatcaatgagatgtcgacgaaagatacgcacgaacgaccgacaaagattagccacacagacaagtaaaaatgttctcaggaaacacaggtagaatcgcgaagctagacaagtatcacaacgtggctcgcccgacgctaataataaagtgtcgctgcctgataaaggagccacccacaaggagagctgagcgatacagggtgcaagctcaggaaagatgctgtagagaatcagccgcaaatacaggatggacacgcgagaaatgatggtaacagcgaatattgctcagagcgatcttatcggagcagcaacgcactcacgcagcgaatcgatacagtagatgtaataggtactgtgtgcgcgtcacctagagaaagacaaagacgagcgtacaccgcactacttcgtactatctgtactatagtagtagcatggagtgaggtaacacgacgctaatatacatcatcgttcgtcggggatagcgcatactgcagcagagctgacacacacgagagcatgacgaaaagacgttcatgcaacgatggggtgggcacgagacgaagcatagtcatactcacgtagcgagcagtggtcaggtctgtgtacgcaatgtgtcgtcgcgagtagcaatgaagcagatccctacatatcccgcag

SEQ ID NO: 130815 - DNA, 578 bp, Arabidopsis thaliana columbia
acgaagaccgcggcactgaccgggcggagaagagaacacgagagaatgacggccctacggccgaggaggaacggccggggcgcgccacaaacccaggtaaacatatcctctccccagggcgggggagacccaattggaatagtacggtcccttgggcagcacccggagggggacggcatcgaaagcctagacatcgaatacgcggacgccctgtttggacactaacccatccctttaaatttccgggtaccccaagctgtatgtcagccccaaacctggatagatggtggaagccttgctttcacgacaggatggccataaccggctgaaactggatagatctcccaagattgaaggaccgaagcgaacactcaaggcgctaagcaggtagtgctagacgaaagccggatcaaaccaagagggcgggtccgagtagagtaacagggcaaaggcagagcctcatgctgaggagagtgcaaccctcggagaaagctgattggagctgatacaaaaacggaacgaggaggcgaggggcaaacgcgaaaaagggaagccacacagggcccatcgggcggcta

SEQ ID NO: 130816 - DNA, 1000 bp, Arabidopsis thaliana columbia
  unsure (1)..(1000): unsure at all n locations
aggataagaacatggagaaaatatttattaattttttagtttgtttaatgtttgctttttttttttaaatattatttagtaacataggttttgttgatatttatggaagataagataatcttattttattaatagttatttctaaggtatttatttttgttgaatattatttatatgacataatataataatcttttaggtggaaaatagtttattaatgtttcaatcattttgatgttatattttgttaatatctatctaagttgaataaatgtagaatttttattggtaggggtgattagcgttatgtatattctgtatgaatttataaatggtggtgaaaatgtttttattatttatatgacatatatattcgtttagttttttattcttcttagtgagataattatcttatgtttggtggattgacattttatactttatttcattgtgacttctctgtattgttaagttttcgtgctcgatataagtgtctgattacttaattagagtatggtgtcagtgatctgatatgttgatttactatggtagtttgtgagaatctcacattatatttatattatggtggcaagctctatatacatgtgactatagtgtagttatttcaacatgtgagatttgtttgaattttctgcgtctattatgaatagtttatacatatatatctttngtgattggtatactcacatctgttattgctgtgtctagtaacatggaggctcatatctgtgatgattatacatatctaatggataaattattattatattgaatctactacttcatctattttttttcatgtatatcttaaggtggggtttcctattatatatatgttattccttcctctgttaagacttttaataaatgtgtgtgtatctgatatcaattagaggagatgggagtacatccattttttgtggtgtgttggcatgagagtatttctttatcataaatgatgtagctataattatatggc

SEQ ID NO: 130817 - DNA, 239 bp, Arabidopsis thaliana columbia
agaatgggtggggtgggattaagacggttggatggaaggagtttgggtagagggggtggggtgaggagaaatgggttagggaggaggtatggaggtatggaagggatgcactgggtggaaattggctatggtggtggtgtggtgggggtggactggggtaaagggaggtgggattgggtttgggtggagattggtctagttagggatttaatggagaaagttgggggaacggaacaaat

SEQ ID NO: 130818 - DNA, 1259 bp, Arabidopsis thaliana columbia
  unsure (1)..(1259): unsure at all n locations
acacccgcacagtattttttttttattttctcactacgcggaactccgcaccctcactaatacttcactatctctgggtcctctatactgatacaactactacatcaacaacctataccaaatatttctttaatctctaataatctctctatatcgcctaacactaatattcaatacttatactaagtctaacacctatacaattcatcgtaactctggatcaatccgagcatgtaatcgcatttgagatcgttctcgatccacctacactacacttcntcgtagatgctctaccacattatattgactattcactattctcttattcgcttgtctttactcaattaccatatatttatctacatatcactcaacaatccaatcagtccatattaacatgtatagcaatattactctatctaactacctatatctcacagactgattctgtacaccacgatgtacatagcaagatctacactcctcatcttgcagaacatcccatactcatatcataatcattcagaacgttagactacactactgaatacatctacatcactcgacaatctagacggttataaactccatcttatacgtagtcgctacacctatgtgtactatataatacaatcccgtcctatgcatcgagacgaacatcgtcaaatcatctgagcacttgcattcatcttagtaacaactcaatacatcatcttcggtcagatgatcttctactatcataactcaatgtctataacgccatcctaaatacacctcatttctacataatccttaacatctctcttacatctttcctctcacatctacacatctcgctatcgacaacgccgtaatcctatctctcaatatccgcgttcctataaatctactgctaattcgaaattaaccacctcctactgttttcatatcacaacttgtccttttctgcacatgcataaacacttatccataacttccaatctttaattatatcagccttgtactattaaaatctatcgtcgctccatcatgaccaatcaacgtgtataactacactctcctttatactctcattaaatacaccccacactttctccaataaatgtacacattcattcctaaatttaccacttattataagttcaatgactaaactctcccttacacatccataatacttatatactgatgcaatagacataattttctttccactcctacaacaatttcaccatgtatctacctaatataccttcccc

SEQ ID NO: 130819 - DNA, 1200 bp, Arabidopsis thaliana columbia
  unsure (1)..(1200): unsure at all n locations
ttttgatttggcatacacgcgcccggaatctgggatccttcacagcgaccgaccttcctatttattttttttttttttttaaacaacaggcaatcacctacagggcgggtgtatcgcttcggtccgcccccctggggggtatttcaccattaaccgggaagataatttatgaattcggggggcgggcctatcagaaaagcctccctcgcgtattaaacttttcgaaagaaaattcttctatcaagcgnnccatttttcttcctggtacaaaagaccataatcgactgacgctcaatatgttaatattacggtagatgctactactaactggtggttagcgtgaccataatatatctcacagtaatactgcacgtagtctacaatacattcacaaactaatgtcctatttgctgatcgtatcacggtactgtcaccataccacccgatatgtcctatcttgcacaacaacaaatgaatatgtgttatcatctaaggtatgcggacttcatggtaaattacacacctcctcttcctatacaacagagctctgtcggtggtattatatgtatgctaacaagatcctccataatagcgtcgcacatcttctcggtcgggtcaatctttcttatatataactagctgttggtgagactatattatacctgcctcatacaaacactatttactggtatacactagtcacgcagagcgtctcttaaagtgtgggtcaatgcggcagaacatatatctctactatgtgtgagagaatgccactacctcttgagcggagcccatcatatagtgtctccgccaactgatggtttaacaaaatataagcctctccatcaaccacaatttatttttgggtaaaagaacaagtaaatcttttttgtggtgaccattctcgagaatacaaaaattcctagacggagatatggccttcctctccccgggttatttataccatcgttgagggtgatcctatcggcgtggggccacaatttaaaattatatgagctctgggcccccacacaatcctagacccttgttcgttctccctccgttcacaaaatccaatattatttttttcgattaatatgcccccgtcatggctgataaatgaataaggattgggtcaccactatctggcctactatttcctggggagccaaacacaccacggctcttcttctttgaaat

SEQ ID NO: 130820 - DNA, 787 bp, Arabidopsis thaliana columbia
  unsure (1)..(787): unsure at all n locations
taccgctccggaattcccgggtcgaccccacgccgtccgacaaacaacatttcttgagattggcgccggagtcaagggagagggttgtagagcgactccaacggcttgagtatggtttctaccgggcatactcggaccggccatctattgggcttaaaggtgaagcagcacgaacggggtactcgtccgggctttgaccgttgttacccaacgactgagagacggtgctgatctgagtctctatcagcaacaacaccttaaagaggagatccaagtcttgtgccggcagggatgtaaggggtacccgtataaggcggtggggaatcatttcaccgccgccatacgtcttcatatgttgttgcaagggaacgacagacagattggggagtaatgacttgcagacagcgcgcttgggtttgtcggtcacagctcgcaagcaggcttacttcgacagagggcttcgctgtatgagccatcacactttcactctgggacaaaatgatctggagtgggggactcctctgtgggtggtaccccagactgtattaccgacgtggtgacagtggatatggagcaatgattnngcgccgatttcccaaagacaatgtttccttcatgtcaccgagcctggttccttctttccttgagacacgtttcttatataaaacgctttgataggtcttatattggcagagtccttaaaacaggagattccccagcttgggctacaccccaagcgattctcgcatgtttgaaaggggagtacactttctcaagttttttttac

SEQ ID NO: 130821 - DNA, 644 bp, Arabidopsis thaliana columbia
atttggttgtactaccgtccctaccaccgcaatcacccgccttaaagttctaactttttttttctatggcaaagactggaaggattggtggtcttaaacatagattacgaatatcctcatcacacctttatcgcccaaaggatctaccagatggctatatacatacaatcattgcctagccatataccactagctattgtacgtaccgataaactgtattggttacaaaattcagtccgaccaagagccgtggagttgactgtgcggagcctgtatcagctttgcgtgggcattggttgcaagatcttcattcttggatactgcaccggcggtctataagaggtgccataaacccagccgggacttctgggtcattcttacccccgaaaggttttcgttctaaagggcgggagtctttacctgggtggctcgcgagatttggtgtcgctaatctatgttgcgagggtgggggacatgcttgaaatcggcctattatatcagaaaggctctactaaatcacgttacttggaacttgcatgtttaaccatcatttgtattggagggttcaaattcacagaacactctatctgtctctagaatctgccttgggactccgagggaccttttcacctcaactattattc

SEQ ID NO: 130822 - DNA, 627 bp, Arabidopsis thaliana columbia
ctttgccggtccccaattcccgggtcgacccacgcgtccgcgagtcacggttcagggtgaagtcattgagcaatcatttggggaggcttacttatgctttagaacacttcaacgtttcacagcagctactctagagcacggaatgaaccctccgatttcaccaaaacccgagtggcgtgctttgcttgatgaaatggcggttgttgcaactgaggaataccgatctgtcgttttccaagaacctcgattcgtcgagtatttccgcctcgctactccggagctggagtatggacgtatgaatattggaagtagaccttcaaagcgaaaaccaagcggtgggatcgaatctctccgtgcaatcccatggatctttgcttggacgcaaacaagattccatcttcctgtatggttaggtttcggagcagcatttaggtatgcgatcaagaaggatgtgagaaaccttcacatgctgcaagatatgtataaacaatggccctttttccgagtcaccatcgatctaattgaaatggtgttcgccaagggagaccccgggatcgctgctttgtacgacaaacttcttgtctcagaagatttatgggcttttggagagaaactcagagccaactc

SEQ ID NO: 130823 - DNA, 812 bp, Arabidopsis thaliana columbia
gcaaccgagcagacggaggaccaggacacacacgccgcaagagacagagcagcgccaccaacacgagcaggacacaaaccagacagcggcagcacccgccaacagggagaccaccgcaccccccaaggagaggcccaacaatggatggcccgtgccagaggacccgaccggaatcccgggtcgacccacgcgtacgacaacaggcggacgaagatgggatgccgaacgagacaccaaatgtattactaaggggggagaataaccaaccggaccaagacaaaacaagccaaggcgagacgacttgcaacaagtaagctggcgacgccgcgaagccgcagcggaaagggggggaggggggaagaccacacgcggggtacgaacgagcccaccaagagagaaaaggaaacaccacagggagaaagcaaaacacggggggagacagaagacgcggggcgcagccgagaagagcgaggcagggcaggagggagaagcaaagggccaaagaggcgggagccagaggatcaccaagggcgaaaggggaacatgccaacaacgaagcgagagcagaggagtggatgagtgacaggggcacgggagcagaggatacgggagacaggccaacggggaaaaagatacaaaagacacgagaggtaggaggggggactgaagccgcgtggacataggacagaggaggcgccgacaagaagcgggagggggcatggggaagcccgggaagaataggaagagaacggaggaaaaggggatcgcagcgagcaaaaggggaagcaaggaagggcgcaacaaatggaacc

SEQ ID NO: 130824 - DNA, 394 bp, Arabidopsis thaliana columbia
ccgggtcgacccacgcgtccgagagataaaggaaagactagcgctaagggcaagccggcgatgtatgatgtagtgtgcgacggcgagagcatgtatgaagctgccgagacaagggagatgacgtatccatgaagaatctgtacgcatcagcagcgtatccaaaagagggaagaggagagtgcgtacggaggaatcggattggaaggtctcgtaaccaccacgcgaacatgacaccaaaacagcgggcatgattctcgaggacgaagttagcatctctcctccgagatgctagcggatgagacacaactgacgcgcgcataagaaagaaaggacggaatgagcggagtgataacaagtgctattggggccgtggagatgattgcaacggaagttt

SEQ ID NO: 130825 - DNA, 1082 bp, Arabidopsis thaliana columbia
aatttgggaaaaaaaaagaaaccccaaacgaaggagggggaaaaagcaagcgaaccagagacgccaagagggaggaagggacgctttaaaagatgcagccagaagaacgaacacggcaatcagagagagcgcaggggggcggggcaaaaacaacaagaaaaaaggcgcaagaagagcgacaacggagaaaagaagaaggcagggggagaagagccgaggcccacgagagaacagcgaagaacgcgcagagaacacacagtgaagagagaaaaaagcgaacagcgcgcaaaagaggggaacgaggcagcatgcatgacaacaacagcacagacaggagaccagagagaccagacaacgagcgaggaggacagggaccaagggagctaaccgagaaggaggaccactgagagcaaagcagaggaaaacacagagcagacgagagagcagcgacgcaagacagaacaaccgatacaagacagacgcggaggagacgcaagcagaggaacacgaagacaccaacggaggtggcacatgaggaaggagagaacgagacaagcaggacacacaaaagggacacaaccggaaaaggagaggaagcgggcatacaaaaaacaccaggaggagacggaggagaacaagcgaaacggcgagagacgacacagagggcgggacagacagcggagacaaaggggccgagacgccgaccagaaaacggagagaagggagcaacgagaggaagaggggacaaacaacagcgggggaaaaacggggagagcaggggcaagaaaaacgcggcagagaaggggcaagaacagagacgggaaaagaagaagagactcagagggagacacagaggacggaaaaggagaaaaagaaacgaaagccgacggacgcagcaagcgcgagggaggaggagcgaggaaaaagacagcgcggaggagaggcgagagcacgcgacgcgagagacagaagaagcaggcgcagggggagaagaaacggggcggagacacccagaaaaaccgagagggagagaaaaaagacgaagacggggggacgcgcgagaggaacggacaccaggagga

SEQ ID NO: 130826 - DNA, 702 bp, Arabidopsis thaliana columbia
acccgaaccggtaattacccgggatcgaccccacgccgtcccgaaggagcaagactgaaaccaaagagccgaagcatgaagcactgcatattctgtatactcgacgagcagcaacgcacgcccatgattgcactccatctgggcaccttcgaaaaccacaaaagatacccatcgagcagctccaacgtcttatatcctttgcaaaaccagccacaaacattccttcacctcctctctacccgtactcttctcacatcagcccggctctcgcctcaaattcttctatcccatctcccacctaaatccagaaactcaactgactggcctcacgaaaagactatgaaaatctgcctcgggcactacagcagaaagcccaacacgatacgtccacaacatggcacccaggcagagacattcactgatgtcggagaccctaaagacctaatccgcaggacaattcccgaacgaaatatcaatctactagccacgagcgatcaacaaagcctcaaaaagtggaccccaaatacagaccgctctctccttggcgtgaagaaaagacttccccaaagaatcaaagactaagggaaggtcaccacaacccccaccacatcacataacaaacctttcctaattgcgggcatcaaactcgccgcaaacggccgccacatgtaatctccggcgggctccgcaccgaccctcaag

SEQ ID NO: 130827 - DNA, 1123 bp, Arabidopsis thaliana columbia
  unsure (1)..(1123): unsure at all n locations
ccccgcccaaagaaagaaaaacgtgaaggaaggaaaaacaacacgagcgaaaacaaacaacacccaacgaggaaagacgacaaaacgaggaaaaacaagaccagaaagcagcacgcacaccaacccgccgggaaacggatgaatgcaaggcgtgggaagaaccggagcgagaagacggagcgcgcgcacgaaagccgggggccgctacagcggacgccacgcaacgcacgcgtgcaagcgacgacaaagaccaacgaaagagccaccaaaaggcaaaacactggccgacgaaacacaacggagagaccgaggaaaacccaggcgggcaccccaaacaaaagacggcccagcagcaccagacccaccagaacggcccagctggaagagaaaaagccgcaaggaggggccccgccaacacggaggcgaccccaaaactcccgaaaccaggagaaggccgcccaaggacccaagaaaaaaagagagcgaaaaaagagggaaccgccgcccccccgaggaggacggccggcaaaaaaagacggcgggcgggcagacggaagggaaaaccgccggcaagccggcggaacccgcaaaacaaccaaggcacaagcgggcccgccgaagaagacccccgacacaccacaagaacggccctacaccgcaccaccacaaaaaacccgcaaagcgcaggacccaccgacgaccgacccgggcctgaaaaccccccccggacgcaaaggacccctccaaaaaaaagccgaggagagaggccacccccaccggcataaggggtggaagcacccgcaaaaaaacagggtgggcaaccccgaacggagggcaaacccaagccggaaaccccccgaagagaaagaaaaccacatgaaaacacaaggggggagggaacagggggacccacaaccgataaggntcggggagcccaacgacgggcccccaggggaaaacggaaacgggggagacaaagacgggacccctcaccccgggaaccggaagcggggaaagcaccccaaaccgcgaacaccgaaaaaaaaaaagggggggccacctccccacaggggaaacaccaaaaaaccagggggaaaaccaacaaccaaaccggaaaaacccc

SEQ ID NO: 130828 - DNA, 392 bp, Arabidopsis thaliana columbia
aaccggaaccgggaatacccgggacgaccagcgcacaagaaggcgggcgcgcaagggacccaaaccagagccgtttatgcggaggagaaccgacgaaacgaagcgagagagaacaggcccgcagagaggcacaatggaaggacagggcgccgaaaaccgccgggaacggcacccgcaacggggacacgagaggcagacgaagaccgcaacgagaccagagccgggaaggggacgaccgaggaaagagacagagggaacacgagcaagccacgaccgcatcacgacccgaggcaggcggaggcggccacgcacaaggcgacaagaccaaaaccccggggaaaggaaacccggaaccccgggccaacggcggagggaaacacccggcgaaaaac

SEQ ID NO: 130829 - DNA, 631 bp, Arabidopsis thaliana columbia
  unsure (1)..(631): unsure at all n locations
ttccgtttgcggtaccggtccggaattcccgggtcgacccacgcgtccgcgcccattttcccatcaacgcctccatcggcggtgactgaaagtctatcgagatccgtaacttccttggcgagaagaaggtgaggaaggtagagatgttggatggtgtaaccattgttcgatctgagaaggtgaaggatgagattgttcttgacggtaacgacatcgagcttgtttcaaggtcatgcgctttgatcaaccagaaatgtcacgtgaagaagaaggatatcaggaagtttcttgatggtatctatgttagcgagaaaagcaagatcgtagaggaagaatgaatgcccatatcatcgtcttagctcctatttcttgtcttttgaatgttagtttcgttttatggaccaaatccaccggtgttgcaaaactctggctatcccttgttccctttttgtgttcgagattttatttacttatgcacaagttttggagacgagctatcattttcacctttgcttaattaaatcatatcgtgtgaaaaaaaaaaaaaaaaagnnnnnnnnnnnnnnnnnnnnnnnnnnnnnnnnnnnnnnnnnnnnnnnnnnnnnnnnnnnnnnnnnnnnnnnnnnnnnnn

SEQ ID NO: 130830 - DNA, 401 bp, Arabidopsis thaliana columbia
gaaccggaaagtaggaggagcccaccccaagccgagggaaccagcgaagcggacggggcccaaaacgagcgaaacactttttttttttcaaaccactacaacttatccaccacaagctggggaggagaggagaatgacgacgacatgcccagctctaaaaaaggcgcaatcggactgcaatgcgatgaactgaagcagacgacggctcagaaacgctctacgctaaccgtactagatgacatcacaagactccccaggcgcctcaccccggaagacctacggagagacaagatagacacttatcacggccgagcggaaaggtaccaaaggcgtctagtaatgaaactacgcgcaacacatatcacataatgatatacctggtggcgcaaataaagctcaga

SEQ ID NO: 130831 - DNA, 667 bp, Arabidopsis thaliana columbia
  unsure (1)..(667): unsure at all n locations
ctctgacgtngcatgcacgcgtacgtaagcttggatcctctagagcggccgcccttttttttttttttttttactttttcattattgcgttgatttgttttcactataccagcaaataacaatttattgccttaccaaacatcagctagtgttactacatttgtactatatagtatcaaatctaaaacagaggagttttacttgggttcttttgtccatcgcctcttcatttcggatttggatcgaacttctttaaaattcccatgcaaaccataatctctctccatcacaagattgattccttcatctgaataccatccaactccaatgcacaacactccatctttcttcacatccacgtatgcactcacaccacctggtggccacatcacagacacatcttgcatatctatcatctcttcctacccaaacgaaaccaaagtatccggtaagttcctactctttagaggcttctgtgccagaaggtccacaccctgtgattgcctctttatcctggcctgttctcaaagtttcttgccatttttttcttccgttatgaaggctgggaaagcttcgtcccttttctatcttttacaaaaatttaccctatttctccatataaggaaattcccttgttttcaacatattctccttcgcatttagaggt

SEQ ID NO: 130832 - DNA, 1322 bp, Arabidopsis thaliana columbia
  unsure (1)..(1322): unsure at all n locations
agacgggagaagacagacgggagcgacaggagctgcggaccgaccagattgcccatgataccacgcggaagcaggatacacggaagagagcgcggcagagagaagcaaaaggagaacatggcaggacaaagccgcaaggagagaaacacaccactccccccgggggggaaccacccctagccatggacaatgccgattgggccagacccgaagggaaagaagcaggaaagccgcacccgggcagaaaacagagcgacagaaacaaaacaggcgcaaggttttttttttcgcaagaaaagcggaaaaaaaagagaggggaaagcaggacgaaaaacaaaacaagcgcgatccaggcggaagcagaagagagaccggagaaagccgcagaagaaaaaagagggtgaaagacagcgcggaaaaaaaacagaggggggaaaacaaaagagagacggggagaccgaagaggcagaatcaacgagcaccgcgcggacgacaaatacaaaggggagatgcaaaaaaaaaacatacgggcgaagaggtggacaagacgccacgggaggcggagaaaaagcgtcaacgggtggcggccgctaaaagaggagaacaagcggtgtggaacgtagaacaacaggaaacctgacggggcctaggtgggagagctatagaaaacagcacagagagtggagaaaacgggcaactcaaccgacaccaggagagagnggacaagaactcaaccacgcgaaggcagagcagagcagaaaatacaagccacattctgcagacaacctacaagacaaatgaacctagcgcagagtgcacgagaagaacaagcagaactatgcagcgagaagagggaaacaaacacacaccacctggaactgctggagcacgggagacaaaagagcggaaacaatcgagcggcaagaccagagaagcgatccatcgcgccaaacagtagaagaaccacgaggacagggtgggagggaagagagacaagagcgctgacaagagggcaacgcgtagcgcacataaaacaggtgtggcgagcggcggaacaaaaagacagccgggagaggaggcacgccaagacggagtaagctcagaaaaagaggaacagcgagacggcgatgcatgcaagggatgacacggagaggaagaaaggaaaggagaggccgaatgcagaagcaaacagcggcgggaaaaaaggatcgacgggggggagacgaaacacatagctgggaacatgcgaactaggaaaaacaacaaacacgaggggccggggaaacaaagaaacgggggaggacacaccggccgcggaaacc

SEQ ID NO: 130833 - DNA, 1037 bp, Arabidopsis thaliana columbia
agggggttggggaaagggaaccccacggaaagagccaaacaggggtcaaccgggcagacgagcccatatacgacgccaccaacgcgcgccaccacaccagggggggccaccggcggaaaaagagggggcccccaaaaaaccgcccacagcaaagacccagaccaggggcgaaagggaaaaggcgaggggcagaaggcagacaggcgagcaccagaacgaagggcgggaaagaaaaaaggggggacgaacaaggaaaaccggagacgcggagcggcagaacgagcgagaagggacaacaccccgacaggcgagccacagacaaaagggcagcagagaggaggagcgaaccccgcagcggggaaacagaaacggacaaacgacggcggaacgccgcgagcacccgaggcgagaccggcaccaacaaacagcacacacgacaagggaggcgagacagaaaggagcgggagagagcagggacagggcgaagcacagaccgcagggaacgacaaaacagcacgcaccgaaggggaccaagaaagcaagcagaggcggcaggaagcgggaacagacccaagccgcggaagccacaacgcagacgcccgcgggcgacggaaggacaacgagcggacgagcagggaaaagcaccacgccggacggaaagaccgaccagagagcgccgaaacagccggcaccaggagccgaggcccaacaaggacgagcgcgcggggaacgcacaggcaggcgcgcacacgcgggcaaacgcgacggacgcgcaggcgaggcacaccaccacaagcccggacggggcgaacgcagcgaaccgccaggaggcgcaccgggcacgcaaacgcgacacaggagagggcccgcagcaaccggcacaacgcgcccgaacaggcaaaggggccagggcacgcgcgcggcggccaccccgcgggccaaaaggaccacggggaacgggcgacaaaggaacgccgcagcaacggcggcagggcgcagacacgacgccgaggacaccgcgcagcgaaactgaacgc

SEQ ID NO: 130834 - DNA, 624 bp, Arabidopsis thaliana columbia
tgcagcaccggtccggaattcccgggtcgacccacgcgctcgggggaggacgctctctcggatgcaagcttacacgctggttcattcgaggctatgaacagctgtatagctgaactgtaattgaaacacatggccgcgccccctacagaccctgggactgcggaaaaccctggcgggacgcacttaatcgccttgaatacaggccccttgcggcacctgtcgaccgagaaggaggcccggcctgtcggcctttctacacgagtgcagcctgaacgtcgactggcacgcgccctggagcgacaccctaaggcctgggggagcggtggtatacgcacaaggtggacgcaacactggccagcgccctaggaccagcggcattggctccattcccaaactcagacgccatgttcggcgactaagcgcgcacaggactaaattggaggctgacgatatggattcatgctagagcgctacgggacctttacctcaaagccaatcataagggggatggtacagtggtgggccatgcacgtggaagacggagtattagcccgtagacgcttgagggcaaattattaatattgggaccccttgtggccaggctgtttgcaaacaatcaaacct

SEQ ID NO: 130835 - DNA, 640 bp, Arabidopsis thaliana columbia
gcgacgcgacacgaaaggcaaggaaccgagcaaaaaggaggagaacacaaaaaacgcgggaaacatgaacaaataacagaaacaaaacggacgagaacaaaaaacaagagagcgcggagaagaaacggagaacaccaagaagcgaaagaaaaccgggaccccgaaacaggaccccgaaaaaaaaaacaacgaaagaaagaaaagagggaaacagaagaaaggaagtgagcaaaaaaaaaacaaaaaaaccggggaacccgaggaaggaaaagaacgaaacaagaccaagcgagagcagcagcagaaaaaaccgaacaagacagaaccggaaaggacaaagaagggaaggaagaagaaagggaacaaaaacaaggggaaagaaacgacgaaagacaaggaaaaaaaaaagacgaggacggacagcaaacaaaagacagaaaagcaaaaacaaaaagcacgagaaaacacaaaaaaaacaaaggacaccggagagaaacaagcacggaaacacaggaaaaaaccaggacaggggaaagaaccaaaggaaagcaccgggaaaccagaaaacaaacacggaagaagaggaagaaaaaccaaaacacctcgcgggcgagaaggacaaacagaccggggaagcgag

SEQ ID NO: 130836 - DNA, 1081 bp, Arabidopsis thaliana columbia
attaaaaaagaacccaccaaaacaaccaaaaaacccaccacaaaaaaaccttttatttcaaaccacacccacacacacaagggggaggaagacaacgaaagaaaggaacggaaacccaaaaatacccccaaaaaaccaaaacccccccacaaaaacgccatacccacacaaacacaatgcccaatggcaaaccaaccaaagcacaaaaggttcaaacgcaaacaaacgggcaacatacgaacatacaaacgcccccaactctcccagcaaaaccaaatgacccgtgacacgcaaaaaagcaaatgggaaatgcaattatatcaccataaagggaagaaatcagcgaacaacacacacggcacccctcgataaaacaacaccggaccgaacaaaacaaagcctaggccaccccaacgaaaaaacagccaaggaaaacagaacgaccataagaccccacgaaaacgcacaacaacccagccacaggacacgaaaacacagggaccctcaaaggcaccaccccacgaaccacgtcagtgcgacccccaaaacgaaagagcttaacaattccacaaaaacacttaaaaccgacccaacaaacacacggggaaagaaaaataacacgcactaaccacctcaaagaaccagacaacgacatgatccccacatactccaaaatacaaagtccataacgtgaacacttcacacaaacagcaccgcaaaatacaataatacagagatcagcaacaacaaaaccacaggactaacaaacccgccaaagacacaccaatagcacacccacacaaacacaactcgacgctatcacacaaagccccacccaactaggccaccacaacaaataatccgcaacaataaccaacctacacccactcaaactaaaaatccaacacaaaactagtcacaccagcacaacagaatgatgacccagagttccaggcacaaaaatggcaccagtaaagaaacaggagacatcacacatcttagaacacatcatcagccacaaaaccaccacgggacccaaaacaaaaccaacacctactgccaaacccatcacgcaaatgaa

SEQ ID NO: 130837 - DNA, 365 bp, Arabidopsis thaliana columbia
caggaccccgaagaagcagaacacagcgagacccaacagacaacgacccagcaggaaaccaaacggacacaagccgccagcacaaccgagggagcacgcacactctttaaaatgtaccgaacagaacaaaaccacgacaagaccgcaagcacccagcacgcaagacacgaaacaaacgccaccagagaaccaaaacgaaaagaaggcgcacacaacaagacaacgacgacacacgaaccacaacaacacagagggagacagacgacgaaaacccacaacaacttgaactggaacgcacacgacgaaggacaccgaatgaacacgcatagcaataagcaacaccacacacagccagacagaacgcg

SEQ ID NO: 130838 - DNA, 220 bp, Arabidopsis thaliana columbia
gagcccgaaagaagagagggaacagacgcagagacaaagaaagaagggccaagagaacagaaaagggacacaaggaagagcgacgaagaccggacctataataaaaatagtacaaggacgacgccacgaaggaaacaacgacgacacgaacaaaaagcgaaaaggaggcgcgcgagcacaaacaggcaccacatacaaaggacagcaaggagaacacacg

SEQ ID NO: 130839 - DNA, 813 bp, Arabidopsis thaliana columbia
ctgccgtaccggtccggaattcccgggtcgacccacgcgtccgaccagagaccatgatagagtgccgaacagtgggcgctcataagacgggttgtacatccgccgctggagtggacaccggatacttttgcatactaggtacaagagcgatgtattatgatctggacaatgggttggtgccttggaacactgatgctgacgccactatgactgactatggttgcgcaaaaagatatatggaaacggcttgtgctaaatctgcccgtaccatcttgatcacccggacgagtgcttcctaaactcgaacatggaataccctattgggcagggtccgacacataccccccctgatcacgatacacaaccgggatgctgtcaggcctagaccttggacatgtgggtagagcagcacatactacggccgttcattactaacagagcaaactctgttggacattgagcgccggattgatttgttcatctactactatgaccacgactacgcacaacgacatggaactctcggcaaccacgtcagtgagatcatcatccgataatcgtaataaacagagctgtgctaatctttatagtaacagcaatcattgcccgagttgtagcggacccaacccgcctatgagccccttaagttcaacgctcgtggatcgacagaacaacacacccctttggctcttctacggactaaaccattaacccgcaccgtcctatttgaattttgggtggaaaaccactggcctctttatatttggtcacctcccaccctcttgccttgcttggaataaaatggaatttttc

SEQ ID NO: 130840 - DNA, 725 bp, Arabidopsis thaliana columbia
tccatctgccgttccggtccggaattcccgggtcgacccacgcgtccgcgagtactgatattcgatgggaggacgaggatacctaactggtggtggtggaggagctacatgtgaacaaggataccagaacaggtggccaagggttcggatccagtaggcaaaggaccagtgcccgtggacaaggcttcagaaccatcaccggtactgacagcttaggaactggtgcaggagtttcgcaccactgtcaagaccttctccacaacgacagtggtggtggtttgagaggaatgcataaccgttccggatctctatactgctctagaacggaggatgatggacaacgatggacgaggaagatcggaataacaggatagtatcaaggggagggaaccaggtcattatgaccagtcaggacactctaaatcgatgggcgggaagggatccagatatgacgctggtggctactgaggagagctccacgagtagaaagggatgcatgacactatcaaggagactcctgctctggggggcccttaagtatacaacgctcttttgtgcatttttcaattcaaaattatgatggttatgttacaccaatctccctgtcggacagataggaatgaaagggtcttttatggtattgtacccgcaaactaacaaattgtattttttaaaatttaacctttacggtgtaaaagggttgttcccttgtaaacaaatcgggg

SEQ ID NO: 130841 - DNA, 755 bp, Arabidopsis thaliana columbia
tgccgtaccggtccggaattcccgggtcgacccacgcgtccgctctcattcactttgaaccttctcttcaccttgagatgcctttttttgaaacttgcctagtatctagaaaccttgccacatagatttactgacaacatactggtatctcaaagattccgcgctgaatgagggctcactcatatgtaagaggattggcgccgtatgaataccacattgcttgtcgtctacatcaaagcttatggcgatggactgttggaatctatgaacgctgccacctgactctttggctcgagcaagagctgtccacttctggggccaactgttgtacgcctgactcttctcttggatacttcaccgtataagaatactaactaaccttaattgtatgctgcctagcagacaactcatgggaacatcttgccagctgattgcctatatggacacttgctgagatctgcaagcttgggtatacacgtatacgaaaaaatcttatcaactttgggatcgaccccaccagttattctccattccggaaatggtcaggtactgatgatctgaactgtcacccactagccgagctgcgagtatatccttcatatctccatacactctgtgtcagatggataccatggcatgccagatggtgtcatgggaaatcagaatggttaatgcttgcttgaggaaacagtatagtgacatcacaaagcttgattcatctgacaacatcctttatgaatatataaatgaaggat

SEQ ID NO: 130842 - DNA, 700 bp, Arabidopsis thaliana columbia
ccggaccggacttcccgggtcgacccacgcgtccggacaagccggcactacattgtaaaaataaatagctccgctcttcttactcgtttgtaccctgtctaatatttgcttctcgatgctgttcaaggtaggacactacagagatcacgttaaacaaaaccgtggaacactttgaacaaaccagggtgcttgagctatggcagcttttttatgggtcacactctatgaaaggaatcgctgatctcaaagctgttcgtaaagcacatagacgtctgcttctatctaccaaaatgggatgatgaaaatgtcctgaaccacgcgaatggatgaatatacccatgacggtttcgagccttcgaaaaaagcccctccgcattctaccgacttactctatgatatcgggaagaatgatgtgaaggataaccctggcatgagccacatgaaagggggccctgaatctcctcagagtgggagtacctcactagccgtaagcgtattgcagcgatataacgcgccgatcaggatacaaacacctagatacccgatttaaaacacttgaaccctcgccagcctcctgagagtctcctttgtcaagtgaactcagaaatacttccgaatagaaattatgtcgtcagagaaaatatgccatcagagagtcccattaatgtgactaaatcatgtcctgtgatgtgacggctca

SEQ ID NO: 130843 - DNA, 781 bp, Arabidopsis thaliana columbia
cgcggtaccggtccggaattcccgggtcgacccacgcgtccgcaaagcattctaaaagaagtttcaaagaagaagtgaaaatggaaaccactgcttttaacacaacatcacgaattggaaactggtcatcggctatttctccacctctacaaacatgtggatctttcaagtgccaattaccaacacgaagaggtgttattgtagctgatcttcgaaactcaaacttccgatggaggaaagcaacgacaacaagcagaggaaatgttgcagcataggcagttaaaattcctacgtcagtaccagtaagagtggcgcgtgagctagctcaagcaggataccgctatctcgacgtgaggacaccagacgaattcagcatcggacatgcgactagagccatcaacgtaccttacatgtacagagtcggatcacgaatggttaagaacccgagttctctaagacaggtctcgtcccacttcaggaaacacgatgaaatcataatcggttgtgagagcggtcaaatgtcatttatggcctcaactgatcttctcactgctggcttcacggcgatcacagacattgctggaggatacgttccttggacagagaatgagctgccggtagaagagtgaaaacaatcatagccatatcacctcctgtaattatcaataaattctgtagatgttcttaaacgcaagttttcaattcattccttaacaaaaaaaccaaattgggcacactacttaataccgggggccgggcccgctttcttagaagggatccc

SEQ ID NO: 130844 - DNA, 877 bp, Arabidopsis thaliana columbia
attgccgttccggaccggacttcccgggtcgacccacgcgtccgctcgtgctgatatccttctggaggagtaagataccgaactgcagatggtggaggacctacaagtgcacgatgcatcctaacaacacttcacggcaacgggtcctgtagacacagggacgatgctcgttgtccttgcttcggaataccgaccgttactgaccgcttcgaaacttgcttgagagctacgacccagctcaatatctacctctcaacgaaagttgtcgacgatttaaatgaagtggttcccttttccgatctcgataccgatccggaacattggatcacggtctgcgtatgaggatgaatatcggactatcacattagaccactgccgagatgtggactctgatgacatgatcggtgaagctaacgctatatgcgggacgggattcagatatcatgcccgtttagactgaagccggtccacgcgaagaaaggtatcactgggcagaataggggaacatcacaccgggggagacatgaagctgacaacaccaactaatacttgtgggataacaataactaggtgcctgtcactcaaggcacatttctgtccgacgtgaataaagctcttttattgccatagaacggttgcttgttaattgcaggggtttgaattaactctacctttgaaaggggtgatcaatgaggcaattcagcccctctttttccatgggtaaaaaaaacccgaacttggtttttataaaacatttccccatggtaataatgtggcatgcttttcctttttttttttttggctttgaaataaaaaaggggggcaacaatcatttaaaggcggccgtgaatcatcgttcttagaatatgttttaccc

SEQ ID NO: 130845 - DNA, 1091 bp, Arabidopsis thaliana columbia
ctgcagtaccggtccggattcccgggtcgacacgcgtccgaaaacctaaaagaacattcatcagaaattatctttttcgagtatctcggtcgaggggggtgcggcaagctaactccacatctactatccttactccgaatcatccattcctattcaataccccccataggatgttcataatccaatctctaatcacaaagaaagtaagatccccagcctcatccttgatacttccaccccacattcaccgcgattcatatgactacaagatataattgtaaccataattgtaacaatcatgagttgcccaatggtttggtacaaattgacatctccttaagcgactatccccattctagttgtacaattcgcaaaactcttacaatctattgattcccttcaaaggattactccccatcatattagttcaacatacaaataaccatactattcactttcaattggtaacatatcttctatagaatgtttccaaccgtggctatacttctagcacaacctcctcattggctaagtaaaatctacacatacactctctcaccgtctctatttgcgttcagatatttctctttattaccattatcgcagagttaacagctgcgcaaatagaaaaaagtttctcccatttccatgaaaatgttccagtaaacttaaaactaatcccaacccagtcccagttcaattgttaaatctccaatttcaaaactggaattcacaagattcaacccattgtagcctattcacctaaaagcaactcttatttcgaccgaataatggtccatttgtcttcattatagggaccttgctccttagtttcccttcaccccccggaaaaaaatgtatccaaacaaccccaatatggttaaactccctctccttccaaacacaactttctccctgttatctacaaagtaccataaatatggacaatgactaaaaacatctaagattcgagattatctctgttcttattcccgtgtacaataaaccccaactttaggtgctctccaaataatatccttaggctattaggtaccactacttcttcataatataaagttgcttcatcaatt

SEQ ID NO: 130846 - DNA, 679 bp, Arabidopsis thaliana columbia
ctgccgtaccggtccggaattcccgggtcgacccacgcgtccgcacggggttcctatgagctatcaccttaaattgcactggccttgtataatataagagcactaagggaggactcaggcgcacttatagaatatcgacatatcagtctgttaatgtgacctagcattgtgaaatcggacacccctgtgtgctcatgtccatgaagtaggaccacaggttcgccccctcaagtagcgcatctggctttggctgctggcgatgactgacgaaaagcgtatgacttatttcctgtgacaacgatgcgcctactccggtggatcaactatgttaggcctgacttctggcatggaaactgaggcgaggcagacgacgagctcatgatctatctacatagtgcctcttggacccaaatggacgctcattgtctggagattgccgttaagatcatgaaccgacatacagagctcttgcaacactcatataccaataaagctgataggcggtgggcttgacccagcgagtcatgcagcaatacagaagtattagcttctaaagatagtagacctacacatttagagccagttgcaagctctaccatttcggctgccaaagcaacttgtgagtgacggatgctctgaaaacgagtgccattgaactagtttatcaggtctttttccc

SEQ ID NO: 130847 - DNA, 816 bp, Arabidopsis thaliana columbia
atctgccgttccggtccggacttcccgggtcgacccacgcgtccgcacagcattctaaaagaagtttcaaagtaagaagtgaaaatggaaaccactgtttttaacacaacaccacgaattggaaactggtcatcggatatttctccacctttacaaacatgcggagctttcaagggccaattaccaacaccgaagaggtgttattgtagctgatcttcgaaactcaaacttccgatggaggaaagcaacgacaacaagcagaggaaatgttgcagcagaggcagttaaaattcctacgtcagtaccagtaagagtggcgcgtgagctagctcaagcaggataccgctatctcgacgtgaggacaccagacgaattcagcatcggacatgcgactagagccatcaacgtaccttacatgtacagagtcggatcaggaatggttaagaacccgagttttataagacaggtcttgtcccacttcaggaaacacgatgaaatcataatcggttgtgagagcggccaaatgtcatttatggcctcaactgatcttcttactggtggctttacggcgatcacagacattgctggaggatacgttccttggacagagaatgagctgccggttcaatagtgaaaacaatcataggcatatcaccctctggaagtattaataaattctgttaatgttctcaacgcaaggtttcaatggtttttttcccccagaacaaaaaccgccccctcttaaaaaaggggggggccgctcttagaggatcccaagctttacggtccgccgtgccttgccaacgatcattgctt

SEQ ID NO: 130848 - DNA, 788 bp, Arabidopsis thaliana columbia
gttggccgtccgcggtaccggtccggaattcccgggtcgacccacgcgtccgctacacttccatataattaaaacacagagagacgaataaaatcgagatctcgaataatgcgaatctgaaggatctttacgaattccataatcttcagatcgaaaggtttctatcgattcgttggtcaagaggagattgtgcgtgtgattcgtgagcatgggctgttcgtttcaggattgaacgcactttacgacgccgtcaacggtggaggtgacgtatggatcaatgagaatcgattcaggatccggctcatctctccgctgacggaacttatgctatgaagaaagttttgattcagaacaaggagcaattggaattggtgcgtgaggagatccgtgtttcttcattgttcaatcaccctaatttgcttccactccttgatcatgccattatttctgttaaggacggccaagagggagcttggaaacacgaggccttcttgctgtttcctgttcacttggatgggaccttgctggataatttcactttgatgaaggctaaaaaagaaactttctcaacaactgatgttttgcacatattccgtcagctttgtgatggacttaaacacatgcactctctggagccaccatatgctcacaacgatgtcaaacctggcaacgtccttttaacacgtagaaaaggacagccttctcttgcgatattgatggactttgggaagtgctcgcccatcacggaagcaaatccgttccccgtcagaggccttacagttacagga

SEQ ID NO: 130849 - DNA, 708 bp, Arabidopsis thaliana columbia
tggcccttccgcagtaccggtccggaattcccgggtcgacccacgcgtccggacaaaccacataaggacgatctcagcgagaggattatctctcttcctatacaaacaccgtgagagatgatgatacatgccaggctctctccaccatggcttttccttgcaccggaataaattcattcagattttaaacagccgctcaggatgttgacaacgacatttctaagattgcgagcaaggaggagacacacagcctcatggaggtcctgctatccgacattcacaggaggtcacaggttataagagattctggtaacatgaatgtcacaatcttggatgatcatattgtctcgcattgcagcaccgaggctctccattgcgtgacaaagaacgaggacgatagattcatgcatccagagcggaacaacagtgctggggactccaaaggcagggtggagaactgtgaggaaacaactactggcataggtccattcatcgggacagaggaaaaaacgttccaccacgaacggaattacggaaactcccacctggccaggaatgttggaggattgaaacggataaagatcatcatgtcccatcacatagctgctttgcactttaagccaagtagctcaagaccattcttattccggaaactagaaaatttgaaaaaaccgaaggggtagcatgggcgggaaaacactttgcctg

SEQ ID NO: 130850 - DNA, 781 bp, Arabidopsis thaliana columbia
actgccgtaccggtccggaattcccgggtcgacccacgcgtccgctctcgtctctatctttctctcacactcatgggtcttcctacagatttcaaagagcttcagattccaggttacgtactaaaaacactttacgtcatcggtttctttagagacatggtcgatgctctttgtccttacatcggtctaccaagttttcttgaccacaacgagacctctcgacccgacccgacccgactcgctctctccacgtcagcaactcttgccaacgagttaatcccggtggttcgtttctccgatctcttgaccgatccggaagattgctgcacggtttgcttatccgattttgtatccgacgataagattagacagctaccgaagtgtggacacgtgtttcatcatcgttgtttagaccgttggatcgttgactgtaataagataacgtgcccgatttgtcggaaccggttcttaccggaggaaaagtccacgccgtttgattggggtacttcagattggtttagagatgaagtggagagtaccaactaataatgatggttttacttttactttttacttttttcacggaaatatttttctactgtataattctttcttccaaactactgtataattcaagtataagattatgtaattgtgtatattagcatcaatcatctttctttgttaaagaaccgactgtataaaatcattcaatgtaatctgcttttcttttatttgaaataaaaaaggggaccgattaaacaagataaaaaaaaaaaaa

SEQ ID NO: 130851 - DNA, 791 bp, Arabidopsis thaliana columbia
actgtccattgccgtaccggtccggaattcccgggtcgacccacgcgtccgaactaactgagagttatcatgtattatcgtctgattagctcataccttacggctcagataagtctattctggaataattcatgtagctcaccgctttatgatacacctggctaaaatgacccttgagatgatgatcgccacgcatttatatttttgtgggatccaagtgattggtgagaaagctgaaaaaagggatataccaaccatctacgaaaaaaagtcagcatattattggcatcattatccttttcattcgcacctgacttgatactaatagtgatagataactacgcttttttcaatttgcacgtacctactccccgctgatctgactgtcgtacagtttgtgtatgtcactcgaaaaataatcaaccttgacgtgcactaaaaggctatcttcatattcgtggacaatgttctttctcccacacggaaacagatagaactactgtgagttcgagactcaggagttatattatcttttaacacaactaacatgagcattacaaggcgtctgcttatatgttccccggtgaacataaattgtgaatatttggctgatctgatctgatagctctgcaggcgcactcatgtcttctgtgtacaaagagaaaaaggatgatgatcggttcctctttctcccttacagcggagaaaacacatttggatttggatcttcataatggggacctcttgctgggaatttcattttactcctctcttttttcaccaaatttttc

SEQ ID NO: 130852 - DNA, 736 bp, Arabidopsis thaliana columbia
ccgcgtccggaaattcccgggtcgacccacgcgttcgcgcgtgaggcacctttactcttttccgaaagaatcccattctttttttattctatagcatactcaaagacatcttccaagatgtttatgaagccagctggaagttgaactatgattctgctggaatctggaatgaacaccgttgaattgatacatcctgtggccaccgctctaaagagtgagggaggctttgaacgggcatgcaaaaactatgatggtgatgtccaacgtgatttcttggccaaggatttgggtcctgggattgatactttgccggttgccagatgaaacattgagctaccggccaggactgggctcctaaggtcacaaagggggagacgccaaagcttcctctttttgtggaccgggctgaacgggtattaatacccccacacttggattatgcaacctgaccgctggtggacacggtcaggaaaacgacacgtctgaccttatacggtcttgtttgagggccgtccagccccgggagtcatacgtgtccaccctggcgatcttctaagcaagggatttaactgcttaaacaaaccttgaatgaacattggggtaaaaagatcccaaccgttcttcaggattggctatataagatcctattaattctagcgatggggtgggcggcgcttgggtctggtgaactccccgcggaagagggaataaaacactttcttagggggggttgaag

SEQ ID NO: 130853 - DNA, 711 bp, Arabidopsis thaliana columbia
ccgtctcgcggtaccggtccggaattcccgggtcgacccacgcgtccggacactttaccttaggacagaaacagcgattgtatttttattctttggcagaatcaaagacatctatacgctaattgtatgaaggccattggaagtccaattatgtccctgctgcaatctggtatgaacgccatctggtagactatctggggggctacgctcttaatagtcacggatgctatggccgggcatgcccaaactctaatggagatgctcataggggaatttcgccacagggatttggatcacagagattgttgaaatatgatcttgacaatcctgatggagaatatagttgcgcctgaggcggccccttggcactgtaggttgtcactctaaagaatcatcactaaaggtgagtcagtaccggcaaagaacagcgtgtgcctcctgtattccaattgacactccatggaacttgcacgagaggcgctaaatttcagtatgatcgacttcattcactactggggaattgtgacatgaaagaatgttcagaaagcacttcttttgttgttttgaagacctagcagggccgtgcaacggcgaacaagttggatcggatatagtgttctatcgggaactttgaggtaagtgttctacttggggcttatcttaaagacctttttaggcgtatggcgatatctaccggttatacctctttag

SEQ ID NO: 130854 - DNA, 988 bp, Arabidopsis thaliana columbia
  unsure (1)..(988): unsure at all n locations
attcggcagatacccgagaagaaaaaagacgggtgcggagctcgcacgcgcacgagaccgacggcgaggtcccggagggagcgagcaacaggggttttaggaattttcgcaccaaaaatctacccagaggaaaccggacgaagggcaggaatgaaggcacacaccctagcatccaaaatcaaaataaaagcaaacagcgtgggcaaacaggagacgcagctcggccccacacccgagataggggtagaagcgggaacgacggagaaaggtaagagaagacccacgggagggggacaagcgacaggaccggcgcgcgggaaacgagggccagcgaaccatggagaagggaaagacggcaaccccggaatgcgcaggaaccaaccgacgaacggggcgcacgaaaaggcggcgcgcagtgggggaaaacggaggagatagaaagtgaaagagggcgcgcgaaggagcgaagaaaaatagccggggggaaaccgaaacaaagtggcgcgacgagggcgacgaaagaggggggaaactgaagggaaaacgccgggaaaaaacggaaagaggctggcgcacgggggtgaaataggaaggaagtagtggaaaagcacggtgcaaccgacccggcaactggctaagcacccgacaccctcgggagagaaggtcggagggatcatcggaccaacacgacgaagagagctatgatgagacgacactcgcaacaggcgggaacggtgggacgcacgagggacgctcccacagaacgggcgagaactgcgcgggcaaacaccagaagcntcatcaggaggaatagacacatgcgggagaaagacggcggccaagacggagggatagaacacgctgcgcgcaacacagaacggcaacgtaaggcgtgtgaacaaagagaggcggccggtgcgatccagccgacgaaatgcacagagcaagagaaaagagcagggcgcaagaagcagacggcggcacgagt

SEQ ID NO: 130855 - DNA, 1426 bp, Arabidopsis thaliana columbia
  unsure (1)..(1426): unsure at all n locations
caacggaaacagggggggggggccgaccaacttgggggggggaaggcgaacaacgggagaaacgcagcagtgttttaaatttttaaatgggaaggcgcggaaacggcatatccaaaagaagttggacaagcgcaacggccgacaaccgccacacagtcgaaaacacgaaacaccgaaaaacccaggaaaacgcaggaacaccgcgcgacaagcgggaaaaacggcgaaaaatcacccgtacacgagggaaatcacgaggcgcaaatcggcgaacaaaccgcgtaaatagacagcaaaagtgtagggagaaaagacgcgaaaaatacgttgatgctactcaaacgcgatagagacagtggagacagagctcgcgtgcatattgaccgcgcgacgtcagtgcgcgataaggtgatgcacaacatactcggggaagataaagacgggacgacactatagagngcagaaaatacgaacgagatacacacacgcgctcaactaccggaaggttaataatcgctgaacaatactaaggatcgacaaatacgacgagcaagatacctgcggcagtaaaaccccgtcggtacaacatcgcgtagacgatatgatcgggtataaataaagcagggggaagattattctgtcatcgcccgtcctcgcgcaattccaactgcactctccgacaaactgcgggaacaatcaggagagcgtccaccgaacagtcagaagagagctttctgtgcacaataagatacctcgacagaataggatctactccgccagaagtgataatggcagacacactacggacagagatcaatcagacgaatgaataatatgtggngactcgcaccatggagccgatatcaacaccgcgcggtcacgaagatatctgacgtcaagtcgactggagataacatctcactgactaagcacactgcggccggaggtaatactatccgcagtgctgcgcggccgaagaatgacgtcgcacgaacaccctgagagcaagcgccaggactcaacttctgctatgaaacactgcgggaacatgtcagcagcagcaacaacccaccacattgtgggcgaaaataatgcggtgaggaagacggatccacatagtgcgaaacaactcgcggctaaattcgggcagaaaattacgggaagcaatggcgaagcgaaaaggcgcgaacaaagggccggcaaactagtggggcaataactggaaggacactgagggaaaatgggggataaaaattcggcggaacaaattcgcgagacatctgcgagacatatcgcgctataatccggggacaaagaacacggctaaaccgacgaaaataggtggcactaagcggcgaaaaaaccgaataactggcgcgaaacacgggagaaagtcggtgaagaaccggtgcaacactgggaaaac

SEQ ID NO: 130856 - DNA, 248 bp, Arabidopsis thaliana columbia
ttgcggaaacactatcacactaaaaagaaaaacatactaaaaaattctacaccaccatactactaaccttgcactaaggatgactacaaatctcctacaccaccatatggctacagttatacaccaacaccatcatggtcaagagagacatggacagtctaatacacaagaataagacgctaagtataactctgaaattgaaagtgaggaattggacaatacaagaaaacaaaagaagcgagatttcg

SEQ ID NO: 130857 - DNA, 703 bp, Arabidopsis thaliana columbia
ccgtaccggtccggacttcccgggtcgacccacgcgtccgagcatgcttctcacctgcacttacagtcgaggacatgtctacacatccttcatgcgcttatagcgcaccacccgcacgtaaatacttaccctcccctgaggtgtctagaaatgggctgcagaccatactacttacattctcctaacgcatcgtacggaccacctccagccctatatgtctgcaggctatccagacaacgaccatcttgactcaccgtaataacagtgcgctgcgaggctaaagcgttcgcggttcactcttcttataacgtatgtgatcgtacgtggaagatgtgatgaaacggctacgcaagatccatctacatgtgagacgtcgtgtttgacgtactccgtgacacgtcagtgtggactcgtaggttaacttctcgcctgacatacaacgaatgaaactgtgggactgccgtacatataggagtgcccgctgttcgccgcaccgcgtgctcacctggatgaatctggctactgcggtgacgataggggtgcactttactagacggtagagataacaacgtctgagactgccgaactactctggcatgggcctcagcttagacggacttgcttgtccacgcccgccttgtatatctgcttgggtggaaatacccttagtgaggggcccgcctcccgttgtcgttcttttccc

SEQ ID NO: 130858 - DNA, 727 bp, Arabidopsis thaliana columbia
tggccttctgcggtaccggtccggaattcccgggtcgacccacgcgtccgggcgagatttatggtgctaatctcagcggatgttctgtcttttttagtggacgcgccgatatcagacgacacagctcggaaatctttagccagccacacaatgttctggaaccgcaacattaacctatcccctatgggctcacggcacacatttctacttcggacactggctgtatttcgtgggctatgagacaccaacacacactttcttgaggcatacacggctgattatgaaaaatgtttctgcaaccgccgaatactgaattctccacgtggagctgggagagaaaatattcctctgtatgagactagacgttgttctctacttgatggaagaggaggttgcattcaaggcgtgaaacccaatgttacaagaggaactcctacttatcctcggactttaactcctgctgctgcaacaaaataggagagcaattctatcgtatgtgactgtgacttgatagcgatttttcactcgcgaagctaccgaatcgataaggaaaatgagcgttgtaaccctcacaaaagatgatcatgcttgctatcttttcacaagtattccgtgtagtgacctcccctttggagagcgatgggttttcatttcaacatagagtcggggattaaaatctggaagggtctgttgaactgttgataaaacattattagcacgggggctc

SEQ ID NO: 130859 - DNA, 781 bp, Arabidopsis thaliana columbia
ctgcggtaccggtccggaattcccgggtcgacccacgcgtccgaccatacctctgacctgccattaaagtgaatggcttttttattctaccaccatacgactatacttcagcaccaccaaggtactgctcaccttaccctaatgttgccttccaatcgcctatatcaccatcactactcaaatagccctaagggaggctgcaaaccccatccaccaccatatctaataagggtctgcaccaactaccatcatggggcgcctttctacaattacttgacgaactccatctcgccggggctcactgagtgatcacttgaaattgtgatgagagttttatataagcaacgaaaatctatttaattccatctttgcttttgttcttcgacatataaatatgtaacaaattgcaatcctgccgagaggaaaaagaaaaaatagggcggccgatgtaagggatccatgcttacgagcgcatgacggcaacgtcctcgctcttctatagtgacacctaagatcgattcagtgggcgaggctagacaacgtccagacagaaaatagccttgtggacaaccaacatagatggctcttgttcccaaaagccacctttcgattcaattgggtgggcccaacctaaataaagggcgcgccttccctaatatccctcgttaaccctgaacaaagatattgcgaacacaaccccctgaagattggggtcggaaatagggggaaaactaacgcctctcttgggtagatgtcgcggaagttcatttacaaatatctc

SEQ ID NO: 130860 - DNA, 794 bp, Arabidopsis thaliana columbia
tggccgttctgcagtaccggtccggaattcccgggtcgacccacgcgtccgggataatgctccacttatgccactcttatattattcgaaaactttttttctctcaaattgctgtcaaaacgtgtcttacgactagcaccactttgaggacagccaatccggagcttgcacacctatcctcgacatccggtgacatcaccgaaggtggacgcatctacatcaaaaaccggccctgcaaggacgatgaggtggctactcccgacactggcaaacacggttgcgcacagatgtcagctctgaagctatagacatcttcactggggaacagctggcagagatcgtgacatctctccacaatggtgatgttgcacatgcgaaccgggttgataactatgtgcttgatctcaatgatgatggcttgacgagccttcacactgacagcggtggcaccaaggaggatgttaagctatgcaccgctcatggaatgagcgaccaaataaggcttggatcccccccaggcaacgattatgcgggaggtgtaactaccctacatgcgagtaggaacaaatctgtgcccgtccaagaaaatatgctgggaggccctgataaacactgatggcctttccgatactggttttttggccccgctaatgaaccatgccagaacgggacaaatttttttgttaatccaaccccaaaaaccgaaaggactctgggtcactaatttttttcccctagaaaggggggaggaaccacccctataaagtctgtggggaggatataactcgctttgg

SEQ ID NO: 130861 - DNA, 658 bp, Arabidopsis thaliana columbia
ttcccgggtcgacccacgcgtccgggcgatattaacacatgaattgtacgacaatgtcaggtttatgttgaaaccatctgagaagcccggatctggtgcacgataaacctgaacatattcagagagaacacatatacctgctggctcacttgacgaatcccctaggggttaatctccaacatgacccagaccacgtgtgtccgtctatgcctgggcacacaccacccaatgatcaggtaagaaactttcaaggataccaaagagcgcggattcttcaccaacacgtattactctacggaaggatggtataaagaaaacgaatatctaccaaatgtgggatatgtttaactactactacacaggtgcctgattttgaagaagacttattagcagcgttaatttcattaataagatattcctaaaaaaccctaacctgtgttctttttttggtgggccatcttcggaatcggagctttggtgtgtcgatttggtcttctttctgagcgaaagcgtgtctcaagagaaagagctcttcttgtcttatattgttagacatgttcgaatgtcgattgtatattttgtgtagctattcctggggcctctcatttccttttgaggtaaaaaaaaaaaaaaagggtcggacattttttaaagggac

SEQ ID NO: 130862 - DNA, 1343 bp, Arabidopsis thaliana columbia
gaaaaaatggagggggggagcggaaaataaagaagggaggggagaggaggaagaaataaagggagggaagaagtatgaagaataaaaagtgagaaatgatatataacataatatttgggaacgagagggggggaggacaggaataaggtagcttacactacatggtacaataggaggggagatagtaacgagcaaaacgaaagtagtactaaacaatacttaataaaagtgacgttcaaaagattgatgagaaaggagaaaaacgcaaggtagaataaatagagtgaaaagggaggaatttatgggacaaagaagaaaagaagggatataatgtagtagtgaaaatgaaaaaaagagataaaagagaaagaggtaaggcagggaagaagataagagactgaacgaaggaaggagaaaagagaggaaaaaaagaggcacgggggaggcaagaaagagggtggggaagaggagagagatgtatgcgatagaggaaggaaagtaagatgaagagaatttaggtgaaaacggagtgaaaaaggggaaaaataacgaaggattaaagaactagaataaaggtaatatagtagtggatatgatagacgaaagaataagtggacgaaacaagcgagatcggatataatagttgaacaaagtagagggtcgggtagtaactgagaaattacatcgagtaatagagcgagaccaaaataggtatggagtatataaacaattctacgaggaacgagataatggaatgatgaacatggacgagaacaaagaagaaggtgaaataacatggagggaaaccgaatacgtgagaataaaatatgcggagaaagatgaggggagaaaaagaggaggaaaagtagggaagaaatgagaggagaagggtgaaataggagggaaaagcgagagaaaaaaagggaaaaaattgagaagaaacggagaaaatggggaaaataggaaaaaagagagaaaacgagatgacgaacgagatataatgggaaaaataagggagaaggaggaataagagtggagaaaataggggggagaaatggagagaaaggggggaaaaaaaatgggagagagaaggaagcgaattaagagtaagatcgagggttaacgggaggtaagaagtggggaaaatgaggaaagagagggggagaaatgagggacgtaaagtgaggaaaataaggggggaaaggggggaggaagggagagagaagagtgggaaaagtgaggaaaagaggggagaataaattggatgtaaatagagggaaaaaggtaggaggtaatgaaggggacaaaaagtggtaaataaatggggaaaaagaggggagaaa

SEQ ID NO: 130863 - DNA, 630 bp, Arabidopsis thaliana columbia
  unsure (1)..(630): unsure at all n locations
ccgtctgccgtaccggtccggaattcccgggtcgacccacgcgtccgagagagaaccatcgngatgactgtcagggacattgccacgttacgtggacatctgtatcatatccagttctaaacacgatgcctcggcaagcatgttacggtttacactgcatctgttgtaccggacccgcattggtccttgcaaaatttctgttgaacgaccacttctgtgtgatctggttccccgtgaggaggcaatgtagtgcaacatagagtgggacgttataattgcacgcctaaaaaggatgggaaatgcatgagtgtggcgcatccgtgatcctctcgctagttggcgcaagtgtgggacgcctgtccaacgcacggattcctgccggtccttcttccacatcaggaagactccatcgttgggagattggaggagaatgacagctgacacgctatgcggtactgtaccttaggatccacctctttcacgcacatgtgcactctgaaatatatataaggcggacactgatgtttgtgcatatgaagctcttggcggttatggtagggctagcgtcaaataaaccatcggggactatggtattcacaagggtgactggtgtccttatcgaaccatgct

SEQ ID NO: 130864 - DNA, 280 bp, Arabidopsis thaliana columbia
tgcaggtaccggttcggaattcccgggtcgacccacgcgtccgaagagggttagatacacaatcagaaggtcgaaaattgttcactttacccaatgtcttatccatcgccagcattgataaggggagatacttggctagttttacatgtgattattatctgtgagcaattgtgtctactatctctcgataaccaccattcagcatgatgcacaatgaacctcttggatagtcgcaaaagattagcgaagtgcatgataggggcgctcgcctcgatgtgag

SEQ ID NO: 130865 - DNA, 577 bp, Arabidopsis thaliana columbia
ctgcacgtaccggtccggaattcccgggtcgacccacgcgtccgagcaggcttcgatacacaacagatgggctatattgttcacttaacccaatggcttatccatcgccagcattgataaggcgtgatacttgactcgcattacctctgattactatctgtgagctattgtttatatatatacttgataaccctattcacattatgaatatgaactcatgaatatccaaagaaaggaggcgctaaggcggccctggtgagaagaccaaacgctgagatggggatatgacaggctctaatcctatatctttgacacgcgagaggaatttcgaaagagaccatggtatcgagcccgatcttagcaattcgaacgtgaccccgatgctgtgcgtggcgctaacatctaatcatgcaatactcattgggggggccaagactactcaaccgctggtggtggatagactacgtggccagcatgaaaatgcgctaaatttgtcctccggattgcctggctggtggctcttcgacagattgacctttcattgcctgaaagcattacggcgaaaaactttgggcaa

SEQ ID NO: 130866 - DNA, 628 bp, Arabidopsis thaliana columbia
ctgcacgtaccggtccggaattcccgggtcgacccacgcgtccgatgaggctcagatacacaaacagatggtctaaacttttttacttaacccaatgtcttatccatcgccagcattgataaggcgtcatacttgactcgcattacatctgattactatctgtgagatattgttcctactactcttgataaccctattcacattatgaataggaacctctgatacacaaagataggagcgctataggggccctgagtagaagaccatagctgaagatggggatatgagaggctatcaccctatatcttagatgagagagtggaaatgcaaaagagaacatggaaccgagcccgatcttaccaaaactaacatgaccctgatgcatggggttgctgcaaaccgtaatcaagcgatactcattgggggggccaagaccactcaaccgcgggaggtggaaagactccatggtcagcaagaaaaggctaaactgacctcggatagctagctggggctgtcccagttgccttcttgctaaagctacggaaacctggcaaggcagatgatatcatggttggcgtcctcgacttttacatgcagcaaacactgtctgaccgtgtgacattaaatc

SEQ ID NO: 130867 - DNA, 288 bp, Arabidopsis thaliana columbia
aaaatttgaatgtccgttgcagtaccgggtaccggttcggaattccacgggtcgacccacgcgtccgatcatgattctatacacaatcagcagggagaaaatcgtgcacttaaacgaatgccttgtacatggccactattgcataagagcaatatacttggactagcatgacaatatgaaatactcatctgtgcagcgaatctgatttgtactaacatactacgaatgacgcagtcatttcagcatgaatgcaaataatgatacctcatggagtagacagcaaaagag

SEQ ID NO: 130868 - DNA, 604 bp, Arabidopsis thaliana columbia
cggtaccggtccggaattcccgggtcgacccacgcgtccgatgagggttagatacacaatcagaagggcgaaaattgttcacttaacccaatgtcttgtccatagccagcattgataagggcatatacttgactagcttgacaatctgatgactatctgtgcgcaattgtttctatacatctcgctgcccgattcagatgatgacaagtatacctatgatacacaaaagaggagcgctaaggcggccctgtgtagatgacctaagctgtagatggggatatgaaaggatatcatcgtatacattagataagcgagtggaatttcgaaagagatcatggtatcgagacctatcataggatatcgaacgtgtccctgatgctgtgtgttgctgtcacttctaagcagagcatactctgtggaggggccaagtctacacaaactcgggtggtagaaagacgccgtggatggctgaagagcgctaaattgtccgggatagcttgctggtgggatcaaagtgccttcttgcgaaagatacagaaactgggcaggagacatggataattgttgagatctacagacttgtacatgtcagtaaccactgtct

SEQ ID NO: 130869 - DNA, 627 bp, Arabidopsis thaliana columbia
cggaattcccgggtcgacccacgcgtccgcagacgttgatttaaagcttctgaagggagaaaaccgtgcctttaaactaatgacctgctcaaggtcaaccctggcaagaacaattccttggcagttttgtcactagaaaacttcttgtgcacgacccatttgaccacaactctattcgagtattagcggatgcaccatctcctctgataacacatgagaacaaccttaaagggaatgttctgatgcttatctcagctcgaaactgtggcatcatctgatgccttgggttacattacatcattcgctgagcattcagacgttcttcacgtttcatgatctctgagcctatatccagtctttcaacaccacgaagttcatcagacaaaggaatcaagagcaaagctctgtggatgtgcccagtcgtgagttactcacgtgagatgaacttgcccgggattggtgaacagcgtgacatttgtttggcggattctgcttctggcgaacagctcaagctgctgcccaagcgcaatcatgggttccatgttcgttgcatagacaattggcatcaacatcatttgacatgtccgaaatgcactacactgaccggttgagacatgtaaaaagata

SEQ ID NO: 130870 - DNA, 665 bp, Arabidopsis thaliana columbia
gccgggccccccctttgattgacgtttcgctgtcccggccccgaattcccgggtcgacccacgcgtccgcgctaacttttatgccttgtaaccctcacgtttacggactctgaagtttcttacctgtaactcttggtccttacgtctatgtgctcggaggctctgcttttgatactaggacttatcctgttgatgttcctgtgcctacttcttctgtgttttcttacagcctcgtgaaatacgttagggaacggctatctccgatgatgcctccgcgtggtagctttgattgcgctgcaatgcctgaatcttgaggtcagattattgaggcgggaggaggatcacggcacactctgataggcgctgctgcaagtagaatgagtactgcggacatgtatgatggctagacagacgagtggagagtaaggaatgaatggcctatgtttcatacatgatgacgtgattacttggtgcagaatgagatggagaaggacatggaggaggataggggaaacccctcggcgctgtttctttacacatcctataggaacgttcatcgatatacactcggctgactctcaactgcctataccttggaaggcgccaatcttaaattgatgctaagccacatacatgatcaattagtcttatatttgaacctaaca

SEQ ID NO: 130871 - DNA, 648 bp, Arabidopsis thaliana columbia
cgcccgcccccccccttgacgtgcactggcgtctgcggtccgcattcccgggtcgacccacgcgtccggtctgcttgatttctagatgacactgaggagcatacgtggctttttacttttacactgcatacagaggaccgctctaaggcgtggtcctagaactctttagcggcaggccaatacctgtgccagagcccgcgaagagtgcctatcttcaggcttgaggtccagactcttaacactatctatggcaacagagaaggtaatgaggcagtcttgattagtttttatacagaggaaacctctggttcattagctgaagatcttcgcagttctcaatgctcctgagattggtatggatccatggcgttaggacccttgatcgtatatccaagagtgcatgcgagcaaaacacctgtgacgatgccaatactatatcgatctggggactatccagacttcatctcaagacatacagagatgcccctcaggtgtactgaaatagtaaaactggcattgttggcttaatatggctcagtgaggtgaattgttgacctaatgctattgaggacttgattggcccccgtgttaaatgtaccgatctaactgacgctggcgttctagaaaaatgctttaacttatggtcat

SEQ ID NO: 130872 - DNA, 635 bp, Arabidopsis thaliana columbia
gtaccggtccggaattcccgggtcgacccacgcgtccgggagctgcagggataatagtctctaaccacggagctcgtcagctagattatgttcctgcaactatagtggccttagaagaggtggttaaagccgtggagggtcggattccggtttttcttgacggtggggttcgccgtggaaccgatgtctttaaggcattggctcttggcgcttcaggtgtctttgtaagttcattcatcatatacacttagctcttgtcatttcccctgttttctctcacggttttcaaatcgctcctttcattttcagtttcattgcaataaccttgattatctcttcttgatttttacaaattgttaacattttgcaccaaacttctaaattttcaaaacaaacccaaatatatcctctgttttattaagttgtttttaatttgtcgaaatgaagccaaacaatgaaacaaatgtgtgtcccgttgctgcatatgagtattatcactgatcatataaatatccaaaggacatgtgattaattacttgttccgttaggtcgggaggccgagcttgttctcgcttgcagcggatggagaagcgggagttaggaagatgctacaaatgctaagagacgagtttgag

SEQ ID NO: 130873 - DNA, 161 bp, Arabidopsis thaliana columbia
ccgtcccggattcccggtcgacccacgcgtccgatcgcattaagattttcaattgtaaaccctaaggttcttcctttttataagcttttggccggacattgccgtacccccagtggtccggggtacgtcgggaagtaacttattttgtacctgagacactt

SEQ ID NO: 130874 - DNA, 640 bp, Arabidopsis thaliana columbia
ctgctgtaccggtccggaattcccgggtcgacccacgcgtccgaaactgttgattgggcgagaaaattgacgcacccatcataggtttgtgttgcaaacgccgatccgacgatggatgaggtcccgagtaaactctctccgcggatggcacccatgacctctgggataaggcgggcgaactgcaaatgtcactgggtgaatacaaactacggagtccggatccttgatgctgaatgtgtactgggacaatgtttatgtctgctgatgaggaagaacgcagatgaagctcctcttcatttatgcgaagacgaatatgcatctgacgagtgtgctagccagaagaaatgtggacactcgagctgttgtcctgggcttattggtaggcaagcattctgacgtacactcttgctgccatagatcttgtcttcattctagcgagaatattatagactccggcgatgagaactttggatcagaatgcaacattggtgggaatgttaagcgctatgctgaggtgtaacagattgttgaactagtgctactgacaattggattaacatccacgtgacctgtactgtccaaaatgtccgtataggttgcttgaaagcctggaacatatgagcgcgcggaccttcttggg

SEQ ID NO: 130875 - DNA, 666 bp, Arabidopsis thaliana columbia
cccccctttgattgacctttcccttctgcggtaccggtccggagttcccgggtcgacccacgcgtccgagtagttgttgttctatttctgttgatcaaaaatggaatccaattcgtttttcttcgatccatctgcttcacacggcaacagcatgttcttccttgggaatctcaatcccgtcgtccaaggaggaggagcaagatcgatgatgaacatggaggaaacttcgaagcgaaggcccttctttagctcccctgaggatctctacgacgatgacttttacgacgaccagttgcctgaaaagaagcgtcgcctcactaccgaacaagtgcatctgctggagaaaagcttcgagacagagaacaagctagagcctgaacgcaagactcagcttgccaagaagcttggtctacagccaaggcaagtggctgtctggtttcagaatcgccgagctcgttggaaaacaaaacagcttgagagagactacgatcttctcaagtccacttacgaccaacttctttctaactacgactccatcgtcatggacaacgataagctcagatccgaggttacttccctgaccgaaaagcttcagggcaaacaagagacagctaatgaaccacctggtcaagtgcccgaaccaaaccaacttgatccggtttacaa

SEQ ID NO: 130876 - DNA, 645 bp, Arabidopsis thaliana columbia
tgcggtaccggtccggaattcccgggtcgacccacgcgtccgctgctgaggaagttcagaagaaggcacttgaggagtttaaggagcttgtaagggaggctttgaacaaacgtgaattcactgctccggtgacgccggttaaggaagagaaaacagaggagaagaaaacagaggaggaaactaaagaggaagagaaaacagaggagaagaaagaagagacaacgactgaggttaaggttgaagaagagaaaccggcggttccagcggcggaggaggagaaatcatcagaggctgctccggttgagaccaaatctgaggagaaacctgaagagaaagcagaggtaacaaccgagaaagcatccagtgccgaagaagatggaaccaagaccgtggaagcaatcgaagaatctatcgtctctgtttcaccacctgaatccgccgtagcacctgtcgtggtagagactgtcgccgttgctgaggcagagccagtggagccggaagaagtctcgatctggggagttccactactccaagacgagagatctgacgtgatcctcacgaaattcctccgtgcaagagactttaaggtcaaagaagctttaaccatgcttaaaaacaccgtccagtggcgtaaagaaaacaaaa

SEQ ID NO: 130877 - DNA, 641 bp, Arabidopsis thaliana columbia
ctctcgcggtaccggtccggaattcccgggtcgacccacgcgtccggctgattcttgctggatcgagagttgaataactctgcttttcttcaatctggttttttttttttgtttcatagaggagaaaggttgtggatttctcaggtggggatttgagaattagggttttctgattgggggttttcttattgatgttaccttcaccaaattgttgtcggagatctagatttggttcagttatggaataatggctcgtctcttgccatctctattcgtaattagcatcttcttcttcatccaaagactcctcctttcttcgttaatccatcgccagctattgaatctgaagcaaatctgagaatctaccgaactcacgcacctgtatattgcttacacgatacagagcacacggagacggagtacatattgttcagcgcaagtgaaagcaagagcctttttgtctattgatgggtgaggagttagctgacacaatgaacctggatttgaatcttgggcctggtcctgagtctgatctccaacctgcaccaaacgagactgtgaatttggctgattggactaatgacccgcctgagagatcttctgaagctgtgacaaggatcaggactccgcataggacacgg

SEQ ID NO: 130878 - DNA, 588 bp, Arabidopsis thaliana columbia
cggcccggattccggttcgacccacgcgtccggtacaaaaacttagacggggccgttggaattttgccctttttattcctgctgggccgagatcccaagcaaatagcggagttagggtggccagaaattgttcgagccatactgagatcttgctcggcttttgcaaagaattactggagagaacggctcatatcagatatgcgacttcagcaaatgcctctctcatgaatggaccgcacaggtgtactatgcaactttgagaatcatatcgagaggcatggacgattgtgtacgctattgtggaacgcctatggagagaaatctgctttaccgacctgaaaagaaatgctagcgttgtcagatggcacagatattagctgtatgcccaatcttgtcgtgatactatgtaaggcaccttggatatgtctacagcgtgtctctcggaacgatggtcatagaactctccggctaaggaagatgtgcgcgatagagagaagatttgagtgagaaatttcgctaagttttggctagacgaaaaattgcgtcttttactaggtgagagcacgacccttatattgaatttgggct

SEQ ID NO: 130879 - DNA, 654 bp, Arabidopsis thaliana columbia
ttctgcggtaccggtccggaattcccgggtcgacccacgcgtccggtctaactgacgctataatcggagacctacacgattgttcgttctaaaaacgctatctctaaacaatgaggctacatagatcatcctaatgttgtgactaatacacacacacttattatatacacgcgcggaacgatgaccaagatagcatcttgactctggaatactctccggacactgtgcactgcgttatgcaactctaaagaacacttaacctactgatgccactcttacacgtcagattttacacttgtgaaatatttagggacttacgctgcattcaccggagggtgcacgcatgtccttacgacttaataccgcaactgttgtttgtctattcacacactacaaggattgaaactatgcaaattagcatgtgcaatagtatcgaaaagaggtacactgaacatattctacatggtgatcgaggtatgacatgatcacatgcagctcatggttcgcggcgcaccgatatatgctagattcattcgaagtcgtggactgcacggatggcttgttacgagggctttgtacttggactaacgagatgttcccttgcttgagagcaggtgttcagataaacttgaagagtattttccaccgtttttg

SEQ ID NO: 130880 - DNA, 512 bp, Arabidopsis thaliana columbia
agaaacaggaggcgggatctcagagtcatcacagaagagcaaggggggggaaagaaggcagaggcaaccgaggcaacatgataatagaccacagaggaaagagcacaagaggccgaggaagaagagaggggcgaacaagcgggaaggaggcaacaaaaaagggaggaacggaggaagagagcgagaagaagggcggacacgtgagggcagacgaggggccaagggcaagccagaccgtaggcgcgggagaacacaaaatcagaaagataagcacacgcaagcggcccacagaaacaaaagagggggctgaaaaacaggggggaggggacaaccgaaagaggagagagacagaagaactagacgtccaacaggcaaagagccgaggggcaagggcgctcagagacgccgacgaagaagaagcaacaccgacagatggaacaagtaacgagagcagaagaaagcgagaagcacgagatagcaatgcggaaccgtaggagacaaaaaagcacgac

SEQ ID NO: 130881 - DNA, 646 bp, Arabidopsis thaliana columbia
cccgatattactgatagaatcaaagcgatcgatcaatcactaagggttttggtttctctttctccctaatccttgcataatccactgcttcggagtggttagatgtaaaccggatgccgaggaccattcaagtcttgttgacaatgttttggaaaaaacacctgataatgccgttgaggaaataacacctgatttgaaattaacctggccctctccaacccatttggtaaagtacctgtcattcccaaaaacacggctcaccatggtcccagcatgataaaaaacacagaccccctgtggggccttaaaataaagggaaactctaaattgggtgaatggaaaacaacccagcctccatactccttataatcaaacataagttcgttcaacatacacccatttctgagaccaaccaattgggaccatcccatcttttgcttttgctccgttccccctaccgactattactcccattccctatacctttaccatccctgtcagccattttatatcttgggaggggggtactcattcaatattaacccaaccccctgtaagtggataaaaccccttctctcccctccggttggattcccttcttttctctcatctaggtgtgagacctcacttatcatcaagtctcctc

SEQ ID NO: 130882 - DNA, 637 bp, Arabidopsis thaliana columbia
cgccgtaccggtccggaattcccgggtcgacccacgcgtccgcatccatacaatttgcagtcttacataaggtgaagtcttttgccgctggttcatcaaaggccgaaaatcatgctcaactgagcccttatctttcttacatcagtggggcactagcagggtgtgcagcaacagttggatcgtatccgtttgacctattgcggactgtattggcgtcccagggtgagccaaaggtgtatccaaatatgaggtcagcatttctgagtatagtgcaaactcgtggaatcaaagggttgtatgcaggattgtcccctactctgatcgagatcattccttatgctggtctgcagtttggcacctatgacacatttaaacgctggagtatggtatataataagcgataccgatcttcttcatcaagctcaacgaatccaagtgatagtctttctagctttcagcttttcctttgcggtttagcttcgggcactgtttctaaactagtctgtcatccgcttgatgttgtcaagaaaagattccaggtcgaaggtctgcaacgtcacccaaaatatggagcccgagtagagctgaatgcttacaagaacatgtttgacggtttagggcagatattaagatctga

SEQ ID NO: 130883 - DNA, 643 bp, Arabidopsis thaliana columbia
tggccgtctctgcggtaccggtccggaattcccgggtcgacccacgcgtccggagcatacaactgagacatgataaattgcagctataactaaaacataatggagtcaccgaatattaaccttatggcgacagctttatgttgaatattgctggctctggcggtgccatctgctgatgataatactacagacaaggacgagggttcggatcagatggtccgtatggccacgtgcttgacttacttgcaaggaccttctacgacttaaactcgctactgttgatatggtcatacacatgggcttaattttaacgacaaatgattttgggtgatcattcaagacgcgtatgagccggattatcgtctccagatcaaccaatatatagttttaacgcttacttctgcttgctgcgccactggtgccgtaactgaatgacctgagcagctacacttggatgcgagatctactatggcccgagtcttgacctactacgtgaaggtgagacaagacgggcgctagctctgctcacactggctcgactcgtgtacctctgaccatttctccgagatcaagaaccgatgatggtaacatcagtgttcagacaatgtatgctccatgcaagcaccacgctagaagcttgtat

SEQ ID NO: 130884 - DNA, 635 bp, Arabidopsis thaliana columbia
accggtccggaattcccgggtcgacccacgcgtccgactcaaacatcaatgaatgatacattcactctgacatatcaaaatggagtcatggaagattgacctactggtcacactactaacatataatagtgatgactgtattggtgaacactcttgatgacaaaactatctacatggacgagagctcggagcacctgcacgttgtggacatctatattccttacttgcacggacctgcattgtctgcgacacctgactgttgtgtccctctcagacaagctgttaattcgaacgaaaaaggtcaataggctatccttcatgacaggcctgatgctgactaggggctccatatcagcctgattctagctggtggactatgttctgttacgtacgcaactggtgacgtcgctgagtgcccagctttgcttcacttggagcctgaattatatgcatgcccagatctactaccagctctctacaggattcaacactgaccctcccagcctatgctgccacagggtcgacccgtggaactataagcatctctgcgactagatgatcctatgattgttctacagcggtcgatcgaccactgtgccacattgaacgacactcggaggtctataacgatggct

SEQ ID NO: 130885 - DNA, 731 bp, Arabidopsis thaliana columbia
cgcacggcgagcgtaaagcgagcaaacgacgccggcgagccccgggcgcaaccaccgcactaccgcgcaccgggggcacggaaaagcgcgcgacaaccaagggagaaacaggagaagacgcgggaacacggcggccgaaaggacgccggacgaccaaaagagggaggaaagacgacaacgggcgacagggacatgcccgcccgttcagggcaggtcatccgcgccgccacggcgcaaaccccggacggaggcccaaccggacaaaagaccgcagcgcacggaggcacacaacgggccatgctgacggggcgaacaccgcgtgggccaccgggcggagcaaaccatcagggacggcaagtaggccactgcagccaccccccggagtccagcagcagaaccagccgacccccaagaattcaggcagcctctcccaacgagccgagggcagcagaatacgaagaaggcggccgtgaaaacccaagaagcagccaaggtgaaaggggaggacaaacccaccaccaggaggccgccttcggccatgctacacacgatcgcaagcaaggcggccaggccctcaccaaacagcgccgggggcccgaggctgccacgggggcccaccgcacggcctccggagggggtgccacaaacacccagccgaaggccgccacacggggcggacccgccccccgagggcgtaggggggcgaaagcccacagagaagtctaagcacc

SEQ ID NO: 130886 - DNA, 647 bp, Arabidopsis thaliana columbia
tctgccgtaccggtccggagttcccgggtcgacccacgcgtccggacatatttgcccaaaatttggatcaaagagttatacgatagaagaaattaaatatgatgagactcctctttgtgttcttcatggatcacaccatctttatcccatgcttttcctttgatacaccggggagggatctttctttatccctggattttatcgacaatactagctcctcctaattatgcatggtcaaggtttgactgcaatgcacagtgatgggtgattctagaaatgcagccatagttattcgtcttcacttccactactgctttgaccaatgatgtgatggatcggtgttgctagacgatacagaaactctacagggagagaagaaagcttctcccaacataaattcattgaaaggatacaaaattgtcgactgaatcaagaacataatcgaatccgaatgtcctggagttgtttgatgcgctgatcttctcacaattggtgctagagatgctacaatcctggtgggtggaccttactgggatgttcctgtgggaagaaaagattcaaaaaccgcaagctacgagcttgccacaacaaaccttccaactccagaagagggtttaatcagcatcattgctaagttctattctcaa

SEQ ID NO: 130887 - DNA, 579 bp, Arabidopsis thaliana columbia
tttgaaacaacacaaaggttttaattcctcactgggtttattctttatgagaactaacagggggagagaggattgtgtttaacgcctaacagtataaccagaattgatttggtcaatccgtatttggacgtcatcaaagaactaaatgcaaagcaccgtacaagaataataggtaagctcagtcaatacatgatgtacatctattaccttaatgacataaagattatttgaggagttcatgccgagtgcactaaaactgaagattttgggagacaagaatagtgttactagacattagctttgtgaaaggataaaaaatttatgtattattaaaaaacattagtggctcaaatatacaggatgtggtgtatgtgtcaaatgttataagatttgaaggataaaaagtttattatggaaaagaaaaaaactatacgggcggcctcttctaagaggatacaattttttaccatcggcttggcttagcgaacatttggaagctcataatatttgtaggcaaacctaaaaaattagagtttaaattgggaacggtcatattttacaaaacgcagaaagaaacag

SEQ ID NO: 130888 - DNA, 517 bp, Arabidopsis thaliana columbia
gaattaccgggaccacccacgcgtccgatcgtttgcttcgctgattaggagaaattcctgcgttttttttttttagccacttaacacctcccaccgcgtatactgcaggtggaggactaggagcactatctatggggattctaaaataagtgcctaaagtgctatgacttgtaaagaaatggtcgcgccatgcctataactgagatctatgttttgttgccgaatgtctgttcataacaaacatgcccatctaccattcactgacctcttgtcggggcgctcaacggagtgcaccttcgaagtgttaccgggtgatataaaacccgtttcagacaaaacttcttgctctctgaacgaacggttggcttctaccccttaacgtcattcatccaacgggtgtgagcttcgtatattccaacaaagcatgacctttgtgctagttcacttgaccatccccgactggagggagttacttccactctttgagtatgctctctctaagcggccttaatatgat

SEQ ID NO: 130889 - DNA, 745 bp, Arabidopsis thaliana columbia
  unsure (1)..(745): unsure at all n locations
attccgttnnnnnnnnnnnnnnnnnnnnnnnnnnnnnnnnnnnnnnnnnnnnnnnnnnnnnnnnnnnnnnnnnnnctttttttttttttttnatttnaatgagaaatcttgagtttttgtttagttggaaataaagtttcatgagaaaagcgaattatattacctgtacatgttatatggggatttgtactttgatttgacaaccccttgtttcgcagagacatgcaaatcctataacttcttaccggttttgaggttgctgacacacatcacacgttgttgtattggtccttgtacctctgcgaatgtcaggcttaattctgaacttctctcttccatttgttcaaactatctctccagagaactgtttttgctcttacaatacaccacttcagattgatagcctgatggattgtctctttcgtgtccggtccattgtgaccttgcttacatacttgcataggggactttagggattttttcgtttttactcccaatgttgaatttaagggttgttacttgcattcttagatcatgattctacatttttttctgagcgaatgtgattaggggcttactgaactggaggcttatacctattacttctgtcatgcaaatccttacccttgcctctttaacatcatttggcgaactagagagagtcaactctttgctgggctgtcttggatacctctttaacccaagagagcaccggatcaaattgcatgtttccgttttctccagt

SEQ ID NO: 130890 - DNA, 583 bp, Arabidopsis thaliana columbia
agctatgacttcgcatgcacgcgtacgtaagcttggatcctctagagcggccgcccttttttttttttttttttttcaaaggcagacatcgagtcccagaaaaggtcagcacaatgttgcatgacagaacctcattctataaacagtatacacaatattttgccttatcactctctatcaggggaggcccgactctatgggtgtctttaacatactccctctatttacctatatcgtaagctgctgacagcacataaccgatggttgggtatcttcatgtacccgtggcaatcgtaatctaaaatataaaaaggtatcctatatttgtgtcaacgctattattattgaagtgacctagatctcacatgacgccaatgatgcttgatagttttgataaaatattgccctaagtgaccagttttgggtgggcgcgcacgctttctattcgtatgaatttcaatgggtcttcgccgggaaaattgcaccccagcgttttttggtcacatgtttattggaaagttacctttataccaatggactaactgcttttggcgccgtcgagtattatattttctctcacatt

SEQ ID NO: 130891 - DNA, 779 bp, Arabidopsis thaliana columbia
  unsure (1)..(779): unsure at all n locations
tggaattccnnnnnnnnnnnnnnnnnnnnnnnnnnnnnnnnnnnnnnnnnnnnnnnnnnnnnnnnnnnnnnnnnnnnnnnctttttttttttttttgattcttaaggcagacaaggatgaaataaagacaccaagacattgtagcttgggagaacatattgctgtgaagagtttacaaaataaaaataaagaccaaaactatgacagaaataacaagcaaaatgcttctttttttttgtaaccctatataaagataaacgtatcatcagttaaagaatgccgtgaaagacagaaacacatcgatccgaggttacctattctccctattttatcctctttccggtttgtttgtttacatcggtctttgtttagagaccaaaattgcacatttgcacaaactccatttagttattaacatatttagtccagagagacttgtattggttcatcgcaatgtctatccacggttttatggttccattgaaatgaatcactcctgcatttctgattacgaccatgctcactcccggggaattgcctaacccaaggacatgccatgatgtgaccaatggattcgtctttgaataaaaagggatcaatccgggaggtagagtacccaattttcagagagttctggcttcatttaaggtaatgcccgaaaatggtatttgatcgggtggaactttttagcgtctccccagggcatttgaaaaatcgaaaaaatgtggcatttaccaaaaagggcctccaaagtgtcccaaggtccatcttgggggggt

SEQ ID NO: 130892 - DNA, 613 bp, Arabidopsis thaliana columbia
  unsure (1)..(613): unsure at all n locations
ccgggcccccccttcggtnnnnnnnnnnnnnnnnnnnnnnnnnnnnnnnnnnnnnnnnnnnnnnnnnnnnnnnnnnnnnnnnnnnnnnnnnnnnnnnncttttttttttttttttatagcatcgcaccaaacggacttccagttaagttgtacataatgctatatgacaggacctaagtctattaacacgccatggtctctagtgatatgtactatgacaccgacatcagatgaatctgttatgtcctgcaaatcctagagattcttactctgttgtgagcatctgacaatcatcacaagttgtggtctttcttcttttgccgctggaactgttttgcttaaccatcgcattctttttttcattggtgataacactctctccatgcgacctgtatacgttctcccaacactccccttaggaacattgctttgataaagcctgctctttgtgccggattccttgtgactctgcttacatcctcggatgtcggattgtagaatatttggtcctgatttttgctaactcccactgtaaagaggggtatgggcgatctgacatcatctggctgcgtttcttcatgaacgagtttggcttgagatctactgccgtgaa

SEQ ID NO: 130893 - DNA, 806 bp, Arabidopsis thaliana columbia
  unsure (1)..(806): unsure at all n locations
attcnnnnnnnnnnnnnnnnnnnnnnnnnnnnnnnnnnnnnnnnnnnnnnnnnnnnnnnnnnnnnnnnnnnnnncttttttttttttttttttttttttgatccgaaggaaatttaaatttggaaggatatcagattacgggacaacatctttttttgaaacttgtgtggtattcataccgaatcctaggcctggcaaatattattacaacctgatatttgtagaaaaacctttggatcactggctgattggacaaccacacggtattcttccaaacaggatcattctgcaaatgcgctatgagccggcctcctggtgaacaccaggtgcctaagcttcagttgacggaagcgatcccatgcaggtggtttccaacacccttaataaaccttatgaacaatgcgttgaaaccgcttgaggcgaatagaggattcgaaatggctcttctcgcaatctctttaagctgaacaaagaaaacctggcgcgattctccgttgaccacaaaggtatacaggctcatggcctctccaccatgaggtgacgtgggttcttccacaaattttttgaactttgcgtagaaaacggcgaaatggtctttatcggaatcgcgattgaagaaatcgtacaatatggggcttcaagatggcttggtataacaagcaaaaagcgcatctttcaataacccacgttattgaaagatgaaataaaaatccctttcaaaaaaaacgttggtttcttaattcccgagggagccacctttgggcctttttgggccggggttcctcaaaaagaaaaccccaaatttt

SEQ ID NO: 130894 - DNA, 601 bp, Arabidopsis thaliana columbia
  unsure (1)..(601): unsure at all n locations
attcnnnnnnnnnnnnnnnnnnnnnnnnnnnnnnnnnnnnnnnnnnnnnnnnnnnnnnnnnnnnnnnnnnnnnncttttttttttttttttttttttttgatccattttgattttaaatttggccgaaaataacgttacgccacaacatcaaattcaaatactggctctttattcatagcgatatagaaaaacgacctgatccttaaagaaacttctccctctcgcaaatcctagagattcttagccttttggcagccccacacagccaatccctggcgttgattttctccttctcctttttgaaccttcttttcctttaccaccaatttcctttgttcgtgtcccggggaggcactccaaagcgccctgttttaaaacacacgtaacgccccttttgaactttgccatgatggaccctggtgtgagtggccgatgccccagggctgtgctcccatcctccgcaagctgtatcgtgaataactgcgccgattttctcttaaccgcgaaggccttgtgggttgcgtgccctccacattcagctcaatccctcttttccacaaagagtttgcaatgggttgcactgaagtgaaaggttctctc

SEQ ID NO: 130895 - DNA, 619 bp, Arabidopsis thaliana columbia
  unsure (1)..(619): unsure at all n locations
attcnnnnnnnnnnnnnnnnnnnnnnnnnnnnnnnnnnnnnnnnnnnnnnnnnnnnnnnnnnnnnnnnnnnnnnctttttttttttttttttttttaatgaaaagatgtgagtttttttttggttaaaggtaatgttacatgaaaacatcgaagggggaatttgcacatgttatgctcggatatcgcacaaaggcctttatctcatgagaaataactccgacgcgcgagctctaacatttctgagccgactagaggctcacacaacaaaaacaaagcggtgcccaattgctacgaccattggacagtctatgcctatacacgaatatcaccgggttcgtgtggtggagagtctctgctaattagacctgttttggaacatagcaaaatccggtgtggtagattcctatgaccgcatctgctttgagtggaagaggaacacggggtggtgctaccatgctccgcaantaggatccctgaagacctgtgccccacggatcctcacaccctgaaaccccagacggggacttgcgctccaaattcaggacaagacctgcattcttgacatgattgggctatcgggactcaaagaacagaaaggctctatcatggacatctctt

SEQ ID NO: 130896 - DNA, 694 bp, Arabidopsis thaliana columbia
  unsure (1)..(694): unsure at all n locations
nnnnnnnnnnnnnnnnnnnnnnnnnnnnnnnnnnnnnnnnnnnnnnnnnnnnnnnnnnnnnnnnnnctttnttttttttttttntttnnnnggaaaacattgatttcttgataagcttaaaataatgctttatgagagaaacgaattctattaacagtacacgttatatagtgatttctactatgatctgacaccacctgtattcgcagcgacctacaaatactagaacttcttaccgttcttgaggtttctgacagccatgacaagttgttgtctgtctccttctacctgtgcatatctcaggcttatctctgaatatctctcttccatttctttaaactatctctccattgaactgttcttgttcttacaatacgccaattcgtctgatagctttgatggattttcctctgtgtgtccgctttcttgtgaccttggttgcatccttgcatctaggattttagtgatttcatcttctttaatccgaatatcgactttcaggtttgatacttgtttcttcagagcatcatatctcattctttctttgaacgaagctgctttgtaaattactgtactgtaggcttaaaccttgtacttgtgtcattcaaattcctgaaccttggctttttttaacatcattttggaccaaccttagggaaggaggttaaccctctttttctggcgcttgttcttt

SEQ ID NO: 130897 - DNA, 666 bp, Arabidopsis thaliana columbia
  unsure (1)..(666): unsure at all n locations
nnnnnnnnnnnnnnnnnnnnnnnnnnnnnnnnnnnnnnnnnnnnnnnnnnnnnnnnnnnnnnnnnnnctttttttttttttttatttaaattgaagcagctaaataatcattaaaatgtaatttaaagacaaatgtgagattattcaacaattatccatacacaaatatatatgaaccctaaccagaatgtgatacttgtttaccaagccatgaaatctaccgcgtctaaggttcattgatcttcgaagatactcaccaacttgaaccactgctgtcattaccaacaactctaacagagtcataggtcgaggtcgaaatcccaacgtgtcctgtagtcctactaaacaagcaatgttctgcgttcgtggtcacaccaacttaaccacttgtgattagatgcaaagacttcacgttgtcattcttcttcttagcaatctcgctaacctgattagcaaactgaagctcccaaacaacgccgtttatcggcggacgtcccataccacggtcttgaacacatctaatggctatatcacaaaacttttctatctaggtcaaagtgatatcagaggttaaatccgagtcagtgatctgatcatacgttcgtttattgaaatctgactctacgcctcgtatcaaaattggtttgaccggtggaaaactatgca

SEQ ID NO: 130898 - DNA, 740 bp, Arabidopsis thaliana columbia
  unsure (1)..(740): unsure at all n locations
attcnnnnnnnnnnnnnnnnnnnnnnnnnnnnnnnnnnnnnnnnnnnnnnnnnnnnnnnnnnnnnnnnnnnnnncttttttttttttttttatttcagggaaccaaagggaatttaagtttggtcggatatgaagttacatgacaacatcgtatttaattacttgctcttgatttatagcgaaaagcactattaacagaccttaactgaatctactaattattgaaaaacctagagatcactagctgattgagagccacatgacaatcatccaaatcggatgagtttgttttttgactctttggacgtcttatgcttaagcaccgattgcctattttcattcgttttgaatctctctacagcgaactgtattcgaactcccttaataccccttatgaacaatgcgttgaaatatcttggtgtgaatagacgattccagatggctcttctcgcaatcttgcatagctgatcgatagaaatttggcgcgattttttgctaaccacagaggtatagagggttacgggcactccaccatcatctgacgtcattttttccagaactactttgaactttgagtacaaagccgtgaaagggtatatatcgtactcgcgattgcagaaatctgacactatcggtcttcagatggcttgacatacaagcagagaggcatctttaatacggctgtcttgaatacgaatttgatccctgcaacgaactttatcaaatttcccagagccatt

SEQ ID NO: 130899 - DNA, 607 bp, Arabidopsis thaliana columbia
  unsure (1)..(607): unsure at all n locations
nnnnnnnnnnnnnnnnnnnnnnnnnnnnnnnnnnnnnnnnnnnnnnnnnnnnnnnnnnnnnnnnnnnnnncttttttttttttttttttttttttttttttttttaaanggtttttttttaaaagggaaaaaaagtccaacccaaacaagggaaacaggccttttttgaaatttgtttttaaaaaaaaattttttccctttaaaaaaaattccccccccggatttttttggggatggggcccaaaaaacctcccaccatcaaaaatttttcccttattaaaacaaagcttttttaaaaccccttttttttttttccaaatattcattggtcaaggacctggggggttattaaaacatccgggattcaaatttttggggacccgacttttttatgtttttaaaccggaaccatattttttgggttgggaaacaagggtttagggaaaagggcccccggttctttggtttaaaagacccgacaggaaaaggtttgcgcggaaaacccttttttgtggctttgggcccttgtccaaacaaaacccggatttgtcaatgtggggcacacccctggtctgttattagaaaattttttagaggggagtttttt

SEQ ID NO: 130900 - DNA, 742 bp, Arabidopsis thaliana columbia
  unsure (1)..(742): unsure at all n locations
tnnnnnnnnnnnnnnnnnnnnnnnnnnnnnnnnnnnnnnnnnnnnnnnnnnnnnnnnnnnnnnnnnnncttttttttttttttttttttnaaggaaaaatagcacatgtttatatgttcgagcattacgtaaggccatgattgcccagtctaacaacaacacaaacgatggtccgaagttcgaatatactccacaaccactcgtaatgtgctccccaaccaggttcgaccactacttactgcaactggaacatattaacatatcgaacacgggcggttgtctgtgtccaattgcactatgagagagctggggtgctatacccagatggaggtgtatgctggtaaatggtatttttccattggactgttcacggcctgacaactcgccgaagcgtaggattactatgatgggtttacccttgggcctagggtggccagggaaccgattctgatcctcgacttttgggatttgaacctgtattactccctgaaccagaattgtggacaccatggcggagacccgggtcacaagagaattcttggctcgacctgtcttaggccaagccttcacgatggttaccgtactgcccggttgtaccttgtatatatagccttctccaggcgtgagccttgagcggtttaacttgaattcggcggcccttcatggcagtccgactttttttgagaccctttggtgggccttaccctcctttaaaaccaaaaaaggggggggaaaggggttg

SEQ ID NO: 130901 - DNA, 720 bp, Arabidopsis thaliana columbia
  unsure (1)..(720): unsure at all n locations
nnnnnnnnnnnnnnnnnnnnnnnnnnnnnnnnnnnnnnnnnnnnnnnnnnnnnnnnnnnnnnnnnnnnnncttttttttttttttttatttcaatgaaaaatattgattttttgataagtttaaaataatgttacatgagagaaacgaattctattaacagtacatgttatatagtgataactactatggcctgacagcacctgaattcgcatcgacagacaaatactagaacttcttaccggacttgaggtttctgacagccatcacaagacgttcgctttttgctactacctttgcacagtctaggcttatctctgaatatatctctttcatgtgtatgaagtctctgctaatcgaactgtttttgttcatacaatacgccagtttgtttgattgctttgacagaatctcctttttgtgtccgatgtcttgagaccttgcttccatccttgcatgtaggattttgatgatttgtgcctcttttctcccaacatcgacattcaagatggagacttgccctctcaattcagcattctccatgttttcttgaacgaagctgctatgtgattcactgtactggaggctgataccttggacttctgtgtttacagtgcggagccttgcctctttatcatcattcgacgacttagagagaggtaactctgtgtgcgctgtcttgggtactactatagcccaagaaagaattatcttaaaattcg

SEQ ID NO: 130902 - DNA, 604 bp, Arabidopsis thaliana columbia
  unsure (1)..(604): unsure at all n locations
gttnnnnnnnnnnnnnnnnnnnnnnnnnnnnnnnnnnnnnnnnnnnnnnnnnnnnnnnnnnnnnnnnnnnctttttttttttttttttttttttttttttggttttagaatactttcgtgaaaagaaaataaatctttaaattataactggctaggacttcccctttgctagcgtgctcttgcaaaaccgtcttatcctcctcaaaaatcttcccccccaggttcttttactttctgaacccgttcctatgtatctccctccttgcccttggcgttttctactcccccccaccctaaagcctcttttcgcctcgtcaaacactatctggggtttttgccttttggccatttttaaatatctctgatacgctttttagggagaccgtcttcttctttttccttaaataggcacctttatttgtgtctgtgaaatcccgtggcaggtactttggcccccatggcttttgcttgaaagcccctatcgtaaacctcttattcggaaacccgacatttataccggagaggccatgtttgcaaactcgcgagatatggacatgagggccgcatcctgtgcttgagaaccgaaaaatctttgcaattgggc

SEQ ID NO: 130903 - DNA, 657 bp, Arabidopsis thaliana columbia
gacttcgcttgcacccgtccgtaagcttggatcctttagagcggccgcccttttttttttttttttttttttttttttttttttttttttttttttttttttttttttggggcctcaaaaaatcaaatgttcttgataaagggggccttagcacacttttcagccaaattccccccaagaacgtttttgttgattaacaaaaaaagtttgggattttttttggcaaaagaattttgcaaagtaaaaaagccttttttgagagagactttacaactcaaaatcaatccccccttaaattccttttggggccgtaaatttctttaagtaggcgatgaaatcaacacggttttggggtttttttagcccagggaacaccattttgggacctggtatgtactttttggggttgagcaagtaattgtacaagggcttttttttccattccacaattttttttttgtgttccgcaaagtaagagtaacccgccgttgtaccaaattgttttccaaatagaccggttaaattgggtccttgtttgggaccggggcctgtttttacggggtgacacttgagcacactgggcctgaagatttctaccgggctggcgtttctggggtgtttataaacaaccttttttccttggtcccgtcggacaca

SEQ ID NO: 130904 - DNA, 775 bp, Arabidopsis thaliana columbia
  unsure (1)..(775): unsure at all n locations
nnnnnnnnnnnnnnnnnnnnnnnnnnnnnnnnnnnnnnnnnnnnnnnnnnnnnnnnnnnnnnnncttttttttttttttttattttaatggaaaataccaaacttgtgtttagaggaaaattacgctttttgaaagaaatttgctatattaacagaacctgtgttaaaagcttaaacaatatgaactggcaacgggggtattggtacagccattcaaatgctaaacggcattaccgaacttgagggttgagacagcgggaacccgttgttgagttaacgcttattctttttgaggacagaacctgattaaaaccatatgggtcttttatttggttgacctctgtgtcttttggaccgatggtgttcttgcaagtcttaaaacccactggttgcgatgagccctcatagaatttgtagtgaggattgtgaagacctttctgagatccttggggggggaatgtatctttctgttgggattctgggagattttcggcttcgttgttggaatcgggtgatggaacacaatcaatgtcccgtctgacccgaaccagagcttgacggggtccacataatccgcacggttaggagttgtgcttttcgttacctctggcatgagcaatggttgcgtatttgtgattgactacttcaaggctgggaactttggttgccgggcttggggactttttggccaaaagtgagccctatgggcttatggtttttcttttaggaaaggcggagaactttctatttggcagtgtagctggtctcggacaat

SEQ ID NO: 130905 - DNA, 702 bp, Arabidopsis thaliana columbia
ctatgacgtcgcatgcacgcgtacgtaagcttggatcctctaaagcggccgccctttttctttttttttttttttttttttttttcccaacctggaaaccgaaacaccgtgacctcaattaattgttgaaacggggattaactaatccttaattttaggcggacaaggatcgcaaattccattgtggttctggaaaaacaattccaaaaatccatctgtgtggtatattcaaccgattgaagaaacaaccccggctttcatcctcaaggttgcccacctcttgcccggctctcggtttatactctccgggccaccttcagggcccacctgttcggttttcctgtggaaaaacttcctccatagactgtacacacgttgttttcaacattgccttaaacacaagccttccacgtctaaacccgccttttcctttagaagcgtgggccgccattacctttccttgtccgaagaacccttacacatgctttggttccttacaacgggtgttggagcctcccacttttaactagagggccaaaactttgtgaagcggggcccaaatatttggcacagggcgctctttttgtctcctaaaaacttgaatgcctggtgacctcgggagacagataaagcagcttcgtcatcgtcctttgcgcttttctgagaccggagacttcactcgggcaacggtttggaccaatg

SEQ ID NO: 130906 - DNA, 730 bp, Arabidopsis thaliana columbia
  unsure (1)..(730): unsure at all n locations
agtgaccttttgaagaagctctgacgtcgcatgcacgcgtacgtaagcttggatcctttaaagcggccgcccttttttttttttttnttttttttttttttttttttttttttttttttttttttggcccaacccaacagttttttgtttttaaaaaacccttaaaacacatatttttttgggatataaaattttgggcaggccccaccgccgaaaaaaaacccattttttttttttttttgcgccacacaagactttcccccgatattataaaatttacccccccccatttaaactctaaagagcgcgtaatcccccccgagatttccaaaaattttgtgggggttttaaaacacagtttttttgggaaaaaacgaaacccagggggggaaaaatttactttttttttccaaaacccaaaataaaatgccccttttgtaaaaagaccccataaaacccttggggtgttgggggggggaaaaaaatctttttaagcgtttacactcctgtgtatttggcgaaaaagggttttaaaaaattttacactctttttttgggggggaataagatttttttaaaaggggcctttagacccttttgtttttttaaaaaacccaaaagggacccttttttttgcccttaaaggggcacccccattttatttttgaaaaaaaaaaaatggtgtgtacacaagataaaacttttttttacaagattaggcgcaaatttt

SEQ ID NO: 130907 - DNA, 775 bp, Arabidopsis thaliana columbia
gtctaacgtcgcttgcacgcgtacgtaagcttggatcctttaaagcggccgcccttttttttttttttttttttacatgaggaattttttaaaaaaaaaaagtgaaggcaaacgcatccttagaaatatgagatttggtaagtaagagataaaaatattcaccaatttcaaccgaaattaaggaaaaaaacatactctataaaaatgaaatcctagtagtattttacagatctttactgggccaaaattataatcattcatggcccaaggcttaaatggaggtccagcccaataccattctctaacttaattccgctactccgatcactatctccggcgaacctcctcatctccggcaaagaaccaccatgagtctttacttctccggccatagactccatgccacctccgtaaagtccccttccaccatgaaagtacccaacggcgttttgtgacgacatgtgttcaccgtaaagccacttagaactcgaagaagaaggagagagcatcatatgcggcggaggatgcggctgaaagaggaggtgaggcagcggcgcgaaggcggagagaagcggattggtatgagggtgaaaattatgatgacgtggcaaaccacgagtagctaacatctgtgcacgtttaagaagctgacgctctttcttgtgagcgttttggtgaccaccaagagcttgagagttagcaaactctctacaacagtattgacactcgtacttacgtgactcggatcctgatccggatccgggtcttggttccg

SEQ ID NO: 130908 - DNA, 756 bp, Arabidopsis thaliana columbia
  unsure (1)..(756): unsure at all n locations
cgcgtacgtaagcttggatcctttaaagcggccgcccttgncctttttttttttttttttggaaaaaaaataattatgtaaaaaacccaaggcaggcttttacccgtaactaatccttatacttatataaccctatccatcccccattagaaacgaaaaaaaaaaattacaaaatcgatttacaaccgtcggccatatataaccaaagactaaaattaaattttgttctttgttttggttcaatggtttgagaaactatatcctaattaaaaactagaaacgtttataataacctgtttcggtttctccttctaaagagatgggtttatgcaacgaagtcgggcaataactgagccacatatctcttctggttctgtatgtccatcccattgaaagccgcggcagctgccgctgatgaatgtgcggttgtggtcgagctaccaccattgatgggggcgggaccatattcctctggttctcctattttcactcttctccctataggaatcccatggggggtctgcatgaaaccctgatggtgcgtggacgacaagctatcacaatgaggtaaacctaacgtgagggacacgccattgttgtttcctgagtacctttgcgccatgagctcctggtctgagactacatcaaatcttgacatctcatccatttgggattgcccgaaattacccatgaaagggtagccaccatttgatcttatccccttgccggtcttctagaaatttcatcgggagcttt

SEQ ID NO: 130909 - DNA, 1140 bp, Arabidopsis thaliana columbia
  unsure (1)..(1140): unsure at all n locations
gctatgacgtcgcatgcacgcgtacgtaagcttggatcctctagagcggccgccctnattttttttttattttttnttaaagcacaagaagggaacttatattccattgattgataagcgacatggccccgcggggaaaacaaaaggtccaatgagtgcacattgcatggcaataggaaagcgcaccgaaaagtggatgtagatggaggccgaaaaaatagaaggcgaggttcgccccacgcaagaagaaacaggtgagagcaacatctgagggcttctattaaatagcaccggcagacgcaaacgagagcgacccgcggaaccgaaagagctggatcgcgggggggttaaaagtttgcctccttggacaaattcacacgagagaaactgggaatataatcatcattacatgctttcttcagggaagaagctacacgcccaacgtacacggtgtcgggagacgcattactctctatctttccgagtgggggccgaatgttgccgtgtctgtcccacacgcgcccccgtagaggggcaaatgccttcttagcgcagaacgagagcgagagcaacttggctctcggagcacgagtaggaggtcgagcaagatcatactgctgcggacacacatcgacagcagatcgggagcaacacaacgacgacgctgttatgcacctgcacgaggaggaggtaatctcaacctgatcaggctcatgatactgaggcgacgacacgatggagaggactacggagacgagttgttgcacatgacgacgcagggaggacgagtgcgggcgggggaagacggacaccacgacgacttcgccgtgacgcatgttatcgcgtcctcataagtgggggcacacccaagaaagggggtttttatcccgcggtgccaacccggaaatttttaaaactttctttttnccagctaaaaaacacgacgtcaacgcacggatacgatgcggtacgatatgtggagacgatgtgtacggggcgggtgccattctatcctccacccctcaatgaaaagaggggggctctctcaaaacgaataatatcggcagtttccacactgatgacaatgccgccgccgggaggagatatcacaagctcatgtgacccatggagatggtagga

SEQ ID NO: 130910 - DNA, 725 bp, Arabidopsis thaliana columbia
  unsure (1)..(725): unsure at all n locations
agctctgacgtcgcatgcacgcgtacgtaagcttggatcctttaaagcggccgcccttnntttttttttttttttttttttttttttttggaaacagttaacaaatttttccgattaaagaaacccttaacccaccttcatcagttttaattttaactaccccaaatcctaagatcccttataataaggtacaaccataatagcttttttttacaaattttggttttccccaccgattcacgaaatccaatggttggggggtcgggaaaaccaactaaaaaacttgggtgggggactttgggagcttccaaaagaaacctcaaagctcttggtggtaaactttcctttcccaggccatatttttttaaagaaccttcttgaccttgacgggattaggtgggcaccaccaccactcctgggggtcttggttcctttggtttttttggtcagctccacctttttcggcggtttttctcctttggtctcccccggcttttcaaccggggagggggaagaaaccgcaacaaaacccacggggctgggatttgctcggagctgcttaaagtagagaacttggcccaccactcgtgggggaaggctttcgttctgggcaacgggcggtgatgcttcatttggcaggttccccacgtgcattaacccacaaagcctttttttttcggaatttgttagttcgggatggtcctcatgaaagggtcaatggcttt

SEQ ID NO: 130911 - DNA, 1331 bp, Arabidopsis thaliana columbia
  unsure (1)..(1331): unsure at all n locations
ggggggaaagaagggggaggaggggggagaagaataggggaaaagagaaaagaggtgggaaaagagaaaaaaaaagaagaatgagagaggtgaggaggaaagaggagagaaagggaagaaagagaggggagaggggtatagaagaagggaaaaagaagaggaggtgaaaaagagggaaaggagggaagagaagggaggggggaagaagagaagagagaagagggaagaaaggggggagaagggggacaaaggggaggaaaagaaaggagagagggagggagaagagtggaaagagaaaaaggggagataagagcggaggaggaaggaaaagagaaagcgaggaagaagaagaagaagaacaaagcgacaagggcgcacggggagaaacgagagaggaggatgggcgatcgatcgaccgaggagacaaggcgagaaagaaggagacaggataatagaagagagaaacgaggaggaaggaatcgaagagggaaccgagagaaaagaggagacagggagagagcggcgaagagaagcaagggggggacggcgagaaagctagagcagaacggagtgagaggaanagacgagaggaagggaagagaagagtggatgaacaggagagcagagagaggagacagatagagataagacaaagagaaagcatagcgaacgggagcaaagcagcgaagagaagtgagaggacggacagcagagaagatagcgagccgtactacgggatgagagagacaagacgagngaaaagtgataaaggaggaaggagcatagagcaaaagagtagaacgatatgtacataagaagagaacgggagaggaccagacgaatgagagagaacggagagaggaagagacgaganggcgcgagaaaggaagcacgcatcgagcagaaggcgcaaaagaggagagacaggggagaggcagagcagcaaacgagcggcagaagaaaagaagaagagagagacgaaggaagcgaggagaagaggagagaagaagggagagcagaagcgagagaaaaaacagaagaagaggagacaagagaagcagaaggagggcaggcgactaaccgaagacaagacgagaagaagaaaggggaagcgacagagaggaggacagaaaggaggagaagcgagatgaagaatagtcactggagagcaagagagggagggaggacgaggaagaacgcggagaggagcatgaggaggacagaaccacgaagagagaggagaggccacaccaagcggaggcacggacgagaaagaaagaggaggagggaggaggagaggatagatcgaggaagaaaggaaagccagaagg

SEQ ID NO: 130912 - DNA, 755 bp, Arabidopsis thaliana columbia
cccccccaactcgtgggctcttaaagagcggccgccttttttttttttttaaaaccgttttcagggggatatctttaaaatgggaagagagtaacaaatctttttttatgacactgagtacaaataaactataatttatgagagatgtgtatgattggtggaatggttttctataagccgaagatttttttacatctcaatgtcttcgagttctggtaaagggaacctgagaagagctgctattccagtcagctgtgccaattgttctcctgacacatgcatcgccgaaaatataaaagcatctcctcccgaatcttttaccgactccaccaaattcacatacttcttccttgttttcacgtcagaattcctgaaaagctcgtccgttatgagaagcgtttgaattgccattcgttcatttgcaacttccacgtgttttggtccatagcatgcccgatctggttcagttgaaagcatgttgtgaaaatcattgagagctttgacctcttttgctgcttttgtatcttttatcatattcatcacgttgggggcatggagaacctcacccaggctatgtctatatccagagtttgtgtgcaccaatattatacgtgatttattctcaataataggtctcagttgtcttctttctgcttccaacaataagtggcgatgaaactgatcctttgtggagccgggacttgcaactactgcacagcgaacgacactgaagtcaacatgtttcacaaaggcct

SEQ ID NO: 130913 - DNA, 697 bp, Arabidopsis thaliana columbia
  unsure (1)..(697): unsure at all n locations
ttccgttagaccaagcacgacgtcgcatgcacgcgtacgtaagcttggatcctctaaagcggccgccctttnttttttttttttttttatggttncacccacccaatcccatattatagagcatttcacagacacgtgacaattttgttgaagaaaaagaaatacgcttgtgtactttagaacctaactgccgctccaccaaaaagtttaccactaccaggtctttctactcgggaaatacttatgactgttcacccataccgaaccaaagcgttttgtttatacacttctacaccacagacaaggaatgctagacttataacgcggtatagagacccacatgagatttgaactttggaaagcttacagaaagatcactgatgacagggaaggcttgtttggtcacacatactttttggccctaacggccgtgagtttcatatctaattcccgggctctgaggtgctcacgcacacatacatccgcttcggcgatgttgtcccagagtgtgatctcataccatccttgggtgcacggagctctccctgctatggataggcacctcgctggccattgattctctccgagctggaccctgatgaagccccatatcccacttacgtattgcttggggtgcctagatggcagagccatgatccttcctatgggtggagttgatggccgctgaacaactcta

SEQ ID NO: 130914 - DNA, 793 bp, Arabidopsis thaliana columbia
  unsure (1)..(793): unsure at all n locations
agcacgacgtcgcatgcacgcgtacgtaagcttggatcctctaaagcggccgcccttnnttttttttttttttttttttttaaaaaaaaaaaatgacctaaccctttttgaggcagctcaacgtctttttgttggactgcttaaccaacacataggttatgattggaactaactgctcaaccaaatcaagatttacaatctttgatttgaacccgttgaaacaatgacaaaagcttgtctcattttgttccctcttattaatttttcttatgtttgatcacctacgtgatgaagagagacctacctagatggaccaagtatgtatgatggatggctccctaccatttgttagggaaagaaaagagggagtcgcctggggggatcaaacatctttaatataaacaagttccctttgctacctttcgaataaccgtacttcctcctgcacataggaaatttcaaccctcccgcggacgctatcgggtgcttatttcggaataaatgccacaatttaaaacccttggagtttcccggcaaccttattgcgattgaagggctttacttctccagtggcctatgaaaacattggaccttgctataatggatgaaacacattttacaaactcatgtaaggaatcttacttataaaaagccacgactctccgaagagctatatttgaggataaaaaggttgggcctgaatccctttggttaaagagccccaaatccaatccctcaaaagaaaaaccttgtgcccggaatttttaacgaaagggccccaggtctacccctc

SEQ ID NO: 130915 - DNA, 447 bp, Arabidopsis thaliana columbia
ctttcaataacctatgacgtcgcatgcacgcgtacgtaagcttggatcctctagagcggccgccctttttttttttttttttgtcgaaatcaaaagagcaaatgtcaatatctccgaggattaccgatatccctcacatcctaatctgagtaaaaaccaaccattggataaatgacgcattgaaaacccacaacacaaccaaaattcggccatgcgaggatcgcccacgaacgattgcattgctatttgtgaagtgacgccctcgccaggttttaaactgcgaatttgtcccacgtgagacggctaagatgactaatataaccgtctaagcaagccaaaggggattgaccataccttgtgtcaaggaaagattactattcgcagctctatgggtgcacaagttggccgcttcaagtcacaggctctaaggtatcactggggttccca

SEQ ID NO: 130916 - DNA, 809 bp, Arabidopsis thaliana columbia
gcgcgtacgcatccgtggatcctttaaagcggccgcccttcatcttgtgttgtaattttttttttaaaaaacccactccgatcatttattttacatcgggaatatgtgaaccagaggttgtattcccaaaacataatttaacaagctatctcttttcatctaatcttccctcttatgtttatatgaaaccgtattaaagatccgccccagccaatataacgccaaacgaatccctagattcgccactttttttaaatactgcatctttatatacaaacactaacctgattaaaacagttaaacggggaccggcgaccgaaactgatcttcattttcctcctttctcttacctctatctctgtcttaggagaagatgaaaaacaaaaacatcttcatttactttcaaaaatggtgcgcaacaatagcctgcagcaggtcttgaatcaaattcctcctctgttaggcatttggcgaccaaaccattacggaatctctatgtacaccttgcttattgttggttgtctactaatccatggaagggatgcctcgagttttgaccagccaccggtcaagcaatcaaatccttctactctaactgtaggcgaagttgagttccaaatttcattctaacacatccacggggaagactaccatcgattgaggaagaagaacggaagatgggaacaccccgcatgcccgaaatatgtgcttgtaacggaaaatgaagaatttttgggtggtacaattgggaattgcgagcttttcttcatccctctaaaaaccgatgccacatctttgcggccctcata

SEQ ID NO: 130917 - DNA, 679 bp, Arabidopsis thaliana columbia
  unsure (1)..(679): unsure at all n locations
cactacgacgtcgcatgcacgcgtacgtaagctgggatcctctaaagcggccgcccttttttttttttttttcatcgcattccaaanaaaaaaaggcaatattgtccagcattccacataatccccgtttccttgtttcagtaaaaaaccacactagtctcaacgatgtattgaactcgaaaggctcaaccagaagaccagccttggagggtcgagaaacaccccatctaccgggacctttgatcccagctgttggccgccggttaacggcacatatatctgcatcttgaagccaaggatgactgaaaaaaacggatcgacatgctcactgagatttaccacaggctggttccgccacagactacagatcctagcctatgggatccaagcagggggttaatgactggacctggggattggcggaacccaacaagaaccgcccggctgctcctaggctcctggatctctcctatggcggcacatgtgtgcacattaccaggcctcacggctcttcgatcgatctctgagggaggctcgcgagatagtgcaggcctcttcggatgcggacgggttcatgcagtaccacatggatacaggctgatactggcggatgataacactggagcgtcggtttgtgatgccaatcgaagaactggtggaggcgacatgtgttgagatg

SEQ ID NO: 130918 - DNA, 653 bp, Arabidopsis thaliana columbia
  unsure (1)..(653): unsure at all n locations
ctacgacgtcgcatgcacgcgtacgtaagcttggatcctctagagcggccgccctttnttttttttttttttttttttttaaggaaacactgtcctataataattaaggggacaaccaagcgtagtttgctcaattggaaaaaaccctacacgagtcttatttgccgccggttcaagagacgcttgaaaagaaactcactttacaggtagtggtttcgggcctgaattataaacatctttgcctcagaacctgcgggtattaaaaaaaaaatccaaatactgagacttcgggggatatagcgacattgtttcaaagacccgttaatgaaaattttgctttcaaacgggacttggttgattggtgaatagagaaaactttttttagctgaagaacactcgttcaacacttttgagaaaacttgtggatttagaatcggaagagtgattttgtcaatcaacaaaacaaccacttgggaaatcatgggcccatctgtgggctgatcttgaacacccataagggcagatcccaatgccttgcaaaggtacttctaaagaacactaaccaccacatggggtcaaccttgatgattacaccttttgcttgaaagcaagattccctttcctgaagaggatcgaccacaattcggccggga

SEQ ID NO: 130919 - DNA, 746 bp, Arabidopsis thaliana columbia
aattccgtgcctatagacaagcttgacgtcgcatgcacgcgtacgtaagcttggatcctctagagcggccgccctttttttttttttttttttttttttttttttttttttttggaaaaaaaggccgtttttttttttacctccaaacggtttttccaaaaaaaaccaatggtttaccaaaggccaataaatccggttaacggcctgccatgtcccacctaattagtatttccccccaccctgcccaaaccatttgattttatttttcccagccccaccttaattaaataaaattggttccccgggaataaaccctttcctttaccccccttgagtttgggccgccgaaatttttataatttttatcccccgcccccccaaaaaaatgggtgttcccatgggacgcgggggtttaatccttcccgtcgccgccccagctttgaaaaagcaccgggctaaaaaaatctccttttaccttttaaaaatcggcaaaaaaatcatcgggggggggctgaggaccaaaaacccccggtctgtatggaccaatcgggttataataatacacatcaacgtttcccaactccatatggccccctcgttaattttcggacccgtgggtcaacccgggaattcgggaccgggacctgggggcgaaccagttttcctttatggggggggcggttttaaaagcttgggcggaaaccaaggggggcaaaaagctgggtccccctggggggaaaaaattg

SEQ ID NO: 130920 - DNA, 833 bp, Arabidopsis thaliana columbia
  unsure (1)..(833): unsure at all n locations
agactatctacgacgtcgcatgcacgcgtacgtaagcttggatcctctagagcggccgccctttntttttttttttttttttttttttngggagccagggccgaagctttttttgggaactggaaaaagaaacactcccttcctaaaccgcatgaaaacgggaaggtcttcccaaccaaccagaaagggtttaaagaacccaaccccaaagaaaaaaaattcaccttaggtggctttaaaaaacctggacctttaaaatgggggtggtggttattaaaagccccacccccggtgaaggggttgaagaaggcctctaacttaaaagccccctaaccaaattttttctcttaaccggggatttttcttaaattgggaatgggaaggtttgttaggcttaagaacattgtaccacttttttccacccaccctggctttattggcgggtggtggtggctttgaccttgagacccacttccccccaatggtggatttgcccgattatttgccgtcctttaagcctcccgggaaaacaaccccttttttttcataaaatcctccaggggacctcggaccccggggttgaacccggaatttccgaccgggacctgtggggcggccagcttttcctattggggggcggtatagaacgtgggccggaacaaggggcaaagagtggtttcctgggggggaaaaatgggtaaccgcctttcaccacattttccccacacaatatttcccaaaaccccggggaaaccaaaaaaaaaggttgtaaaaggccccggtggggggggcccctcaaagggggagggggggggcttataacccccccaaat

SEQ ID NO: 130921 - DNA, 747 bp, Arabidopsis thaliana columbia
  unsure (1)..(747): unsure at all n locations
cctttacactagctatgacgtctgatgcacgcgtacgtaagcttggatcctctagagcggccgcccttttttttttttttttttttttggtttnaagcacccaagcccgttttttttaacacccggggtaaccatctttgtcccggagacgaagagacaattttcgagtccacttttgaacggagctcatcatctgctcggcgagaactccactacgagggaaaccttggcgtcaaaacattcgctaaaaaataaccccagaggctgaaggcattctaaaaatcataatagtacaaccattacgtgcgggaaaccttaaaaaccgcaaagttcggtcccccatactttatatggctgtggcgacccgagggatctttaaccggaggagggaccgctaaggcgggagacgctgtgggataccacgggaaataaccgagagatctgattgtcacaccgtgggggggtaaaaaacaaaagggtctccactgcatattatagcccttatcgcgcggtcttgcgtgagatacctcaacaagcctgtgcctgttttatgaagagacaggaccagtcaaattctaccgcacagctggaggcggacggaaacacatatgagtcaactcctggcctgaggaacacccttgcggtggtagatgattcaaccgatattgaaaacggatggcgctcatattaagcccatgtgaggaagggagggttaaatgataacaatattttaaacgggatatcttt

SEQ ID NO: 130922 - DNA, 737 bp, Arabidopsis thaliana columbia
cacgacgtcgcatgcacgcgtacgtaagcttggatcctctagagcggccgcccttttttttttttttttttttttttttacaagcgaatcaaatctattttgttcatttaatgggttggactttttgcagctattcaaagctatctttaatacacgctgttatctcagacggacaaaacgacccagcaaatcctgccttgggcgtgtgacaaaacattggtaatagattaagaagttgcgtttaaggagcttccgggctggtatttaatccattcgtcgtaatctttaagcaattgctgaagcaaaaggggaaccagtgtctcaaccagtgtctgcgttactagattcccaagagcctcaacagctgatactggaagcattgtgaacggacgcgttgagatctctagagagacattcaatctcacgtcaacttccaaaaatggctctggatgatccatgttgcaagccatgcagtttgtcattattgttgaaaacctttcacatttggatctccaataactctgatcctttcaacttgcaagaaagcagctcaactgtacaatcttcctgtgtgggagtgacccttaaaaccagtactggataaactgtaaaagctattaactgaacttttggcaagtacatatgtaagtgcatcactatatcactaatggtacttgagagctttggtgacacagctcatgccaaggggttaaaactactgaagcactctttctcat

SEQ ID NO: 130923 - DNA, 927 bp, Arabidopsis thaliana columbia
ccaaatcccgggtcgaccaccccgctcggccgtcgacccccaagaaagaaccaaaattacacacacgcgactttttatttttttaactccacgatcgcgacacctacctcctattctctgcgcgaaccttcacaacgtgcagatcgctaaaaccccggagttacccaccacaagcctcgtgcagcacaaccagctttcgtcagagggcgaattagctaacaggccccctccgatcactcttcccaacgattgcacagacagagaggacaaaggcactcgcccacgaagaagacatccacgcgcggcgtaacgtggcggctacgctccagcgagaacagcgacacatgttcagcctccctagcagagccgtgtacgtacaaaactttcaaagcctgtcacccttttccttcgacccaaccaatgtccacaccgaccttggagtccgcgcacgtccaggggaaatgccttatactatccacagagcgagtccatacccaaatgattataagaaggagaacgcccccccaaatacaacttaatactacggactatacttataaccaccggctgaggactcctatccctgtaacacccacgcccgaataacaacaaaactccccaggaagaccaaaagacccaaaagcagatcgagtgtcgttcaaccggttgaaattgtgcgcctccaagtgcgttaccccttggaaaagaaaagcgcgcgctttatcacgctcccagtcgtcacggaaggcgaactcacaacccttcataaaacatgtgggacctctaagcccccagaactggccaacgaccactcaacccaaaatcatgacacaatatgcttgaaactcccacacgcagcgtcgccagataacagcacgcgggtctgacacaggtaactgaataatcaagcactcagcgcaaagttta

SEQ ID NO: 130924 - DNA, 260 bp, Arabidopsis thaliana columbia
ctgcgtcgtcgcgttaggtagttctgcgatgagaattcttcgtctctcgctagctttgggtgacaatgaaccctcgaagcacgatctctcttctaagtatgtacatcgtgctcgttacttatcgctgatgctctttgtctgcctctctctgatcgtgatattattgtacgcgcgtattatacgaacagtggccatgtaattattctgtcttggacatttgtgcgtgactattgctcgaatacatatcctttcttaggtgt

SEQ ID NO: 130925 - DNA, 379 bp, Arabidopsis thaliana columbia
aaaccaacccacgacaggagacgcccacaacaggaaggaagacagcaagaggaaaaccgaagacacgcgagacgggaaagacaggagaagcacaaagaggggaagcagcggagcaccaacgggccacggaaaacggacaaccggagaacaaggagacaagggccccaggaagagaaagaaacaaagagccgaagaaccaggcaaaaaggaggaaaggagagagcgaagaagagaaacagccgggaacagggaggcaaaggggcaaggaaagaagagaaaaggagcccaaaaagggaaggcgagcgaaaagcgacaaacaccggaaaccggacaaagaaccgaaaagaagaaccgaacgagaccaaaccagaggggaagc

SEQ ID NO: 130926 - DNA, 560 bp, Arabidopsis thaliana columbia
ggaattccggggtcaacccacgcgtccgtgctccagagtagctgctgctggacctgagacagtttgtatttttagctccaaatccttcttcagggaacgatggatcttctttgattccgacctcgttcacaactgtactcagtgccgtactgttcgttttgttcttctctagtgcgtaaaaaaaaaactgaatcttttttcaccagctagatttggctgtatgaaattgattaatggtttttattagggctaatctatgtatgttttggagtgttctgttttgagaccatatcggtttctctattactagcgtttactcttttagtttatgttattactttgtctcacaacattggtccttttattcgatctatcgcttattcctgtccaaaaaaaaaaaaaaaataaaacgaaaatcgtacaattgaacgcaatcatctgaccatccgaatcaaagccaatttaactcaccacaacatatattgggggggggcgtcttttaaaagaaacatattttgcgcgcgcggttgcgggaagaaaataaatttttttttttgttg

SEQ ID NO: 130927 - DNA, 1187 bp, Arabidopsis thaliana columbia
  unsure (1)..(1187): unsure at all n locations
acccccccgccaggaagacaccaacaagagggaggaggcgcgaaccgaacaaaacagaaaaggccatattatgattatacacgaacacccaccccgaaangaagaaaacaccaacgaggggagcggggggcggaaacccacaacagcaacaaacaggacaacagcccgacacccccaacaaaaccagacgaaagacgcagaacacgaccaaacacaaaaagcacgagaccaacaacacaaagagcaaacaaaccgcgggagcaaccaggaaacaaccaccgaacaaaaaaaccacgcgcccacgccgcaacgcgagcaaagaagagaggcgacgccaccgacacggagaacaggagaacaacaaacagggcgaaagaccaagaccgcacccgacaccgacacgcaaacaacggagaccacggacaaaggacaaaccggaccgacaacagacacaaacaaagagcggacaacacaggacgcgaataaaccaaacccgaccctgccgagacaacgacagcacgcccgagcgcgcctaagagagaaacagagcgggacgggaccgcaccagcgcgagcaaagaaaagcacacagcacggagaccgacaccaaggagccgaaacaccagaaaaggacaaccgaccgaagccacaaacaaaaaggaacccgacgaaaagggaaaacgccgcgaaccaacaccacacaacagaaagcagcacgacaccggcgcaagaggacagcaacaagacaaccagaaccagggaagcaccacaacccccgccaaagagacacagaaacacgaaccacccacaccaccacacacgacaaacagaaacaaagaccccggaaaacgcacagaagacgaccaagaaccacaaaaacacgcaagaagccaaagacaatacccacgagacaaccacacagacacgaacccgcgggaccaaaacgaggacagcaagagcacgaccgaacaaaacaacaacgcagaaggaccacgacaacccagaaaacaacaaaaaccgcaaccaaacagaccaccagaacaaaccacccagcacacccagcgcaggaacaccaaaacacgaggaaaacagcgccacaccacacgaagcacgaacggcggcaccaacgaccaaccagcagacgcccacaaaggcacacaacgcacaacaccaacaacaccacacacg

SEQ ID NO: 130928 - DNA, 766 bp, Arabidopsis thaliana columbia
aatttccgggacgacccacgcgtccgggagagttggctttagacaacacacaaaatgggctgaccccactgtctgttttcacatctacaacagcaaccaaaccttggtgaaaactactaccagagattcaaccgctggcacaaccaccactgacggggataccacctccacagactctcctctgaggccaaaaactggccgcgtaaccaagccaacacgtagaagggccagagcctcacgtagaacaccaacaacgcttctcaacaccgacacttccaacttacgcgccatggatcgagaatacactggcggcccaaccgatatggctttcggggccggcaatactaccagtgcttgcagcctgacttcatcggaggatccatcagctggatcgtctgaacaagctccctggcgatataatttccagcctcacgcgccgctacagccaccggaacggccttacatgttgtctatgaaccaacgcgaaccccgaggcggggaaaagcaacatgaacaaccccaaaacgaaggttgccggcgaggtcgggacagagggaaggcctgggaggaagaggctcttgctccggaccgcaaaggagggccgcgaaaaagggaaactccgtcctacctgccgaggggaggccaacggaaaaaaaaccgaaaaggggaaaccccttattgtggggagaaacagtccacctatgggggacgtaaccccgggcaataaaaaggggccaaaaaacaaattgggtggacgggcgaaccc

SEQ ID NO: 130929 - DNA, 1068 bp, Arabidopsis thaliana columbia
agattagggtagcccgacgcgtacggctttgctttgtcctaccggacgatctcccgactacatcttgttgtgtcaacccgaactgcacaccgctaaccgtgttctgatcatacaaaaaccggatcaccactctctactctatctccgagctgagtgacctcctttagttcccacattacaaaaaaagcgttaataaattgtatctccgatttcccgtaactcgcatctacgacgcaaaaccactatattcttctcctacctctaaacagagattttctcttttctgattgcaagccgtcgcacttacttatcctgcgctcgtagccagcagaacaatgaccggacgctccaccagtcaaacttataatcccgtggtaggtcagggacgattctctcttgctccgagatctacagaatggtctagtaccaagacgtgtgcaggaaaacaatgggcgttttaaatcaagcgagaaagaacctatgcctccactgaggatcagaacctacactttagaacattccgtgaccccaacagaaatccccgcaagaatccctatccggcgatccgaagaattttccttatctcaggaaccgcctattaagacatttgctaaaaaattatcaccgccaagagacccgttctctgccttttccaccctttgcggagaccgccttccttttcactcgtgatctgtggctacctcacaaaataaagacacctcttactgcgacaacggagaatctcgataaaccgatcgttcctgcggagtttctctgtacacacgatctctatcaaaagaccatacccttacaggtaaatcggcgcgccatctccccggcatcttaaccacaaccgcgtttaagagtggcgacaatttacaaggctccatctctgtaaaacctttaaaaggccctgggtttccaacccggcaaatttttcggaagccctgatcagcgaaccttggacgcaccgttccgtgctcccctactaactcttcaccccgcttctaaagaagggccggttacgaacacgggttcttaatttgtgctgaggcgaaattccgggaa

SEQ ID NO: 130930 - DNA, 758 bp, Arabidopsis thaliana columbia
cggaatttaccgggtacagacccacgcgtgccgtgatacagacatggcagtgtgtggctaaacagtccgcgacagtgtttttctaatgattaggaaggatatggacgacgctttaatattgggtatagcaagcagtttgggctacaaaccctatgaatttgtcctggtcacctgcattgatattaccagcatagggtctcgctcatattagagagtctacctatcgagactggtccgacatttggagttgttacatccgtcaatgagcgcaacgtggacgcacttatgtggcattgactccgtgtcgcgacaggttccagtcaggagtgatgcacacatatatttgtacaacaggaacagtgttaagggacgaagtgcagtggtggtgttggagttcattgactacgtgtacaaagttatcaggtttacctatgagctaaaactttcaacgaggccagacaagtaccttggagatttggaaacatgggataaagctgaagcggatcttaaagaagctatagaagcttttggaaagccattactgttgaacgaaggagatggtgcattttatggtccaaagatagacatcacagtttctgatgccatgaataggaaattccagtgtgctactgtaccgcttgattttcaaccttcgattcgcttaaacttggaatacgcagctgaagatgaagcgcaaaaagaatagaccctgtaatgattccatagagcccgtgttggggattccgtggaacgtataa

SEQ ID NO: 130931 - DNA, 720 bp, Arabidopsis thaliana columbia
aatttccgggttcagacaccaacgcggtccccgcaatcctctctataatacgaattgtctcttcttctcaaatctgccgcaaaagagtatttatccttacagctttcttcgacatgagactcagcggtgctcccatcggacggatcgagatggagcttttcgctgatacaaccccaaacacggcggagaatttccgtgctctctgtaccggcgagaaaggaatgggaaagctaggaaagccacttcacttcaaaggatcgatcttccaccgtgtgattcccggattcatgtgtcaaggaggtgatttcaccgccaagaacggaaccggtggtgaatcgatctacggtgctaagttcaaggacgagaactttatcaagaagcatacaggagctgggattctctcaatggctaactctggtcctaacactaacggatctcagttcttcatctgtaccgataagacgtcgtggttagatggtaagcacgttgtgtctggacaagttgttaaaaggcttggacgtcgtgaaggcgattgagaaagatggatctgattctggaaagacttccaaagtcgttaccatcactgattgtggtcagctttcttagatctaagtgaaaaagtgagagactctgatctttatgaataataatggcgtcttttgctatcgggtggtccttcctcttaccttaaaggaatattctggttaggggatgagattt

SEQ ID NO: 130932 - DNA, 232 bp, Arabidopsis thaliana columbia
cagaggcccgggcgcagggcaacggacgaggaaggccagcaccaagaaccagggaacccgcgcaacccacaagcgaacccggggggaaaacacaaaacggcgaggaccagaaacaaaacaccggcaagaaaccgaagggcgcagagcgccaaggaaggaaacaacggacaaccgaccgaccaagaaaaccaaacaagaacggaaaacagcacgggaaagccacaaaaggaca

SEQ ID NO: 130933 - DNA, 412 bp, Arabidopsis thaliana columbia
cccgcaaaaggggaacggggacaacagcggagcccagaccccaacagggcaacccagcgggagcgagaggcgacccagaaccaaaaaagcgaggggcgaagacggcggaggaaaaagaggggaaccccaggaagaccacgcgccaagagccaaaaaggaacaggggacgaaggggccgagaaacccgcgagaggcggagaaccgggaggggcgaccagaccaagcgaaggcacggagggagaacagaacaaccgcgcgaacaccgaccgcccgacgacggaccccacaggaagacggagagacggaggaaagaaacggcataccacgccaacgcagcagagacgcaagccaaacacaagaacagcggacgcacaagaagaggaccgaaggcaaaagcacaccccagacgcga

SEQ ID NO: 130934 - DNA, 349 bp, Arabidopsis thaliana columbia
tggactttgtaatattaatagctttttttaggaagagggatttgcttgatgtggtagtgtaaagggttataagtatgagaatataagtagggggtattaaaagtatggtgtcaagggtaagaaatagggggtatgagtgcgaagtatgtaataattagagtaataaaattagtataagattggattttaaatgtaatgaattagtttaaaattagattataatggtatgaagggtatgtactagtataagatgttgttaagaggttaagataattttataattgatgtatggagatatagttcggaaatttggaaatggtttaattggggaaaattaatagaaatgttg

SEQ ID NO: 130935 - DNA, 313 bp, Arabidopsis thaliana columbia
aaggcaaaagcacgacccaggcccgacacccaccagacaccacaccccaggaaggccagcgcgaggccatttagaattataaggcagcgccccggacacacagacccacaaacggcagagggggaacgccccacggaaaaagaaccggccacaaagccgcacgacaaaggaacccgaagcaagaccacccgagcaccgcccgcgaaccgccacgacaggcagcaaccaagcacgacaacgggaaagcaagcgcaacaaaccgacgcaacgcggcacggccgaccagggggcacccaacaggtccacagaccac

SEQ ID NO: 130936 - DNA, 672 bp, Arabidopsis thaliana columbia
  unsure (1)..(672): unsure at all n locations
gtttttccacagacaggccaagggacagacgaccgccacatgttgtgtgaagggtgtagaactacgaaaccatggaatgaccgagctcaaatcgctcatcggcctagtctaccatataggctggcgaccggctgtaatttaacgaacgcctaggaggctccccctgtgctacccagccactgcgtgcactcggacgtaatcttccagccgctactgggatcataacaaaccttacctctaaccaacgcgatgacttgacacataacacctactcgcgggccttctctgatgacacaaatgggcatagccttctcctgtatactcacaaagagagctcgttaccaacgcataactaccactggtgataactgccccagtcgatcaacatttcccggaaaaccagggcccgcttagccactcaatgggaaggaccatcgttttcgcctaaagacctttccctccgggttgccccttcccaatggaggaacacgcggccacacctaatagcacacccccccgctaccccgtaaacgtagactcttcaaaagaaagacatgatgatcnaacacgtaagatgtcctccaaaatagcggaattatactccacacacccgcccgacaataaagtggccgcccataaataatggagacgcgcgagcacaacgtcggatta

SEQ ID NO: 130937 - DNA, 713 bp, Arabidopsis thaliana columbia
acttccccgcagaagacgaagagccacacccaccagcaagcattttttttttcctatacgctcccccacccgcagaggaggtaccatcccaggctcaggccaccagggaccgcaccatacaccggcttggaagaacaatccgatgccattcccggcacacaccgacaagacgcacacaagggacatcaaccttccatcgcaagcaacgggggaagagttaaccgcatgaaggcgtggccaccaattggaaagaagaagttggagactctatcttacctccctgaccttagcgacgacgaataggctaaggaagttgactacctactccgcagcaagcggattccttgcggagaatccgagaacgagcacggatttgcgtaccgtgagcacggaaacacacccggatactacaacggacggtactggacaatgaggaagcttccattgagcggatgcaccgaacccgctcaagtgatgaaggaaggtgaagaatgcaagaaggagaacccgggcgccttcataacgatcatcggaatcgacaacacccggcaaggacaatgcatcagttgcattgcccacaagcccccaaagcctacacccgaaggttaaattatccctatctaaaaaacaacccgcaatgaaaatgatccatctggactcaaacaccaaatgaacacaaattcggccctgggggatcaccaaatagcccctcc

SEQ ID NO: 130938 - DNA, 685 bp, Arabidopsis thaliana columbia
ctgggtcgacccacgccgtccgtttttataacacagtggaaatgcgcaaccgagactgggattcttttcttttttttcagccatcatgaaagccaaagagccatgtgcgtcgtacgtactgaacccaattcacgcgtagctctgagataagcagagtgaccaagcaaaaggctgatgagctatctcttagcacatgtctattcgaacacgttcgtgtgcatactttccgagtagccacaagaggcagtagagtctaacaagacttccatgaaatccccaggtcgttccgtaagagatagggaggtctaaggtgatgaactctaacgccatgggcaatagctcttaagctgtagcaggtctcgcgaagagaagcgaagatctctgggtcggttaatgagacgccctttttgagcggaggttccgaggtcttgtgatgacagagtctaaagcttttagtaggctcccgtgaatggattggttttcgatcacgagaggagtgggggatggtttggtgatagtagagggaagtgaaatccactgggtggcggtattggttttagaccctctgctgtgcttccaactggtggggcgcatggtccctgggctctgtctttttttcgatctggggacgaaatggtaccgcattcccccgcaatgcgggatttacagccacgcaaaggtcctt

SEQ ID NO: 130939 - DNA, 742 bp, Arabidopsis thaliana columbia
  unsure (1)..(742): unsure at all n locations
gaacacgaagcgaacgacgacaggacccctccctcccccagccgcggcccntttgtattgtacactcgtctggagaaccccccaccacagaaggcccgggacgacccacgcgnccgcgcggcgcgacgacacacgaaaagcgcaacgcgcgggattctttttgccggcgagcaggacgcgagcaatacaggcggggggagggaggggaaccacaaggacgacgacgcaaccacgcagaggacacacaacgacgacgaggaccaaacagggggaccagacgggggaacaccaaccaacacacaacggcgtccgaggggcaaacccccaaggcaggacaccacaagcgcgagccacggcggaaccaggaagcgcaacaccaaggaagcggcgacaagacgggcaggagaggacaccagcagaggccaacgaggaggggggagcagcgacccgccggagaaaggacacaacaccacctaccgggagagcacgcgcgccacagcggcgggaggagaacagaccacgaggaacgcgcggagggaaccgcgcagccacggagaaaccgacaccaccaccgagggatggacacacaaggggaaacaggagccaaaaagcgccaaggccttccggtagggcgcaacagcgaaaaggaacccggataaatggagaaagggtccaaagaccgcacacaaacggcgcgcgcgacggcacacaagggccgccggaaggaaaacgaccaggaagc

SEQ ID NO: 130940 - DNA, 1148 bp, Arabidopsis thaliana columbia
gggggaaagacaaacaccgaggaagacacctagagagggggagaaacaccaagagagggcacgattatttttttagcacaacaagccgagaacaagaacaagagagagaggacgaaacagcaagaaaccaaagagggatagcacacacccacgacggggcgaaaagaggaaacaagaggacgagagaagacgagccagaacgagcgcgacgcagagaacaagcaagacggggaagacgcacggaacgaaaaggacagacgcggacaagagagcacggaaccatgacaggaggaagcacggaacggcgacggacggggcgagcatcacaggtacagacgaacgacgagcaccgaaggcacgggagcaaaaccccaacggcgaacacaagtggcaagaaccgcgggcgagaaccccggcacagaggcgagagacggaagcgaaggaagaccgacacgactaaggaagaacagaggacgaagacaaagcgggaataacacgagaacacacaggggaaacggagaacaaaagcgccccaggacgaaagcgcaaaacaaaagagagaagcagggcagacccaacgaccctaggacgcaaggaaaccaggggcgagacggcgaagaccggaacatccaaaggaaatcaactgggccacaaaaggaagcgggagataagaccgagcctccgacgaggcgcagggcgaaggacgcaagagggaaacccgacagaagggagacaacaaacccggcgagcccgaaacgaggaggacgtcgcccgcacagcagtcggcgcaagaacgggccggcgaggagaagcgcaggcaagacaccgggacacacaccaccaaacaagcacagggaaaacaacgccccagggggggaggggcgccaccggagaaaacgcaggaaagggacaggggagccctcccgggccaaaagagagagcgcgaacagaaggcaaacaagggcgcgcggggcaggggtcaccaaacacaccacagaggcgggccgacgaggaaccccgcgagaaaaaaaacccgcacgggaaacagaaaaacggagcggaaaagcgactcaagcaacgggacgagatgaggggacccgcaacacgacgcgacggaaggacaggaataacgggacaccaggagaaaa

SEQ ID NO: 130941 - DNA, 605 bp, Arabidopsis thaliana columbia
cttttgcaattttcccgagaacaatctttgaatttatgagaatggaggtctggtctggtaggaatgcgggtcgggcctcgtaggaggacgggagcgttttttttttttttcccacggcccggccgtagacagactttaggtggggggaggtcggacacgtagtaaggagtcgaccactctttcactcatgctcacgagcgtgtgatttttctagggatgcgggatctctttgagttacttcgttaaagttctatacatgattgactttgatggagtaattatgtgtctgtctagaaaggggaaacttatcgtctgttagaaaagggcctatatcgagtgaattggtgttgacgacatcatatgatgagagtaattaataacaacgtatatcagagagtgctggagggcggtaccgagcgcctgttgtagaaatgtatgttgcgtagtagcaacatccatatgatgtacggaatatatgttcgatgcgttaatacagatacggagtagctggtacatagtcaaaggatatattcataagagtcagattgaagcaacgtgttccgtacggcaggatgaacactattgcaacttactcctaccgaagt

SEQ ID NO: 130942 - DNA, 631 bp, Arabidopsis thaliana columbia
  unsure (1)..(631): unsure at all n locations
cgcgtccccgcgtatacgtggttgatagaaaggaccctcangagcaaatttgccacgggcgctagcgggcttttttgttgatactcttcagaanacacaccgcacgagcgcccgacgactgagatgtgtgtagcgtattaagcagttgtctaacaagggcactcgccacatggaggtatctcgagccggctgtgatcaatttataagcatgaatacttctgtgctaataggaacacgatccagtctcatgtcagtcatttagaggggcgcataggctagagttgacaatattcgctgggaagcgcgtgatgatgcaatttggatctgcaccggttaatatctattcttgggacaaccactgaatgtgaattatgaaaatgaatttttttgttcccacagagaaccgttgcttattgcgatgcaatgagcataagagggacggtgaagattgtgacgaatgctctggtatgctgaaaccgccccccctgccctcttgagaccttgtgtccaagttcagttacctaataatgctgatccacccgctggcaatgaaagggtttaggaggcacctaagtttttggatctggcttgctccccatgatctagaacagagacggcatccctgataata

SEQ ID NO: 130943 - DNA, 726 bp, Arabidopsis thaliana columbia
tgcagggtccgagccacgacgccacggcgtctcgcatgatgcgtgagagaggaggaacaccaggaaaaaacagcccttttgttttgcgcccgcggaacaaaacgccagctcttgatagaggaaggcacaacacggaaaagctgcaaaggaggcaaacctgacagaaccaggctacccactggagctgacatcacctgcgcctatcggtgacccaagagcaactctaagaaccccacccgccgaaatatcggtacacgaaaaagaagaggaggaggaggagaagcacaaaagaacctatatggcaatgggatcctcaaacgacaagatatgaaaggtgcgggcgccgctctatacacagacgaacagacgaggctgacataccacaaaaggatgatgcaatggcgtacatcccaaggaattccctgccctccaatgcagcatcattagcatgcaaacagcgggggaacccaccagataagaggagctattggcacaaccctgactcaaacatgcggagagctgagtacaaccgcacatatgggcaagactacaaattcaaaaccggctatgacgcatgagacccgcccgggcgggggcacattctggggtggggaagaagcgggaaaaaggaaaaacgacccccactgaaagaagaaaaggcccaacagacggctatcaaggtggcacaaagaaggacaacaaaaataatcacacgctggaagggac

SEQ ID NO: 130944 - DNA, 1143 bp, Arabidopsis thaliana columbia
ggagggaagagagaaggagaaaccaagagggggaccaaaaacgaaagggggagacgaccggcaagacgggagacatttttatttattacaacaaagaagaagcaacacaagggaccacgaggaaggaggaggggaagagaacgagacgacaacaggaaaagaaaggacacaagccaaaaaacgaaaaggggacgcgaagagcgaaaaaagaagacgagaggaggagcaaagaaacacggcgagacatcgagacgaaaaggcgaagacaaacaaaggaagaaccgaaagaaaacaagggaaggagaaaaacaggacgtagaccacccgaagacgagagaaaacgaagcgaacccgagaaagacggaggagagaagaccacggagacgaccagaaaagggacaagaaacaagaacaagaagggacgcgacgagaagacagagcagaggagagcaagggacaaacaagacgaaaaaagaggagaagtgcgagaggcagaggaagcgaacagaaaggaggaaggcggggaaaagaggagcacaagaaaagaggaagagagggaagccaggaagagccgagcgaccagacaaaagcacagagaagaaaagaacgaaacacggaaagcggagagaagcggagcagaaacagaaaacagaaaaaaagcggagagcccacgacgagaaagcgacaaaaaaaggagaggaaggcggcgaggaaaagaaacaagcagggaagaagacacagaaaaaagagaaaacagaggcaaggaccacgaaacagggaaaaacgacagggggccgagaggaaatgccaacccgaaaccaaaagggagaagacggcacgggtacaaagagcaaagggcggccaaacagggaaagagggcgaaccatcgaaacgggagagcaccgacacgggcacgaacaaactgagaacgaaagagacaagaagaacaggcaaggggcaaggagaagagaacgcaagggagaaaatagaatgtagagaaagaaacaaagaggacccgcgaggggagaggacggaggaaaagaagaaacacacgggaaggggaagacggaaaagacaacaacaggagagaggggcacagaaaagagaaagcccaaaggaaggggagcagaaacaaggacaaaa

SEQ ID NO: 130945 - DNA, 642 bp, Arabidopsis thaliana columbia
ttccaggttccgaccccccggccggcctcacttaaaaagggacaacatggcgacacgtgcgcactattatcttttggattcgggagagccgacgaggcgactcacccggactccattagagccacttcggctgagtttctttacacgtacgtcttcgactttgctggagaaggctcaatcctcgctctatacaagtcgtattgggacacggcgggtcacacggggacaaacacgcctggagggttagctcctggtggcgtaagctcatgcattggccttgttcgcggctgtttctgcagccatcaatgtctctggtggccacgtcaaccccgctgtcacttttgctgctctaatcggaggcaggatctcggtcattcgagctatctactattgggctgctcagcttataggtgctatcctcgcttgactcttgatgaggcttgcccctaatggcttgagaccagtaggtttccatgtagcataaggagttagggaacttcatgggcgtactgatgggagatcatacttcacgattggcttttggaattaatggatgtcttacctccgaccccgccacctccggattccccaaaacagaagggggggggacggtaaatttggcggagaaatccaattaagtgc

SEQ ID NO: 130946 - DNA, 214 bp, Arabidopsis thaliana columbia
tgaccgatgtcaaaaagcttagtagaatttgctgacagactatttccaacacgtctattagcactaacgggtatgaatagataaaaacttgataatctaagggactagctttgtccgacggggtttgaaatatgacacggtaaagatttctagctttttcaagtacaggagagccgggtttatttacgtgcatatgagacgtctcaagtcagaa

SEQ ID NO: 130947 - DNA, 980 bp, Arabidopsis thaliana columbia
  unsure (1)..(980): unsure at all n locations
taaaaaaggaaatggaggggggtggagaagagagggggtatagatgggaagatggtattgatagaagggaagagaaganttttttttttttaaaaaaagggaaggggagaagaataaagatggtgggtaaaagggggaaggagaaaaaggggggggagatagggagggggggggaataagggaaaagggagagggataagggagtgagtaggagatgagaggagggagtagaattgtgagaaaggaaggaagggaagagtagaaagaaggtgatgggtagtaggggagagggaggaggagttagggtgagaagaaaagaaatttgtaaaaagggggggaggtggagaggaagagagaaatggagagtaaatgtgaagagggaaagattatgagaaggatggggagagaaaaaagaaatgtgggaagagaaagaagaggggtttagtgggaaatggataagggggaagtttaagagaaatgttggaataagggaaagggagggtggaggtttgtaggaagggaagatgtataaattgaagaaagggatgagaaatatagaagtgtgggaaaatgagaggggagggagaatgatgaaagatgagaggaaggggaagagggtgttagagagaagtgtgatgaaagatggtaggggaaaaaaaagaattattaagaantgagggggagagataaatagtgattgttgatgaagagaaaggggggagaaagtaggggtggaaggggagtgaagagatatataaagaagagagagantagaatgggagaataggtggagagggtgaggtaagtttagaatggtattatgagtggaaggtggagaaaaaagtaatgaaaagagggatggggggatgatgaaaaagtgggataatttatgggggaaagaagagttagattggagagatgaaaaggggagaaatagtgtagggggggagaaaggagagatgaaagggaggggggtgaac

SEQ ID NO: 130948 - DNA, 701 bp, Arabidopsis thaliana columbia
gagaaaaaccgggaacagaaccacgcgggccgaccgagagagagacaaaccaagggccaaagaaggtttaaaaataggcaacaagacacaaaggcggggaaagcacacgaggcgccaacccaaacaaacaaaaagaggcagaacaagacaaaggacgggggccccagccaagagccccccagaggccacgaacgaggaaggcaaagacagcagcgcaagagccccagcagagacccaacaaacgcagaaacagaacacaaaaaaaaccgcaacccggaagaggcacccccaagggacggccaccgaacaaagggacccaaagaccaccaagaaaaaagaaccgcacaccgacccgggaacaccggcggcaaaaaaaaagaaaaagagcgccgacaaacccccaccgagaggacaaacacaaaaaaaccgacccccaaagcaacgggggaaaaccgaaaacaaccccccggagaatgagtacggacagacccagaaacacaccaacacaaagagccaaaaggacaagaaccgcaagccgaacccgaaacaaaaccaaggggcggagggacaacaaaagggagaggccccaagggaaccgaccacgggggagaaaagacggagccccgcacaacccggaaaaaaccgacccaccacaggagggggaaacagcaagacacagaaaccccccacgggggaaggga

SEQ ID NO: 130949 - DNA, 701 bp, Arabidopsis thaliana columbia
agaaagcgctatagcgcgagcggccacggcgcaggcgcaagcatataagatcgataaccccccaccaagggacgtaagcacagatgaggaaagggcaacaacagaccatgcaggcgcggcactcacaaggagcagcaggcgtccaaaccagagctacaagaacccaccgtaccaggcaggccggatgaaccaaacgtgcaaacaagcacggaaagggactgaccgccaccacaaaagggcgtgaataagccgcgagctctcacggacatcccgacatgtccaagagcggaccatggaagcaaggatcttgaagaggctaaaagcacagggggcggcacccgagatcccggaggagatgtaccaaccaaaaaggaaggccgctgccacccggaaacatctcgagaggaacaggaaggacacagcagccacccacaagctcatacggggtgaaaacaggaatcaccgacaggctcgataacacaagaagaccaagaagctacctcccgcctgaaagaacgaatccactagcgcgagcacccttgcggcacaagcagcaggccggaagaggatgccactaacacggagctcccctaggaggggaagaaagcccaacgaaagcgccaaggtgacaccaagatggacgagagcccccccgattaagaagcgcgagctaaggcgcccacgtgcaacaaaaagggtat

SEQ ID NO: 130950 - DNA, 568 bp, Arabidopsis thaliana columbia
  unsure (1)..(568): unsure at all n locations
gcgaatttttaactatttacaatggggaaggccgcacctcggggttatatttcttggtttaaccaccattaatcacaaatcttaatcaaagaataatggttcaacaatgttcaacctctcgttgctcacatcagacatgtgggctattttgatccgcactnttggttaccacgaaaaggttgattggctctacttcttggcatttgctactacagctactggactgatcatatactcaatgaaggagaaagatgaggaggaacaaagaagtggagaagtggtaagtgagaggaggaagctgttcgatgaggaggatggtgactcgctccacagcaaccttatagatgcttccacctgaaacctaatcaaatcaaagcctctggtttttacttgtctataacattgactgtgacttgtgggatatatgattattatttttcacacttttgggttggaggagtccacaagtttgtacatttctctcccaaactttggtaactgtaaagaaagaaaaatgtatttgatacaaaagatagtttcaaatggtggtagtgaaggtaaaaaaaaa

SEQ ID NO: 130951 - DNA, 1004 bp, Arabidopsis thaliana columbia
aggggaaagaagggaccaaacaacccgaaaccggaaagagagggacccgggggccgaaagcgcgcccgagatttttaagttttgacacaagggcaaacacccgagaagaacccgggggggaaagggggggccaaccagagggaaagaaaaaacggaacccagccaacaaaagccgaagcggggagaaagacagagggggatccgcggaaagcaagcaagcaggaagggcagaaagcaggaacaacaccaaggaacggagggaaaacacaaaaaaaagggcaagcgacgaacaaggcgaccgggcggaagggaaaggacaccgaaggaggggcaaggaacgaaggagggcaaaccagcaaaaaaggcgaaaccacgggaaggaaggcagcaaaccggggcacgaaaacgaaaccaagaaagcggggcggacggaaacgcaaacgacaagaaagggaaagggcgcgaacaagggcgaacaagcaaccccagggggacgaaacgaccaagggaagaagacggcagaggccgaaaaagcggcacgcgaacgggggaaggccaaaacctcgcacaaaaaacaggaaccggagaaccaacgggaaagaaagcgagccagcggcacggggagaagaccaagcgaaaaaaagaaaaagagggaacccagagggaggcccagcaagggccccgacgaaaaaccaaaaagggaaagggaaaagggaaaaaagaggaacaaaaaaagggaaaaaaggctaagaaccccgcgagggggggaaaacagaacggggaaaggaaagggaacaaaaggggcgggcccaacaccacaccgaaggaagaaaagaggggggaggcaaaccacgagaaaaccacccggaagggaaagggaaccaaaagagcgagaggcccacggagcaaagaaaccaacaccaggcgaaaaggggggccaaaaggggccgagaagggggaaaggaaaacggacgaaagagcccccgagaaccacaacccggaac

SEQ ID NO: 130952 - DNA, 569 bp, Arabidopsis thaliana columbia
cgggttcggagccccgcggcgcacagctgatggctttcctctgcgttttttttcgccaccttgtccggcatgcggtccgacaattaaaccaaccccccatctaccattgttcaattctttctcgacggcatagggggcttgttatctcgctctcctcttctgcctttttctatctacgtgctttccattctcacacttgttgcatctccgtcgacccgctgtcggatcggttttcgcttgatgggctcatcggatttggtgccctaggtccttgtgcgacgaactggaaaaaacgatggcaccaagattactagggttagaaaggtggccgatatagaacacgacgatgaaacatatgtacggaaggttggatcatgttgggtatggtcatggccggggctaaccagatagatattgggatgggctttaaggacttctcttggtttgcggagggagccaaaaccctataattccttacttcaggcacccgagaagtctttgagaaagggccctgcttattgtagatggaaactggcccaatactttggcagggaaaagaatttgttgga

SEQ ID NO: 130953 - DNA, 725 bp, Arabidopsis thaliana columbia
  unsure (1)..(725): unsure at all n locations
atttccnnnnnnnnnnnnnnnnnnnnnnnnnnnnnnnnnnnnnnnnnnnnnnnnnnnnnnnnnnnnnnnnnnnnnnctttttttttttttttttttaacaagaaataaacaatttatatcaatgtaacaagattagatgtaggagctgatccaagaatattccaaagtttctaactacatgagtacagaagttaactgcaaatcaaagctttaagcttatttattcagtgtgtataagttgttagaacccaaatctcttaccttttttcacgatccatgttcaaggtttgttacttatagggttttatatctctgtctttggtaatgaggaagaagaagaagagatgtcattttaatttggttagctgactccagatcgtaaccccgggaagaaactccagctgtttcctgcaaccttctcgatattctcgtctttcgtgttgtcgaatttaaattctttgctagatccaatcgatgaggaactcagcttctgaattctatgctgttcgttctctctgtctcctgaccttttctctatgtttcttcttatgtctgttgatgaactctcctctgtttcgatccggtcattgttgttcattctgtcgtgtgatcgatttagcttgcttgcaagacaacgtgcaacgtcttcacctgttaactcaaacgaaactctgtgatctgctaccatgacttcagagccatgatccgaatttgccagtgaagca

SEQ ID NO: 130954 - DNA, 271 bp, Arabidopsis thaliana columbia
acacatgagagggagagaaaggggtattttcaaggtcaggagaaggcaacacacaagaaacgaggagaatgtcaaggaacaactaggaggatcgggacgaccaaggctacggacccagaacgacgcaacctagcccggaccagacgtcgaagcaaaccggaccagcaaagacaacatgggcaaagcagacgccctaaacgtaggaatccccaaagggacacaagtcatggaagcatacactgtagaaaaaacgggacatgaaaagaaacac

SEQ ID NO: 130955 - DNA, 713 bp, Arabidopsis thaliana columbia
  unsure (1)..(713): unsure at all n locations
annnnnnnnnnnnnnnnnnnnnnnnnnnnnnnnnnnnnnnnnnnnnnnnnnnnnnnnnnnnnnnnnctttttctttttttttgttttaaaaatatgaaactttttaaaccaacaaaaatgaacaaagaaattaaatgtaacattttcaaaattcacactacggttgtctttgaaccaagtattgttggtgcttctcgactttcgctgttaacatggaaaacttctgaggaacagtgtcgaaatcgtctacaaagccgtacctttgtctttcccttgctaccttttccaagtataaagggtcacatgataagctctcatccatgggtaagagattcttccacagaccaatagacctttgtataacagaatccatgatctcaatcatctgactagaatttgactgctctaggacctccaagaatttgaccattccgtttttttggatgacaagggcatgaatctgaccatcctggattatctgaaccacatgcatttccccctccttagcatttcgcaagtggaccatgtggggtttatcttgaaacgacagggccaaggactcctgtgtcaaaacaaaaatgatacgcttgcaaagggaagacactggttgcttaactaaaccaaggttcttatactctccaaaatatggatttcctggccacaaccaatgggctttaattgaccaaatttttccggttctttgttaaaattac

SEQ ID NO: 130956 - DNA, 726 bp, Arabidopsis thaliana columbia
  unsure (1)..(726): unsure at all n locations
ttccnnnnnnnnnnnnnnnnnnnnnnnnnnnnnnnnnnnnnnnnnnnnnnnnnnnnnnnnnnnnnnnnnnnnnnctttttttttttttttttttttggaaaccaaggcatggttttaaatgtaaagggtgggctttttaaaaaaaaaaagtggatttcccatcttataaaggcctttcaaggttcccaaaggtgggggggtttttttaaaagttaaccaaaaccagaggcgcccaaaagccctttgggtctgaaaaaaggctcgggggaaggttttggtcctttaaactaaccaaacaccttaaaaggggctttccctcctccaagggcaagattggggttcttgaatctttgccctgtttttttaccagccttgttgtcgtttagcccagcgttttcaaaggctgaaatggcttcagcaaacaaaacttttgcccccttgtaactgtaatatccagctgcttttcccccggcaaaaatgtgactgaagctccaaagaaatttttcctcaggaaggggggggttacctggggtttttactgttcccctttgacctccgtcataaatggcctctggccctcctggtccgtttttggtgggcagcttaggaccaccactggcaattttcaactgccaaaaactaaaggaccctcgccggatggttcttgcggccagaagtttctgtgttccttcctttgggagggttcttcctgtttcgaaaggcttc

SEQ ID NO: 130957 - DNA, 704 bp, Arabidopsis thaliana columbia
acgttgcatgcacgcgtacgtaagcttggatcctctagagcggccgcccttcatttttttttttttttttttcacatatccggattttctaacttgggccaaaatactagtcagttgtcactgttctaatcaatgcagcgttttcacagaactcaaaaggttgctgaaaaaacatcaaagaatcattcattcccctaacttgtttcttaaatctgccgacattatcatatggcaaaagagacaccaaaccatcaagctggtttaagacgatggaggattcacgtctggctctgggttatcgtcatccatttcatcttcaccggtagagtccctgtccgtagttgcgccaccacgacatgagtaaccatgaagaggtttatcatcatcgtcactgtctgattcataagtcgcagttccactccaaatgcgaggttttggtcttgtctccatgtcatcttccggctcgtccaaaactcgattgactggtggtgtgtgctgaaactggacgctaggtgcgtgtattattcccgaaagttgttccagcaacgtgttccttatcctctccatatttttgggcgtgtttaaattctccataggacttgggtcgccatgaaacgtttaatctgggccgaaatactcaaaatactcattgtaagggagtttgttgtccggctctactccaacagaaactggagtctcataat

SEQ ID NO: 130958 - DNA, 479 bp, Arabidopsis thaliana columbia
tcccctagactatagaccagctatgacgttgcatgcacgcgtacgtaagcttggatcctctagagcggccgcccttttttttttttttttttttgaattggttccatttgctaatatgaagattatgaggagattcgagtaggacaagtttacttttttactcacgataatggcatactcgggattttgttattgccagcttcccattcaaatttcacttgttttttccccccacaaaatacacaatttaaaaaccaaaaccttaccttgaataacaaaaagaccattattgaaaacaatttacgcccctccggctgtttgatttaacgagaaggtttacgccatatctagcaacggctacagagcctgtggtgaaatcttgctagcacactgagacggatgccttccggcagacgctttgatcactcccaaccggtgggtgcattctctccataactaggccatttttttttaattcc

SEQ ID NO: 130959 - DNA, 710 bp, Arabidopsis thaliana columbia
  unsure (1)..(710): unsure at all n locations
tgacnnnnnnnnnnnnnnnnnnnnnnnnnnnnnnnnnnnnnnnnnnnnnnnnnnnnnnnnnnnnnnnnctttnttttttttttttttttttttttttttttttttttttttttttttttttttttttttttttttttttttttttttttttttggggaaaaaaaaccgtttttttttttttggaaaaaaatccacgggttgggaatttttttttttaaaaaggttttttttttttttttccccccccaaaaaaaaagttggggcaaaacccaaaaaaaatgggggtttttttcggggaaaaaattgggggggaaaggcccctcctttttttttttctgggtcggcccaagggggcagggggtttttttttggccccttccccaggaaagtgggtttaccaaaaaatcccccctttgaaaaaatcccccattttcgggtttggggccccttcccctttaaccaaaaaaaagcccttgggggggggccccacccccaggggttcatcttccccccgggggaaaaaaaatccctggcctttcccaaggggccttttttggggattttggggcccttagggggtcccaaaaaaaaaaattgggggggccaaaggggccatttgttttgggggggaaccacgttggggttccccaataatcgccccccctcttttttaaaattttgaaaccggctttataaccaaccgccttttc

SEQ ID NO: 130960 - DNA, 1004 bp, Arabidopsis thaliana columbia
ctcggcacgcacgaggcccgcagtctaggaaacctctcaaaccggagcgccctccgccctcctagaacctttgagctttaacaacacaaaaacccactttacatacgactgggcacgccgacagcaacaatccgagccacccaaaaacgctcgtcaaaataaatccgaacgcccacagcgcacctcattgggaagaaaccatgccatgcgggatggaaagcgaaccaatggtgttaatgacccaaggacccccgaccccgacaggttcgcacgcaccctaggtcatatggcacgcgagaaatgcagcgtaccatttcaaacgacgagcggccctaaacgccacaacttcgcccgggaaattccgcctcaagaattaccacacaggtaactgggaacacaggctcgcggaaaagggtccccccacgaaccctttccgaagccgccaggtatgccaggaaccccggtggacagtccgataaggcgggaccacaagcatgggaagaaattaacacccagggctgcacgacgacccgatcttgctaaaaagtaaacggacgcctttcgaaccgagaaccagccccaggggggaaccgagcaaaagaacacctccacgggctgctgacacacatacaacaaagctcttcgcactcacaacccttccaggggaaatgggaacgtatacacaccccacaaaggcttgctccgcactcttcgggccaggaagtaggggggaaccctccgagacactcgagagagcgttaccagtccttaggaaaccacattaaacgtgcaagaaacaacccgacacacaagacatcacccgcaaaccaacaaagcggaagcctagtcaaccgatccgcaagggcaggaggcaaaggaaccgagacaacgtgacccaatccacacgaatcaacacggtccaaggcatcaggaaaaatacacccacgaatctgctcacaaaagcgacgatgataattaagggggacactcacagcccacatcac

SEQ ID NO: 130961 - DNA, 737 bp, Arabidopsis thaliana columbia
ctatgacgtcgcatgcacgcgtacgtaagcttggatcctctagagcggccgccctttttttttttttcttttttttttttttttttttttttttttttttttttttggaccaaaaaaggggggggttgttataatttctgatcccaaaatcccttgggcccatcgacaaaagttttgagatgattaaaggaagagccttttttttttacagcctccgccgtttaatccttccccctggggggttttcctttaaactcctccgccttggtttccataacttcctaaaggcaccgtcgtttttcttcaattttccccaccacaactccttttttttctttttttcccatcatttttacccctgttttcccacatttttttaaaagcttggggtgtatcatctgatcattccattggggaaacccccccccgggaactcctgaaaccaagcttttcagggtagagttccccccgtatgggggtacgaaccaccctatcgatcttttgttctaaaacccttttctgttccccccattaaacccccatttctttcttattggggctcttttttgaaactactttggcacactttctcccttctttgggcgactctcttttttttctggccccctttatccgggtatcccccccccaaaaagtgggctccccgacctttgttatctcccgtctttaaaaaaagctcccccaagacgtttgttcttttgtttcaacaaacagga

SEQ ID NO: 130962 - DNA, 546 bp, Arabidopsis thaliana columbia
caaaaccaactggagtaggggcgggggacgggagtgcaagaggacacgatggaaaagaaagaatttacttttttgagaagaagatgggtaaaagggaaaatgaggggaaatagggaagataaatgagaaagaaaaggaagaagtaagagaagaagggaaaagtagggggaggaaaagagaagaaggagataagaggggttgttgaaagaggatgaaaaccgatagaggggtaaatttggtaaatagtgaattgaagttatataattgggagggtgagagacacgaaataggtaaagtatggaagggccaaggaggcaaacttgatttagaatggatggggaggaaggggaattaagcggaacgggacaaagatggttatgaagaatgagatgggcgagatcggaaatatagatagtccgccgagggtagataagaaggtaaagaatgaagatcttaagtgtggtattgtgctaataagttgtggtggttataaacagaggaagaaggggcaaaaggtaggagaaagagaagagagaaatagagtgg

SEQ ID NO: 130963 - DNA, 703 bp, Arabidopsis thaliana columbia
ttacccttagacgagctatgacgtagcatgcacgcgtacgtaagcttggatcctctagagcggccgccctttttttttttttttacttaggactgtcgttgatataaaccaacaaacaggctgcaaaatgaaattatattatctctacactttaggctttatacgacgtttattaggttgcttgatggaatgggcccgatttaaggttgccttgttttaggaacgtcacttcgcaatatagcctgatagcttcaggggtggggtacgggaactaatgggttaccttggggcatagaccaagaagctgtgccttctcggtaaagagccccaatgggttcacaccggttgtaggaaatggccttaagaaggcacttgggaggatcaaacgctgtaatgctaacatgaattctgtgtggacgaaaaagtgcttctactggtacggaccatcgaagcaagcgccatatgattgctgggaggcccctactgcaaaggccttttccagtgattgtggggaaaggagcaagaaatcacggactctgctgatcgcctcggacaccgagtaggaattgggggacttccctacccaggatccggtgtggccctacaaccacactaacgcgtttgaatgggggggggaggatctcaaaaacactctgggggagattattttttggtggggggtcattgcaaggaattgtatatt

SEQ ID NO: 130964 - DNA, 309 bp, Arabidopsis thaliana columbia
tcgtctatcaagctgcccacgtctacgcctttttttaaaaagctttggctgacaaaagcgcaacaaatcatagaccttcatttgctcgtaggatttctgactaaccattggtccacatagaaaataggagcgcatggggccgtttctttgacatgtactaagaaacagttgccggtcgacccttgacgcgcgttgacgagacgttgggacttctggagcttactgcccagcacgccctggataggttcgcccaatgcggagtaatcagcgaagcagggtaaaccgggtcctagggaacttacccccttg

SEQ ID NO: 130965 - DNA, 1018 bp, Arabidopsis thaliana columbia
  unsure (1)..(1018): unsure at all n locations
aactatatacgaactatgacgcccgctgcccgcagccgggagcctgtataccgtacagcggtcgncccncattcntttttttttttttttaacaagaggggagaccgcctccctgctttgggccctgatgagaccaaaaaaactgcagcccggttgtttaataccagaaaaaatattctaaataatgcacacacacttttacacccatactatgatgctctcttccctgtccaaaggaactttgaatatattccaggtggtacttttatctacataccacaaggtttggtgggctgaattccaccccccaagaaaaaaggtgtgaaaaaaaaaaatttccccccggcgtaaaaaaaaacctcgggtcccctcaaaaaattttttgttggggccccttgggattcgtaccacccccggggggcacgcgttatggctttttatttattaccccncccacctcttctgttttgttggcacaaaaccccgcggggcaaaaaacacggggggctttgctatctctcaccccaccactttggcacagaaagcgcccctttgtggggtacaaccccccgcgaaccctcttttggggtgttctcccctcccggccttggtttccttgtttccgcgagcccccccaccagcgcccttcttctatagaatttctcctctattcccggaaaccgcccctggggggtttgaacccccgggggaaaatttttccgggaagccggggttaccccttggcgagggggggtggcccccaaaaattatttcccccttttttgtgggaggggcgggttttttcaaaaaaccttggggcgggtaatacccatggggggccaaaaagccctggtgttccccccgctggggggaaaaaaagttttatttcccgttttcacaaaattcttccccccaaaactatttcctaggcccgggaaaaccattataaaggtgttaaacaaactcggggggggggggcctttcaggagggggaaggctctaacttcaccgattaatc

SEQ ID NO: 130966 - DNA, 719 bp, Arabidopsis thaliana columbia
tcccttagacgagctacgacgtcgcatgcacgcgtacgtaagcttggatcctctagagcggccgcccttcgccttttttttttttttttttttttttaacataaactacaaacgattttattatgcaaacagcaagtattacaactcaaaccacataaaacattacataatcaaactttattcccataggtctcttcttaatctatagggccccaaaaacttgaggcagttcattacaaacgcaccatgggttacttaaaatcatacatacataatgcaatacatgcctgggggggattgggtaatatattggtttagggaccgggctgagtctgaacagcttttccggcatacgagcagtatcttgagcagccgttgtaacctctgtagcagaagccggggggggagtaactttccccacttccccctccttcttggggcccaccggctccttggtatcgacccccccctccttgggaattacccccccccccttggtaattacccccccctccttgggaattaccccctcctccctgggaaccctctccggtattggaatttcctccattggcaccggaaccccgttgatcagggttaacaggttccctactctctgaattacttggggcaaagatgccgcggtttcctttgagaccacgagaaaaacagtaataagaccccacagaacccaaagcttgggagccattttttttgtt

SEQ ID NO: 130967 - DNA, 677 bp, Arabidopsis thaliana columbia
agactatctatgacgtcgcatgcacgcgtacgtaagcttggatcctctagagcggccgccctttttttttttttttacttcaaagttttgataggctttccgaattctttaaactccttaaatttttaatacatctcaatcaaactccacttatactaaaaataatccatattgcatttttaaaaattctaaaagaagaatcacatgataacttgataagcacttttaaatgatagacgtccacgtccaggaataagacaaaaagacaaaataaagaaaaaggacgaaatctaaagagagaaaatcatttacaagccccagaaaaggtagtatgatctttctcggtccgatcctcgaaactccctcgaaggctcgaaccctctctttgtttttttaccactatataataaagtccgattcctcggaactcttattcccacttccacacatacacttttaccacagagcaagagagtcattcaagtatagtgaagatggccacttagcaagaagctttagccatcgatttttttagccaacaccttttcacagactttgttcccatggaaactgatcaccccattttttttaccagccaactttacaacttttactcaaaaacaggccctataaccattaccaaccattcccctaaacccaaattgactcttaaccag

SEQ ID NO: 130968 - DNA, 728 bp, Arabidopsis thaliana columbia
  unsure (1)..(728): unsure at all n locations
atttccgttnnnnnnnnnnnnnnnnnnnnnnnnnnnnnnnnnnnnnnnnnnnnnnnnnnnnnnnnnnnnnnnnnnnctttttttttttttttttttttgaacaaaaaaatgtatattacttaatccaatgaagagtgacatttttctacaccccaagagcaacccactccaaaaatagacaaaacaatattatttctaagccacacaacttattaagtttacttaacttaatgcatatgactaataagggattcaacttaattaaactaaatctgtcactttcccataaccagatatactactactttgacaacaaaaacattccgtggcaaaactctttgctctacacaaagcccgctggaacgcagcagctctctttttaaagcccaatgatcgtaagattccacaaaacttcaaatgctcaacttcgtagacatctgttataccataagaattcaacaaccccttgttgtctgtagtgataataacaacactcccaggaccaaaactgctgaaatcccctgcaagagcttctaactgtttaaccttagtaacgttgtctgccacaagcagaaccttttgatttttaagacattgtttggtagaggcttctcttttaatatttctcaaaaactcgtcctgtagatgcgctgagtggcgaccctgagaaatcgttttcacgtttccaagaaaacaatggctgtcaaactgttgacaagatgtctgat

SEQ ID NO: 130969 - DNA, 719 bp, Arabidopsis thaliana columbia
  unsure (1)..(719): unsure at all n locations
gtttnnnnnnnnnnnnnnnnnnnnnnnnnnnnnnnnnnnnnnnnnnnnnnnnnnnnnnnnnnnnnnnnnnncttttttttttttttttttggtggaaatatttttattcaggtccatatagactagagttttaacttttaagctcaaagacaaaagaaacgagcacacacacatagcacgacacaaactaaaccacatcttcttattttagatcaaactctaagtcttccttttattttatgatcacatttttattattatggttttgtgatctcgaccttcattcatcgctcttctcattccagttccttgagaaaatctttgttgtccaccaaaaccgttttccagccatctggatcaaggaatgagacaatcttggtgccgagtccaggaagaggtccggcttctctagtgatctttcctcctagctcttggttgactatcttaataacttcaccgcttttgtacacatcatctgtgcctattgcaatctgtgcatatgcattgccctttgtgtactcagtcacgtcgtagttataggtcagctccaaaactatcgactcgtattcttcagcataccccatcatgcctatggtgtacttgtactcaggtctctcaatctttctcaagagtctcatcccgagggccttttcatagaatttgatggcacggtcgagatcaccaacacgaagcatgacttggcagaaaggtcaggagtt

SEQ ID NO: 130970 - DNA, 624 bp, Arabidopsis thaliana columbia
atgcacgcatccgtcagcttggagcctctagagcggccgccctacgcacagcggacgactgttttatctctttcggaaaaggaatgaaataggagcaccctagaggaacacttagaagacctacgaagaaaacagcccattgaacaaaacaacaaaggtattttcatcataatcacaaaacttatcaagctgaatcaacctaaggccacgcacagactagggagcacccaaatccctaaaaaacgaaatcgagccaatatgagaaatctttagatccccccggagaaaagagatctccaagacgaaaccgatcaattcacacaaaacccgcctgcaccactcccattactcttaatagggcatcggccatgacaatctctaaaatttaagaggcgggattttaccaattgaaccaagaggcggggccagggcctccggagcttggtcggcgatccaatcaacggccatgaaatccccgagaagcgattccgattacctgacaatcacgaacgggcatcgggatgataaagcgggacgcggcagaaaacaaaaaacccttgtatattgtttacaagaccacttggagggccccgggagcgcgacatttcccgtaaagaccggatg

SEQ ID NO: 130971 - DNA, 724 bp, Arabidopsis thaliana columbia
  unsure (1)..(724): unsure at all n locations
tcgttnnnnnnnnnnnnnnnnnnnnnnnnnnnnnnnnnnnnnnnnnnnnnnnnnnnnnnnnnnnnnnnnnnnctttttttttttttttttagaagaattatgttgcaaattgcattttctttttcctttttgttccttccacttatgggttcagaatttgaaaaaaaaaacagcttttaccttctttcgtttgctttccataccaaaggaagcaaacaaaaagaggctgatgaagaaagaagaaacaacataactgttaaatagttttaagaaggtcattccttttttttttatcataatcaattcccattgcatcggtgaatcacaccattactgctacttccttgcactagcttcttcttctggttttgttggttaatccggtcaagtccccatatccttattgttccatcatcgcttgctgaagccaacatgtgtagattcgtcgggctccagctcacgcagttaactgctcctgcatggcctggtagctcaactattaacttccctgtagatctgtgccatatatatacctgagagtcctcgcttccgctagcgatgaaagcttgtttatacccaccaaagcatgatctgatgatgaatcgtgaacgcttgtggcccggacgcgtggnnnnnnnnnnnnnnnnnnnnnnnnnnnnnnnnnnnnnnnnnnnnnnnnnnnnnnnnnnnnnnnnnnnnnnnnnnnnnnnnnnnnnnnnnnnna

SEQ ID NO: 130972 - DNA, 569 bp, Arabidopsis thaliana columbia
actatagacgagctatgacgtcgcatgcacgcgtacgtatgcttggatcctctagagcggccgcccttaattatttttttttttttttctttttttctttttttattttttttttttgtgtggggccacaccattttttttctttgggttttataaccctaaaaggtgaaccccatgaaaccaaaacaaacctttaaacccaccccgtttaaaaaaaaaaccggggggaaccataccaagggccgagggttttatgtaaaaagcaaccaccattttttaatcctcaccaaacccttatgttttttggggaaaagagtttcgaaaaagaaatagagaaaaagaggggtctttcgagatttaaaacattcttgaccgggaaaaaggagatctcgtatgatggccccccccaataaagagtaggggtggtaaacacaagtttccgagacttttcttccgttttttaataatgaccaaaaaattgggtttttattccctatgtatttaaaaaacccttttttggttgtaaccgcgggacggctgtggttggtacatacccccgtgaaaaattt

SEQ ID NO: 130973 - DNA, 189 bp, Arabidopsis thaliana columbia
taacatagaagagtctatgacgtagcatgcccgcgtacgggatcttggaaactatagagcggccgccctcaactaccttttttttttttcaacgccaagaaaggagagttacattacaccttcataagtggggtgggccaccctcaccttattccacattctgtaaacacaacaaaaacagttgttttt

SEQ ID NO: 130974 - DNA, 628 bp, Arabidopsis thaliana columbia
tttccattggtatgtggatgcggaataggtgaagtgatggattaaacagtggttgttgagattttattttaaaaggatagagttatatttgatttgttttagatttacatgtaaatttaaattattttattaagttattataatagttagtttattttagtgatgtttaaaaaatattttggaaaggtgtttgtaattttttttatttttgtgtatttgtttttgtttttgtatttaaagttttgtttatctgtaagtatatatattatttaaatattttttttggtgtagtaataatagtaatttgtatcattagtattattcttaattttgatgaaatgtttataagtgaggaagagaatattggatattagtattatcgtataatagtatttaattcaatacattgttattattttgatatgtaagtttgagtatataaaggcgtataaggctttattataagttttgatgtaggtttatatttttttattgttatttactagttttaataaagattttggtttatgtttttggtaattttatgattatgtttgtttttatgatattttaaatttattatttatttttataagagttattttaatatatattttttaaatattta

SEQ ID NO: 130975 - DNA, 712 bp, Arabidopsis thaliana columbia
ctatgacgtcgcatgcacgcgtacgtaagcttggatcctctatagcggccgccctttttttttttttttttttttttttttttttttttttttttttaaaacaaaactttggccaccccgttaaaattggttttttaagggaaaaaaaaccccccccattgggaattgaatgggccaaaatttttccttaaaagggttttaaaaaaaaaataaacctcggggaaacttggggggttggggggcaataaacctgttgcttgggccttgcggggggttgccaatccccaggaccctaagtaggggcccggggtcccccttttggtttttttaaattcctttaaaaatttgagggggttgggtgcttccaaccatgggaggctcccccttggtccagccccccccttggaaattccggggggggtttccgggctccggggacccaaatcggggctttacctggatttaaccacagggaacccccttgtgggggaaagggtagtaaatttctttacccaattttgcccttctttagggcggggggggaaaataaattttaaaattttttttttcaaatgggggggcccccttttttggtttttttttttccccccgttgttggcaagggaaaaaatccccctttgggtcttcgggggggcccggaattttccttggtttatctttagtccgggtttgggggcgccccctgggggcc

SEQ ID NO: 130976 - DNA, 714 bp, Arabidopsis thaliana columbia
actatattccgatctatgacgttcgcatgcacgtcgtacgtaagtcttggtatcctctatgagcggcacgcccttcttttatttttttttcttttcagggaaatgcctttatctcctctcaacttagtgagaatacacgatcacaatatattatatagggcttgagttattctgacatgccacacactaaacgaccaaagtcaaagccttttttgtcaattaacaaatctgattgagacaatagacaaacctcgtctttccatgaacataatcgaaaaaataccatcacatcttcacgggctctgttttaacatttctgcatctcagtccaatcgttttgtcggcatccatggagtctttttggatccttcgcgtcccagacccttgcaatctggaccatcagtccactcaagcatgagctctacttccccacactccacattctttagtctaagaatcatcttttgcgtgaccttcccatcgctccaagtgatgctgatctcttcagctaaacagttgggtcctgccctggacggaatcctctttgattgccacaaaacatcggggggaggcttcttggaaaattctaaaccccccattttgtttgcgcctttcttagggaaaccgggtccctaaaaatatctatttttttgggctttcaaccccaatttgttgttcaatttctctaccccggagaaaaatccttaatgcctt

SEQ ID NO: 130977 - DNA, 726 bp, Arabidopsis thaliana columbia
  unsure (1)..(726): unsure at all n locations
cgttnnnnnnnnnnnnnnnnnnnnnnnnnnnnnnnnnnnnnnnnnnnnnnnnnnnnnnnnnnnnnnnnnnncttttttttttttttttttttttttttttttttttgagagggaatcttttgtttatgggacgattaaacaaatgacttttgtacaaaattctaatttgaaggctcacaacaaaaacaaattcctgcagtgaatccacaaatcaagttcgagagagttaaaggggaaaaaaacaaaacacttatgattataaacgatgccttgttcacaaattttgtttaaacccaaagtttactcactgctgttttgcaccatcgttttctggaacggtattcacaggtgttgaggagccccttcttttgctaaactgacctgtgattgttcttcccataaatctccctgctttgctcaatccactaccgaccgctccaaaatccgttccaaccatcccaacacccgagctcacaccggttccaaccaatccgactcctgtgccaataccggtcccaacctttcctacaccaggaccgagcccacttaccaccattccgagtggatccattgggctacctatcacccctgcttcctttaggctcttcctttttttacatgatctttatttttttttttccaaagaaccccattttgcctcctcttttgctgaacctcaaggaaaaaggttccccttaaagaagttatggcctcccccctattctt

SEQ ID NO: 130978 - DNA, 655 bp, Arabidopsis thaliana columbia
  unsure (1)..(655): unsure at all n locations
nnnnnnnnnnnnnnnnnnnnnnnnnnnnnnnnnnnnnnnnnnnnnnnnnnnnnnnnnnnnnnnnnnnnnnctttttttttttttttttgttcggatatgaaaggaccaggataaatcaaactgagtggaaaaacgttaagcctttgccacattattacccaaactgacaaaatgggaaaagagtccggggataagagtagaacacaggtaccgggggcccatgatatattaccatttgaggttccacaaagggggttatgacttttgggactcttgagcgggagcaggcaaggaacctcatgcattggactagacgagccgctggggacaccctgattctaatgaaatgcccagggtgattctcctagcctttgtccttatcctctaacactggaaggggcctcgggcattcctacaattgaagctcccacattgctcagtgtggggcatcatagcctgcgggagtgcctccgggctcacgagtctctaatttcttgttgcccctcctggtctggaccagacctttcactttgttatgtatagggtgctggactttccttgctcaaagttaattcctctatgggcacggaagccagatccatttccaaacccattgttgccgaaaggcgggcactctttcctgcacgtaaatcaa

SEQ ID NO: 130979 - DNA, 421 bp, Arabidopsis thaliana columbia
gccattgtctggacccaaacagagggcctcgagtatatacccacttttaattaagaagccgcgatctacagcggacgcaattaacagacaacgcgattctcgctaatgagttaaagcgctttgggacccaggtactcaatgtccaagtgtgtccatagcccgccccaggtcaacgatgcaaacgaagaggtaacccaatactccgatatttttctccgcttgattcacaacttccgtaaccacagcacaagtgggttcagtgtcaatttacagtcgcaatacctagtgcgtgagatactagataagagagtgtgcaggtcaccatctacgggctgcaagtatacgacttagaaatatccgtcgagcatggctattgagaaggaagagcaaataagcccataacttgacagccactggtgta

SEQ ID NO: 130980 - DNA, 663 bp, Arabidopsis thaliana columbia
acactatagaagagctatgacgtcgcatgcacgcgtgcgtgagcctggatcctctacagcgctcggcccttttttttttttttttttgttcaaataactactcaaagataataaaaggtatgatgcaccatttaaaccatccttcattagttcaaaaccgtttcaaagtatctgaattaaaaaaaaaacaatctaatttccaaaagcaaaaagacttatcctacttttaatcagccttgttgaacacgtaagttgttccacatttcccacaataatgcctatttaaccgactccccatgaaagttccaggaccacaactaacagaaggacactttttcttcaacctttgaacctttccactttcatcaacctttgaaaaactgcaaaactgctagcttcacttccttgtgcgtatgcttaatcttcttaggtttcgtgaacggcttttttttcctcttattcgcacctcctcttagacgtataaccctatgaagcgtcggcctcttctctggaatgtcggaataaaagctagggtttctttccactctttccattttgttttttcccgggcgaaaagaatcaaacccgtgtggcttgtattccgggggggggaaattccccttttccctttgtgtctttggagatccttttggggcttttttc

SEQ ID NO: 130981 - DNA, 712 bp, Arabidopsis thaliana columbia
acactatctatgagctatgacgccgcatgcacgcgtacgtaagcttggatcctctagagcggccgcccttttccaatttacctctgtattgtctgttgttcacgacaagagttgggagtatagtcacgtctccacgggaacctttgcctatctgtgactcctgctctgctttaagaactgggttctccacatctgcttcagggtctccgatacacttgtccacctttttgagatcaatgccaagggacttaataattccatctgcgcattccttggtgtacttcttctccttcattggacaccggatagcaaagtcagtcacatagtcccaccagacccacggcttaccggtatcattcatcactctgtagacacaagcctgacgtatattctgaacaacaacatcctttccatcataccctttcgtaaaatcctgctcaggatcaggcgcacaataccttccatggttgatgcactgagacttacactgtttactcaacgtaaacgcttcatgacagtaccaagtaatataatgtggcgtgaactgagtatgcccacctttctcaagaatctgagcagctcctttaaaattcttgagaaactcaatctgagtatcacacttctttccacactcgtcattgctattagtccacagttcatactctacacgctcatcaagatgtggaaccgactcaatccaatctagcttcat

SEQ ID NO: 130982 - DNA, 713 bp, Arabidopsis thaliana columbia
  unsure (1)..(713): unsure at all n locations
nnnnnnnnnnnnnnnnnnnnnnnnnnnnnnnnnnnnnnnnnnnnnnnnnnnnnnnnnnnnnnnnnnnnnncttttttttttttttttaataaaaaggatgcatattcttttgatccaaatgggtaatttgctcttcatatgcaccgtggggaagtttatgattgcgtcttcttacgctatccatctgaagcgagtgacaagatggtgaagaaaaactgaagcttcatgacgagcccattcgagtaccagggcacaatctctgaccacctccaaaaggacggaaaccactcgtgttcatgtccctttcttgccatctccagggattaaatttgtagggagactcataataagcctatcccgatgaaccgatctgatataggccatgaaacaccatcctttttgtatcacatatccttttatttcaacatcttatatcgcctttctcatcactccaattataacatttgccattctcagtgtctctgtaatcaccttttgtgtcaaaggtagcgaccagtgatcgttccaacataggggcgctcctgtcaattccttcacactttttaccctcatgttttcggtctgagatcgagggctgcaggacaatcatagaggaatctgacggatctggttttgaggacagggacagaatcgtgggccgggtcactatgtcattcatatggtagcaataaattgcgagttaaatgctccct

SEQ ID NO: 130983 - DNA, 729 bp, Arabidopsis thaliana columbia
gctagacggcgcaagcacgcgcacagaaggccggaacccgcaaaagggcacgcccaaagaaagagtttcggtttgaaagggccaaaaaaagccacaaaccaagggagagggggcgaacacgaagaaaaaagaccgaaaaaaacaaaaccacccaaggtacagaaaccgaaagaaaacgaaaaggggataggaaaaagccccaaaaaaaaaaccgagaccccaaaacaagggacaagtgacaagccccacctggaaaccacagaagaaacacgaaaagccggaaacgcatcaaagcgaaaaaagccgggcgaaggccggcaaaagggaagaacacaaacaggcgacgcccaaacgcaccgcaagaaaaaacgcgagcgcgcgaaaccaacaaccggcacaaaaactaaacggcaccaaagaaacgccgcgaatgaggagcgaccaccaccaataagcgacagaaaaaaaacgcgacaaacaaacccacggaaagaacctcgcgccgaaagcacaagaaaagaggaacaccagagagaacacaaaacaacacgaaaatgagcccgagaccaaaacacttcccaagaagaagatccacaaactaatcacacaaaaagggggaaccacagatgcggccggcgagaggagaaaacggaccgacatctaggaaagaagacgccaaacataacgcgccgcacaacgaataacgatcacaagaagacccgcgcgaga

SEQ ID NO: 130984 - DNA, 378 bp, Arabidopsis thaliana columbia
gaaccaaccaaggcacaaccgacagggggaccgaaaccggaaaacagggtaccaaaacaggggaacaaaagccaagccacaagacaggcaacggcccaagggacaccgggcaagacccggacgcacaagaagagggacacaaaccaaaaaggacgccccaagacaaaaccaacccagcccaggcagggccgcgaacagggacgaaaacgcaagaaagccaaacacctccaaaacccaggaaaggaagccaaaaaaaacgggagcacggaaaaccaaaagagacgaaggaaggaacagagaggcgaggacacggcacggcgaaggaaagacggacaaacaggaagcacgcgaaaagggagacaagggagaaagccaggc

SEQ ID NO: 130985 - DNA, 736 bp, Arabidopsis thaliana columbia
tcaatggaagaagcgagtagcccgccatacgtcaaacccggaatacctttaagacgggacggccccaacgcagatttttgtatttcaaggggagctcatctctaccgataccaaggggggcgatcgccttaatatacccggggggaaaccaaaatgcgccattttcgacaaccaacgcaaagggggacaagaaggggtaaaaaaaccgaagccgtcagaagagcccattatagaccagagggacaatcttggaacaaccttcaaaaggaccgaaaactactccgggaacatgtaccccctccctgcgcccctccagggaaccaaaagttgagggagaccccctcgaaagcccatacaacaatgaaaccgggccgaaaaatggcccaacaaaaaccacagccccctggggtgcccacaaaatgacccttttttttcaaaccataaattgattggcctttgtttagaaaactccaccctggagacccaattccaggccctcttcggggacgtggggaaaaaccccctattcgctgcgacagagggggcccccccggagagaatcacaccataggtggggttcccgggaaataccacggcaaaactattgggcgcccgctttcctgcggcgaaagaggggaccccgcacccccaactagaactccacggaatgggacagcgagaccccgacctaatcctgggcagggacgacacatgccgaccaaatgggtacgccccg

SEQ ID NO: 130986 - DNA, 735 bp, Arabidopsis thaliana columbia
aactatatatgattatgatgcccgcttccctcagccgggatcctgtatagcggacgcccttcgttcttttttttgaatggaaaagtacacagcaatgtagttattgatacagagacagttacagttgaaagaaacaaacttttgtatgttatgaatgctgatatataacagcattactacgacgaagctttgttttgcttatacctatcagcttagaagaatttaaccgccatgttcacaaggctaagaccatccaagagccagaagaagtaatcgagatgacctgaattgagattatccgaaatccaaccttcttgcccatttcttgttgtaaaataagtcacgagcgtgaggatcaacgagctcaagtagttaccaagtgcattggtcaaaagagccaaggcactgcacaagcttctcattgcatctggagattggtcgtagaagaactccagctgaccgatgaagtagaatactttggctgcaccgagaatgaagtactgtggaatctgccacaagacggatatgggaactggggctcctgacttgactaatccaaaatcgttggccatatgggagacggtatgaatttttaccaattgctttgcagtttgccctttccggagtaaccaggagtaccatacaaggacccaaattgccccatttctttttggtattcctcaagagggaatacccttttggtccttatcttccctggggaaacctttttttttg

SEQ ID NO: 130987 - DNA, 450 bp, Arabidopsis thaliana columbia
cctattatatacttaaggactcgcgtcatctcgacatgcacaactaatgaccaaagcaaatccttgcctgccaacataaactcttataacacaaaaacacactcgtcttctcgtgaccttacccaagaagatctataacatgtcccccgcccccgcatcaacatttccgcatattatggccatctgctctgctctgaacccatggggactccctggatgcttcgagtcccagaccctctaaagtctggatcatacactcacccacgcatgacctctactttcccacctccacatctttttgcaacaagtatcccctgcacgagctgcccctgcccaatgaggcgctctctcacccaacagttggccctcacggcggcaccctttcgaatgcccaaccctatctgtgggagcctcttcgggaaatctcaaactcaccccacttttggacag

SEQ ID NO: 130988 - DNA, 558 bp, Arabidopsis thaliana columbia
  unsure (1)..(558): unsure at all n locations
nnnnnnnnnnnnnnnnnnnnnnnnnnnnnnnnnnnnnnnnnnnnnnnnnnnnnnnnnnnnnnnnnnnnncttttttttttttttttattgtaagggaaaacaaatttttcaaggattaggacttccacatagagaaccccaaggacagagggttggaggatgaagacataggaacctaggacacatttacaagaagccgaactaaaggaacgtatcgtgtgggcgggaacccgttaacaaaacgtggagtgggaatcggcagcacatgggcgtgtaagagaatttaaaggtggaggtgtggtgggacttggtatggaatctacggtggcctacttggcgggaagctcgggagggagatttggctaatcgattgggctaattgaggccgcgtggggccacagagttggtgagggggaagctttggagcgctggttgtgaacaaagggtactgctcccgtcacaggtagcggaaacggactgaagatgactacgggcctcgaagaactggatgagtcgcgggaggattgcaaaggcctcctggagggatccggaaagggg

SEQ ID NO: 130989 - DNA, 1068 bp, Arabidopsis thaliana columbia
ggaatctcatagatcaactgggggggggggggactaagacgcggcgaggcgatacgggatgccacattccccacaaaaattatagataatcgtgaaaacagcaccagtaaaaagaagagaggtaagacctaaacgaacatgggaaagaaaagaaggtggaaaagaactggggtggtagcataagtgatgagcaaaacaaagtggggaggaagaagacacaagggggcggatggtcaggaactgaagcttgtagtgagattaacgccgcacacgcatgaactgtagaacactagaacgtattgggggcgcgcgaagagagagaacaaactacacagcgtaagaccgtgactcatatgaaactcgcgacagagagccacaagtgaaatatgagacctatgccaccgttacaggaggcagacggggaggaaagaagaccctggaaactcttcatctctctgggtgaggggaaagggaaaatcgaggcgccaacaagggagtctatcgaagaaaagcattctaggcgttaaatgtacaatgggagcgccataggaatcgaagcacaacccgagatgtgacaagaaacacaaaaggttgggtggggaagccggcaaaaatataccaccttcccgcgcactgtaaggggaaatgagacaagcacacaggagtaacacccgaaagacacatccagtggatgcatgtttcgggggagggcgacacatttgggagaaaacaggggacactgtggaacgcccaaagcgagcggtaattataactaacttatagaccggggctagaggggagaagacaaaaagagtgggataacaaaactcacatcaccctgggtaagagaggtgggtataatataaagaagtcctacattgggacgtttataagaagagggaagactcgaagtgcgtttccgagttgaccacaagggggcggagggaataaaggataccggggatggttctccgcgaagtaacagtgggaattcgtgcaaccaccagtggaaaggagaacacaaaatgcatacgtgtatggacctgggaaggagcattagggggcccg

SEQ ID NO: 130990 - DNA, 754 bp, Arabidopsis thaliana columbia
  unsure (1)..(754): unsure at all n locations
nnnnnnnnnnnnnnnnnnnnnnnnnnnnnnnnnnnnnnnnnnnnnnnnnnnnnnnnnnnnnnnncttttttttttttttttatgtaaatagtgtttcaacatctctatcttatgcacaaataaaagatcttttggcttaagagttaaaacaccaactgtgtttgcggttggaggatacaaagaaatgatggttctctgtatcaaaccctcatctatggaagtctttttatccatagacaacattctcaaacagtaagttacaaatacagaatcgatggcactttcatcgcgaggtattgtgtttccaccaccaagacttgttttacgtatacatgtagtcatcctatagcttctggataaaggaaagaacgagatctgtatgtacagagaagagttgtgtatccacaaatagcttcatgaacgggcgctgacgactgggaaaggagtcgatgaaactttcctttaggagaagtgataccttatcgttgttggattgcacatttgttatggtgtgtgactgcagattagagcaaagagaatcaaggtacgaccttaggacatccatgaagccttttgcagcatccacctgcacatcagtacattcatacactggtcttttctttgctaggtagctttctccgacgagctttgagtgataaggacttagcgcattatataagtctcgatactgaggcagctggggcatacttggtgacttaacctggttctttagaatatccacgacgatnacatt

SEQ ID NO: 130991 - DNA, 711 bp, Arabidopsis thaliana columbia
  unsure (1)..(711): unsure at all n locations
nnnnnnnnnnnnnnnnnnnnnnnnnnnnnnnnnnnnnnnnnnnnnnnnnnnnnnnnnnnnnnnnnnnnnnctttttttttttttttatcacgagaaaccaaaatatgcatatcaactaaacattaaacaccaaatatcccaaaggaaagacgactccacaagatgataaaaacacataaatttccggacattaaaattcaattaaaaagggggtcttgaaggtgttgcaactccccatccaagctaatgaggatcaccagaaaacccgtaaccacccacattacctcctaactgaccctgaccggtgacttcagacggactagatgctgatggagcttgtagcatctgcgggggcaatcctgctactcctcgtccgccaccaccaccttcttcttcctactgctcaatcggaaatctctcgaaaaccgcatttgagaacgaagccgccattaatctaaccggagctgatgcaataaggggagacacaacgcttcctccgaccacctgaccttgccctccggctaaaaatatagacaaaccaccggcaccaggcggtgcaagaggtggcacaacagtgcccgttagcgaaagaatctcaaaccttccatgtaaagccacaacttctcctcctgcggacacaccaccggcattttcaggagtgactggctgacggacagtgacgttagaatcagggccctttacttctaaaac

SEQ ID NO: 130992 - DNA, 753 bp, Arabidopsis thaliana columbia
  unsure (1)..(753): unsure at all n locations
ccccccgccccctttgaaggttcgatattcgttacactatagaccagctatgacctcgcatgcacgcgttcgtaagcttggatcctctacagccttcgccctntantttttttttttttttttcacacgtgattttgggaaaaaagcgaaactgtgtcgttctaatttaaattttttggttcccctttaccacccccaatctatgggacctgaccccaattccccctcccagaaaaaatataccctgttttttttataaaaacttttttataaccttattccaaaccccaaaaaaaaataaaaagccccttttaaagatacaggtggatttttactttgccctaactttttgttcctcaaaaatgaaagcacccttaaaaaaaaaaaataacgggctcaacgaccgcgcccttttgaatgggggaaacctttttccccaaagaacaaacccccccctcatctttgtttaaaatgtttttttttgaaatacaaacccaacccggccgggttttaccacttgaagctttaacccgcgccgttttacccacaaaagggcccccctttttaactgcgggtttactttcatttcccgttaccgaaaccctttacaccccctaccttttaaccggggagatgtttcccttttttttcccccgcccaaaaaaatttttttttaaaaaaaagatttttttttttgccttacacctcttttctttttatacgcggggaaaaaagaccccgcctctttttttt

SEQ ID NO: 130993 - DNA, 763 bp, Arabidopsis thaliana columbia
  unsure (1)..(763): unsure at all n locations
cccggccccttgaggttcgaannnnnnnnnnnnnnnnnnnnnnnnnnnnnnnnnnnnnnnnnnnnnnnnnnnnnnnnnnnnnnnnnnnnnnnnnncttttttttttttttttttttttttttttttttttttttttttttttttttttttttttttttttttttttttggggcaaaaaccaaacagttaattttttttttttttcccaaaaaaagggggggggtaaaaaggaaaatcccgaaccctggggaaaaaattaagggggaggggggggaaattttggccccgggggggggaaaaaaaatggggggctaaaaggggggggggggccccccattggggggaaaaatgggccttttggggggcctggtaaaaaactttggggtcccaagggggaaaatgggttcgggggaaaaaattggcccttcaatctttttttcagggcaaaaaacatgggccctaggaaaaatttaaagggggcccggggggaaaaccgttcctaccccagggcgggggaaaggccccattttaaacccaaattttggggggggcccccgggttttttccccgatgggggggaggggggccccttttttacaaaccgatttacctttttccaagaatttttttgggaccttaaaaaggggttaaagggttccttgggggctcccaaaaaaaaaaggtttggggggttttcctggagcccccccccaggaaacccccccccgcggggtaaaaaatcccccttcgggggggggagaaa

SEQ ID NO: 130994 - DNA, 968 bp, Arabidopsis thaliana columbia
  unsure (1)..(968): unsure at all n locations
nnnnnnnnnnnnnnnnnnnnnnnnnnnnnnnnnnnnnnnnnnnnnnnnnnnnnnnnnnnnnnnnnnnctttttttttttttttttttttttttgagcacatttttattttttttttttttgggggtcctatttttgtaatgggggcaaaaccacgcggtaaatatttttttttttaaaaaaaaaaaagggggggtccttaaggaaacttccccagcgcggggagaacaaataagaatgaaatggggaatatcttcgtaccacgggggggaaacaaaaggtttgggctaacaggggggggcgaccaccctataggtggtaaaaatcggaaatcgggtagggccaggtataaaatttttgtggccataagagaaaaacgtggttaagggtcacaacatatgtctctccaaaaataaataccgggaccttgcaaggggtccatgaggacaaataactaagggcttcgtggggatcttgatgttctaaaaccctccaggtgtggcgctcggattataaaaaacccagactagttggcagaaatacccaccgtggtgcaatttatccccgccatatataggtctaaagacaaaggtatacacgcaatgcttctgtatagacgaaacgagtgacgacacacgagtctatgactgttctatacgagaaataactatagtgccgcacataacatgtacacgtgctgagataacatgaaaggagttggtgctctgcagggatgagagtcaatccctatatgttaagcgtccgctctgttatctccttattagtatgacaacaatattatgagagtctagcgccacatggctttgcgcagaggccgtgagaccgtacgcgtaccaatgtgatgagactccgaccacacatctagtgcacggatggttagtgaaaaaatctgaacccgcgaggatacacgggaaggggcagcaaagagaatattaccggcaaaactccc

SEQ ID NO: 130995 - DNA, 651 bp, Arabidopsis thaliana columbia
  unsure (1)..(651): unsure at all n locations
tnnnnnnnnnnnnnnnnnnnnnnnnnnnnnnnnnnnnnnnnnnnnnnnnnnnnnnnnnnnnnnnnnnncttttttttttttttttgaagaaaacaaaaaccaatttattcacacgcaagcgggggtgtatttatacaaaaattagcaaaagcaatagttttatagacatttttaaaactttggaaataaagaaaaggagaaggaaagaaaaaaagaaactgattggtctcatcttaatcagaggctcaggaatatctgaacatctctatctaggtctgagaataataggttgaaaaagggcgggagggtgggtcgacactgtctttgaggttgaaacttgcccccagactatattcatggataagacatcaaccccccaccgcgattttttgtaacgaggctgtgcgtaccttttttacttgaggccgccgaaattggactgggaatcggatctcaagctggaggaaagacagggagagggagcgtcccagcttgacgatgtttgatctttagagccgagagatgtggcgcggacggaggtactgagtgagtaatggaaagatccttgctgacggagtgggaaagaccgaaaaaacggcatgattgactggtacgagtaacctttttgaggacccgggaagtacgcctgaa

SEQ ID NO: 130996 - DNA, 273 bp, Arabidopsis thaliana columbia
tgatgcacgcattgcgctcgtcttggataccttgtataccggcacgccccttcatccctttatctttgttttttttacgtttatttcaaagccccataatagtttctgtttcaataacatggaagccttgtagttgtattcaatacatgaccttcacagttttgtttatccccacacagtctcttaaatattctataaaaaacgttcgccgttttttataaaaacagatatttggatagtcttgacattacgtttatctatatactcctttac

SEQ ID NO: 130997 - DNA, 743 bp, Arabidopsis thaliana columbia
  unsure (1)..(743): unsure at all n locations
nnnnnnnnnnnnnnnnnnnnnnnnnnnnnnnnnnnnnnnnnnnnnnnnnnnnnnnnnnnnnnnnnnnnnnctttttttttttttttggaagaaaacaaaaaccaacagatacacgggctgtcaactagtaatctttatcccaagtttgagggtaacactaactcactcaacatattctttggttctgaaataaagaagagtttattaaaagaaaagattatactacatgcactaattcatttggcggttcaggaacgaacgaccctacttgtcgatagaaaaactcaggtctgttaattacctctgtaaccgggctctttgacggtaggagccattggtgtggccgctcttgaagctacactcgcgaaggatgctatgtttgagtttcttgcacctgtggttgcgtgagacacttcactgatgatgctgctgctttgaacggtggatggctcgatattcaggcttggggagtcgagaccagctgccaaaccaaaccttgtctcatgtgagaaggaacttctctctccactgatgggagggcttgatgatattggggcaaagtttcccagagcgtgaaagtcatccaaggaaaatgggggaaagtcatcactaaaagacgactgcccaaaactggccatcaatggtacaagctctgcacgtgcagctacttcagctttgattctattttttcgatccttccaagctcgtggggttccggtgctactcacgcttcttaatgggat

SEQ ID NO: 130998 - DNA, 585 bp, Arabidopsis thaliana columbia
  unsure (1)..(585): unsure at all n locations
nnnnnnnnnnnnnnnnnnnnnnnnnnnnnnnnnnnnnnnnnnnnnnnnnnnnnnnnnnnnnnnnnnnnnncttttttttttttttttaacatgaacgaagaccctgttttctcaaatgatagattctgaggccaatacataaataatctctgaccaagatcaaaatttaagggcttgcactctcgaatccatgtatatctatatatgtatatgtgtatagaacaaacgattcatcactcgatcacactgattgagtacaataaactttgtgatcagacgaggataaacacgaccatttcttccagcattaaagaatctagatctgacctatggatattggcaaaagcacgttagatatcaaactgtgtaaaagatgatgatgagtgctgaaccttgtaaatacagacattatgagacatacaatgatattgacccacactcctgatgagagaggctatggcaccattgcaacgtagaccattgctaagaacaccttgagacacagaatgacgatcattgtcacgtccaccgtatagctcggagaagagtaaagaggcggttctgatcttttgcgctgtatgcgaa

SEQ ID NO: 130999 - DNA, 746 bp, Arabidopsis thaliana columbia
acactatagacgagctatgacgtcgcatgcacgcgtccgggagcttgtatactgtacagcggccgccctttttttttttttttccttttgaacttttaacccccaaacaataagttttacttgattggggagaaccaaataaccggaaacatttaccgataatacttgtaagcaattttgtctttatccgaagacataaaaaggaacctttatattacacaagaaccaatctataactgggaaaaaaatactccttagtcttccccttccgttcaaaaaaatggcttaaatggtaagataagggggcgataaaaagctcccaaattttgaaactttaaatgtgataaaaatgcaaagctttcatttttttaccataaatcagggggggtattgaactcgaacgatggcttcagcttgaacaacattgtgaaaccaatttggcaacccatggtaaaaaagatttttaaatttacccaattttggagaatatgccacaagaaccctattttttttctccaacaagatctttcctttcttcaaaaaacataagacgcgaaccactttaccattttcaaggttctttcaaacttctattggccgggacaaattttgctttatccccttttgcaagttagaccccttgaaatttttttttccccatgatttttaggggcccaaagtttttcataccccatagtctaaattttgcttgggatcactaaacgatcggcccaagacaccctttt

SEQ ID NO: 131000 - DNA, 827 bp, Arabidopsis thaliana columbia
  unsure (1)..(827): unsure at all n locations
tnnnnnnnnnnnnnnnnnnnnnnnnnnnnnnnnnnnnnnnnnnnnnnnnnnnnnnnnnnnnnnnnnnnctttttttttttttttaattttaaacggttgccaaatacaaaacacctgctctggcaaagccaaacataccgatgtttttctaactccagagacctataggttttttctaacgcccgttccaattcccaaatggtgtcccccaagctaactagacagagatcttggttttttcacccgctgaccctccactatagttgatttctctgattcacatcatggaggatagaccttttaccggggatatcaaaagacctccaatatcctgcgagtaaccatggacttgaattgtgcttcaagcaaagcacgggtgaaccatttgcgatttcccggattctgaactatttacgtcatcgagattatcttccttcacactccaagatgataactctgcaaatagtcaacgtgcagctgcaaactccttgtcgacctaaaattgcttttcctgcgacccggacgttttccgagcctactgccttcttttgcttgaaccttgtggatcacagacccctcgaaattttttgataaagccaccggggacccaccagggcgtttttcgctgggacttttggagggtttttccactttttcgagccgaaacttcccacccatttgcttcttttagaatcatactctgggtggttcacttacaccccacccctactctataaaatatattgtctaggggaggaattttttcctctgggatttcgaaatactatttttcaaaaggctttttttccttttgaaaatggtgttta

SEQ ID NO: 131001 - DNA, 801 bp, Arabidopsis thaliana columbia
aggttcgatttcgtgacactatagacgagctatgacgtcgcatgcacgcgtacggaagcttggatcctgtacagcggccgccctttttttttttttttggtgttgaacaaacctaaatgtgaaaaggcgcggtactaggagtatcccatcgaatttgaaacgtacttacacccgattaagttttttcttcttttaccaaggaggcccaattattttttgatgagaagacaaagccttttatcaccacacacgggtggtgttagcggaacctttactagaaaaaacacccctgggggagggccgcctgaacattagcttggcatcaaattctttaaccctaaaacaccagcctggcaggatacctaacacttgggttacgcggcgtttttgcaacagtttccctccttgcgtagatatcatcctgatggttcttgagaagatgcaaaggccatccttgttcagccccttttacatcatgaatgacaggacccgcctttgcgtgcctgttgacccatgggtggtaccccgttatgaccgggcgcgacccctgagggggccgccatctctttacccatgggtgagtggaacataaaagctctgtggggaaaacaggggccaataagattgtgttgcccgcggtggtaaacagccttattcccgccttctcccattatgtacaaacgcattttttcgggaaggcctcgaaggggggtttataaaggtcgaaaataaggccccgggcgggggaggggcatatccttcacggggggggggttttatactcccacccaatatttattt

SEQ ID NO: 131002 - DNA, 793 bp, Arabidopsis thaliana columbia
tgggacctttgaggtagaatttcgttgacactatagacgagcttgacgtcgcatgcacgcgtccgtgagcttgtatactgtacagcgttcgccctttttaatttatttttgtttttatgatttgcaataccgaacagacatattttgggtgtgagaagaagaggaaacatggaaatgaaagatccatgatataaagaacccaaaagccatacaagctaacaccaaattcaccactctctggggttggcatctgttctccaccaccgttggtgctacgccttctcccgccgctggttcctcaccgtttttcaactgcctctcttacatagttgacccatccttttcgattgcaccgtcgtcgttctgggctcccgagaggcaaatctcgcatgctttgccgactttgatcttgaaccaagtctgagtggattggctatgaacaacagacaaatcgtctttacaagaacaccttaattcaattgcacatctaccgctcgtttacactcccaaatgacatatcctgcaatttttctccgggggtgccgtaggatgatcactatgtatgtccgacgacgagggactcattaccgacgacactttcctcgactgatctcctttgtattcatacaatcctccaggcctctaatacaagtaagagttgcatgacttcacatctttacccgcctgaataatataacgctgaccgcaatttccgtccaacagaccttccgaagatattccaaagagcttcctcccttggttctaaattcgatgttcaggtacgtttttattt

SEQ ID NO: 131003 - DNA, 542 bp, Arabidopsis thaliana columbia
  unsure (1)..(542): unsure at all n locations
tcgnnnnnnnnnnnnnnnnnnnnnnnnnnnnnnnnnnnnnnnnnnnnnnnnnnnnnnnnnnnnnnnnnnnnnnnnnnnncttttttttttttttttttcattaaagaaaacacattttccatgaaatttatactacacacacaaaccttcaaacatctttgattggaggataaagttaaagtctcgtaccacaaccttccaagaccaacaatatataaacctatctatataaaaaacgaagcattaccaaaccctgctgattcattcgcctgaacaatgtcttggaaaagagtacaacgcattcacgtctctaaggattgatttactcattcccggaaactactcgagcggtcaacgcgtgacctatatgcaccatcgaataggctaattacgtgtgcgtaatctcaccgataccgtcgtggtcaaacattcgtagatatggacctaaactgatggtcgtactcttgatgcaagaccagaaccggctagaagggtgctaaccgactcgagaactggatcagagccatggtctttcgacctga

SEQ ID NO: 131004 - DNA, 443 bp, Arabidopsis thaliana columbia
attgtgtaatgattaatgccaagaattgaaatttatcctctgtcaggacaacaaaatccgaaaatgctttagaaataggctagaaatttattaatggaatactgacgcagactggcaaaatttaaatcagatgttcgttagtcgccagataaagtgaatcattatctaaaaatgaagaggttaaaataaggatgtaaacggcgacaacattataaattaattagtgacatgactctacacattacttgtcatcttcagtctagacccagaatgatccatccagaaacaggatctggggagccagatgaaggacaaaccccctcattgagcctggtgacttcactaatcccttggaagagaattaagagaaagtggttggcttctcagttctgtcacccggaccttacaagagaaacggaaacagaattgtatttccaatatga

SEQ ID NO: 131005 - DNA, 700 bp, Arabidopsis thaliana columbia
  unsure (1)..(700): unsure at all n locations
cgtttnnnnnnnnnnnnnnnnnnnnnnnnnnnnnnnnnnnnnnnnnnnnnnnnnnnnnnnnnnnnnnnnnncttttttttttttttttttttttgaaaacaaggacacttttatatttcccatttgatatcaaggaaaatgaactttcctattacggtagacattaacaaactgttcttaagaagcactttacaagaacacacataattaaaaaacccatcatgtgtaacctaaaaacaaaaccgtcttaacccctttcaggagcatgccttagggttggagaccaacaaccaaagggtgttctttttattctaccgccgcccaaagcataaagatgaccctcttcctcaagggctggttaaaatgaggtgttggacttgtaatctcgtgactgcaccagactcttacaactctattggaaggaatctacttcttcaactttcaaatgttcacctactttgttacagtcaagctccagcttgtttactgcgttgtatatcccttgcgcttctgacacattcgcatctatggacctcattactattctctgatcagcgaaggcttcatggctggacccgcccagggtgattcattgttaggtcctatgagagcagcgacaccaaggtgatacaggaaggctcgctgcagacactccattatgcccaaaaaagagtttgtttattggtacctctattaacgg

SEQ ID NO: 131006 - DNA, 1127 bp, Arabidopsis thaliana columbia
  unsure (1)..(1127): unsure at all n locations
ccttgaggttcgatttccgttnnnnnnnnnnnnnnnnnnnnnnnnnnnnnnnnnnnnnnnnnnnnnnnnnnnnnnnnnnnnnnnnnnnctttttttttttttttttttttaaaggaanggggtagctgctatttttagtcgcagggaacacagaaaaccgtcattaataagacttcaccaaattactctatcattcaattgagaaactggtaatatccgatattatgaaaccgcacacgggacgagtttcatccctctctctttgtttttcacagaccagaaacactctaaatattatgcaaacccaccacgcactctttgtttgtgggctaggaccacgtataagcgcgcaaagtagaccgacccccattaagcatatcccgggtacacccaaatcttttggttagacctaccatcttcggtgctagtgtttcaacaccgcgttgtgttttgctctacctgcgtttgaagttacacaaaaccaaccaaaactcttttttgtgtgtgagagcgttaacaaaaagcatattcttgtgggcatatttttctcgacctgagaaaaataaggtggttgttggggacgctctctcttttcgggaatacgtgtgccatacatcttggcgaaataaagcgcgcgtaaccgttgaacaaattccgcgcttctctcttgagaacacaccccgctaaaggtggacccttgggtaaccacaggcggaattcatattggggactccaacactaacgggggagcatactttagtccgccgattcctttggggagaagaaacggagaatatctggcccttccggataaaagatgggattccctaggcccccatttaggggcaaacttaagggaatggtaaaccgagtaaccccgcccgtttaagagataggggggtacccccctttctccctttagggatatagaaggtttggaagggaccccccccgcaaacacaacaatttaagctcttttggggcaatgtaaaaaccacaggggtcccaacaaagacagagcaatacctcttgatttcttaatacgttggaaaccattaaatgggcgaatccaggcccgggcaacttatcttgaattggggggcgttttatccccccgaaaaaaaaaa

SEQ ID NO: 131007 - DNA, 643 bp, Arabidopsis thaliana columbia
  unsure (1)..(643): unsure at all n locations
acactatctaacaagctatgatgcacgcttgcctcagcctggatcctgtatagcggacgcccttcgccctttttttttttttttgaatatntaaaacatcctttattttaaaacccaaatgaaagcgtatgacatgttttattaaaagactgaaggagtgtatttttatttggacaaagaacataaagcttgtggaatgtatcttactgaaagggcgaaccccagttattcctgctttatggccatgaacacgcagtatgtggctgttcatatgacaggaccatgggagagaactaagttttttgtaagaattctccagacgctgcactttctgcaaccactgcagaggtcaataaggggcctggcttactataaggggtaccgcaccccatgacgggtccaccgagaaggtttgcaaacctgaataacttctatggttcccgcactaatcgcctctcagttattgggtacctgtaaggttcccaggaatcccaagggaaatctggcaattcgttcttgaaaggcattagtctagccccctgtgctggctgatccccctgtgagacctgcatcctcttggggtcaccacctttggggtcccgaggacaatacgggcccagtggatttgactcttgaaaggtcc

SEQ ID NO: 131008 - DNA, 760 bp, Arabidopsis thaliana columbia
  unsure (1)..(760): unsure at all n locations
gnnnnnnnnnnnnnnnnnnnnnnnnnnnnnnnnnnnnnnnnnnnnnnnnnnnnnnnnnnnnnnnnnnnnnnnnnnnnctttttttttttttttttgatatattattaatcgtttggagaaaaaatatggtctattggattcacaccaacacccaaagtgtggctttgtaaccattgacacctattaatcacccttggttgtaaagctacaaactgtttgtttttgaaaggcttccagtaaatacccttaaaagagtgcattgactctctttagttcataagaacctgatactacaccttgtttttagagttgaaacccaattagggaatccctgtgcctttccacctccaatgtgccttgacctccacaaatttgtttatgtaccaaacctaacaccacagcttggcttgtattcttgatagggacaccttggggagcattattccctattgacaaccttccttgttgaccttgaattaccgtgtattttttgtcaccgttacataattcggttggggcaagaatcccagagttctgaaacctgtgatggattccattgtttttttcccactcggggcttaaaccgcgaataacggaccggtacctgtaggacgaccaattttctctatagagagttcttttacacattgcctgacacatggtcatactgtgtatactgtgtgaaatttacatccgatcacaatgccacataagattctgccgtgaatcttgaagagttaaggctggggtgccaaatgag

SEQ ID NO: 131009 - DNA, 744 bp, Arabidopsis thaliana columbia
aagagctatgacgtcgcatgcacgcgtacgtaagcttggatcctctagagcggccgcccttttttttttttttttagttcaaagctttttaatttgggcaacataactaacacccgtttgggatggctcacgtaccccgatacatacacagcttaaaccacaaaaacagagaaatataaaagtgagcagatacttgttttgtggaatgaatacataaaccaaaccagcaactttaaatgtcggggtaaggccgacttgaatgggttgccgacttcccagttgtggggagacttgacatttgcaaagagcgcgtaggctgaaatcaatgagagccttccgtcggctattatgtttaagcaagggcttatggaggtcatctcctggtttggtgtcgaaccattacctaataatctgtagttggtagctggatgggatctatccagcattactagctttcccaaagcacagaccagggcattgggacttctctggcgtgagataccggaacaagactcttaccagacagactcataaccaaaacgctcgtatgagttagactccctgtggaggctcatattgcaggagacatgggttggactatacctgagaatgcaccgagtctatgcgctaccgatccgccaaccgttgctataattagtttgcgagggagacacctacgggttcatagtcgcccactaatcaccaatggatctgaaggggtcatggggcacactgtattatgga

SEQ ID NO: 131010 - DNA, 757 bp, Arabidopsis thaliana columbia
tgaggttcaattacgttaaacagctatgacgtcgcatgcacgcgtacgtaagcttggatcctctagagcggccgccctttttttttttttttttgttgaaaagacaaggacacttttttactcgccaattgttttcagggaaaatgtaaattacaaatacgggaaaaagtaacaaacttttctgaagcatcatcttacaagaacaaagaatgttgaataacccataatggggaacatcaagcaaaatccatcataaccactttagaaagcatgcataaggattgaagaacaaaagccaaagggtcttttttttattttagccgaaccaaaaacataatgaggacccatttcctccaaggctggctaatttgaaaaggttggccctggtttggaaaggaccgagccaaattccgaaactttttttgaaggaaattacttctgtcggttccaactggtgttcttctttggttcaatctattaccaacttatttagggggctggaaataccttgtgattttgacacaatttcaattattgggccctttactatttcatgaaactgggaatgcgtttcaagggctttaaacccggctatgggtgggaaacccgtggccaggggccccaccaagaagggagaagcccctttttaaaaggggtggaaaaaaaaaaaccccggggttttctaaaaccctttgtttgggggcgcccacaagaaaaaatctccttgtggttttttttggggcaccctctttttttt

SEQ ID NO: 131011 - DNA, 817 bp, Arabidopsis thaliana columbia
  unsure (1)..(817): unsure at all n locations
cgttnnnnnnnnnnnnnnnnnnnnnnnnnnnnnnnnnnnnnnnnnnnnnnnnnnnnnnnnnnnnnnnnnnncttttttttttttttttctttttttacaaaactctttcggaccaaaaaatatgatttggttggaatttctccaatccaaaaaggttagctttttatccaatgaaaccctcctaatccacatggttgtaaaaatacaaactgtttaagtctgagagtattccaactaaaacccttaaaaagtggattgcctcctcctgtatccagaagaaccctgaatattacacatttgtattataatcaaaactcaactagggaatctccgaacctttgcaccacccatgtgcacacactctacattattggtttatggtactaaactaacagcaaagcctggcttgtcttataaactgtgaccccgtcgagtgctttataccctagtaaaaaaccgtcttgttcaaattggactaccacggattttttccccaccgaaaactaatcgtgtggggcaaaaatcacggggtcctgaaaggcgtgatgtgatccctcgattcttatcccaaccgtgtttctgacctcggaatttacgggattacgtacccttgagaggggcaacaccattttttctccttttagcacagatatattttcaaccaaaactttcccgtttaacacccattagttcctaacatctgctggtaaacacaatttgtgtatgagaaaattctttatatcaaaacacgggatcataataaactttttctccacagcatttactgtttattctcagtgcccctgtggaaatagca

SEQ ID NO: 131012 - DNA, 707 bp, Arabidopsis thaliana columbia
tttttttttttttttctctttcccgcctataaagaggaacaaacttggataaagttgaattcatctgctttaggaaaatacctatgctaatacgatagcgctatgataataccatatacacgattattctacggcccacatatggcacgaaacaggaatgggccaacaaacagtacatgtatacggtctatggaacacacataaaacaaataataccgagagcataaatacagtaaaaccctcaagagcggtaacttgcgcttgattgtggcgtggacattaatgctgacagtgaccaggaacctaggccggtcgatacagttgttgtagaagggtcacttcttactaacccgagggagacgacgccggttgttcagacgaaagggcgcggttctctttctgatcccaccacatgcggtcttgggtggcacagatcttggattggacagaagcttggccaccatttatggggaatcctttgaaaaaagcaacgaaaggtgctttgtcctatgtggatggatataaaccgtgtatacggggccagtcatccgcgttcgagaggcttgagtagagcttcattggttggttgaatgggaaacggcctcctaaatccttagcattcttgaacgttcggatggggatgttgggaacaacgtattcgatctgttccatcttgcaaaggttgattaagcggaatagggttccag

SEQ ID NO: 131013 - DNA, 645 bp, Arabidopsis thaliana columbia
  unsure (1)..(645): unsure at all n locations
tggggccttgaggtacgatttcgttnnnnnnnnnnnnnnnnnnnnnnnnnnnnnnnnnnnnnnnnnnnnnnnnnnnnnnnnnnnnnnnnnnnctttttttttttttttttaccacgctaaaaaaaacaacttgtgagtagatctttgcatataacaatacctaggtaatgaacacgtgtataaattatagcatgtaatgttaggcccaaatataacgttatcattaggggccaacacacatattcatataagcttctcacgaacccgcattatttaaattatactgatagagatcattcattagaaccctctcgagtagtaacttatgcgtttatgcccctttttcatccagatggcttaaccgggaacctagcccgaacagtacagaaggtgtcgatggtccaatttgtacgaacccatttgatacgacaccctcgttcatcgacaatgtgaccgaactctttttgatcacaccacatgcggcgcttgagtggcgcattactgggctatcacagaagcctgagatggatctataaggaattctttgtaagacgccactaaaggtgccttggcccaattgctcttctgtagaccggctctcatggcccaatcatccgtggttcaatggcttgagtcaagtttatt

SEQ ID NO: 131014 - DNA, 1054 bp, Arabidopsis thaliana columbia
tacactatagacgagctatgacgtcgcatgcacgcgtacggaagcttggatacctgtcgaccggtcttccttttttttggctttaaattttttcaatagcggaacattccggtttagagtttggggaagaaaacttattccggctttgaccatgctgatcttcaatagataaccatatctccaaaaagaaaccgctcgttttgtgaaagctgcccatttaaataaacttttccctgaatcacccttgaagctggtcgtgctttctccttcaatttttgggccgggaaaaaaagaagccaggtgcactcaccgatctgtttttacaaactccgggaacccccaacatactcaaagcggtcccctatacttcccaataggatttattttgtgagttacaccctttctgtttaatggatgcggactccggccccgggggaattaaggaggtcacgccgaccccaaccgatttggaattgtgtttcctcggcccccacaatatgttatggaatcgtggtctctccgaggcgaatatcccccctatagaatatggccgttgttttttaaatgaacaacaacaatcatcctgtttttgagggaaatacaattccttctccgagaataacaccgcctccacctttatcactgggttaagcagccactggcaataactctgtattacgggacgttcccttttcggccctttattattccgaaacatctcaaaaaatattatacaaaacctgtagtttcttttatatatcacctcggatacccataacccaatggttttttccaatgccggggttgttatttggacacaaaccccccccacccaggattgtgagtttgcgacctccccctttactgggagggaggggctagtcttttatatttggagaattggtacctaaattggcgccccataacatgaaacctggcgttgtgttttttaaacccaattataaaatttttctcgggaagtccctttacttttccccagggcttgttaaacaaatgatcgtttagctccatatagacgcgcccctcttgtctt

SEQ ID NO: 131015 - DNA, 655 bp, Arabidopsis thaliana columbia
  unsure (1)..(655): unsure at all n locations
cactatanacgagctatgacgtcgcatgcacgcgtacgtaagcttggatcctgtacagcggccgccctttttttttggtttttttttgtccgccncaaaacatgtttcatatccctatttggaaacaccaaacccaaaacgagtgaaatggtaatacttaaaagaatgtagtgtttcaaaagttaagaacacccacaagggtaaaggttaccctaaagtcttaaaactggcgacgacccctaattttttacatgcgacctccagcataccctttgacagagaattttgaaacatgcttctatgggtggaagcccctattgaggaccatgcttctggaacctttacattgcgtcaaatagagggttaatggccacagacatccatcgctgtccaagattccttaaagcagatgacagacaaacctcctgaatgatttcttttgactcaaccatcacaggtgcggtctttgtgaacttgtcgcgtacaagttctcccgcttttccgtgttccaaatctgttttggtggacataatgccggccccttttggagcttcggcatcaatcggctagatacggattttccaccctttcttatacaacatttgtgcgcccattttaggacttaatctgttcccccccatctgtgaattttgaa

SEQ ID NO: 131016 - DNA, 537 bp, Arabidopsis thaliana columbia
  unsure (1)..(537): unsure at all n locations
actatgacgtcgcatgcacgcgtacgtaagctggacctctagacggncgccccnnnnnantttttnataaagaaaaatgcaaagcttaacgggaacaaaagagaacatttcaaacctgacaattttccccaaaataaactgaacaataaaagaaacagtgaccttttgtttcaaacctaaaacctaagaaacatcccctttgaaaacaggaaacgagcaacagcaaaaccaagtaagcagacatcccagtttaaaaaaggaatgtcaaccgtaccaatgtaagcacaatttccgacagagactcttaccaaaaaacacaaccaaaactctacaataaaaaaacatcggaaaaaaacctccgggaaaaaccaaaacttaaaaaaaaaatccccaaattgccagctgggcctgaaaccaaaccttgaacaacccccacttacccccaaaagaaaaaaccccggggaactggggaaaaagctaaaaaaaagcgcttcaccacccacatcaagggaaaataaacccaaatggaaaaacccc

SEQ ID NO: 131017 - DNA, 709 bp, Arabidopsis thaliana columbia
  unsure (1)..(709): unsure at all n locations
nnnnnnnnnnnnnnnnnnnnnnnnnnnnnnnnnnnnnnnnnnnnnnnnnnnnnnnnnnnnnnnnnnnnnnctttttttttttttttttttttttttattttggatctttttttttttttttttggttgggaaaaaaaacccggtttggtgggggttttttttaaacaaagttcccgatcctatcaattataaatttttttgaatgcgaggaatattttattattgaaaaacacccgtttcagctttttattttttaacggaaaatccttatggggaaacatcacttaaaaaacctgtttggtactggccggtattcccaaaaagatgttttagaagagcgttaatgttacaattggttgcaagaaaccccctaaggttctttggtttgtaaaaaaagcccatttcctgcaactgggtgaatggagtacgagaccgtttttgaggaggaacattgggttggttcgggaccctaagggcggcagagacaaaatgtgggaaatttttaatcagtaaatccccccccccggatttttctggggaaggaacaatttgccccacatcctgagggggtggatttgtattctgaaatagagaatgctggaaaagaattttttgcttggaaaggcgggtccacccggagattctggatccggacattgaggggacaccggtttggccttatgggggggatcctgaaatttgggaccaa

SEQ ID NO: 131018 - DNA, 705 bp, Arabidopsis thaliana columbia
  unsure (1)..(705): unsure at all n locations
nnnnnnnnnnnnnnnnnnnnnnnnnnnnnnnnnnnnnnnnnnnnnnnnnnnnnnnnnnnnnnnnnnnnnnctttttttttttttttttgagatagaaaacaacgggtgcgtatattctgtggtttataagataccatcccttgtctagtgggtggagtgatacccttttacgctatgagatacacctcatggagaatctggagactgaagaatcaaccgagggtaccgttaaaaccttcgcttgaacgatttcttgaccgcattgcatcttaatgacgatgcttcagattatcatcttgatggatttcctgctgcggattctttatgtcattcctattaacatggcctcccacataaacacctgtgctaatgatcctcatcttaccgccacatcccgtcgtaaaatataaatctggcctggtggcctggaagacacgtgatcgtagacctgggaggaggaaccgaacctcctgatgattgtcacttacgtacaccgtatttgtgtctcctatagctcgttgagcacaaatacttgggaagatgtaactactgtgtactctagtgtggacattctgaacggtgaatggacttgtgactcaaagaggatacattttttggtcggatatttcttgaagacatccacggacttatttggagctagaacgaaatgaccgatctttggagcgagagtactggcgggttcga

SEQ ID NO: 131019 - DNA, 744 bp, Arabidopsis thaliana columbia
  unsure (1)..(744): unsure at all n locations
nnnnnnnnnnnnnnnnnnnnnnnnnnnnnnnnnnnnnnnnnnnnnnnnnnnnnnnnnnnnnnnnnnnnnnctttttttttttttttttgataaaccattaatcgttttcatatatacaatggtttataaaaaacaatccaatttctagtgggtggagatataccctcttacgctatgagaggcacctccgggagaaacttgcgactgatgaataaaccgagcctcccctgaagaccctcgcgagaacgattttttgaccgtggtccctcctcttacgatactgcagatcataatcgtgattgtatacaaactcccctttatatattttatttctcctaacatgttcccacaaacaatcaactgtgattatgtacctcagttttccgttcaacccgacataaaatagaaatcaggctcacgtggctaggaagacacgcttttgatgacctgcattgcttaagtaaacctcctgtagataggccctcacgttaaccgtaattgcttagtatatcgctcttccagctgaaatacctgcgaagttctcgcttatctgtccgcccgtgcggacatatagtacggagattggttctatacctaatcgccgaaataacttctattctagatgctgtttgacacatacagagacggaaattgagctgtgaagaatctccgatacttgaatgatcttactgacgccccngtctatgccatggagctgaaaatctgaagcttctccatcagatg

SEQ ID NO: 131020 - DNA, 757 bp, Arabidopsis thaliana columbia
  unsure (1)..(757): unsure at all n locations
gatttcnnnnnnnnnnnnnnnnnnnnnnnnnnnnnnnnnnnnnnnnnnnnnnnnnnnnnnnnnnnnnnnnnnnnnncttcgtttttttttttttttttttttttttttttttttttttttttttttttttttttttttttttttttggggggggggaaaaaaaaaaaaggggaaaaaaaaacggggggttaaatatttcggggggaaaaaaaaagggggggttcacccaaaaaaaaaaaacacaacccgcgggtttatttattggggaaaaaaaatctgtatatggaaaaaaccgggttgtggaaaaaaaatgaaaaaaaccggcccctccaaggggtcaattttttttacccgtcgggaaaaaaaaaaaactttgattatgggggggaggaaaccctcgggggggggaaaaaggggaaaaaagacgtttttgggtaaaaaggggggggaatccaaaaaaaaattctttttttaaaaccccccagaaaaaaactcttttttttttttagggaaaaaaaaaatttttttggagaacaaacaccggaaaaaccgggggggggggccccaacgggggggggggggcccaaaaacaagggaaggagggttttttttggaggaaacaacgaaaagggggccttttccacccaaaccaaacacgggaatttgtggcttttgaagaggggggaaaaaaaacgggggggggtttttgaaaaccccaaaaatccttttgaactgggaaaaaaaacaaaagggggaa

SEQ ID NO: 131021 - DNA, 593 bp, Arabidopsis thaliana columbia
  unsure (1)..(593): unsure at all n locations
cctttggnnnnnnnnnnnnnnnnnnnnnnnnnnnnnnnnnnnnnnnnnnnnnnnnnnnnnnnnnnnnnnnnctttntttttttttttttttttttnggagagaaaccccttattgggttttttttgccattacccccgtacttccaaaatcttttcagttgtggttttattaattaccccaatttgggaccgagttatataccccacctttctgcgaccaaaaagggaaccaaccaaattttgaattttaacaacccgaaaaaaccgggaatgaaaaaacccgtaaagggccaaagaagaacttcaacttgggaacccaaaaacttgaaaggggggggaagggtggagaaagcaacccattgggccaaaaaatctaaagggtttaaaaaaacaaggtttggagggctggaaaggcacttccgagttgtgttccccggaccccaacgaagttgatttggtgacaacaaacctcgggtggttttttttctatgggaacgggttaaaagccaccacctggtttgggttaaaatggttggtgggagggagccacccttccgtggtgattagcttccccgggggcaagggtttttaaa

SEQ ID NO: 131022 - DNA, 745 bp, Arabidopsis thaliana columbia
  unsure (1)..(745): unsure at all n locations
nnnnnnnnnnnnnnnnnnnnnnnnnnnnnnnnnnnnnnnnnnnnnnnnnnnnnnnnnnnnnnnnnnncttttttttttttttttttttttgtataaactgaaacaatatgtatttattcctaataccgggtgctttgacaactatgaaggagatattaaaaaccattgacaaactgagaggttacaaacagtgttaatgaaaaatccgggaagtatatggtggcgcactttggccattgctcaacagaaatgatacaataatgaattctgtgtggggatcaaaataacaaggtagggatgtttaaaaaagaagcctgaaaaagctgagccttttagggttattaaaagggaaaaaagcttaccgaggagtgagcttttgtttccggttgctttcttggataatgaatacacaaaccatcagtttcacagtttcacagaaacgggaacctttgtatcgtagctggggctcagcgaactaggtgcagttgttcaatcctcgcatgaagaatgtcattgttaggagtgccactgctgtgtggtttcacactccaaccagctggtttcatgggccttgcaccatacgtgttaacaacggggatgtcgtgtcctaggtgatgaagagtcttgtaacatgtgatgagcccatgaaacatcttccggactcgcgggtttaacccggaattctggactggttcctggcggggtctcaccttttcctatagggaaggctattaaagcttggcgt

SEQ ID NO: 131023 - DNA, 753 bp, Arabidopsis thaliana columbia
cactatcttgacgcttgatgcacgcgtgcgtcagctgggatcctctagagcggccgccctttttttttttttttaataataaacgaatttttttattaacgttcttcttttttgaagaatcatataatccaacaaagaaaaatcaaaattataaaaccaataaatgatcgccacgtgccacttcaacaacctcgcacttcaccgtcaaccccttatccattccaccaccggcggccaccgttctcctcttcttcggagctccgttctcgttagaagaaggaaaagaagatctcttggacttaatccgaaccgggtcgggttctcctgaattaactctcaacggaaaattcaacaaagcgcgggaaccacgcatcctgaaagcagctctgtcgtaagccaacgccgcgtcctccgccgtctcaaacgtccctaaccaaaccctagctccgttcttcgccgggtctctaatctccgccgcaaatttcccccacggcctttgtctcactcctctataatgctttcccttcgccgccgtcaccgccgccgaaacaggactcgtcttctccttcttgaccggaacagaatccaccgccgcgaaactctccggagtctcgatcttaacactcgggaaagagctacgatcttcgtcggaagacgaagaaaacggctcccaaccgccgtgaaaggcgtcgttgaggataccgtaaactaacatatcctcagaatcgttttctttcaacggcaaatctccca

SEQ ID NO: 131024 - DNA, 638 bp, Arabidopsis thaliana columbia
ctatgacgtcgtcatgcacgcgtgcagctacgtccgtaagcttgtatcctgtagagcggccgccctttttttttttttttttgatatatcaacaaaaacgttattatattttggggttaacggaaaacaatccaaaaaggattggctgtaatttacaacacataagctcgaagcttctccttaaaaatcaactaggtaccgaaggaaccttctttggtggaaccacacgcactcttggattgaattattaaaccgaaaggcatttgcgtctataacaaggaatgagaagggatgggcggctcattcctccagcttacggtgtgtaatgtattcaggcgggaagcgcagataattaagatggggtacgctcctgttttttcgcgacaacctgccggaccataaaaaccgtccgcacgtggtgaggaatacacctcattgaaaacctccatggatgaagtaaaccttctgaagatgggcactaacgaataccggaattgtgttaaatatagtttgtgcccctgggatttcttgggaagaacgccctagtttgcccaccaagcggggtccgtgtatttaccggataaaagaaaaacaaatgccttgggtaaaaaaaaatacagatacttttttccctccgt

SEQ ID NO: 131025 - DNA, 680 bp, Arabidopsis thaliana columbia
  unsure (1)..(680): unsure at all n locations
nnnnnnnnnnnnnnnnnnnnnnnnnnnnnnnnnnnnnnnnnnnnnnnnnnnnnnnnnnnnnnnnnnncttttttttttttttttagttaaaacattgatcatattcgcatattatatggtttataaaagacaatccgacgtattgtgagtggtacactactcttttacgctataagacccaccttaatgaaaaactttgcactgattatgaaatgtagacattaacataaaaccctcacttgatcactgttgtgaccggaattcgtctttcctcgatactcccgaccataattgaagagagtgctactaactcagccttatttatctcatttcttcaggcatgttccgacatataatctgctctgcttatgctcctaagctatccgtactaccctgcctgtccatacaatactgcctcatgcggcgatgaagagcaccgataatagacctggtaccataacttgaacctcctcaatactgactctaacgttcaccggaggtgcgacatacatcgcccgtagagctgagatgcatgagaaggactaacacgtttgtaccccgttgacgacataaagaaccccaaattgtttcctaccttgtcgggccaatatctaattctgtaccgacttattcaacacatcctttgacaaaaatttttctggaaagaatcttcccaccgt

SEQ ID NO: 131026 - DNA, 754 bp, Arabidopsis thaliana columbia
  unsure (1)..(754): unsure at all n locations
ttcgttnnnnnnnnnnnnnnnnnnnnnnnnnnnnnnnnnnnnnnnnnnnnnnnnnnnnnnnnnnnnnnnnnnncttttttttttttttttttttttattaataatcgtattcaaatattatatggtttataaaaaacaatccgatatctattgggtggagtaataaccttatacgctatgagatacatctcatggagaaacttgacactgatgaatccacggagggtgcagctaaaaccctcgcgtgatcgctctttagaccgggaaccgtcttcggacgatacttcagagcatcattgaagatggaatacaaactccggcctctatatctcattcctcctcacatgatctcgcagataatctgctctgcttatgtacctgaaatttccgtacaacccgccggtaaatacataaaaatgcgcaggcttgttatgaagtacacctgattgaagacgaggatggataaattaaacctcctgaaaatggacttttccgtttaccggagttgcttcatctatcgcttgtagagcagagatacctgcgaaggactcgctggtgtgtacaccggtgtggacctagagaacctggaatggttttattcctatccggggaagtaaaaaaacctgtagatacttgttcaacacatcccccgacaaaaatttggccggggaagagtttttccataattccagggagcttcccggaaccttgcgactatggccatggttttggaaatgtaaaggttatcgctaag

SEQ ID NO: 131027 - DNA, 596 bp, Arabidopsis thaliana columbia
  unsure (1)..(596): unsure at all n locations
gtgacctatagaggagctatgagcacccgtgcctcggtccgggagcctgtatactggacgccggccgccctttttttttttttttttttttannggagagaattccttttttgttttggaaccgccaaattttttttttttttttccctaaccccaaaaaattaggtttttccgggattaaaaaacgggttttgaaaaccaattttaaaagaaagggaaattggaaccgggggggttttaaaagaaaatgggaaaaaaccccaagagggggacccctttttgggtgccctatttgaaaaagggatttccccaaatttaaatttggggtcaacctttccctttagggggggaggtcaaacccggggcccctttttttccgggggggcccccaatttaattcctttccaaggaacccttattcccggttttggggtttttaaaagccccctttttacttttcccttgggggtaaaaaaaatttttatcgccccgggtttttttgccttaaaaatttcttttaatttaccccgcgggaatttattgggttttttcggggggactcccaccggacctttaaggggaaacgggtttttttt

SEQ ID NO: 131028 - DNA, 715 bp, Arabidopsis thaliana columbia
cagtttaagcacgcgtgcgcacgctcggatcctctaatagcggtcgcccttcgccctttttttttttttttttttttagaaaacaagaaattcaccaattagaggactgggaaaaaacaatcacatattacaggaggggtgaaaaaaccttatcactatgaataacacctgaggaaaaaactttacacacacaaacatatagctactatggtcacaactggttctgacaggaaatgaagacgccattcttgcttgtgacgacgactcagatattcacttttatgacaaccaccctccaaagcctttaggtgattcctctacacatggtgtgaccaataaacacccgtgattatatttttcttgttgcctgcacacacctctgaaagcttaaatgtacctgaccttgctctgcagatccacatattcaaacctaagggaggacccgggctccccaaagatcactgctaggtttctcaccaatatgtggctatattgcacatttatagggaaaatcctgtgagagatttagcttgcggtccctccggtggggaactatcacacgccaaatgaaaggatacacctacgggcaaaatgtttttcccgggatatttggacagcgcctctccggcatcacatgtgccgaaagaaagccgatatatcagggtataacggcgatctgttttcgtcgaattgaagacgcaacaattcaacagct

SEQ ID NO: 131029 - DNA, 663 bp, Arabidopsis thaliana columbia
tcgtgacactatagaagagctatgacgttgtcatgcacgcgtgacgtaagctgggatcctgtagagcggacgccctttgccctttttttttatttttaaaaagtttcaatagtggaacattttgggtttttgagggggaaaaaaaaacgtattgaggcgggtttttttttaacaaagttaaagaaccaaatataataaaatattatggaaatcttgagaaatctgcacattgaaaaacaccctttcctggtgttcattttaaaatggaaaagctctatgggtagactttagggccggaaccaagatactcctgtccaaacctcgcaaagagtggttttctcagggaagtcccgttacccttggtggcgagacaccgccctaaagttcattgttatggaataaaatcccattccctgccacggtggccagtgagtgaggcccgttctatagaggaacatcgtattgttttgggccaattatgcaaactgctgcaaaaatgccaagcatgatttttataaacggcagccccccgtttttttatgtggaagaacacagtggaacccaaaagaggctgtgtgattcctattctgaaaatacattgatggaaattatttatgttggacactgaggcacccgaaatcagaacgttttgagatacaaatc

SEQ ID NO: 131030 - DNA, 781 bp, Arabidopsis thaliana columbia
cacactacacgcttctgcacgcttacctaagcttggatcctgtagagcggccgcccttcgttctttttttttatttttaatttttaacaaacgcgaaacatatccaatttggagattggtgaagaaaacgtacatgaacgatgacgcttcaaaaattaattatacaaccgaatatactataggatacctgttgtttttatgaaatatatacattaacatttaccataaccggcattgaccttgattgtggacgtgccttctgcttggattacggaccacaaataagttaatccaggtacaacccggcaatgcttttgcaatctcagggagacccgttcccacctatagcgtgaccatgactaaaaatacttgtatcttgttcaaactcctaacattttaagttttgacgaagatacgaggccccataaaaatattcataatccttgctagatggaccgataaccagatctatgggagaatttccttatgagatataataaactgcaccatatattgagacgattgcgaagacaaaagtagaacctatttgacgtcctgatgattcacaactcgcaagaaacctttgaagcgtccgaccactaagattgggcaccggaaattccccaaccctatcttgaagacctagttattcttttgaatgttacaaaaccaccctattcataaaaccccggttgttttctaaacggcccaaatattcacgggaaccctcgtctcccttaaaatggtggttatcccaacgtacacactcttgttcctcaca

SEQ ID NO: 131031 - DNA, 839 bp, Arabidopsis thaliana columbia
gtataattgagtaaccaaaccaggaaagtaaatacggtataacagacccaaatgatgtttgtaatttgttatatctatacaaaaggaaaagatgccacttcagaaaaagggagtaaagaaggcacaaattctgcaaagaaaccaatcttgtcataacttgctagggatcacatcacgggatagctaggtcggctttacaaacatgtcttggggctttgcaatgaacttggcaaactgagatcctttcgtttgtttggtattaccatctttgagtaacttaagcaaattgggtaaaaactgctcaaactttggggatagtgatggcattaaaaaccccaatggaagaaaattcttttgttaggttgatcaaaatgttttgaaaggaacggttgaggatctgacaaaattttttttggaaaaaactttgaaaaatttggtgggcacaaaaacatggcaccaatggggaaatgccttgacaagtttggaagaaaagcctgaatataaaacaaaatacccccggattcccatttgttatttgccgtttgggaatgtggtaaacacaaagtatacaaaattcattaattggggcccaactttgaaaaatttggaggaaaaaaaaggaaacccaaagcaaactttgcgtccaaccaacgggaatgtcgaacaaaggtcagtcattagatatggtttatttcaaagacatatatagtcgggggggagaaaactttattggcaaaacattttctttggacaaaaaaatgggaatatttggcagataatttacaaaatccctccacttcattttggtgggagagaaaacataacaactttttagttta

SEQ ID NO: 131032 - DNA, 728 bp, Arabidopsis thaliana columbia
  unsure (1)..(728): unsure at all n locations
atttcgttnnnnnnnnnnnnnnnnnnnnnnnnnnnnnnnnnnnnnnnnnnnnnnnnnnnnnnnnnnnnnnnnnnncttttttttttttttttttttttacatatttttttttagagtaaataggggcaatcaaaaataaatacattcccaacttttaaaagcccattttccaatgtttcttcacgaaccaagtttataattttaccggtttaaaaaaaccactttgaaatgagggtttttttctattcgcacatgtctatggtcccaccaaaccaccgggggggtgctagattttgctcgaacagagacatttttgggccattgaaaggctcaaaatgcttgcaaattttccgagatcctgggagcatacaattctcagggaaaccacctctatgaacgaatggctttccatggaaacacttgggcccaaacaagttcccaaggcccaaaaactttatcctgagattttggccctttcatgcgcttaaaatggaattttacattagggctgccgaatttggggctttccttttagaagccaccaagacccttgaaggatccaaccggacatgtaaaaaccccctacttgtacaaaaacttcggcgtgaaattcccggaccgataggggatccttaaaactgttgtcaaatggatttaaaaaacaagttacgggggtgggctctctccataaacttttcacatgggaaacttgaaaacccgtgccaaaa

SEQ ID NO: 131033 - DNA, 725 bp, Arabidopsis thaliana columbia
  unsure (1)..(725): unsure at all n locations
gttnnnnnnnnnnnnnnnnnnnnnnnnnnnnnnnnnnnnnnnnnnnnnnnnnnnnnnnnnnnnnnnnnnnctttttttttttttttttatttggaatatttattttgtcactcaagtttgatattcgaagatagacgctaaaattgaggataacacacattatagacaaaaaagtaaagcaaatcacatgtcaacgtccaaagcattggaaccagagacagtatgtgtggttgtcgacccgacacataatccccaacctcttactgaccggaaagaaaaataactacctgatccaccgacaattttaactcctggcaacattcaagcagcggacggtgcggtcacgtagttgagccggccagcttcagtaagagcggtgatgaacggcttcagattcacgagatcgacctctgtgtccacaacggtaacaggtttcttgtaatccaaggattcgtcgtcgtaaatgtcccaccattttttcactaacatttttatatcttccctctccatgttcgcttctttccctgtgtatctccacggcttcgaacccgctgcacagtagtgaaccaccttgacttttccaagctctacattttctgggtgacgccataacatcgcaaggacgagattgtacactaaaggaatcggcttgtagattttcttaaagtacatgttcaaaaaatcctgttcagcgaaaggagtcggaggagtgattttaagtgttc

SEQ ID NO: 131034 - DNA, 754 bp, Arabidopsis thaliana columbia
  unsure (1)..(754): unsure at all n locations
tcnnnnnnnnnnnnnnnnnnnnnnnnnnnnnnnnnnnnnnnnnnnnnnnnnnnnnnnnnnnnnnnnnnnnnncttttttttttttttttttttttttttaagaataagctgtatatattacaaaaacaactgattaaaagaaaacaacatcaacaacaaggataacatcaaacgacagtaaaagaataacaaacttagacaaaaaaaagaataaaaaacattacaagtttacaacacataatatgcaaacaatagatagatggtatcgtggtcatgtgttgtgtggcagtagctagctatagagcttaattagcttctcatttggaaggtggtggagtgaaaaatgggattgttggaatgctggtgggaagattgaatgggaagttgtttgggatagaaattgggaagttagggatattgatttgggggaaatgccccccaatcttaaaaaccggctcttggggtctaggctcttccacgcccttaaaagaaatgtagacatgggccctgttggctttgacaatctcattatacggttcccaatctttggtagcggatccctattgccactataacaaatttgcaacttggaaagatcttttggcttgatactgatgggattaaccagtgtcctgaaatccaagtttcccaattcaatttacccttcaatttggtggggttgtcccacttcttgattccatttgccccatggtaaaaatcggaaaatctcgggctatttcaaaaaacctttatc

SEQ ID NO: 131035 - DNA, 705 bp, Arabidopsis thaliana columbia
  unsure (1)..(705): unsure at all n locations
acaccatctatgacctctgcacgccccctgccctcgtccgtgagtcctggatcctctacagcggccgccctttttttttttttttttttttttnnnggnttttttttttttttttctttttttctttttttcttctttttttttataaaaaaagcccggcccggatctttcatttccttttggcgcccccccgggccccccgggttagaccccctttttttttcggggccccccccaaaattaagcgggccccgttctccccccaacaatcccccaaattccctgaaccaccccaacccttttgccccccaaaaagggctgcaaaacgccccccttcttctgtttaaaaaccccccccaaaccctttttgtggaggggtcttttcccccccgcccctttttttcccccttggggccccaaaaccccccccccctttttcctgagggggcgggaactttcggggcgccccccctatttttttctcccccgcccttcttggaaaccccaccggggtgcccaacgaatcaaccccccccattttttttttggcaaaaaacggaccccccccccaaaaggatttttccccccctttttcctgttttttcccaccccccaatccccttggttcccccccccccccccccatgggcccccccccttttggggccccagcccccaaaccggggggtcccctttcccttcccg

SEQ ID NO: 131036 - DNA, 752 bp, Arabidopsis thaliana columbia
  unsure (1)..(752): unsure at all n locations
gcgcccccggttggagttgcatttcgttnnnnnnnnnnnnnnnnnnnnnnnnnnnnnnnnnnnnnnnnnnnnnnnnnnnnnnnnnnnnnnnnnnnctttttttttttttttttttaagagcaaactaatatcattccataaaaaaatggaaataatacaaagcacaaaccttgtaccgagagaacccggtttgtatacagtctataacccctaaaccggttctggtcgcaataaaaaacatacagacatttccccaaagatattttaaaaagaataccaaaaatcaaaatcaagatgtaaaaaacactttacagttgtgtttaacaaataaataatatgaagatggaaacaagaagcagaatcatattttggttgtgtagttgttactagggggagttttcatgaagctaatgatcttggaactctcataccaaatccatgcttcactttctcaatcgttggggctaatttgccaaggctgtgaagttcttctcctgaatcttgatcaaggattcttcctgatatatcaacaatgtaagaacggttcttgtctctaggcagaccacgacccacaagtaactcgaaatctctcttgtgaagctctcttccattcacaaacacgtctgtgtttcctgcagcgcagttatccagcattggatggctaaactcttcaataaatggaggtattataccgagacacggtttgcccatcactccccagaacccagctcggtaatcataccaatactttc

SEQ ID NO: 131037 - DNA, 207 bp, Arabidopsis thaliana columbia
  unsure (1)..(207): unsure at all n locations
nnnnnnnnnnnnnnnnnnnnnnnnnnnnnnnnnnnnnnnnnnnnnnnnnnnnnnnnnnnnnnnnnnnnnnctttttttttttttttttattgctaccaagagactactcccatgctcttattatattggcccgctagaaacagattacacatatgcatgaacttattaacggtactgtaagaaagcataacatgccaaggcaataac

SEQ ID NO: 131038 - DNA, 694 bp, Arabidopsis thaliana columbia
  unsure (1)..(694): unsure at all n locations
gttnnnnnnnnnnnnnnnnnnnnnnnnnnnnnnnnnnnnnnnnnnnnnnnnnnnnnnnnnnnnnnnnnnnnnnnnnnnnnnnttttttcccgggaatgaaccaccctatcttgcaatcaaacattactatcctattgctaaaatgccaaaacctagtcgctctcattgtcattgcttttccctgtgaccttaagactggccctctcattggcgcacagcatacgagccggagtcatccttcgtaaagcctgatcactgactgaggaacctgacatgctttattagcgtgtttctttacgaaacatcctgaaaatgtacacttgtaatacctccttgaataaggattacccctgcccactttgagaccatacttgcttcatgtgcgcccatggggaagaatgtttatataactatgacgggcgaaccaccactgtcgtctccttcacattctttagagagttccatcatgcggccactgctggatcgccccccatgtctataccgtgtccattactggtgtactgatgtacttatcttgcgctggaatatgaaccctctcatgcaagtagctagatatgatagcagctccctttatagactatgtaaatgatctcaccgttcacaagagactctgatactttgttatcagcgacacaatgtgaacgctgccctcattagaaacttgcatgggttt

SEQ ID NO: 131039 - DNA, 726 bp, Arabidopsis thaliana columbia
  unsure (1)..(726): unsure at all n locations
nnnnnnnnnnnnnnnnnnnnnnnnnnnnnnnnnnnnnnnnnnnnnnnnnnnnnnnnnnnnnnnnnnnnnnctttttttttttttttttgtgctgagaaaatggatttataaacaaaaagattcaaactttagattacattagaagaagaagaagactttatttgctcccaggatcatcttgagaagataagcatgaaagaatgaagaaatatttcacaagcaaacatacaagtactgaataaagtaacggtctttgattttggttcatggccgttgataaacgtattttgttcttgggtcaacgattagaccttttcctccgttaacttcaagatcatgctggaaaacaaagtctgggattgtcagctgctcacgaggaacgtatttgaacagctgcagaagtcggtctgcatatacaactttcttccataccacattatccacgaaaaattgcatcgttaagattgtagccttcaagtggaaagttggatgaagaacatagattgcctgaaggttacgctggtgttttcgaccaagtatctgttctaatcttttcatccatcccaaatctggttggacttgtaacgatgctgcagaatgaaagtagacaatcgaataaggcttttgtatcacaggttcaaattccttaataacataaagtacaaaacgctccagatcaagacatcgcagcaaaaagtgagctcctacaacaaccattacaggatg

SEQ ID NO: 131040 - DNA, 726 bp, Arabidopsis thaliana columbia
  unsure (1)..(726): unsure at all n locations
nnnnnnnnnnnnnnnnnnnnnnnnnnnnnnnnnnnnnnnnnnnnnnnnnnnnnnnnnnnnnnnnnnnnnnctttttttttttttttttttctattaatcatacaatatacttgcatacataagagtcgtacaacaaagaaacaagagaaatatattgcataacttagcccaaagttccaaaagatatctatattaggttctggataccaatatccaataaagcctcgtatgttgtttgtttcatcttgaacagaacaagctgctccggtacacgtttacagatatgattttcaagcttgaagctttatcaaactgttacagttagacatcgtacaatggtggaaggttctttcaaggtaatgacaatattagaccacaggaccgtcccccaaatctttcctccttccctcctttccaatctgatctccgtgcaacagattttggttgaacccttctcaaggttaaacataatcgcaagatttcccccgagattcgacattctcgagccatcacgcttgtcaggaagatcgtcgagacccttcaagcgatcccaaaccatggcaattggatcaaacacccatattctattcttgctaccaaaagtgtaaatctttccatcaatgacgcaagaaccaacactccattgtgtgtccaacaactcatcagtctccaacgtaccttctttaggatcataaacaaagctattctttcgatccataatgtaaa

SEQ ID NO: 131041 - DNA, 725 bp, Arabidopsis thaliana columbia
  unsure (1)..(725): unsure at all n locations
tccgttnnnnnnnnnnnnnnnnnnnnnnnnnnnnnnnnnnnnnnnnnnnnnnnnnnnnnnnnnnnnnnnnnnncttttttttttttttttttttttttcaagataaagatcaactcttaaactgtaatatcaagcatatgacaaatagtttgctggaaatcaaaacagtatagttaaacaacatgcatcatcctgctaaatagaagaagcattttaaatccacagtttggttttgttctgtttgttttttcacctccaagaggaaccaccaagctttatcacttcttctgaacttgaatctttccttgttccaaatccttcatcccttttctgactacttgcgtctccatacaaatcttttagctttgcgagattgctgttcactgtcaccgccgatttctctttgttgctactatctcttttaggagtcggttcacgctcaatctgcacactcctgctcctacttctgcttctgctcctgcttctccggtcatgtctacttctgtcgtcctcataatcattgcgcctgcttctactatcatagtcacgccttgatctcctatcattaccataatccctttccctttctctgtatctatccctccccctctctctttcgcggtctttctccctctctctttcccgttgtctatctgagtctctgtcagaataatagtctcggctctggcttctacgtggggaccgctgttgtacttcatcgccta

SEQ ID NO: 131042 - DNA, 710 bp, Arabidopsis thaliana columbia
  unsure (1)..(710): unsure at all n locations
cgttnnnnnnnnnnnnnnnnnnnnnnnnnnnnnnnnnnnnnnnnnnnnnnnnnnnnnnnnnnnnnnnnnnnctttttttttttttttttttttttttaagtttccatataacattaattccttaactggacgtttggtttacccttttttgacttttttggagggcccttccctttccaccccaccaaacctatggaaacattttactaattttaaatccaatttttaattacgtcgattggggggttttaattaattcccggaataaaaaaatatggctttaccacagccatagggttactttcagcataagtttcacaacaaaactcatggtaaaacgctctggccttccttaatatatggttaagggaacatttaatgtcccaaaacaggcttaatcgagcaacataacccctaaaatttccgtattgggccgcggttatggactaaccatttttgttcaaaaccttcccgggttctggtggattcgcctccttttttttaacaaactgatcttcaaaaaacagtaggggattataaagggggggggaattaatcttattatggaaaatttttgttagcgttttgccaaaaaaaacgttgttcaacatgttttcgctaatggtttgggagggttggggttggtaataatggcgtcaacaaaattttgggggggatagaaaggttttagggcgggggattcgagtgag

SEQ ID NO: 131043 - DNA, 709 bp, Arabidopsis thaliana columbia
  unsure (1)..(709): unsure at all n locations
agctactgacgtcgcatgcacgcgtacgtaagcttggatcctctagagcggccgccctttnttttttttttttttttttttttcatttttttttttttttttttttttttttttggaaaaaacaaacccttaaggccatttttttatttgaaaacaaaccggtgtttttggtgattcataaaaataggggttttacaaatcaaaaatacctttaaaggggccaaaccaaattttgaaatcgaatgtttctttttcgccgggggttttttgggtaatcaaccgaaggctgaaaaaatttcccctttgtgggaattgtgggcccctaaacttcccaaaaagtggttgtttttaacctccccgaccaattttttaaaagggtcatttttggggtccaaattaccccatttttttgaccaaatctaaaacccttggtttttccaaactttgaaacgggctggatccacaatcgggggttgaataacctcctttggggggaacactccccaaggaactggtttcacatgggacttcccggggttggagaccaaattttttgatttgttcacggcctttttggggataaaaggaaaagctttggatttctccccaagggggtataacttatcctttgaacaaaaaaactccaaataaactttttggtaaacgtaacccccaggacctccccttccaatatctggaaaattggatt

SEQ ID NO: 131044 - DNA, 707 bp, Arabidopsis thaliana columbia
ctatgacgtcgcatgcacgcgtacgtaggctggattcctttaaaccggccgccctttttttttttttttttttaaccaatccatatataaattataacaggtaattttaggcccaaatatagcataaacatcatgggccaacaaacaatacatatatcaatcttttgaacaagcataattcaaataataatgatagcataaattcattaaaaccctcaagggtagtaacttatgcgtctctgtcccttttacattcagctggcataaccgggaacctagtccggtcggtacagtagttgtagatggtccacttcatacgaacccatttgagacgacgccattgttcagcgtcaaggtcacggaactctttctgatcccaccacatgcggccttgtgtggcacagtacttggcttccacagaagcttggcaaccatctatgtggaatcctttgtaagatgcaacgaaaggtgcattggcccaattggtcttctctaaaccgcctctcgtggaccaatcatccgcgttccaaaggcttgagtaaagcttcattggttggttgaatgggaaacgtactcctagatccttagcattcttgaacgttcggattggtatgttgtcaacaaagaatacgatctggtacatgttccaaaggattgagtaagtgtgataagccttacaaggatcaaaccagagatagattcgttgt

SEQ ID NO: 131045 - DNA, 702 bp, Arabidopsis thaliana columbia
  unsure (1)..(702): unsure at all n locations
ctacgacgtcgcatgcacgcgtacgtaagcttggatcctctagagcggccgcccttnntttttttttttttttttttttttttttttttttttttttcttttttttttttttttttnaagagggcaatcctttttttttttttattgaaaaaggttcaaaaacaacaatcaccctgaaccccatttaaacattttcgatattttttttttttaaggcccctggaaaccttataaaaaactccaaccttccccatagggcccaatgttatccccttcctccttctaaacgcaaaccttttatggaagtgtgtttgctccacacttttacccaacgggacggttacccaaattccccccctaagggttggaaagggcctcctcaagaaccccaccggaggcttttgccttgtcaaaaaaaaaaacggcccaaccactcttaggttttcgaaaaaattttttaattggagttcaacaccctcctttcacgggggaaatcgccccctgagctgccccaacccttggacccctctttatcgccttactgtttggaaaaaatctaccacactttcttgcaccaaaaacgaatgtttttgttgggagaaccccccccatttttcccaaaaattttatggaagcccgcctttttttttttggggaaatttttaacgaccccagatttttgtttttttcccgccccctttt

SEQ ID NO: 131046 - DNA, 595 bp, Arabidopsis thaliana columbia
caacctctgacgtcgcttgcacgcgtacgtaagctgggatcctttaaagcggccgccctttttttttttttttgtttttgaaaaaacgattcgggcaaattgaacgattaaacgaagaccaaggttctaaccactatctttttcccctctaactgggaaaacacattttttgcaacaggcctagcgatctggcgttctatgagaatatgaccctaacaacacctatgataccatcccattcagctttgttaccaggaatgatcaattcttatggcacatcaaatgtacccctgcttaggcacttgaaaaaggagatgaatcttttgcatttatgccttggaagcttatctgttttttgcgatttcctaaatctgttaacggtaagccactctgactgcaatttcatttcctattcatccttacatgctttttctaccatcattccctagctgacgattatctgtacccgttctacttgtcaattaattcgggttcactgctctgttgtcagttttgacgatcgcatactgcttttggggatgaatcggactgtgctttgagcggctaccgtcttttccatgggtatgaaaaacta

SEQ ID NO: 131047 - DNA, 719 bp, Arabidopsis thaliana columbia
  unsure (1)..(719): unsure at all n locations
gacgagctactgacgtcgcatgcacgcgtacgtaagcttggatcctctagagcggccgccctttntttttttttttttttttatttttgttttttttttttttactttttttttttttttccgacgggggacttatttaaaaaaagggggaataaaacattttcccaaaaaacacattctttttcaccccccccttaaagggcaaaacccttgactcctttaggttggtggaaaccttttcataaaaagggggccccctatttcccctccatgttggccccccccctgcttttcccccaaatttttttaaagctcctttgttgggcccaaccccccctttccatggtttccaccccttaggctccccaaaatcttgattatttcctttaccccccccctcctttatttccatcccttgttttcccaaatcccggttttcccatccccccctgccccaaaaattttttttccacccttttttctcccttccttcaccaaagaaacctccccaagggggatttttggctgtcttttttataccactaggctggccttcccaaggattggccacctttttttactcttcaaaaccttttatttttttgttttggggccctgacttttcccctccattttcctttccctggccccggtcctcccaaatggattaaaccctttctttggctttccccggattttcccccccttttttaggcggc

SEQ ID NO: 131048 - DNA, 714 bp, Arabidopsis thaliana columbia
tacaccagctatgacgtctgatgcacgcgccctcggcttgagtcctgtacagcggccgccctcgttttttttttttccaaatggagaagggggggctataaactttctgttggtgcgtcatcctgggatatcctaacttatagatgcatgaccatacatagaacaatctacttacactccacttaatcttcgtcctcacatttttgttgtctgaaatctcatcaggtaggttttggacaaacgatatgcacaccgctaagaccacactgtggaacttgtagtattactgagatttgcccttctgccttcaaggagaccccgagcacatcatccaaattgaagaaatctcccaaaagtgtcatgtttctcctatctctggattgcattgcgctattttgccaaccaatgcaccacattccttcatgagggaacagatagtcatgaggataaaccctgaggaaaaccgagttctcgaaatggaaagtgacattcggaaacccctcatcaactctgccagagtactgaaagcatttataatctttatccactatgtgaacttttagagcaggctcctgcgaggttatcttcttcaccaatggttcatagattatctctggaagataggccaaggttgtaccactgtcaattatcgctccttttctatctccaggttgaaataaatcggctgggatagttagaaactcctgaccaact

SEQ ID NO: 131049 - DNA, 712 bp, Arabidopsis thaliana columbia
cactatagacgagctatgacgcacgctgccgtcagccgggatcctgtagagcggccgcccttcgtttttttttttgtttttaggtttgaggacagggattggacaacgaaaattatggtggggcagtagaacataacctgatctagtgcaccatgcacaagatgtaaaaaaaacatggcagttgaccccctctctatcaaaggtcctacacagtccgttaacacacaaaagtttacggactctgaaaaaggggaaccttgatttccaatgattgttccgggggacccgttgattatgacacaaactatttttgagaggttgtgaagcatcctttgccgattcaccatgggttctcatcttttggcgccgccgagaaccgtgctaatgtctttggccctcccctatgggtgtgccgtgcggttttttaccaactacggggacctccctctgcagttgccataccgggctttatcaacccctttttttacgtgtgcttctcaaggtacccctaccaagaggcgaacttcgggcggccttttttttgctgctgggttcgtcccccgaggaattgaggctgtttagaaaacgcttataatacctacgtttttttttgtttgtggggcccctatatcttagacccgcctcaaattaatttaactcttgctgtgcccgggaagattcccttgcacaagagctggtccgggttattaaa

SEQ ID NO: 131050 - DNA, 543 bp, Arabidopsis thaliana columbia
  unsure (1)..(543): unsure at all n locations
cccggttggattgcgttnnnnnnnnnnnnnnnnnnnnnnnnnnnnnnnnnnnnnnnnnnnnnnnnnnnnnnnnnnnnnnnnnnntttttttttttttttttggtaagaaaattttattaccaaagctttctaccaggggaccactaaagcattgttaaaaaaagggggtcaccattgaccaaacattagagagaaggtccttaaatcaaagaaaatgtagaacataaaatccaacactaaattgagagagttcaaataaaaagacaaaataactaagagaacacttagtcgacttcctcgatcttgggaccagcaccacctgatgcaggaggagcttcatcctcgtccattccagaagctccaggaccaccagcttcaccaccagctcctccttggtacatcttagcgatgatcggattgcaaacactctccaactccttcatcttgtcttcaaactcgtcagcttcacccaattggttaccatctagccattggattggcttcctcaattagagtccctcaaaccttctttcttggtcttgc

SEQ ID NO: 131051 - DNA, 749 bp, Arabidopsis thaliana columbia
  unsure (1)..(749): unsure at all n locations
cgggccccggttgaggttgcnnnnnnnnnnnnnnnnnnnnnnnnnnnnnnnnnnnnnnnnnnnnnnnnnnnnnnnnnnnnnnnnnnnnnnctttttttttttttttttgggacacaaagagcaaatatagactccaaacattatcaatagcagcagtacttacaaaacgtagaaattccaaacgaaacagagatacttaaaggacattctaaaaccctaactcagatcttccaaattccattaaccctaaagcagagcaacatccatatgataagaaccctaactcaattattcaagagctggtgaatttcgtgacggctttagtcccctcagaaacggcatgcttcgccaactctccaggaagcaccaatctcacagcagtctgaatctcccgagaagtgatcgtaggtttcttattgtacctcgcaagcttcgacgcctcttgagcaagcttctcgaagatatcgttaatgaaactgttcatgatccccatcgctttgctggagattccgatatcgggatgaacttgcttaagcaccttgaagatgtagatcttgtaagtctcgacactcttcttcttcatctttttcttcttgtcgcctccggcaccagcttccttcgggagcttctttccggcctttggtttcttctccgccggagctttctcggcttttgatttctcctccaccggcttctcggaagctggtttcttctcagcgggcttcttctctgctttcggcgccattgat

SEQ ID NO: 131052 - DNA, 717 bp, Arabidopsis thaliana columbia
tacactagcatgacgttgatgcacgcgtacgtaagcttgaatcctctagagcggccgcccttttttttttttttttttttacacaaaatgtaaaacctatcttttactgaaacaataacacaaaagatacaacacaaaatatccccctgtaattttcttcctcatgtacaaaagaattcacatacagtattagtaaacagaaatctgaaaaccctaaaaagcttttaagttttacaccagaacatagaagaactacaacctcttgaagctgtttctttcctgcaaactgctagatttttcagacaagtgtgtgagtggaatttgaaagcttttgtaatgaaaaacggtcaagagttttcttctctcaagttgtttgctcttctttaagccttagccgcgcaacgggctgttgctgctgctgttgatttaagttagccaaaccgccaggtcgattatctggccttaactgtgccgctgcagcggcatggctgcttgatttagcagcgggaaggtcatggttatgttttccttcatatgttgttactacagcttttggatctgttgctgctctctctacatgtttcctcacaccacatcctggtgttgtgcacttgtagtagctcctcggataaggattccctttgacaactttctgtccatatttacgccacctatatccatcatctagaagatcaacttcactcgtcgtttggacaa

SEQ ID NO: 131053 - DNA, 739 bp, Arabidopsis thaliana columbia
  unsure (1)..(739): unsure at all n locations
cccggttggattgcnnnnnnnnnnnnnnnnnnnnnnnnnnnnnnnnnnnnnnnnnnnnnnnnnnnnnnnnnnnnnnnnnnnnnnctttttttttttttttttatcgaattcgtatacatatatactccaactagggaaattaagatgtgctgttacacagtatggggaagtatctcaagataatatacacagagattcaaaggtctcttactcagacagacgctggtgttggtgttgatgtggatgttgaagaagcaacacggttttcaggtgggatttctgtgaattcagataggattgctcggaattcatcgcctgacatagtctctttctcaagaagtatttcaacaatcttgtccatggcttcacgattgtttctaatctggctcaaagctatctcgtacgctttgtctgataatgtcttcaccgctgtatcaatatcatttgcaagcttctcagacattgagtttcttgccatcatcctcataatgacatcgctttgctccgatgaatccattagcgaccatggtccgatttcagacatcccaaatgttgtcaccatctgcttagccaaaccggtgatctgttgcaagtcactaactgcaccagtagtcacctcagactcaccaaagatgacttcttcggcagctctaccaccgagtccaccaacaattcttgcaaagagttgctgtttggagattagagttgggtcatctgagggaatgaaccaagtcagacc

SEQ ID NO: 131054 - DNA, 724 bp, Arabidopsis thaliana columbia
  unsure (1)..(724): unsure at all n locations
tacnnnnnnnnnnnnnnnnnnnnnnnnnnnnnnnnnnnnnnnnnnnnnnnnnnnnnnnnnnnnnnnncttttttttttttttttttttgccagaaacttattacatcttatataagggaaacacactacattacattattgaaacaattttaagctgttgattcgaggaaagggtaatcggtgtaaccgacgactggatcagaagtgtaaaacgttggtctatcgtacttattcagcggtgcatccacttggaacctctttggcaggtccgggttggctagaaaccatcgaccataagccaccaaatcagttcttccctttgacacagcctcattcccatcttccctcgtgaaacctcctgcggagataaaagtccccttaaaggctttcctcatcggcattagtgtgtgaggacaagcatgtacttctcccattgttttcattctcgcttcaatcacatgacagtagaggattccgtatttgttcaaagattccgccatgtaaagccctaatgctcctggattagtgtctccagattccatgtagtcagcaaatggagagagcctgattccaacacggtctggtccgatctccttagccactgcatcgactatttctagaggaaatttgcaacggttttgcaatgatccaccgtattcatcagttctatcatcggacgcgtgggtcgacccgggaattccggaccggtacctgcaggcgtacc

SEQ ID NO: 131055 - DNA, 141 bp, Arabidopsis thaliana columbia
tctcttctcagggtggcgtttagggtatttttttggtcaaaagttgcgcctgggcaagtttagtctgaaatccttagttgttgcataaacaatcatcatacacaggtgttattagggggtcttgatgtgctgcagtcacgg

SEQ ID NO: 131056 - DNA, 812 bp, Arabidopsis thaliana columbia
gctcactatagggcgattcgagctcggtacccggggatctctagagtcggctgcagctggacgaggtgcccgatgcaggtcggccgtgaagctgtccggcagagcgcgcgaggacggcgcggccaccacagggccaccagcagcaccagcaggtagtggtagtagccctccagccccatgtgcgtcgtggagtggaagtagaagagcaccagctccgccgtgaacggcgtcgccgcaaccaggcacagcgctccgtccgtcaccgggaagtgcctgcaccgttcgtattcgttgttcagttcaacaccccattgtttactactcatgctttgctgcggtactttatataataatggcgttgtacgactgcatggttggctgccaaagatttttcccaagccgaaacaacaaaagctgcgcaggttgtgggattcagaaaagaagaaaagggggggactgcaatgcactcgtttgtcgttgggggttgagatcaaagcttggggggccccccccaccagcaactccaaatgcgaaaacagagttcggacttgcactttgctactaattccaaggtggcattcagaaaaagggaagggcacgccggccaacgaaaatcccttttttaattttttccgcctttcaccaaaaagcatcgccttgcttgggtgctgcgtgctttacggggtagttaccggccgacgaggacagggccagtggttctttggggggaatggaatttgtaaggggcgattttggggggcattgggtttgtggttttgaaggcgggaatcggccgaccacattgggttggg

SEQ ID NO: 131057 - DNA, 783 bp, Arabidopsis thaliana columbia
  unsure (1)..(783): unsure at all n locations
ttgctataggccgagttcctgctcagtacccggggatgctctagagtctacctgcagcgcgacgaggacgcccgacgtcagttattgtcgttttgctgtccggcatgagcgcgcctaggacggcggcggccacgcacaggcccaccagcagcaccagcaggtagtggtagtagccctccagccccatgtgcgtcgtggagtggaagtagaagagcaccagctcctccgtgaacgccgtcgccgccaccaggcacagcgctccgtccgtcagcgggaagtgcctgcaccgttcgtattcgttgttcagttcaacaccccattgtttactactcatgctttgctgcgtactttatataataatggcgttgtacgactgcatgattgcttgccaaagattttccaagacgaaacaacaaaagctgcgcaggtgtggatcagaaaagaagagaggggggactgcatgcactcgttgtcgttggggtgagatcaagcttggggcccccccaacagcactccaatgcgaaacagagtcggactgcacttgctactactccacgtgcattcagaaaagggaaggcacgccgccacgaaatcccttttaatttttgcctttcaccaaaacatcgctgctggtgctgctgcttacnggtactacgaccaccagacaggcagtgntcttggtgtatggatttgtaggcgagttggaggacatggtgttgtgttgtgagctggatcgaccaccacatgggtgggccagccaattatggcgaccagtcaaacatg

SEQ ID NO: 131058 - DNA, 723 bp, Arabidopsis thaliana columbia
  unsure (1)..(723): unsure at all n locations
accggggatcctctagagtcgacctgcagcccttgcgcagacgcggcaccgttgcagctcatcgatctgccccgctctgtcgatcgatcgatcggcacgcaacggtatatatatgcgggcacttcgtcttctccttggatatatatggtcgccagcttcagttctctctcgatctgctctctgtcagtgtcgaacgtacggcaatggaagcgcacgacccaggagcagctagctaggcgacgatggcggcggccgaggtttttatgcagcagcagcagcagctgacaaaccgatggatagatgtatgtgaaggacagcagggcaggtactagtagctagctaggacagaaggtaggctggtggctggttgcgtatatagacgaagctagcttgacgctagagcaaagaagaagaggcacctgcaccacggggcacaattaaaaggctcgattcgatgaaacagccagacaattgggggttctgctccaatgactttagcggttagcgcctccgttttggcgcaacatcccactgtctgctcacattgtcgcgtcnnnnnnnnnnnnnnnnnnnnnnnnnnnnnnnnnnnnnnnnnnnnnnnnnnnnnnnnnnnnnnnnnnnnnnnnnnnnnnnnnnnnnnnnnnnnnnnnnnnnnnnnnnnnnnnnnnnnnnnnnnnnnnnnnnnnnnnnnnnnnnnnnnnnnnnnnnnnnnnnnnnnnnnnn

SEQ ID NO: 131059 - DNA, 751 bp, Arabidopsis thaliana columbia
cccgtggaccctgtgagcacggacctgcagcccttgcacaggacgcggcagacgatgcagctcatcgatctgccccgctgtgtggatcgatcgagcggcacgcaccggtgtatatatgcgggcactgagccttctccttggatatatatgggcgctagctgcagttctatctcgatctctctgtggcagggacaaacgtacggtatgggaagcgcacgacccatgagcagctagctaggcgaccatggcggcggccggggtttttatgccactgcagcaccagctgaaaaaccgatggatagaggtccgtgagggacagcgggaccaggactagaagctagctaggagagaaggaaggctgggggctgcatgcttatatacacaaacctggctggatgctggagcacagaggaagaggcacctgcaccagggggcacaattaaaaggtgcgattcgaggaaagacaatagaaattggcggctgcgctccaatgactttgccggatggcgccatgctgtggtgcctacagaccactgtatgtcccatattgtgcggtgccctgactgcacgcaagctaggcgtaatacctgtcatacctgatgcctgagtgaaattgccatcccctcacaagagacacaatatgcgtagcgcgctcataaggtggaaagcccggtgagcctaaggagtgggctaactgacaggagggggggggcgctgactgccccgttgtccagagggaaacctgcccggc

SEQ ID NO: 131060 - DNA, 825 bp, Arabidopsis thaliana columbia
tcgtcccgtgatcctgtagagtcacctgcagacgtgcgcgtcggcgaggcagctccggatccgggcccagtccttgcggctttcgacgtggcgccgcagccaggtggagtagtccccgaggcggtactccctgtagcctgccctcgacacggcctgaccggcgcccctgttggtgacggcgaaggcgaagacggtgaagcagagcagcgcgacgatgaacacgagcatggcgaggaggtagagccatagcagccaggtggcgcggaagcaggcgccggcgaggcccgcgacagcgatggccatgagcaccgcgcccagcgcgatggccggggtggacaggaggtggtcgcactcggtgccgtcggcgcgcgaccgcagccagattcccgagacgaggatggggaccgagagcaggagtgtcaccaggttcagcgcgccgatcacgttgttggtcatccggatcgccatggcgaggcggccccagccggctttgtgtcgtgctcagctcgactgctgttgtggggaagggtgtccaggcgggccatcggcgccgtccacgtgttagcagccgggtcggcattttacagcaggaagtgtggagctccccctgcgtgagcccgcggcaactgctggacaccactcctggagccagcgctctccccggggtctcggccccagacctcagtcgttgcactttcgccaatctgcaccccacctgtttgtctaccgtcgtgtctcacgcataaacatgctactgtagaagacaagcagccatctcagttcatgcgagaccttcaacgtctctctactctagctcggcatcgg

SEQ ID NO: 131061 - DNA, 789 bp, Arabidopsis thaliana columbia
cccgtgatcctctagagtcgacctgcaggctgcggtgggtcaactacctgagaccagatctgaaacggtgtaagatcacaccccaagaggagagcgtgatagtccagctccatgctttgtgggggaacaggtatatatagtaaattacccagcttttatttatcatgaaagcaaacaaatttgatcgaacgaacctgatgcactaaataaagttcttaatttggcatctgatgtgtagttttattactcattatagtactgtactgtacgtcgtacgacgtgcataagcaggtggtcgacgatcgctcgcagcctccccggcaggacggacaacgagatcaagaactactggcggacgcacttcaagaagggcaagccgtccaagaacgttgagcgcgcgagagcccggttcctcaagcagcgccgggaaatgatgatgcagcagcagtctcttgggcggcagcacctgcacctcgacgagggcggggaccagcgccgcggcgcgtgctgcatcaccggcgccacggcggcgtccggcgacaacgactgcggcagcgcgaccggtgacgcgtgcgcgggggccgcgaccaccacctgggtggctattgaacccgggcccaacccgacatggacgaggccatggattgcttttttggccccaataactggcaaagacgacctcccttgaggaaaaccgggaggcccgggtgaaaagtgtcccgccaccccagaaaacgtggcccgcgggactcccacaggggcctgagaagccccggggccggggccccc

SEQ ID NO: 131062 - DNA, 826 bp, Arabidopsis thaliana columbia
cgtgcccgggatcctgtagagtcgacctgcagtgcgcgttcgcgtagttaaacccttgtcagttcccctgcccccgcctctatccggcgcgccggccttgcagccgccaacatcgccatgaaaccctcgccgcacttcccggagatcggaaagaagcctaaaggtacgcccaccttgctccctcggatgcgctcacggaatcccttggtttcgctgaaaataatagagattccatcttgtacgcagatttgattgctaaggaccacacatttaacatcgcggcttacatctcgtctggagcggtacgtgcatctctttcctcctctcccagattcctgagtcctttacttttgcgtctcgattagagcttgactcaacagctagatttggggctagggttttgctctattttgggtttgttggggaatgctatgctaatttgcttggataaattagtgtgcgcattagcaatagttctttgttgctcagtaggccatgaagctagtgccgcccgtggtggatggatgtgcccggattctgttctgatcttcataatcaggactgggctgggatacttggctgtgtggctccggctgattctatctgtatgccacacggggtaacctagcagactggggggggcaaggcatggggcttatttcggcctggggaaacggccttcccgcttttggaggggacaagtaagccccccataatggacggattgtcccacggcgcgcctgaaactacaacctatgctcccccctgacagggccgctatttttgcccaggcttctcaaacgactttctgtcggcgaacggaccc

SEQ ID NO: 131063 - DNA, 572 bp, Arabidopsis thaliana columbia
tacccggggatcctgtagagtcgacctgcagaacctcctctctttatcaggctatgtcaaacaggtcaagcgtatggtcgtgcaccgtagactgcacggtaagctgctggagatagccttatcggcatgatatgtttccatcagaagagcactctcacgctgaaagttttgtccattccaaatttgaacaagcagtgacagtggccgcgatctaccgagtaattaagactctaggatgatgcagggagatcctgagggtcctacgcggatctctgctggctatataatacgcgcccatcctacaggatttgattttagttgcaaccgtggaaaactctggacagatcactgagctttgattgcaccaaatgttgaacctagcacaccaaatatttgatgatgaggaactatgcctcacctatcgagcgcatgagactttctgagcacgcaggaaggctgattgcttatcacgagccataacgatgtgataggcgctgcacacacaggccaagtctcaatggttgactggaggagcacacaggatcacacggggggcgggaaaaacagcgact

SEQ ID NO: 131064 - DNA, 823 bp, Arabidopsis thaliana columbia
ccgtgcccgggatcctctagagtcgacctgcagcaggatgaggccgtcgggtcatcgaccggaggcggtggcgagcagagctcggccagggcgcgggcaaaggtcggcacgcaggacagcagctgcccctcctcctgttgctcctcttcctcggccttccgctcctccgacgattcgatgggggacacctcaggcacgacgacgagcttgctcgacaggagctccccgacgctcttgacgtgcggcctccgagtgcgcgccttgcgcttggaccacgccggcgcgacctgctgctggcgcttcttccacgtcgttgtcgccacgccggcctcgagcgtcgtcgagtgcgggtccgtcgggcgcaggcgcaagcgaaggcgctcgtgccgcctggcgagcgggttcgcggagtgcaccgaggcgtcgcagccctggcacaggaaggcgtcgtcggcagcgcaggaccaccgcgcgcgcctgcgcaagcaggtggtcgaggcgcgcgcggccttgcccgctacggcgcccccggggtgcttggagctgctcatgtgccgcccccaaagctaggaatccccggaaaccctgcccaaaggcgagctagatgcgccccgctccagaagcccccccgaatccaagccgctgaccaggaatcccctcgggattgggcctagcccccctacaccgtggaccaaaaaatccgcggccgaaaaaaaccccactgacctccgcatttaaacggcccccccacataggagctttcttgtttttcccagccgaaccccaccgggtcgcgcggaatccccctcaagggagcgccaca

SEQ ID NO: 131065 - DNA, 781 bp, Arabidopsis thaliana columbia
gcccgggatcctctagagtcgacctgcagccccgcctctgcacgctccggtcgtacggcgccggcagcggcgtggtgacgcggaggattctggccggggaggaggacggcagcggggccgccgactcgggcggctccgcggcgttgccgttcttcgcctcgctcgctgactacatcgagagctcccgcaagagccaggacttggagaccatctccggccgcctcgccatggtgagtgactgatgagggcccgctctgctctgctgtctgctctactcctccctgtgcacagagtacacgtcggatccacggcttaattaaacctcgcgctgccggtgctgctacgtacgtacgtacatgcaggtggcgttcgcggcggcggtggccgtggagacggcgacgggcagctccctgttcaagaagctggacaccatggagatcgaggaggcggcgggggtgtgcgtggcggtggtcgccagcgcccggggggttcgcctttgcccttcaaaactgccccattttggatctcgccccatggtgcaccctggggttccacacgccggggggtgagtgccccgatctacaataataagccaggcccttcttttcctagggctcaactgcattgcctgcaagcttgcgctaaacatgggctaactgcttctctggggaaagggtaatccctcacaatttccccccacttccgacccgaagatattgggtaagcctggggccccaatagggggactactcccctaatggcgtgcgtcactgcccctttc

SEQ ID NO: 131066 - DNA, 875 bp, Arabidopsis thaliana columbia
gatgctgtggagtggacgtggagggctagtgcggcgtgattgttggaggagtgggtaggtttgtgcgggtgtgagtgtgtgagtgaggcgtagaggcgtagagggtttgagggtggaaggtagacgtgtgaagagcgtggtggaaaacagaagttgcaacgggtagggtaggagggttgggtaagagggtgggtggcccaagagttggacgtgagagagtaaccgacagaacaagctaaaacacccacgaggtagcagagcgagtgtgcggttggtggtggcagggcaaagtgtcgttaagggcgggcagtggagtttgctaggggttggcagggtggcagcagttggcgggtgaaactaggttgaagcaagtgacgaccacacagcaagcaccaaagtgaggcaagcagcagtaacgagcaaggggggtgcagagggggtcaggagggatgaggaggcgtggggaatcgtcaggcaggcgtgcccacgggcggtagtgcatggcgggggtggcgaaagcgcacagcgaaggcgtgctcatgaggcagcaagcgcaagcaggcaaggagcgtgaggagagcaagaaagggaagtaggcgtgaggagtggccgggtcgtggggtggcggcggaggagtgcggggagtcggcgtcagtcaaacgccgtaggaacaggaacggggattaacggagtgcaggggggggggggtttgtgggggtaagcgaaagtgcggggggcgaggcggggcagggggcaagggggcacggggggctagggcggagagtagtgcagcggggcgtttgcgaggaggcgatggagtgtgtgttggtgcgtagcgggggggggcggctggagtgcgcggggcgggggggggt

SEQ ID NO: 131067 - DNA, 956 bp, Arabidopsis thaliana columbia
ctcttgagtcgatctgcagcctggcagccagaatggagctagcgatagatttctcagaacagctgattcttggacggcattgattggcgggatcgagacactggacattcggtcgccgtcggagtaaacctgatcttcttagtggaatcctaaggttggattttacgttctggggtggtcctgtgactgttgtagctcctagccttgcggggggtgatctgatttccacttgcgagcggttcccacaccgccggggagttcttgttgtgatcgttgtgttgcggcctgtatacggtagccactgggactgccggtggcgtctattgccagatggcgttggtaggtctattcttggtcatgggttttctgctcgttttgtgggttttttttttaccgggacgctttttcttcgaagttgtttttcgcggcggacgagtgttcgtttgtgtttgtgtttgtgccccgctccccacaattccccccccccgcggggtggtggagggggggtatgttgggggcgggtgggggccttccccccccacgcatcccccgccccgccaggttattagggtctgtggggcctttgtggtattgggcccttaactaaggccccattttgttgggaaatatccggggccccggggcctcagggaaaaaccccggtttctgtttcccttttccccttggttgaaagggatcccccaaatgtgtctggcgcccggttttggggggctgtgtttaagaaaccccgggtgggtgtggtggtatggggggttgtggttgggtggtggttttatgcggtgttgtggtcggtgtggttgttgattgtgtgggggtggggtgtgtttgcggttgttgtttgttgtggggagtgtgggtgctgtgttggcttttgtgtggttgggttgtggtggtgtggggtttgtttggtgtgttgtggttgtgtggtggaaagg

SEQ ID NO: 131068 - DNA, 790 bp, Arabidopsis thaliana columbia
cactttcgcgttgaagagtattcatgctaatagaaggtgcgcttctcacggatcatttgtgcagcagctttccaatcttcagcgaaccctaatgcgacaagaagcgcacacatgacacagacacttgtgccatgacctgttagagatataacacgccattaaataataaaatccaagtgaccaatattattggacttataagtttaattggatggcatgttagataagtgaggaagaagtaagaacaagccataataaggaggttttattttggaaactagtaacagggagatttaagctaagagccaaacctaagagtgcagccagtgcacatatccagaacttaagtttctttcaatgtttgagcttaaattgggccaaaaaatctctttaaagcctggtacaatctacacaacatatgggatgaaccttatactatctgaatgtaatgcagatgctgctcagcttatgcatggcagttttacttctcgtcacaggtaagaactaaataagacatgacaaataatcacatgaaataagatgacacgagaaatggaaaaaagtagcatatcagcatattgctgtttcctgactccagctgttacacaatatatggttgaccaatacaatgcccattgtggatcatcatggtctggagttgggttaaacatgggctcaacagttatctaaatatgactaaactacagaaatgcatttaggaacataaacctatgtatttgaagaaaaatcacataggacaataccacccagggccttatgcaaacatagg

SEQ ID NO: 131069 - DNA, 311 bp, Arabidopsis thaliana columbia
gactatcatataggagcgccaagcttcaaggtcactctcagatctgctctctcggcgagtgtgcgaagcgtactgcgcaatgtggtcgttgcacgcacctcatcgagcactctatgctatggcaggctgatatgtcgccgtgcccgatgggtttattattgcacgcagcgattcaggcaggcgttacgaataccggaatggactacgaacgtttctttataggttctagcatgggactagagtgatcctagttatgctgatgctcaatgatgtatgtaggtgacagtgctttagttgtgctcagctttgcg

SEQ ID NO: 131070 - DNA, 776 bp, Arabidopsis thaliana columbia
ttcccgggatcctgtagagtcgacctgcagatgagcgcgcccacgatgaccaccaggctcacccactccatgatgagaaggcagtccatggtggcgcgcttgaagtccgaggtcatgccctggtccatgaacgggtcgtcgtgctcatcctcgaaggcacctgacttgccgatgggccctgatttgccaatgagccccgacttgccgataagacccgaccggagctggccggacttgggcggcagccccttggagacaaatgactttcggggatccacctcgctggcgggggcgctcgacgtcgacggtggcgggggatccattagccgagatcgcgtcttgctgcgcgccagcagggaggaaccggtggacgtcgacgtgcagcgtagcaccttggcagtgtccaagtcgatggcgctctcgatccggatgtggctggcgtcctacgaagaggatgactgccacgacgaggactgggagaaccgtttactagatactggagccagacgcgtcactgactgaaggcgacaacagatgtggaagaacgtggcataccagcatattggtgcagcctgactccagctgcgacacaatatatggtgcaccagtacaacgcccattggggatcattatggactggaggggtgttaaacatggtctgagaaattctctaaatttgactaatattcagaaatgcatttaggaacataaaccacagtatttggcagaagaaatacatacgaaaataccgcacaaggcccttatccaaacctagg

SEQ ID NO: 131071 - DNA, 703 bp, Arabidopsis thaliana columbia
cagacgctaccagcacccacatccatcacaccagtcagttcacccagtggtcacagagaccagctccaggcaggcgtaatcgcctgcgacgtgggctttcgatccaatgcgggtggagcattccaatctcaacagtccaaccctggcacagcataccagagacgaagaacagcgcaccaacccccaccaaggacccaaggcacatcagcctgaatcccacggggaatgatttggacgcacccatgcagacggtagcattccccccccttcgtccatttcatttcagccacattctattgcaggcatgcctcaccttgaccggacagtccatcttcagccattgccctcccaggacaccaccaccctcccccctcccaggcaggctagggacttcaggacaccatgctccaccaggagtcgccaatccgccaacaaaacccagcggtggcagccttgacccgggaggattttggagctatcggctccggtacaacccgcatctcctcgtccctggaatgctgacatcaccagttgatccgcaaccaccttgcccggagtcctgcttcccccattccccaccagcagcccacataccacacccacaccacagcacactggattggcgcagcaggcaagcgggccttaagcaggggcatagcggggtccgtggggaaatggggatccgggcacaatgccacacaac

SEQ ID NO: 131072 - DNA, 759 bp, Arabidopsis thaliana columbia
  unsure (1)..(759): unsure at all n locations
ctcgtagcccgaggatcctgtagagtcgacctgcagccacagccagacaccagcaggaggcccagtgggcacagagagctgctcctggtggtttgaactgtcctcctacgtctcctacctatccaagcgatggggaccagggccaagcgcaagcagccaagccgtcatatcatatcatatactaataacagcttagcaacccccagtaagcacccaatccagattatcctgaatcccacggggaattatttgcacgcaggcaggcagatggtgcagtccccccccttcttccatgtcatgtcatgcacagtcagttcagtgcaggcctcagcgttatctgatagtgcagctgcatccattgccctccgagtatattattagccgccccccgcccatgatgttattttattgcatgacacgatgctccaccatgaggcgctaatccgctaataaaaggcatcgttgttagcgttgatgcgtgatgaggtgggatcgatcggctcctggacaatcctcatctgctcgtccctgcaagctggacagcactagtttatcctcaaccaccggtcccggatgccggctgcccccaggccccaccagcaggccatataccacacccacaccacaccacactggattnnnnnnnnnnnnnnnnnnnnnnnnnnnnnnnnnnnnnnnnnnnnnnnnnnnnnnnnnnnnnnnnnnnnnnnnnnnnnnnnnnnnnnnnnnnnnnnnnnnnnnnnnnnnnnnnnnnnnnnn

SEQ ID NO: 131073 - DNA, 641 bp, Arabidopsis thaliana columbia
ccgggatcctgtagagtcgacctgcagcagcgcgacaggcgacgccagccacgacagtcgacaggtgaggggggacactgttcttccgacttcccgagcgtgggggcggggcgacgaaacgaaaaggtggtggtggtggcgctggcctgcgagctttgggcaggagccagagccagccagaaggggacgcgggggcggggccaaagggggaggaggagggtacggcgatggccaggccaagtatctctgccgtctggctgtggtgcatgcactgcgcctgcgcggagacggaacggaacacccggccggctttgtagtgcgtactgcgcactcatttcccggatcttgtctcggcgttccacctgtggtttctgccgtgagcgcaccctcatgaatttgagctggtgtactcagggttacggtacatgctcctggcttcctcgttcgaccgggatcgtgcacgttctcgccatccaacgcccgtcggggcactcctcccctttcttccctttacctttttgctctcagtgattccgacggacgatctggtttacgccccatggggcgcacgggatgttgtacaccccgagctcttcttggtggccccgggggccaagcaatctatactctgtgctcctagt

SEQ ID NO: 131074 - DNA, 736 bp, Arabidopsis thaliana columbia
accggggatcctctagagtcgacctgcagcgggaactcgtagccggcgtcgacaccatctcccagctctgcatcaccatctcgtacccggagatcctccccgccgacgggtgcaccacgtagacgtgtcgcccctggcccagacccggcgcatcgcgcgaggtcgccgtccttgaacgcggcgtagaaccgcgcgttcgccgccagcaccgcggcccggccgtcctcctggagcacgcgcacgtcgtcccggagcgccgcgtccgcgcgtcagtacctcctcctcgatcgcggtttcgagctcgcgccgcaaggcagtcctcgtccgggccgccgctgccggttgcgctctcctccgtgctcggacgcccctcggcttccccgctcttcacgtgagcggttgtgagccttgtggtgcctcggtgtcggtgccgacaggtgcttgccgttcggagccctggactgctggacaggacgcagaggagatgttacagaatttattatcagcacgttaccaatggcatcacacatttccacaggaaaaggatcgatgcaaagcaacaagattttttctgaaaccggtgaatggagttcgcatacgctactagattgaactactgcacctgcactgatgaagacagaagacacgaagaggagaaatgccgaaatctgttttgattcagataatcttctcagggcatcaaataattagactaagagaaaatgcatgtatgtat

SEQ ID NO: 131075 - DNA, 592 bp, Arabidopsis thaliana columbia
cgtacccggggatcctctagagtcgacctgcagcgggaactcgtagccggcgtggcacaccatctcccagctctgcatcaccatctcgtacccggagatcctccccgccgacgggtgcaccacgtagacgtggtcgcccctggcccagacccggcgcatcgccgcgaggtcgccgtccttgaacgcggcgtagaaccgcgcgttcggcgccagcaccgcggtccgggcgtgctcctggagcacgcgcaggtcgtcccggagcgccgcggcgcgcgcgtagtcctcctcctcgatcgcggtttttagctcgcgccggagggagtcctcgtttcgggccgtcgctgccgggtgcgctctcctccgttcttggactcccctcggcttgcccgctcttgacgtgagcggtggtgagccttggggggactgaatgtccctctcgaaaggaggaccacccgggtggaccccttggcttctgttcgggacccctcttctggagtgtggaggctttaaccccaaaagctgccctaacccaaccaccctgatgtccttgattgtgggggagaccataccaacttttactctccgcagcgga

SEQ ID NO: 131076 - DNA, 731 bp, Arabidopsis thaliana columbia
gtacccggggatcctctagagtcgacctgcagataagcgcggcacgatgaccaccaggctcacccactccatgatgagaaggcagtccatggtgtcgcgcttgaagtccgaggtcatgccctcgtccatgaacgggtcgtcgtcctcatcctcgaaggcacctgacttgccgatgggccctgatttgccaatgagccccgacttgccgataagacccgaccggagctggccggacttgggcggcagcccttggagacaaatgactttcggggatccacctcgctaacgggggcgctcgacgtcgacggtggcgggggatccattagccgagatcgcgtcttgctgcgcgccagcatggaggaaccggtggacgtcgacgtgcagcgtagcaccttcgcagtgtccaagtccatggtgctctggttccggtttgtagctggcgtcgtaagagggagaggacgccgaccacgtggacggggagaaccgttttccggggatccttgaaccagacgcgcaatccccttcgaggccttggacagatgttggcgcgcgttgccggccttctcatctcgtccacctccaaatcgggggtccattgacagcttcgcgccaacagccggctgcttcccgagaattgccaaatgaagccgctccgccgatttcccttgaattccccggcgccggcgaacactccggccttccgttctttaaactaaacactccccgaccgg

SEQ ID NO: 131077 - DNA, 756 bp, Arabidopsis thaliana columbia
gggggggggtaacgttcctacccgtgcccgggatcctctagatgcgacctgcagatgagcgcgcccacgatgaccaccaggctcacccactccatgatgagaaggcagtccatggtgtcgcgcttgaagtccgaggtcatgccctcgtccatgaacgggtcgtcgtcctcatcctcgaaggcacctgacttgccgatgggccctgatttgccaatgagccccgacttgccgataagacccgaccggagctggccggacttgggcggcagccccttggagacaaatgactttcggggatccacctcgctggcgggggcgctcgacgtcgacggtggcgggggatccattagccgagatcgcgtcttgctgcgcgccagcagggaggaaccggtggacgtcgacgtgcagcgtagcacctcgggagtgtccaagtcgatggtgctctggttccggttgtggctggcgtcgtaggaggaggaggacgcctaccacgtggacggggagaacccgttgcggggatcctggaacgagacgcgcaggtccctggaggcagttacataacattaagcggcgtgcgctctttgtctgctttccacctggaaacctgttcggaccgcagctttccaggagagggcccctcgctcccagagacccctccccatgaggcgcgctcgttttgacggttaatgggcctggccccgcccgtcgggcccggggaaccgaccctcacatcgtccgagtagtttggtatacctt

SEQ ID NO: 131078 - DNA, 802 bp, Arabidopsis thaliana columbia
gctcgtacccgggatcctctagagtcgacctgcaggctgtccatccatatcccactgccactggccagtgggcacgggtcacgcacccactgtgggagggggtaggccttgtagcattgaattcccggcgcctatcatcggcgccgcgcacatgtgggccttgtggcttgggcagcacaataaaggaaagcttcacttccatcatggcatccaccccgtcaggcagcgggctcacggcatgcacgcactcacgcacacagggctgcgcccgttcctcgtatggtgtgtcatctgcgccaggacaccagcgcaccgcacagaggccacgcacgcagcagtctagaatagaacgagacaatcatcattcgagaggaagaggtcaacaagacctacagctacctatctatagggtgtggagcgacccgctccaggaccgacgtgccgtgcgcccgtgccattggcgctgatactgtgcccggtgctttacacaagtaggctttgaaactcattattcctacccatttactgtgcctggcggcacatgcaccatctgagcagtgtgctactactaccacagcccacgccgaatgccataacctggagtgcgtaggctgaatgaacacacgtgcctccctgggccttgcctccctacacatatgcaaggtttggcacaactcatgtgtatagcctctctccttgtcagaaaatttgttgatcccctccataatttaacccaaagccctttgcagacccgggcaaccaacacagttgatacaccgcccctggagcgggccttaaatgt

SEQ ID NO: 131079 - DNA, 266 bp, Arabidopsis thaliana columbia
  unsure (1)..(266): unsure at all n locations
gtgtacctagtgtgtgttccatcatatgatgtctagaccataacatagctaccaganctactgtgtcctaccttatgtgtaagcctgtacagctgtagcgtgtcactagctggttaatctatcccagcactctgtcatgtcatagcacctgtacacctgtacatatgtcctgtgtacacttcagtcatanattacatctcatctgtgttagagcctactgtactcatgtcaaccacaagtatactgttgtatacctgtgtgtgtgt

SEQ ID NO: 131080 - DNA, 739 bp, Arabidopsis thaliana columbia
ctcgtgcccgggatcctctagagtcgacctgcagcaccttcacggccaccatggtgccgtcgcgtagcgtgccgcggtacacccgcccgtagctgcccgtcccgacaagccggtcctcgctgaactcctcggtggcctcgaccagctccctgtacgtgatccgggggaacttgtacttcatcactggcgacgagccgccgccgcggcggccactgaacatgtgctcccgcattgccgcgacccgctcgcggatcttgcggacgctgacagtgcagaggatcgtcagcgcgaacgccagagccgccgagcagacacacaagatgactacgaacttccgggactggtaccacgagcggtggcgacctccgcaacgcctgagcacaggaccagagaggcgacggttgccgaggtaggagagacagctgaaattcacgaaagggccggtggtggggacgccgccgctgaagtcgttgtatgacagattgagatatttcagcctgtcgcaattggccaggctaatggggatctcaccactgaagttgttgttcgcgacattgaggctttccaggttcttcagctggctgagtgtccaaaggaggttgcccggcaagccaatttgtggtgagaaggcccaagcacttggcaacctcaaatgcagtgtttcccgatggtgggggccaaaggaatcctccaccccggtttgagaaagttttattttcccaagggaaacaagggttgc

SEQ ID NO: 131081 - DNA, 759 bp, Arabidopsis thaliana columbia
gtacccggggatctctagatgtcgacctgtagatccggcatttgcacgatgcggacctaccgcgctaggctctgctggctacgcagtacatgctttagagcgatctagccggcgacatgcccagaaccagcgtcgctcagcgaactcatccttcttcgcatctctctttaactagatccctaactctggcaagaaccagcacttcggcgataacgccggatagctcctcatcgtaattgactgataaccgttcgcacacctctgactttcggggttccacagcgcaattctggactatacatgccgtccatggcttaagggcacctcactcgaatggtgcaataccgtacgtcacatcatagcatctcagtggtcgctgacgctgagcgcatacataccgcaatgtccaactccctggtcaacaagctccacatcatgcagatctagcacgacgcggagatctccaccacgttgatcgccaacaaccctttcctcgcatcctcctacaacacgcgcaataccatcaggcatatacacaccctgggctgcaacgccttcttcaaatccctgatacccaatatcctgaatccattcatatcccaccgccagcttcaggcatccaaccttggcgtaaccatatgcaaagctggggccattttcaaattactatccgctcacaattccacacaacatactagccttcatcatactgtacaaatcctccgaatgcggatcatctgcctaactcacattaattgg

SEQ ID NO: 131082 - DNA, 834 bp, Arabidopsis thaliana columbia
  unsure (1)..(834): unsure at all n locations
cgacctgcagcacagcctgtgcacgatgaggacgaacggcacccactgcatgatgaggacgcggacgtgctggccgctaggaggacgggagagggcccggcccatgaaccggttgcgcggcgaatccttgattgcactcgcctttgagatacatccctggctagccaaggagccaggacttggcgataagacccgaccggctctgaatggacagggactgaagaccttccgagactcaatgctgtctggtatacacctcgctgtacacagagcacaaggccgatacaggggttagatgcatcagccgctagcggggcttgctggtgcccacaatcgagtaaccggtggacgtagcaaagcaaggcttggtctcgggagaggccaactcgatgatgttcaagctccgcaccatgctgatcccgtaggaagaggaggactcctcacacttgcacacaaaaaaccagccgcgagcatactgggacaagcctcgcaagtctatggaggcggcgacatcacatgtattgcgtggcgctcacttgcctcctgttccaactagaaaaacctgggcgcggccaacttgctttgtctgaaattcggaccaacctcccctgtccgagagggcgcttttcacgtcatagggggggantgtttttcccctttcctctgttaaatctaaatccccttgggccctcagaacctttctccacttccgccggaaacccgatatttagcctcaaccttcaaagaggccggggataccccggttattcccccccaaaatcttgggggggtaaacgccccccgaaagaacaccattgtgtggccacacaagcg

SEQ ID NO: 131083 - DNA, 1431 bp, Arabidopsis thaliana columbia
  unsure (1)..(1431): unsure at all n locations
tggggggggggncatatatcncaaaacaccaacacaaaacccaaaaccctttttatttttcaaccaaacaaacccaaacccaaccccttctcacacaacaaaccaaataaacaccacacacacccaaccaacaaccctacctaccaaacaccacaccctaaataacacaccccaaccaacctcccacaacacaacccactaaccacaacacacaacccaaaagcacaccaaacctcctcccaaccaacccaccacatccaatcacaccacaaaccactctacctcccacgaccacaacacatactaacaaaacccaaccccacatcataaatcctacctccaaataccacacacattctaatccccctccacaccaaataaatctacaacaccccgcactatacaccaccaacataacaaacatacccacaatcattgtcaatcactctacaaccaacacacatctaatattcaccacccacacaccatacgttctaccacaaaaaccacatacatctctccccatcactgatacataacaccttctacagaacccactacctcactccaccaactaacaccatactaccctccagccacaccacatatctacaaaaactcgcgtcactttcttctttcacctccccacttactactacaacatatcatgcattcatacccacacactacacaacctgcatcacacacataacgcacgcaccgatacatcctccaatacggacgacatcaccacacatatgacctctccactcctctaccacatatacacacatacaaacactaccnctctatatcacatcacttctcaacccaacacaaccacactctcttaacaatctatacatcccactcatacaacaacctcccacccacacaacctcaacgtcaacaacaactatctcaacaaccaccatacacacatactctctctctgcataacacaaccatgaataccagcgccaccacactcaccttatccaacagaaacaacccacacccccacactaccacacatctacaccactataccccaacataccactcctactccaccaaataaccaacacctaccacactaccacgactactctacacctcccaacacccaactcacacctaactaaccacacagctcaaactcaaaaaaacatactccccaccacacatcacaaactcaccatccctaccaaccactacaacataaaactcaccaatacaaccaatcatactacaacctccaaccatacaaccaccacaacctcctacccactctacagaactaacaacccacacattacatacaacctaatccttcaaccaacaccacactttccacccacccacatatcacccacacaccctcactaaaccacaacaccgtttcaatatactcagtcacacctccaccca

SEQ ID NO: 131084 - DNA, 1038 bp, Arabidopsis thaliana columbia
tcgacctgcagaacgccgcaactgatggatcaggtatgtaggtatgtatgggtatgggtatgggtttgtgtttaccgctagtggcggctcgtacccatcagctcacggtcaacgctgttgatcctgaggtactcacactctacaatccgactgctgtcctcgactgaatcactcgcgacatgcacgctttgggtgtgcttggacatagctgtgacctgtgtgaaactgctgtccctctccaatgccccacctgaacccagccggaaggaccttgcgggaagacctgtggggccttaagggtgggctcctgcgacgccaacaaacaagaaatgatccatgtgactcacgggcctcccctataaaacatctcacccgggttgtggctggcccccttatgaccctggtaccctaaatgccctcttcgttccccaccttttgcctcccatccctgggtttgccaaactcccgcgccagatcccccacggaatcgtgttatttcctcccggggctgtttgtgcaaacaaaatcccgggcccctcagcaccttgctttcgtgtcatctaccccgtatccgtctcatagactccgccccccttctcacatcgtagcatcacatccccaacacgtgagctgcgctccctcacacgtccggagcgcgtccttctcctcccgccccaccctacacgcagcagaactacgcgcggcacccttacgagcactcttctcttggagtaggcccccgcgccgccaaacaagaatagttcctcttccaacttcccgctttgggtctactaaccctctcacccctccacctaatgactatgttatggcgacccccagtctggcttctcttctaccccttcacggaaggggcccccccccgggagccctcccccacccctgggtctgtctctcccgcatcgcccgcctacactcctgcggctccgcctctgcctcctcccccgggcgcccgcaccgaccgttctcctttttccccccatcatggtccaggccgctactcacccttcttccctctcg

SEQ ID NO: 131085 - DNA, 808 bp, Arabidopsis thaliana columbia
  unsure (1)..(808): unsure at all n locations
ccgtgcccgtgatcctctagagtcgacctgcagctgcagccgcagccgaagagcagagcgtcacggggggtggcagaggaagaggcgcctggagcaacggacaggtggtgtctccaaaggctgagctggacacggcgggggagagagagcatggcagtccactccggcagagatttcctctcacaggcgcacacacacactatcgctctctttagtctttactctttacgttggcagcgaaaacaaatacaaaagcaggagattgtgtgatgcttctctgctttcttgggattagattctcttcttttcttaacacctctgctgctttagcgaggtttcaagtagtattagtattgtagcgaaccctttttttgttgctttgacgcggacgacgtcgccctttgcattgccccgcccccaatgcatgcccaggaaacagcactgcaatgatttagtgcttgtttttttttactgatgaatgatgataggacagcgagttctgattcctgggtgctagactgctagtagaaaaaaaacgtttggaccgacacggcgtgatcattactttttcctcngctgtatgatgaggcgacgaccagcatccattccatggctttggcttgtggttttcctcatctttttcttgcgacgctccgactgttccgcttcctttggccgggccgctcttttaaggctttttacacctaccatcagggaagcttgggggcctgtgcccttcgcccgctttttggcccgaaaggccgaaaaaaaacccccaaaaggcgggggcccttgccccgccccccgt

SEQ ID NO: 131086 - DNA, 783 bp, Arabidopsis thaliana columbia
tcgacctgcagctgccgtgttaatgttggtaggcttggtctccatgcttcatctaattgttgtcgtcgtcggcgtcgtcgttgctcaattaatgaatggagtaattaggaggatttgatgtgctgtcttctgtgctgtgttgtgttcagttcagtttcaccgtgtgtctctggtgttatgtgctggatctgttgtaagctaagctagggagcttgagtgctgtgttggtcgattaattatttaagctgctaatgtggatgtgtacaattaattagaggatggtgatgatgttcgtaaaatgttgatttgaggggtgcactcggctctactatttatatttctgatctgttggcactgctgataacgacgttgtttaagtacagtagttgtcgtagtagctgcataatcactgccgtcaaccggtagccatgttggtttgactatatcctagcagcaggcagcaagctctcactcaaacacagtcactggactggagtgtggcctgctcggtgcgttcgctatggtttgtcgcgtagctgggcagtgagtcagtgcaggggcagggcatggccgcgtgcgttgttcttgcaggaccgcttgcgagctcgccgcctgccagcttggcggactcatgggcatagctcggtcctgtggggaacatggtatcccctcaccaattcccccccaacattccgaagccgggaagccttaaatgtgtgaaagccctcgggtcgccctttatgaaggggggctcgaccttcacattcaatttggcctttgccc

SEQ ID NO: 131087 - DNA, 748 bp, Arabidopsis thaliana columbia
cttacctctgatggtgttttataatagttaatgataaaaataaacaatgacattgtcaagagatcacttgttgacaaatatgttcattttgatgtacacataatattttttacatctcacaatgtgtataaatgacaatgttttccattaataacaaagaaagtatgtcttgagtataatttacgcggggatggggatccccgatggggatttatcccgcaggtaatggtgatgggaaagaaatgtcccccgcaaccattcgggggatttccatggagaaattttttctctcggtgatggagatggggaggtacaacccgacagggaattccctgttgccatccctaattgcaccaccttagcactcatcacatgctggaattctcgtgaaaggtctgatatcctaaggatgtcttcagcagatcgtgcatatagttatataaaacatgttttgtattgtatactgcattgttcatatagtgaagtttagaatacaagatatgatagaagatagaatgagaaagttgttggagacagtctaatggttataggagtctcgcctagtgtaaaaggaacgaggtgtggttttggtgggagaaggaagctagagataagacattaatgatttaatgccagaataaatatacatagttttagccactacaaagggtcatccagtttccttcatggactctttcctacacctagcatattcgaagggccttaaaattaaaccagaatataaatc

SEQ ID NO: 131088 - DNA, 608 bp, Arabidopsis thaliana columbia
ggagatctctacaatcgacctgcaggtagagaaaaggaaaaaggggaagaaaaaaaaaaacagctttgcatcaccatctcgtacgcggagttcctccccaccgatatgtgcaccccgtcgacgtgtgcccaactgatccatacccggcgcatctgcgcgcaagtccgcccggcctatgatacagcggcgtcatgccccgcctcgtatcgccgcgaagctattgaatgcccggttcgattctgcactgaacacacattggcagctcggtatgctgcaaacttttgcaggcaaaccgcctaagcatgtcgtccttccaacgcctccgccttctccttcgcaacatcaggaggcggcagcgtacctttctacggtaaccgccccgcccgtttcgcgtattcgccgctctaacgtccgtcgttcggaacttcgcctttgacttgacccggcttcctaaccgcaaaacagggatcatgatgccgttcgttgcgtgtcctactgtgttagtttcgcggacatgttctttagttcgtttaccgcatacctaggacctcgactcataacgacccacaagcagaatggccatcacgaacgcctactgtattcaaagc

SEQ ID NO: 131089 - DNA, 527 bp, Arabidopsis thaliana columbia
  unsure (1)..(527): unsure at all n locations
atgctctagtagtcacctgcaggggcggggactcgttatccacgataccacacaccttgttatcaagcctttagacatccaggtctttcntatttatctctctggaagcatgccatggcctcattcacacttctattgtgggctacggtgcacactattcgttcaacataatctcctatccagataacactcagaatctatccgctgcactaataatatgggaacacaccttataaatgaatgtggaggcttaaaccttcacctattatgaaagatcagatgctcctacactttcccgtggcgactcctccattgaaaaccacacaacttgcttgtttcgcccctaacatattcatgaatccacccccccgcatctctctcaaagaatgcgtggaatcttcaccttgcgccttgcaagaaatactccacccttctccctaccaaaccggcacataagttgcactcccacatacatccttttcttttggcagcttcacccacatttttatatgaccctctctcctgaa

SEQ ID NO: 131090 - DNA, 750 bp, Arabidopsis thaliana columbia
gttgctgctggaggtatatgcatatgttctatcttcatatacttatggctccaggacgcggcattatgtctgtatcgtgtttgtttagggactaataatgatgtttattttgtgctcacagagaagcgccttgggcttcaaccagcatgcaccgccgcctgaagggaaactctctaagttgtacagctaacagttgctaggtttgcctcatgtttttttctctactaaaaaccttatatgaaggccccttttggcctcgccaggaaaaaaaataaatactgtatgtttgcggggaagagtgtacattaattctgtagcagaaagaccccctacccatgtggcggaatcaagggaggagtgatgcgtgtgagtgcgatcgatctgaaggctgctgtaaagaggaagatggaaggggaaggagtgagaagcatgtcagttactctgctgctgtacaaattaaacttagctcttagagtgaggagaaagtaagctgttagctgtctgcctaaagggaagaaagggaaaaaaaaagaagctggaagccattggcaccctgtttcatgtgttggtatagctgctgtggctctcctgttgtctgtctggcctttgttgtaacataaagctgaggcgcactagccttccttcgttttcacagttaagctgaagttattagtatcagctttcctgaactgcttggtatgtaatgtgactctgtttcttccttgtactaatgcttgtctcatgtaatcc

SEQ ID NO: 131091 - DNA, 785 bp, Arabidopsis thaliana columbia
ttgccgctgctggaggtatatgcatatgttctatcttcatatacttatggctccaggacgcggcattatgtctgtatcgtgtttgtttagggactaataatgatgtttattttgcgctcacagagaagcgccttgggcttcaaccagcatgcaccggcgcctgaagggcaaactctctaagttgtacagctaacagttgctaggtttgcctcatgtttttttctctactaaaaaccttatatgaaggccccttttggcctcgccaggaaaaaaaataaatactgtatgtttgcggggaagagtgtacattaattctgtagcagaaagaccccctacccatgtggcggaatcaagggaggagtgatgcgtgtgagtcccatcgatctgaaggctgctgtaaagaggaagatggaaggggaaggagtgagaagcatgtcagttactctgctgctgtacaaattaaacttagctcttaaagtgaggagaaagtaagctgttagctgtctgcctaaaggaaagaaaggaaaaaaaaaagaagctggaggccattgggaccctgtttcatgtgttggtatagctgctggggctctcctggggtctgggtggcctttggtggaccataaaagctgaggcgcactagccctgcctttggtttttaacaagtaaagcctgaaggttattaagtagttcaagctttttccttgaaaccctggctttgggttatggaaaaatggcgaaaccttcctgtgtttgcctttccccctgggagactaaaagtggccttt

SEQ ID NO: 131092 - DNA, 751 bp, Arabidopsis thaliana columbia
gcggtctctagagtcgacctgcagctagcatggagtgatggagacgtgtagtggatgctgtacgtggaagggtaggtgatcgtcgccgtcatcgtcgactcgtcgtcgccggccggccgtcgtctcgtaatgcatggcaagcagctgtatgattttgacaccttttgagctattgactttgacgccggccgggcaagcaacatttgtcagcgcagaaacccgagctcttctttttttttttttttgtcaatgacctgtttgacagacagcgcactagctagctgtatgcacgaaagatttcgaggcctcattttgttttctctctatggcaatgcagccgtgcaggtaagttcgctcaagttatgtttacatcagccaatagcgttttggcaagactgctgtcaataaaatattgatgtgatttgttaggcattctgtcctcgataactctcgttcacagaaaattccaatccacatcatgcgctagttaaatactcatccgtagaaaaaaaatcggagatttggagaactggatggagatcattgacttcaaaagtaccaatgcagccatacgcaacatccatcgggcgccattaaaaaaagcacacacacagatgctggctctgaaggcacaaggagcaccactacttgatgtctagatccggatatcaccaccatccattccacatgcctgtagccgtgttgtactacgctgccaaaaaatcaaaagcgacaccacattctacccagc

SEQ ID NO: 131093 - DNA, 843 bp, Arabidopsis thaliana columbia
actcgcgatcctctagagtccacctgcagctagcatggagtgatggagacgtgtagtggatgctgtacgtaggaagggtaggtgatcgtcgccttcatcgtcgactcgtcgtcgccggccggccgtcgtctcgtgctgcatggcaagcagctgtatgattttgacaccttttgagctattgactttgacgccggccgggcaagcaacatttgtcagcgcagaaacccgagctcttctttttttttttttttgtcaatgacctgtttgacagacagcgcagctagctagctgtatgcacgaaagatttcgaggcctcattttttttctctctatggcaatgcagccgtgcaggtaagttcgctcaagttatgtttacatcagccaatagcgttttggcaagactgctgtaaataaaatattgatgtgatttgttaggcattctgtcctcgataactctcgttcacagaaaattccaatgcacatcatgcgctagttaaatactcatccctagaaaaaaaatcggagatttggacaactggatggagatcattgacttcaaaagtaccaatgcagccataccgcacatccatcggccgccattaaaaacagcccacaccccagatgctggttctgaaggcacaagggggcacccactacttggatgggctacatcccggattataacccacccttgcctttcccacaatgccctggaagcccccggtttggtaccttacgcttgccaagaaaaagcaatccacaaaggcggccaccacccacacattttcttaccgcccagggcacgccatttccccctttgtggccttgtttgaataaccgccc

SEQ ID NO: 131094 - DNA, 816 bp, Arabidopsis thaliana columbia
ccccgcgatcctctagagtcgacctgcagctcctcctgcttcggcgccggcgccggcgccgccatctcagggcgttgcgttgcgcgttggctctccgcttcttgttgcttcttctcactccctctccggttttcgtgggaagggaacggaagggagctagcgaaagtactaccgactttggtggtggcgatgcgctatttgaactttgaagcaactggtcgtgtaggcgcaggcacgaggcagcgcaccaacggcaggcagggcactgatgactccgcggtgactcacgcacgcagcggcagcggctgcggctgccactgccacccacgcacatcacatccaacggcaacggcaacggcaacggctcccccgcgggccgcggccgaggccgagcagtaaaatattcgcacggccgagcagagcagagcagaggcatccgcatcccgcgggccgcgcgtcaaaccgggtctcccccgtcgtcgtcgtcgtccgccctccgcgtaggtgccgccgagttagttcccacgcggccacgcctgttgtcctccccacaggtctcatgcatggccgttggcgcggtgcccggggtgagtgcatgcaggtgtcctcctgaacacacacacacacacacttgattggagggatccccccagggggactggaccgcaccccacggtcgaggctccactccagcagggaggaaggaagccgaaagttggccagggaaagggatctccgggaaaccctcccttccctcgggggttcttttctcctccaatcctggggccgcggggattccgtggggggggcaaaagc

SEQ ID NO: 131095 - DNA, 758 bp, Arabidopsis thaliana columbia
ggggatctctagagtcgacctgcagcgacttgaggtactcgatcgcctcgtcaagcattgacgccttgtccgtctgctcacgtaatgcaataacaagattcttgttactatactgtttagtttactatatatgtaaagggagagctcttgtccagtgcagtctaacgaaccttgttgcagtgaggtaagagctcttgcagggctctcatcttctcgtttatcctgtctcgtgtcctctgcaacattgttgggaccaaacaagaaacatccatgtcagagaccgtcgtcgactgttcaacgaggcaacagctagcaacaagttgtcgtcgtcagagtcacacgcacccgctccgacaggttgtgcacttcggcggcgcggctcctccggcgtcgtcatcttctgcggcggcttgcgcgccaacatcgcggcggaccccgactccgcgtcctgcaccaccgtagcattgccggcggcccaggcccgttattgctagtattaaacaacagtgatagacggatcgacgaggcactgatcgtaaaagttcaaagggcgaaaactcgctggggctcttcgagtcctcggtgtcgaaccgcttgcgcttgctgctccggttgctggtgctcgcgggctccgtggtggtggtggtagttgtggtaacgccgaaacagcagtagttggaccgccccgacgaagacgcctcgtgggccctgccggccgccacaggttcgcgttcgggttgccaaccgcgaaggaaccc

SEQ ID NO: 131096 - DNA, 789 bp, Arabidopsis thaliana columbia
cctctagagtccacctgcagcgacttgaggtactcgatcgcctcgtcaagcattgacgccttgtccgtctgctcacgtaatgcaataacaagattcttgttactatactgtttagtttactatatatgtaaagggagagctcttgtccagtgcagtctaacgaaccttgttgcagtgaggtatgagctcttgcagggctctcatcttctcgtttatcctgtctcgtctcctctgcaacattgttgggaccaaacaaaaaacatccatgtcagagaccgtcgtcgactgttcaacgaggcaacagctagcaacaagttgtcgtcgtcagagtcacacgcacccgctccgacaggttgtgcacttcggcggcgcggctcctccgcgccgtcgtcatcttctgcgggggcttgcgcgccaacatcgcggcggaccccgactccgcgttctgcaccaccgtagcattgccggcggcccaggcccgttattgctagtattaaacaacagtgatagacggatcgacgaggcactgatcgtaaagttcaaagggcgagacctcggtggggctctccgagtcctcggggtcgagccgtttgcgcttgctggttccgttgctggtgctcccgggctccggggtgggggtggaggttgcaaccactcacacacagcagggagcgggccccccctagccgtccttatcgatttcctcctgcctccacccgcatacttagaacggatgggcgcagcccaatgctggccaaatccgtctctgctaccgctgcccccctacac

SEQ ID NO: 131097 - DNA, 697 bp, Arabidopsis thaliana columbia
ccgccgatcctctagagtccacctgcagcctggcagccagaatggactagcgatagattctcaaacagctgatcttgacgaaaaaaaatgacggatcgagacactggacattcggtcgccgtgggaggaaacctgatcatctagatggtagacttttggtggaagacaccgttctttctctctctgaactctgaagactcgtgacctgccgtgcgacgtcctgataccaactgcggcagtgtaccaggtcgacggggagatctgttttgctccgtaaatacacactgatgcgggtgccactggactgccgtggcgtgtatgccagtgcgttcgaagtcttcgttttcatctttctctctttttggctgtttgtaccgcacctttctctcagtttgtaccgcgcctttctctcattttagtgggagtagttcctttccttgcctagacccaagcagacctgtgggccgtggccttggtcgagaccaacagcaaatttcggctgtgtctttggatgtgctaacaaggccatagtggaagaccggcccggaccacggaaaccgtggtgtcctttccttgggaaccagcccatagaggcaccgccgtcgggcgggctttgcttacaccgctgcgcggcccccgccaccgccggcgggccccgggaagacccgagcccgttgcccccgctcaagcagtgtcc

SEQ ID NO: 131098 - DNA, 743 bp, Arabidopsis thaliana columbia
cggggatcctctagagtcgacctgcaggcggcacagcgcttcctcctcttgctgccgggcgccaccggcttccgcggcgccggagggcacaccgtggccggccgcagcaggcacggcgacgccgtcggggtcacgcacgcggcggagtcgatgtccagtaggccgccgcccaggcccaggcgcggcagaagggagctcgcggccgtcggcgtgacgcagcccgtgtcggcggcgtccgggccgtcgcccgccgccgcggtctggaccggccggagcacggcaagtcggagaggtcgagctcgacgcccatcgggtgggtaatctaacactcagatggagaggccccggcccccgaggcgcctgcacaactggctaggtcaaggaagataagatctgcccgcagggtcgtctcgtcgtcgtgtacgtgaattgtgacgaacagggcagcactaggtcgcaggcggtgtgctcttttgtagcggcggtagtgcaaaggaggagggacggagggaggcaggcaggcaggcgtcatggccacgggatatggaggtgatgatggtggcaatggggacacacatgagcaagcaagcagctaaaggcaacagaattatatgcaggcaggcaggcagctgcaacagcaacacaaaaagccgcatgacattagaggacacaatgaggggaagggcacgggaaagggtggtgcatatcattgttgtgggggggcaatatgagacacacacaca

SEQ ID NO: 131099 - DNA, 779 bp, Arabidopsis thaliana columbia
cgctcgcgatcctctagagtcgacctgcaggcggcagcagcgcttcctcctcttgctgccgggcgccaccggcttccgcggcgccggagggcacaccgtggccggccgcagcaggcacggcgacgccgtcggggtcacgcacgcggcggagtcgatgtccagtaggccgccgcccaggcccaggcgcggcagaagggagctcgcggccgtcggcgtgacgcagcccgtgtcggcggcgtccgggccgtcgcccgccgccgcggtctggaccggccggagcacggccaagtcggagaggtcgagctcgacgcccatcgggtgggtaatctaacactcagatggagaggccccggcccccgaggcgcctgcacaactggctaggtcaaggaagataagatctgcccgcaggggtcgtctcgtcgtcgtgtacgtgaattgtgacgaacagggcagcactaggtcgcaggcggtgtgctcttttgtagcggcggtagtgcaaaggaggagggagggagggaggcaggcaggcaggcgtgatggcgaggggatatggaggtgatgatggtggcaatggggagagagatgagcacgctcgcagttttggctaacttattattttcaggcacgccggctttttgccacagcagttcatatggtcccatcgacttttcaatgcaaaaagcgctgggctccggccccaacgtcgaacctgtcgtcttcacacacatacatctctccttctttctcacctcttcgtctctttgctcctttcttctcct

SEQ ID NO: 131100 - DNA, 791 bp, Arabidopsis thaliana columbia
cggtacggggatcctctagagtcgacgctgcagaatgcagcttctgtaccattgcctccatgtcaataaccacagcggatgatcagatggggagccatccgtccatgccacgtgtatgcccgcatgcctgtcgagtcgtccatccgttcggcaagctcaagtcacaggcatggacggtcgagatcagcagctatttttagaacagtcgacagatgccaatctcatccgattcgtaccgatagaggtcgattgcacatatggatataaactcgcccatatcattaggatctaatccctaaacttagcactcacgaccataatgaaccacatacaacctgggtgaaatttgaggccagtcgtgtaagccaatgatctgcgcccaaaagcagcaaaccgccaatctatccccggctgaatcctaggcagcattgcatcagaaaatgacctcttgatggcaaagcttcctaacggcaattccggagtcgaaatgaccaaaattccccgctgcaccatgcataccagcaaagcccccctaaggttgaaaacctacccggtcattgttaaacctaccggatagccaaattggaaaaccacggaggatttggaaaaaaaacaaaggcggaccccgaaaagcttaaccccaaagcagggaacaaaaaaatttcgggatcccgcatccgagggcccaacaaaccctttaaaacactttggggcggtaagggtttcccgtttccccgaaaaggaaaaatttcccattattcaatcaaacccagccaaatcccttgggttac

SEQ ID NO: 131101 - DNA, 941 bp, Arabidopsis thaliana columbia
cccgggatcctctagagtgcacctgcatatgcaccctgttggtgccatgccttcatgcacatgaccagagcggatcatcagatttggagccatccgtgcattccacgttgtatggccgttgcctcgggtgtcgtgcctcgggtgggcaaggtgaagcagatagggttgacccatgcgatagggtgatatccgtgggaacggaaatagaatcccatcgccagaggatccatcgaacataggcgagtagccataagggacacatataggtccgtgcaggggaacataaaccaaaccctctcaaaaggtacgcgcataacccctaccggggggaaatgggacccggtagtggggccatatttggcccaagggaggaaccggcctcgagactgtctgagcccgacggacaccgaggaagacgttacctggtgccaaagtctttcctaaagcaaattcacgaaaggggccaagggaccaagtattgacaccgaggttgctatggccaattggcggcctacaagggcgccccctttgatggctttgaaaatagccattcgcccccggggtcttcgggggaaccaacccggctccaggggggggcgcccatctgcttattcacccttaagcagaagagggggtgggcctttattgtaaacccttgccctgtaagaaccccctgggagggcccctcaaccgctccagggggccgggggaacataaaaaatctacagcccctgccctaccgaagggggccacaggaagacccgtgaacaccagccgggcaccagtgggggcccatctggccccaatgggagtgcggggctatgacccaatgccatgccagccttaagctagtctgtatcaacgccgggccatgccccgccctggaaattaacaatggatcgagggccccaccgcaggtaagacccccccccccgcccccc

SEQ ID NO: 131102 - DNA, 1119 bp, Arabidopsis thaliana columbia
  unsure (1)..(1119): unsure at all n locations
ggtgcgtgcggttgggtgctggttggttgcgctggtgggcgttgtgtcggggtggattcggtgtcgggtgggcgtggtgttctcgttgttttgggttggtggtctgtttggtggcgtgtgggtggctttgcggcttccgggtcgtgtgggtggttgtgtgttgcgttgctcttgttgtgtggttgcgtgtgttggtgggtgttggtggtgtgtgggtgtggtctgtcgtggtggtggtgtttgtcggttgtgtggttggttgtggtgtgctggtttgggtgtgtgcttgcgtggtgtcggtgttttggtgtgcgtcggcttcgtggtgtgcgtgcgtgtccgtggttgtggttcgtgctgtggggttgtgtgtgtgtgcgtgggtgtgctggtgtgtcgtgttgtggttctttgtgttgctttcgcggtgtgtggcgggtgcggtcgccgcccgcccgcccccctcaactcactcccgccgccgcgcccctggggtgttgtgtcgtgtctggggtgctggcttgctgctgtgctggcgtgtcgtggttggtcgggtgtttgtgtggcgtggtcgcgtccgtctgtggttgtgttgtggtggtgctgtggtgttcgtgcgtgtgtgggggtgtcgtgtcgggtgttcgtggcgtgttggtctggttcgtgttggtgtgctgtgtgtgtgtgtgttgcgtgtctggtctcggctgtngtgtctcgtgggtggttgctgtgtctggcctgtgcgggtggtgtgttggtctggcgtgctggttctgcttgtgtgtccgtgcgtggtggtggctggncgtgctgtgtgnggctgcgtggttgctgtgctctggtgttggtgtggtgcgttctgtgtggctgtgctcgttgttgtgctggtgctttgtgtgtgtctgtgttgcggtctgctgcncgttttgtcgtcgctgtcnctgtgcgtgcgtctgcgttgttgctcgcgtctgtgttgtgttgtgtgctgngttgtctgtctggcgtctgtctgtgctgtctcgtgtgtgtgttgtgttgctgtgctgctggttgcgtgcctctgtgtggtgtgtgtgtgcgctgcgcgcgtgcngtgtgtgtgtgctgttg

SEQ ID NO: 131103 - DNA, 678 bp, Arabidopsis thaliana columbia
acgctcactatagggcgattcgagctcggtacccggggatcctctagagtcgacctgcagtggccgtggcgagtaggtgcgcgaggagcagcagcacgagaggcgacatttggggaccggtaaggttagcggtcgaggaagaagacgggagtcgtggaccacacgcgagaaaaggttgctcatttacttattataatttgccgctctcgagggagcaacgacggcatgatgatcccgatgaggaggaggaggcgacctcggccatccggggcttatcacggacacttggtcatgctccgccgacaacgtaagcgcgcgaggaaacaaacgggagctcttctttcggccacttgtatccatcacagtacatgtgtatatataggattatttggtgacatatcgattcgaccaacacactttaagcgatggtacatgaacatctctaaacaaagtcataaggatgtatatggacatgattatatggttgatgaatttcgttacaagtagtacatctgtgggtcgaccttagggatgttgttttggaaaaactgaattttatgggtacgaataaatttgggccacacacacacacacatcaagcaaccgacaacagggcggaacgaaagaattgatttgaattggtgtaagagttgcacaaccaacacgggcacattttaa

SEQ ID NO: 131104 - DNA, 630 bp, Arabidopsis thaliana columbia
actatagggcgaattcgagctcggtacccggggatcctctagagtcgacctgcagtggccgtggcgagtaggtgcgcgaggatcagcagtacgagaggcgacatttggggaccggtaaggttagcggtcgaggaataagacgggagtctggaccacacgcgataaaaggctgctcatttacttattataatttgccgctctcgagggagcaacgacggcatgatgatcccgaggaggaggaggaggcgacctcggccatccggggcttatcacggacacttggtcatgctccgccgacaacgtaagcgcgcgaggaaacaaacgggagcttttctttcggccacttgtatgcatcacagtacatgtgtatatataggattatttggtgacatatcgattcgaccacacactttaaggcgtgggtcatgaacatcttttaacaaagtcctaaaggatgtatatgggacattgattatatgggtggatgaaatttggggtaccaagggaggtgccatctggggggggcgtaccccttgggaaacggtttggcttggcgacaaaaacaccggaactgttttattggtgcgttacccacaagaagacatttttgtggggtccaacccacccccg

SEQ ID NO: 131105 - DNA, 793 bp, Arabidopsis thaliana columbia
tgggcgaatgccagctcggtacccggggatcctctagagtcgacctgcaggcaaagcaaaccatcagcaacgcgactgcgtacgtgtctctaggcaatgacgacgacaggggtactagctacagtacagagcaacagagctctagtagctagcaatggaccatggcgtgcagcacagtaccgggcctagctacacgtactcccgagacctaggttgttgtgtctgtggcgctgtgctcagggtcaggcgaagagaaagagaccagagagtgcacgagcgagggcgtcgttcgggaccacggaatggcatgacctttgcgtggtctctcgctcgccatttataggcgacggcggcgcggccggccaacacccctgcgagcgggagcggccgtgggatatccgttggcagttgcttgccggccgcggtcacctacgcccacgggagagcttcccggccgcgagggacaaagagtacccgcccggtcgcccgcccagtgctttgacttgtacgcgccgcacacacacacgcacagctactttacacttgcctgctggccctctgcatattctactcccaggtgcggcgcccgcggttaggatgtacggcacctacgggcccgagacggactgcaaaatgcataggaaaggttgattaacccgggtcctggccttttttacttctactcctgggcacctggttttcgctttgggctggcagggccatggccgatgccttggggcttaatttttaaagaaggcgggctaccccaaccaggtaggctttgcgcccggga

SEQ ID NO: 131106 - DNA, 734 bp, Arabidopsis thaliana columbia
  unsure (1)..(734): unsure at all n locations
accggggatcctctagagtcgacctgcagagacgcgtgcagaaagaaccgattgatgcgcaagaagaagatttggagcgcgagngcaggaagagaaatgcaagaggggagaatgaggcagcctcgatccgtagctctcacctatcacaatgtacgtatatgggcttgctgtttgccggagcttgagttcctcttccccctccggcgccttgttccttgcttccttctcctcctcgtcaaacaggacagagggctaactggtggcggtggctaattatgtgagaggattagtgtgagacaaggcccatatatagacagagggggagcagctgagctgatgagggtcgctgtcgctggcggtgtggacttctgggtggcggggcggggcgcgggggtgcgcgcgagaacgagaagccgacccaccaaaagacgattagttttgtggcggttccacgtgttgtcggggatgggatgtcagagttggtctcactcggaagtcggaatcgcggtggcgctaggctgccgcagcccgcgtacagtggcatggctggcaaccgtgtatcaaaaccagcgatgctgctgcggctgcctgactccgcaagtacgcatccagccgtgtcctcgggagtgcggaaattttcgaaattttcggtgcgcaacactgcgaagtacctgcaggcatgcaagcttggcgtaatcatggtcatagctgtaatgtgtgtgaaattgttatcc

SEQ ID NO: 131107 - DNA, 739 bp, Arabidopsis thaliana columbia
gtacccgggatcctctagagtcgacctgcaggagaccgcgtgcagcaaagcaaccgattgatgcgcaagaagaagatttggagcgcgagcgagaggaagagaaatgcaagaggggagaatgaggcagcctcgatccgtagctctcacctatcacaatgtacgtatatgggcttgctgtttgccggagcttgagttcctcttccccctccggcgccttgttccttgcttccttctcctcctcgtcaaacaggacagagggctaactggtggcggtggctaattatgtgagaggattagtgtgagacaaggcccatatatagacagagggggagcagctgagctgatgagggtcgctgtcgctggcggtgtggacttctgggtggcggggcggggcgcgggggtgcgcgcgagaacgagaagccgacccaccaaaagacgattagttttgtggcggttccacgtgttgtcggggatgggatgtcagagttggtctcactcggaagtcggaatcgcggtggcgctaggctgccgcggcccgcggtcagtggcatggctggcaaccgtggatcaaaaccagcgatgctgctgcggttgcctgactccgcaagtcccgtatccagccgtgtcctcgggtagtcccagaaattttccaaaattcttcgggtccggaaccacttgctgaaggggacccccgcagtgctttgccaaggccttcggcagtcaaatcctttgggtccat

SEQ ID NO: 131108 - DNA, 667 bp, Arabidopsis thaliana columbia
  unsure (1)..(667): unsure at all n locations
ggtacccgggatcctctagagtcgacctgcaggcggcatgtggaggtccccgcctgggccccccgcgggtgggggtgggtcgggcagcaacagcaacatgaagaacgaggcggtggtcatcgggatctccgttgccgggctggtcctggcactggcgtcgctgctgataatcgcgtgcgcaaccggcaagcagggcaaccgggggaggaagcgggagcagcacgcgtcgcgcaggcacagcatggtgttgcctgaacctgagtgtggcgcagccgcgggcgaggtgtcggcgaacgtgtaccagccgctgaacgggccggtgccgggtccctcgactaacaggacggacgagcctcttatgacctggtcggaaggctcaccaatgccttgtggttccaccgtagcgataggattttgnnnnccgtcgaacaaccctgccggggtctacacaaggggggcttttccccagaaatgagcgggtacctttcctttaatatctaagcactgggcgctatccctgggggccctgcgcttttagcccggactggggacaaaaacaaccatgggccccagttccacaggtattaacgtgaatgttgcggggtggaaagtttgttgcctaaagagctcgtcttttaattgttcttcacagcaagggattgtgttt

SEQ ID NO: 131109 - DNA, 581 bp, Arabidopsis thaliana columbia
gtcggaccggggatcctctagagtcgacctgcagctcgccaaacttcagcatgcactcatcgttcacagcgacacccgatctcgcgttcgcctgtgaccacaagttaaatcatggttaactggaaatacaaagtttgagtttcccttcaaagtacctactaacacattttattttgcatggcacagccagctgtccccagcatttctaaatcaggctgcaattgaaccagtgcagaaactgctaacattagacatttcagcagttcagctcatagtcttgactctcgaccaatagtgccaagtgtcaaaacaagaaacacatttctcatttctcgggagacacctagtgagtactagcagagtatactaccggtacataatctaggaccaaattcctaatgcaagtactcgggactcagtttgcaaagcttagaccaaatatggattgtgccttaataatttttaataaggggattccttccatggggggaaaatttatacccataaatttttttagaacccttgggaattttttttggggggggttcccattcctcaaacccttaaggggggttttgggg

SEQ ID NO: 131110 - DNA, 757 bp, Arabidopsis thaliana columbia
  unsure (1)..(757): unsure at all n locations
tcccccgttcccggggatcctctagagtcgacctgcaggtgcggcggctcccacggcgggaggcccccggcctttccgccgtccgcctccggctcgcgccttccttccataggcgatgggtcgaccgttgacgaacgcgacgagctgtggcgtgagactgagagcgtgtcgcggaaggagacgcgcggcgggatctggaaggacactggtgcatctgcgaagaggtagttgggagttggggtggaaattgaattgggtcaggtggcgggccaggtagtgcgttgggttagtgggccaaagacccagataacgagccgtgatggacacggtgatcatgggcctaatcgagcccatgtttgtctctgtgactgctgcatgctttggtgtcttgacttgacgctccatctgaccatcttccatcttcttaacggagtagcttcattctcttggtgctcctctctgtcaatcaacaaaataaagggtagattccagaaagctacatacatcttcggctagtcacggaccaccaacatttcatagacattttgaatactgaaactctattgcagccaacaagaagaaggaaaaatgctgtctgaactctggagggcccttcgaaaagaaaacatgttcaccgaaagtctgaattcggagatnnnnnnnnnnnnnnnnnnnnnnnnnnnnnnnnnnnnnnnnnnnnnnnnnnnnnnnnnnnnnnnnnnnnnnnnnnnnnnnnnnnnnnnnnnnnnnnnnnnnn

SEQ ID NO: 131111 - DNA, 759 bp, Arabidopsis thaliana columbia
ggcggggatgcgtagagtcgagctgcaggcgcgcgagaagaagctgctgccgaggaaggcgatcggcaggacgcgtgctgcgcgcggctcagcggaggagtggaagaagctgtgggtgagggcggcgtccagacggttgcgggcgcaagaagcgggtcgaagggctgcgggagtaactggggggggtggaagatggggggcgcggggtggatggggtgaagcgcggtgcgagtggaggccgtgggtgcaggcggagcgggggaatagggaggagggggatgaggatgttgtggagcgcgagagtaccggcgggaggcgtgcgttgggcgcggtgcgaggcgcgcgaggggagggaggttgggggcgttgcaggcggtgtggtgtaggagtgggtgctagttggagtgcgtgcggggaggcgaagaggggcggggcatgtgcggcgatcgggagggaggtgcggcagcgcgaggaacgggaagaagaggatggggcaggtctttcgagtgaggctttgagggggatgggctggtgcacgagcgcttctgcgagtgagctgattgcggaggggagaaggaaggggggagcgagaaaggggaggaggaagagaggggaaactggggggcggaagaggggcggggagtggtaggggcaggaggatgcaggaggacggggagggcaggggagagtgggggttgtcgagtggacgagcagaacgcgagccggcagagagaagcagcgaggaagaaggcggggaga

SEQ ID NO: 131112 - DNA, 716 bp, Arabidopsis thaliana columbia
tacccgggatcctctagagtcgacctgcagcgccaccaaccgtcttcctggccccgccaccgccgcagtcgtcgtcgccaaggtccatgacaacggccggcgccttatcgcggcggcgcgcgcgggaggaggacggcgcagcttccaccgccgcttgggatacgccgcggcggccgcaaacgcgcggcgtggcgcgatccatgcgtgcggtgggggcgctagattctgttgctgcaacggcgcggcgcggcgcagaggaattgaagggggtagttgagacttgagagtacggtgggttgggggaggtttatggcccaggagggactatgacgggtgggccccgtaggggtttgggcaggtgctccatgcggcgggcgcggggccagggagggatccggtcatggggaggcggacgacaaggagagacaaatgcccgggaaatggctgccgggtgcgcggcgggtgcgggggggcgaggcccgaggcggccggatcgagtgcggcgtgctttccctaggccgaaatggggctggatggtctttccgaggatgggacgctgccgggggcatctactaaccgcccggaatgtctgggtacacccccgcattcctctttttctctttgccggcattcttaaacccacctgccatgggcacctgccatagcccttggtgccggacacctccatggggagttctttacgacctgcgcttgtc

SEQ ID NO: 131113 - DNA, 624 bp, Arabidopsis thaliana columbia
gggatctctagagtcgacgtgcagacctacaagtaccgctacgcctacgacgaaggcgccaactgggtcggagtcttgagcacggagacgctcaagttcggcggctctagccctggcgcgcccgggcccggcgtctccgtcggcggcgtcgcgttcggctgcggcgtcgacaacggcggcctctcgtacaactccaccggcaccgtcggcctgggccgcgggagcctgtccctcgtggcgcacgttggggttcgcaggttctgacactgactgagcgacttcgtcaacaccaggctgcgtagaccggtgctgttggggtccctcgcggagctcgccgcccccagcaccataggcggcgccgcgtggcagtcgacgccacttgtgcagggcccctacaacccgtcgaggtactacgtctgcctcgagggcatatcgctcggggacgcacggctggggattccgaacggaaccttcgaccctgcggcgacgacgggcttcccggggggcatggagtccgttgggaacttccgggggcaaacaattcgttttcaacccggtttccgttcccgttgggcaagaaggtttggctttttttcaagggggggttggggttccggttcgaaa

SEQ ID NO: 131114 - DNA, 743 bp, Arabidopsis thaliana columbia
  unsure (1)..(743): unsure at all n locations
tcggtaccggggatcctctagagtcgacctgcagtcaaaaagaagggaagtttcaagctttggccgtccacgtaaccgacatccatcgtatggccatcccgtactgcttctcaactgctgcatacatacagcccaacagctagcaaccaacagtacgtaagctactacatgcgatcacggaccatggatcctaacaacaacgacgagcagctctgctagctagctagctagctggtcgatggatcgaccgcccctttcgtttcggcaaaactggaggccagaaactcagtggagactggaactggttctcgaactaataataagatatcgatatcatcgaggaatctgagctagagagggggcgctgccaagtttctacagcgacatcgtcagattatattgcagaccacgcagaataatctctagggtttctttctttctttctttttctcctcctcctcctccaaaagaaaaaggaaaaccaaagaggagaatgaaaaagattgttgtgcttcgcattcgcccttcgtcgttctcatgtggcaagtaatttcaaccaaaagctgttcatgatgagaacacaaggcaagagcgagatggggagagagagagggccgggttgttgctggagttgagaaagaaaaaggannnnnnnnnnnnnnnnnnnnnnnnnnnnnnnnnnnnnnnnnnnnnnnnnnnnnnnnnnnnnnnnnnnnnnnnnnnnnnnnnnnnnnnnnnnnnnn

SEQ ID NO: 131115 - DNA, 516 bp, Arabidopsis thaliana columbia
  unsure (1)..(516): unsure at all n locations
gggggtggcgtgtcctgncgtgagtgatggtgttgtgggttgttgtgcggttatgtgtgttgcgtgcccggtatgggttgtgtgtgggttgggtgcgtgtggttgctgtggtggggtttgtctggggtgaggtgagtgtggtgtgtagggtgcgttctccgttgtggcttggagtggccgtgctcggtgtttgcgcctttggtgggtggagtgtgagggaccggaagcgtggggtgcaaagaggttgggctgctaaagcgcgcgccttgtgctgtggtgtggcgtggtgtgttgctcgtggtcgggttgngttgttcggggggggtggtttgtggtcgggggtgcgtggtggtgtgtttttggtgggtgtgctgtggtgtgtggtgttgtgtgtgccgtgcctgttgtgttttggctgtgttgccggtgtgtggttgtccgcgggtgttgttgtggtcgtgtgccgcgctctgtgttgtgtgcgcgtggtgcgtcgttgtgtgcgtggtgtgtgtg

SEQ ID NO: 131116 - DNA, 743 bp, Arabidopsis thaliana columbia
  unsure (1)..(743): unsure at all n locations
cggtaccggggatcctctagagtcgacctgcaggcctcacagtctggccatggcgttcgctccgcttgcgccgcctgagtcacggccaagggggaagaaggtcatcatgggtacaagtacaatagggtctcgtcggagctccaaagcagggctctggcgcatcaacggccgcctcaacatgacattggattctacaaaccgattttgcaatattcacaaaaacaaatcgatgtacaagagaaagcattctactactactaccaccgtgttttcgtgcatgtttccaccatgggcgagagacccgaggcgatgaccggcaaattaagcggcttccgttgctgtcgtttcgacgtggaaagtattggagctttcttgtaaagattcagaaacagtggcggcggatgtagcatcaacacgcccgatggattcagtggcagctgtgacagtgacggtgacagcgacggcctcttccccctcctctgcctcctcacccaccgcaatggccggcacgtcgtaaccgtgccccggacccggacgacggccggcatggcagcattcagtgtagagtctaaggaggttggccaggtccggcgaggaggagtgcaccgaccccggcaagaagtccacgagcgactggtagttgttgccatcgccannnnnnnnnnnnnnnnnnnnnnnnnnnnnnnnnnnnnnnnnnnnnnnnnnnnnnnnnnnnnnnnnnnnnnnnnnnnnnnnnnnnnnnn

SEQ ID NO: 131117 - DNA, 712 bp, Arabidopsis thaliana columbia
  unsure (1)..(712): unsure at all n locations
tcggtaccggggatcctctagagtcgacctgcagcggaccagaggagaagtggcctcaaatctctgcatttcctcgcttctatcctactcaagaagatggggcccagtggcacgcgctaccttctatgcttggtattaacatcggtaggttctaccattttttcctctgagtgatgtacttgtttcagagatctctactcttcgttgcttttcgctcttgcatacacacaagtggtcccagtgttactagtgccctactgctgctatcatataaaggaaccatgagtaactagtaaatctgtatttactcattgtaatatctcaacgaggcaagcagtttaataatcacatgcttatgtagaaagttagcaaaaacattttttagtgaaaaaacataaaaacaaacagtacagatataatgtagttctatatgttcaccagctgaagtttgaatgtatgcagtcctttaataaaatgatactattgtggctagaaactttggtttttttaaattatggtcatcaaactaccttggggggtttaaacagcatttgaagctttaatatactaatgatctagatgcattattctcaccgacctgtgcgtatnnnnnnnnnnnnnnnnnnnnnnnnnnnnnnnnnnnnnnnnnnnnnnnnnnnnnnnnnnnnnnnnnnnnnnnnnnnnnnnnnnnnnnnnnnnnnnnnnnnnnnna

SEQ ID NO: 131118 - DNA, 806 bp, Arabidopsis thaliana columbia
  unsure (1)..(806): unsure at all n locations
gtcccgggatcctctaagtcgacctgcagcggaccagnagggagaagtggcctcaaattctctgcaattttccctccgctttctatatccctacctcctaatgaagagaagtgggngccccccaagttggtgccaaccggcccggccttaacccccttatccttaattggccctttggggttaatcttaaaaccaatccgggtaaggggtttcctcacccccatttttttttttcccttcttggaagttggaattggtaaccttttgtttttcaagaaggatcctcttacttctttcgttgcttttttcggttcttgcataccccaccaaggggcccagtggtactaggggcctactggtgctatcatataaaggaaccctgaggaaccaagatatctggatttacctattggaatatctcaaccagggcagccggttaataatcacatgcctatggagaaaggtagcaaaaacattttttagtggaaaaacataaaaacaaacagtacagatataatggagttctatatgttcaccagctgaagtttgaatgtatgccagcctttaataaaatgaaaccaatggggctagaaaccttgggttttttaaattatgggcatcaaaccaccttgggggggttaaacagcatttgaagctttaatatactaatgatctaaatgcattattctcaccgacctgtgcgttttnnnnnnnnnnnnnnnnnnnnnnnnnnnnnnnnnnnnnnnnnnnnnnnnnnnnnnnnnnnnnnnnnnnnnnnnnnnnnnnnnnnnnnnnnnnnnnnnnnn

SEQ ID NO: 131119 - DNA, 733 bp, Arabidopsis thaliana columbia
  unsure (1)..(733): unsure at all n locations
ggggatcctctagagtcgacctgcagtttatactccgttagactatagctagcacaacatttattattacacgggacaaccttcctgcatccaacgaaatttgctataaagttttagagcaagtttaataatataactcatataaccaactaaaagcttagccatataataacaccctcatgatatataggctgcacatttaattcattcttggtctatctcttcctctcacaaagagcagcccacttttttctctctctcttcatttctcattcttccacacaataaccataaaattgatcacctttattatacttcctatatggatcgatgtcagcaactttgaaaacattgtatatcgtcgcgtgttcaaacacacatcgaatataatggattacgtactgaacatgcatgtcattttcatgcttgctagctcatcagggtagaaagattggatcggatgatggtctccccggcccgtgtgatcaccccagctccgatccatttataatgttatctgacacacactaaaaccctataaaaaatgacggaagacgtctcaagtctttcgaacgaaagtctgcgctcgacgctcacacacaggaagaacttcaattgatccacacgcaaaactnnnnnnnnnnnnnnnnnnnnnnnnnnnnnnnnnnnnnnnnnnnnnnnnnnnnnnnnnnnnnnnnnnnnnnnnnnnnnnnnnnnnnnnnnnnnnnnnnnn

SEQ ID NO: 131120 - DNA, 686 bp, Arabidopsis thaliana columbia
ggtaccggggatcctctagagtcgacctgcagaaggtgctgagcaggcggtgccttgaggtgaactagaacagtgaagtttctttctgatgtattttcaggcacttgggtgaactctggatatgcttttatctctaccgttctcaaacagccctgctgagtgccgttagccttagcctcttcgcacgacaaatccaagggttcgtcgtcgttgaaagtgccagggtcagcgtcaggcagcagcgtggccagatgatgaagccggccaaaagagcgtgcgcgaggaagtggccgcggtatgctcatatggcccccattttggtacccatgaactggattgatcctcgcatttccttggggcaattcagcaggcaagggacctcggaacgggagctccttccatttgatacggcataccgggcagctgctgctcccatgcttaacgtttgccgaaatgcagtggaagtggaaggtgtgcgagcactctgctgtgaatagagcgtggccctgaccaggcttcattgtggtcaagcatatggcacatgttttctggggaaaaaataagggggcgaaaggtatagcatagaatagtcactatatgagacgtaaaacttaagagagtagctcaactaagactcttcatataattatgcatatactacaagagtgtagtgttatcttgcatca

SEQ ID NO: 131121 - DNA, 616 bp, Arabidopsis thaliana columbia
caccgggcatctgtacagcgtggacgctgcacgcgaccgtggacaccccgcgcagcaccaaaattattaagcacctcaccagttagtaattacctgcaccgctacggatcagagctgttataatcaaaggtagccctgtcagctttggcacatgcatgccaccttgaagtgttcacacggcatgtgctgttgtgataatgcgtatagcccatgggtacgtacacacatggttgttgttgttgttgttgagttgttttgtacttgacctaatgaataaccacggaaacaacttacccaaaccaaaaaaacatgaacagcgcgtatacaatggcaacagcactaccaagtgtagctgtacgtacaccaagcacaattattacgcgatggcatggaatgcacggaattaaacgcatgtataatttgtggccacaccccacacgcacgcgcgcgcgtcacatcacatgaacgcgtgcagctagcggatggcattcacgcatatgcatgcatcgtctatgtcacctgatagaccagcaataaaatcatatataaactccgctgcataacataatcatacacctttcagcgcataaagcaaatcagcatgcctaaattaagg

SEQ ID NO: 131122 - DNA, 731 bp, Arabidopsis thaliana columbia
accggggatctctagagtcgacctgcaggcgccggacagcttcagctcaagagctcggaggccagccgcgtggaggtggagggctcggagctgagcacgaggtcaccagggactactacctggaccggctctggtgattccgcctggtgtagaagaggaggatagcttaacaattcggtacatagtgaaatgtcatgactaagctacgactaatcacaactacattagaggtcgagtataagagtaggtatggtatcatagagaaggaaataaatggtgtcctccagctatcgccggccatttggcgacaaaaggcgatgggtaagaaaacaactgcctcacctagtagtgcagctgcaactgggttctgagttctgacacagtatagaatgcagcttcgacgccgatacgtagaaccagatgtcgacataacctgtggctagtcctacgtggaatccgatccgacagtgctggtgttgatggcatggagatcagaaaatgaaggcttggaggttaaagacaagcaaatgttgtctggtacagcagaaccgtgcttctcccaacttcattgcaccatgttgccgtactctgagcctctgggtgaagtattactaccactacttatactgggagtgggtactagagagcctggcctgcgcacgcgggtgcagctttgtgtttgtgtaacgggcgcatgttgagcgttggcatgacattggcttgctgtggcg

SEQ ID NO: 131123 - DNA, 999 bp, Arabidopsis thaliana columbia
cagttgttggtttccttattcattgttgcctcgcatgatatttcttggcattttgtttcttcgtgcgtgttcccccccccccacacccccgccgccccctttgtggtggtctccccccgcaccctaaccccgccctcttttcgtggtctttgtgttggttgtgcccgttttgtgtttctccccccccccccccccatacccccccccccccctcgttctttccttcttctgtgtctgctttcttggcttcgcttggctcccctgtttcctggggtccctgttcctcggtcctctctgttgttcgtcttgcttctgctctggctgctggggcttctgcctaattctctgttgtttgtttgggtgtgttgtggtttgtttgtccctggccccctcttcccctgccctttcttgtggtttgtgttttggtgtttgtttgtttttggtgtgtgtgggttttgtgtttgttgtttgtttttctgtgtggtgttttgtgtttgtgtgtgtgttttttgtgttgtggtgggtgttcgttttgtgtgtgtttgtgtttgttgtgtgtgttctgttgtttgtggtggtgtctgtgggtggttttgtggttgtggttgttgtgtgttgtgtgtgtgttctgtggttttgtgtgtgtcgttgtgtgtggtgtgtgtgttgtgtgttttgcgtgtgtgtgtgtgtgtcttgttgtgtgctgtggcgttgtgtgtggtgtgtgtgtgttgtgctgttgtgtgtgtgtttggtggtgtggtgtcgtcggttgtggtgttgctgttgtgtgcgtgctgtcttggtttgtggtgtgggtgttcgtcgtgggttttgtgtgtgtgtgtgctgtttcgcgtgtgtgtgtgtgtggtgtgtgtgtgtgtcgtgtgtgttctgtgtgtgtgctgttgtgtgtttgggtgtggtgtgttgtgttgtgtgtcttgtgtgtgtgtgtgttgtcttcgtggtttgtgtcgtgtgttgtgtgtt

SEQ ID NO: 131124 - DNA, 570 bp, Arabidopsis thaliana columbia
  unsure (1)..(570): unsure at all n locations
ctcggtacccggggatcctctagagtcgacctgcaggatgtcgaggtcgacgacgtggacgcggtcctcgccgtggaaggcctcgaagatggcctggttggcggtgaagtgcgcgaacttgatgtaggggcaggcctggtacaggatctggtacaccttgagcgtgtccggcgacggggggaacgtgtagggcgcgacgccggcgccggcgccggaggcgccggaggaggaggacgggttgttggaggagaggcgggcggctagggcgtcggcgaagtaggaggcgacgcgctgcatggagtcgcccagcggggaggcgactcggcggaggaggtgcatgtgacccagcgccgacggctgttcccccttgnagannaagacggcgcacgccagcagtaggggcaccaccttgaaggcccgctgtgnnngttgcctgcacttcttcattgagtgcgagtcacctttaataacatgccgctggcgacattatgaataatttttttacaacgaaaccttttaaaacctctgtattcaccacaagatgagtatcattttctgccatagaaatat

SEQ ID NO: 131125 - DNA, 734 bp, Arabidopsis thaliana columbia
  unsure (1)..(734): unsure at all n locations
tcggttcccgggtatcctctagagtcgacctgcagcctagtgggcgttattcttaccgccatgctaaatttgtcgatttctgatttaactgagactaaagccattacagaatttcagctcgaacctacagctctgaagacatgctccaaaagacaacttccaacggatagctaaagaattgcataacagaatgctcccccaagattggacatgaaagattaaccgacaggaacaagctaaaacagccacgaggtaccagacgagtctcggttcctgtggcacccaaatatcttaacgccccatgaatttctacggttccacctgcacaattccgaatcaaactaccttcaagcaagtaacgaccacacagcaagcaccaaatgagcaacagataagagaaggggtcagaggctcagagctgagagctgggaatctcaccaccgtcccacggcgtatcatccggcctgcgaaaccacacgaacctctcatcagcacaacgaacacaagagtaagaacaaaaggaatagctgagatcccgtctccctccccgagatccggagtccctcaatcaaaccctagaacaggaacgggattaacggactccaggggggggcgtttgtggggtaacgaaatcggtggaggggggaggggctgnctcccggcgtccctgggcgcagcagtcgtgctgggccctgtccgtctggnctgcgggcgtgccccccggcggtgtcctg

SEQ ID NO: 131126 - DNA, 230 bp, Arabidopsis thaliana columbia
caccgaccaacaccgcgcgcacccgcggccagcacccaaccgcacgcgcgtacacagcgggcaccgcaaacgaccaagcggcagcgcagcatggccgccaccaaccaacgcggcacgaacagcggcgcaagcagccgcccaacgcgcggacccaggagcaaggcgcaccgacggacgcagcacgagacacaactggcccaaccaatgcggaccgaccagcacgaggacca

SEQ ID NO: 131127 - DNA, 300 bp, Arabidopsis thaliana columbia
ctcggtcccggggatcctctagagtcgacctgcaggcgccagcacagttttatgctcaaaaggtggggggccatccccgtgtcagcataaggcttgtgactgaactactgggcggccaatgactactacatgcaccggatgtagagatattcgcctgctgaagatgaggacaaaccttatcaattcgtggcatactgacatgatgtgaccacggttcgaattatccaaactaccttggaggttgagttgtcggactgggcatggattggtgtgagaaagcaaataagtggttgtatctac

SEQ ID NO: 131128 - DNA, 798 bp, Arabidopsis thaliana columbia
tcggtacccgggtgatcctctagagtcgacctgcagcagaacctgtggatagaaaatgaaaccaagataatggctccttagatcgatcagttaattaaaggtttaaaaagagagagagagagagagacacgactgtgaagtgaagttgtgtccttcatgctttgacagactttgtttactactccgatcctcaagtctgcactacgaaatcaacagcgagcaatgcctagccctagaccgctggaagtttggaacaggagcgaagagatgtacctacgcaggtggctgagccgttcgcgtagaaggcgcggatatccagctgccggaagttggtctcgggtgcgcttccagctattctgtgcttgatcgtgccgcgtgccagagccagctctcctgtccctcccacgacagcccactccccctccggtggaagaactcccatcacctggagcgtggatccgctgtacctatcgcacaacatgcacggtttgttatcgaccgacgcaccatgaacagatgggagggagggagggaaggaaactgatgtgctctactgtcaccctggtacaccatgcttattgagaaagaacgccaacgttgggtagataagacaagacatgcactccttgagcgctttgcacgaaatttgtgcctgtagctggccccatttacccatggtttcatttcttttggcctacaggtcattggggccaatcgtgaatggagtcggtgtctggaggggtcctactaaaaatttaccctttccctgggttttgctggaactttttttatcccggg

SEQ ID NO: 131129 - DNA, 522 bp, Arabidopsis thaliana columbia
acctgcacactcaacaaaacaaaaacatcaaactggttgctaccaacgtacgttacatggttgcatgacgcagcttctgggaaaaacactccacacgacaatgtttgctcaaacaaaccttgcgcttcaactcaaacaaacccacaaaccatgactcaagctcgtaacaaaccaggtaaccacacagacacaccaaacaaaaactgagtgcacgcaccaaccacttcacttcatggtacacgtacaatagactacaagatgtcctaccactatctacgtggtgggttctggtgtctgctacagcatatggtacggtcatctggtcaagcatgcacaccatcgaaaacaacccatcggtattatctccgatagtattctcgttcgggttcaggtccgtcatttgattcacacacgggtcttttggggtgtacatactcgggtttgggacgtgatctgtatttggggatttcactgcgctatacagacgccatcacctttttctgggggtttgtagtttcttta

SEQ ID NO: 131130 - DNA, 721 bp, Arabidopsis thaliana columbia
caccgctcatcatacacaatcgctgccaacgtacatcttatacctacagattgcaggtttggattccatacttgtgcaaaacaatcgattagcactattaagtacatggcggtactacaggattaaccaggtactggcagtcatacgttatacatcaaacattgacatatagtataggcaccagtataaactagatttattacaccacaaccaaccaaccagaatggcattggacttgatgcataaaaatacagaagttgcagggtggctgaacattactagactcacacttataacaatgtcttacacatacacttgtaaggtggctaagcattactttgacatatgtacacttgtaaatggatgaactgatataaacaaccgtacattacgattcaaaggaccaagacagcatgaacaactgtatgtacattatcacaacaacagccacaacaacaagcaagacatggaacaaaccatgacaaggcaccaaaatacagggaaaacgacacttgtgaacaccataacagtaagcattaggcatacaaatggtaccacacacatactggatgtatgatcaaacacatttatccaaggcaaacatgtatttcagcagactggaggcatcagtcacgatatgaaccccacagtaggattcaacatcagaaaaagcacgaaaggaaatgtgacgacaaagttgtaggatcatggagagcaacca

SEQ ID NO: 131131 - DNA, 768 bp, Arabidopsis thaliana columbia
cttgccttatatactgaattgctgccaagcgtcttttttttcctacagtttgctggtttggattccatattgtgcaaaagaatcgattagcgctattaagttcttggcggtactacaggattaacctggtgctggtagttattcgttatacttcaatcattgacatatagtataggtaccagtataaactagatttatttcacctctacctaccatccaggttggctttggacttgatgcataaaaatacagaagttgctgggtggctgagcatttctagatttatacttataagaatgtcttgcacatgcacttgttgggtggctaagcattactttgacatatgtgcacttgtaaatggatgaactgatataatctaccgttcatttcgattcaaaggaccttgtctgcttgaataactgtttgtacttttttacatctgcagcctcttcttcaagcaagagatggagctttccttgatagggctccaaaatgctgggaaaacgtcacttgtgaactctattgctgtaagtattaggcattcttttggtaccactcatatactggatgtttgatgaaatatatttatccttggtaaacatgtatttttgcagactggaggctttagtgaggatatgatccctactgtaggattcaatatgagaaaagttacgaaaggaaatgtgacgataaagttgtgggatcttggaggccaaccaagattccgcagcatgtgggagagatactgccgtgcggtttctgcaattg

SEQ ID NO: 131132 - DNA, 400 bp, Arabidopsis thaliana columbia
aaatgattctgtaccttgtggatggactggcgtgatgtgcagcaactattcgagtgatccagaggttttgtccttgaatctgtcttcgatggttctctcgggtaagctatcaccaagcataggtggattggttcatctgaagcagctggatctgtcatataatgggttgtcagggaaaattcctaaggaaattggcaactgttcaagcttggagattctgaaactaaacaataaccagtttgatggtgagatacctgtggaaataggtaagcttgtgtctttggagaatctgatcatatcaacaacagaatctcagggtctctccctgtggagattgggaaccttgttgtctctctctcaactggtgacttacagtaacaacatcagtggacaattgccc

SEQ ID NO: 131133 - DNA, 349 bp, Arabidopsis thaliana columbia
gcttcctctccttcaggttcaggttcgggttcggattcagggtcgggttctggatctagttcaggtcatgggttacgtgcttcgactggatacatgttcgttgttggatcgttggttattggtcttatttgggcttactaataattgtttagggcttttttgtaatgtatcgaatatatttggtggggagagaataaatatttttggaattattaattcgtacttgttgttgtattttatatagttcggatatttgcatttctgatctaattttctatatatatcttgtttttcatgttttctcaaccgctactccacgattggttgagttggaatattctttttttat

SEQ ID NO: 131134 - DNA, 209 bp, Arabidopsis thaliana columbia
ttggtgacaagactttcttcattgcggcacttttagcagcaaggaactctcctgcaaccgtattcgtagggacctttggcgctctagggataatgacgataatatctgtagtgcttggacgtacttttcactatgtcgacgaagtcttccattcaggttggtgaaacgatttgcctatagatgatatgcagctgttgcgcgcctcactc

SEQ ID NO: 131135 - DNA, 188 bp, Arabidopsis thaliana columbia
caaaagagtgaggaaactagagagagagaccacccaataatggtgaggttcgagaaggttcatttagtgttagggttagctctggttctaactctggtcggagctccgaccaaagcccaaggacctgtttgcggtgcaggaatgcctgacaaatttagcagattaaaccttccctgaaggcttcattt

SEQ ID NO: 131136 - DNA, 153 bp, Arabidopsis thaliana columbia
cccatgtggatctcgattacgcgattttcgaatctaccaacgtcaccgtcacggatccggtcacgaatctgacataccacaacctctttgatcagatgattgacgctttcgtcttcgccatgaacgactcgggtatccggatcttcggatctg

SEQ ID NO: 131137 - DNA, 520 bp, Arabidopsis thaliana columbia
tgacaaggagaggaatgcaaaccgagaggctcttacagcactaaggaagagagctcggacaacaaagactagtgttatgtctccatttcattctatgatgaaggatatccatgggagctcaacgaaacctttggtccaagaagtttgctccacatgtggatcccatgactctagtgaacccacctggatgatgctcccaggagctgatctttttgctgcaattccgtttcatgctgtgcatacaatgctagagaaagatgaagagaaaatggagtttgaatcgaagaagttacagagcttagtgaaggaaaaagctctgtttatatcggaactaggggctcttgctgatggtatttctcctggcgttatcagatcgttggtggctttagaggacaaaccttaagttaagtagaagaagtagaacaatgttagtttgtcacaaaaaggatatgttcattgattctcttgtatgatgggaaaagtcattatccttaatattaattaaaatcacaaaactttc

SEQ ID NO: 131138 - DNA, 152 bp, Arabidopsis thaliana columbia
  unsure (1)..(152): unsure at all n locations
aaacaaagaagtagtgttactaagagaatcaattgacatggcaaaaactggagagaaaaacgaattcgaaaagatcgcatagaaaancntcagaaattgaaagcatcggtagcagatcccaaggctaaaatcgatcaggcctttgacatata

SEQ ID NO: 131139 - DNA, 200 bp, Arabidopsis thaliana columbia
aagaaaagaattacataatttcttaaagttacaacaagagaactacttgtacaaagtacaaatttacaaagataaaagaaccaaaaaaacaaaacataaaaacaactgcttcttatatgaagcaccatgttattatcttagttaaaataataatcataaaaagtaggaaacgtagaaggaatacacaacaattagcaaaa

SEQ ID NO: 131140 - DNA, 306 bp, Arabidopsis thaliana columbia
gaattattttcttggtcccattattgaaacactgaacccatttctttatgcatttccttctcaaataattccttctctcatttccatcttgatcttcaggttgagtaatacattgaagtcgggaagtggctaaaatcatcgtcatacaccaatctgtcacatttctcaagagtgtaactttgatcatttttacttattggtttgtttagtatcttttttttatcttagttcttcatcttaaagagttaatatcaatgacatgttcacttaatattctctttttgttgttttgtttcattctgaaag

SEQ ID NO: 131141 - DNA, 343 bp, Arabidopsis thaliana columbia
  unsure (1)..(343): unsure at all n locations
ggtggggattnnaccggagagtgtggtgaatggnaggaaagaaaccaacaaaataaaaaaagataagtcacaaatncagtctgttaaaaccttaagaaactactaggctcaaatcaaacccaagacattaaaggtcgaatcattcttttgtagatagtaaaagcctaaaaggtcatcacatcaccactttnatcctncattttttccttatcatcatcacttagccatcataatcttgacaaactcctcgtagtttatctgaccatctccatcaacatctgcttcaggaatcanctcctcgacctcttcatcagtcagtttctcacctagattcgtcatcact

SEQ ID NO: 131142 - DNA, 364 bp, Arabidopsis thaliana columbia
  unsure (1)..(364): unsure at all n locations
caaagtttcattttcatattaacacaaaatctccatacatattaccaaaccaaaaaaatacacaagggggagagagaccaacggttcttggttcaaagtttgcatcttgtttgagccgtcaccgtttctnagacttaacagccacaacacctttataaagcttcacgcgatccttcaacgcatctcgccgaggccgagccaccttattgtttggtttcaaacaacaaaacttcttcaaacgcattcaatgccaaaggaaactccttcttcttctcataagcatccccaaggttgttccaagctgttacataaccgggttggcagcttnaccggccatttcaaactgaggcaattcctttggtca

SEQ ID NO: 131143 - DNA, 233 bp, Arabidopsis thaliana columbia
  unsure (1)..(233): unsure at all n locations
ggatgtggtagtagtcaccantttcnaaantctttaagttgantcgaaaccgacctcaaaattcttttcaagggaaaccttttnaattaatttaanttctcttttctcttttgtaatgttggattgtnggtttcccttnaaccttttccctttaaattgattgtaaaagaaagattgtatttaattaatttaagaaattaanttcctgaaatttctttaaaaaaaaaaaaaaa

SEQ ID NO: 131144 - DNA, 218 bp, Arabidopsis thaliana columbia
tggcacgaggggtcagcggatctcaatgatgctcaacacctgccaccgcagcgtcactcgcagcaccagtcatgcagcacgtcgcacgatgaccgtccgagcagcagcaacgggtaacggcgcaccattgaaattcgtggtgacaggcgccaagggcaggactgggtcttcgttccgccaagaagcttgcagcacaaccagacaagtttgagcccagg

SEQ ID NO: 131145 - DNA, 252 bp, Arabidopsis thaliana columbia
  unsure (1)..(252): unsure at all n locations
ctcgtcctcaatcatcatcatctnagaattcgcagcttttgcttcttcgatagaaaatctaattatcatcaatcatgtctaagttcacgggattctcatctctcgctatctctnattttctcttggtttcaacgattgttgcagccaccgatgttcactactttnagaatttctgctaacacagacactgagatctcgagcggcaagttggtgatcgaggtttcctactttggatggcatattcattctgag

SEQ ID NO: 131146 - DNA, 448 bp, Arabidopsis thaliana columbia
  unsure (1)..(448): unsure at all n locations
gcaaatnttccatcatttccatagctttcttcttcttgtcatttcctttaaatctttttggttggatattttgtattttaacacttcataaagtagtcatcactaaacaacatatatacacatacaaagagatggatgctgaaaagaagagtgcccattttcgccaaatctcatcttataaaccacaattacttgtcctctcctcaatccaagaaaacccttcttcaaaaatctcagaaaaagccaatatcaaagctgacaatgacgccgagattggagttttcggagcagaaaagtacttcagcatgaagctagatcatgttgattccacggcggatatcaccaagcancatgaaaaggaaaacacacatgatcatcctaatgcttaatcctaatcctaatcctaatcctcatccctcaatcctcatcccccagttgacggaaaacg

SEQ ID NO: 131147 - DNA, 403 bp, Arabidopsis thaliana columbia
  unsure (1)..(403): unsure at all n locations
atacaatgctttatccaacatggaagcttttacttgtttctggctatatatatccttcattacaaggcctttcgatattntttaagactattaaagctgtatcttccatttttctgttttgccatcatcttcgttttctaccggatactgtctttttcacagccccaacagagactaagaactgatcaagtgaagagagagttctcatatcgtctggaggaaaatagctcgcagcttttcccattagtgaagtgaagagaagagagagcgaaggacgagttacatatctttcccctagaagatcctctaggaacccaaacgcagctaaaaaatctgatcttcctgcgtttattggagcttcgaaatgagctgggataatccttttaaatctccagtcacgggc

SEQ ID NO: 131148 - DNA, 211 bp, Arabidopsis thaliana columbia
cagatcaatactcaatggaagaagcttgtaaagtagctactcttgcgctgagatgcctcacattcgagataaagctgagaccaaacatgaacgaggttgtttctcacctcgaacacatccaaactttgaatgaagcaggaggaagaaatattgatatggtcagaggagaatgcgtaggagagcatagtgttgcatctaccaaacaatgcgg

SEQ ID NO: 131149 - DNA, 428 bp, Arabidopsis thaliana columbia
ggaagtttccggtagaagaagcggttgcagtgataaagctagggcttatttgcacttctcaggttccatcaagtagaccacatatgggagaagctgttaacatattgaggatgatcagatgcccttcaggagctcagatgagttgggttcaagttgaaaagaaggttaaagactaacatgttttttcaccaagttccggcgaagaggaatccggtttgttcatttgggggttttaagagaaatccttgtttgtgtttgttttttgataatctcttatgtgttatcttttgtgtctgttagtttcaatttcaatgtttgtagcttcttctatttattgttcttgtaacatttttagggctgtatcggatttgtcttcaccgggttccataatatgggactctttcgatgaaatcttaagtattattatg

SEQ ID NO: 131150 - DNA, 199 bp, Arabidopsis thaliana columbia
ggcacgagtttactctttcagtgagagagagaagttagagctgtaaaagcacatgacttcgataccattggggcctcctcagcctccgtctttagctcctcagcctccgtctttagctcctcagccgccgcatcttcacggcgagattctttgaaacgtcgtccgatatagacaacgacaggaaatgtctgctgctgtt

SEQ ID NO: 131151 - DNA, 264 bp, Arabidopsis thaliana columbia
  unsure (1)..(264): unsure at all n locations
ctcntttttnttttntnnntatnncnntanaanaantnaagctnaatcccgcnactgggcggccataanatatcacccaccatgagtgtacgattcnatttatatatccccttncgtgtgtatgtnatatgacaatacacttncgtttgtaatgaagtgccttaagtttaagaggagaaactatcggaataaagttccataatgtaatgcctttgtgtttatttaantngttatttgcgatgtttgcatantaaaananaaaaa

SEQ ID NO: 131152 - DNA, 315 bp, Arabidopsis thaliana columbia
  unsure (1)..(315): unsure at all n locations
ctttgatgtgaagctatgttacaacaagatctatgaggaggaacaaaaggttccgtcttcttatttnagactctgagagctgcgacaggntcttgccatgaaattttcctcttatttgntccgtttccgccattcctgcaagaagatggcttcacatctttctgctgcatctcaatgctactgatcattaatctcttacatganttactttcttcaactctcgtgttctcttgattattgtccactgcctctgtttcttgctcttcttctccctatataantcantttatgagctaaattactcacacnggcggg

SEQ ID NO: 131153 - DNA, 382 bp, Arabidopsis thaliana columbia
  unsure (1)..(382): unsure at all n locations
ccaaagttaagaaagatatgcaaaatattaatacactcatgangcctagataagtttcantttctctttcaacaattaaagactcaaatctaaaatatatcaattacgacactgcatcactaaattctagttattacccaaatcgttgttgttgttgacaatcgcattgatgtngttcttgcggctgtgatgatgatcattactggtgtttcccantctcctcccatgttgctgcttaagttgtgatatctccaattgagtcttcacaaagaactgcagtctctgcaactcangctccttcaagancttcatcctctntntctccatctcaaccacctgttgcagntttcgcattcnctgtttggctcataaggcttcaccg

SEQ ID NO: 131154 - DNA, 319 bp, Arabidopsis thaliana columbia
  unsure (1)..(319): unsure at all n locations
ctctttgcaacttctcgagtgtgcataaacatttactcaaaacagngctgtattgtgtttacacaaacggcataagcatcttcgttngtgtgtttgcttgtacaaacaatcctgtgaacagtttgaagttagcatttccactataaaagancaatcaaccatatatctttnacattacacaaaancatatgagtgtaatanctcagangattcacaatccaatataacccaaaanttaaataantnaaaancataaactcaattaatagcatcgnaccttcttcggntctntcctcttctaccagtctgtataccaaaa

SEQ ID NO: 131155 - DNA, 463 bp, Arabidopsis thaliana columbia
  unsure (1)..(463): unsure at all n locations
gtttaccttcagacaggaacgtagttaaaggtattactacttcagatgntcttcttgtttcctcattttaaacaggaatatgtgtctctactctgtaatacataatttcccactgtgttgttgttaccaatgaaataaaacgactttcaacccaaaaagaagtctattgtatataccatttagctttttgttcatattcaatataatgtgttgttgtttccaggataccaaggaggaggaggacgataccaaggaggcggtgggcgacaaggaggagggggaagttactgccgccacggtgctgctacaaaggttaccatggctgctcaaggtgttgttcatatgccggagaagcggttcagactcagtctgggtcactaaatctacataatatatcaaccaccatgagtgtacgatttcatttatatatacacttacgtgtgtatgtgntatgacaatacac

SEQ ID NO: 131156 - DNA, 230 bp, Arabidopsis thaliana columbia
  unsure (1)..(230): unsure at all n locations
tgagatatttcatgagattatttcgttttantttttatatgagagcacttatggccaccatttatattaanntggtaaacaatttgcgcgcagaataaaacaatttgataagatatcttaaaattgttgtccttatccgaccaattaaattaaccctaaaaattgctatttatgatttgtatgagaaggttattaaataatttgttcacattgtgaatttgatgtaatgg

SEQ ID NO: 131157 - DNA, 298 bp, Arabidopsis thaliana columbia
  unsure (1)..(298): unsure at all n locations
caaattgcatattgcactaatatttgtaattcaaaaagaagaagaacccgaaacgaagactcaacttatttatacatttnangccaactctgctactttcttatcttacagtctcaaatcactggtgaatcattctgtcttgaagtcttaaattttggtagtatccgnttccgaaagngtaganacatatttttcagtgtcgaccgcggcttcgctcttncttctaccactttccggtctnctnctcctctgtccattcccatctnttgtgccttgagaatcgctaggaagctttcat

SEQ ID NO: 131158 - DNA, 467 bp, Arabidopsis thaliana columbia
tttttaaaatttgcaaaaaggaatacgatgtataagatgacagaagaaacacttggttaaattatacgaccaaatggttcttggtcgtaacgaaatatatattgttcctcttaacgtatatatataacattaaacacactaaagtctaaaataatcgttacgatctatttaaagctccaaaaaaccatgaattatatacgtaaatatttaacatgcatgaatgtgataatgatatagaaacaatatatttagaaaatacgttgaatgtgataatgacttaaggtcaattgctcgccgaatttctcaattccttctaaaaatgaaactgatagtttttttaaaatttgcaggccatgaaatgacaaatgagcaaattcaaaatcaagctttgttggaaattgaaaagttgttagctaacagtggaagtactcgtgctaattacgaatccatgccatatccagaaaaca

SEQ ID NO: 131159 - DNA, 354 bp, Arabidopsis thaliana columbia
gcctgggtgtcacaaatcgtcgtccctcaccatcctttgctgatgcgggacggaagctggtctcccgtgtgttacgcacgcggttggcctaaatccgagccaaggacgcctggagcgtaccgacatgcggtggtgaacttgatccattacattttatcggtcgctcttgtccgaaagctgtagatgacccaaagtccatatagcgaccccaggtcaggcgggattacccgctgagtttaagcatatcaataagcggaggaaaagaaactaacaaggattcccttagtaacggcgagcgaaccgggaagagcccagcttgaaaatcggacgtcttcggcgttcgaattgtagtct

SEQ ID NO: 131160 - DNA, 310 bp, Arabidopsis thaliana columbia
atcacaaacgagtaagaatacacacacacatagcaaaaaaatggcaaacaagctcttcctcgtctgcgcaactttcgccctctgcttcctcctcaccaacgcttccatctaccgcactgttgtcgagttcgacgaagatgacgccagcaaccccatgggcccaagacagaaatgtcagaaggagtttcagcaatcacagcacctaagagcttgccagaaattgatgcgcatgcaaatgaggcaaggccgtggtggtggtccctccctcgacgatgagttcgatttggaagacgacatcgagaacccacaa

SEQ ID NO: 131161 - DNA, 339 bp, Arabidopsis thaliana columbia
tttctttgttggatcgctgatcacactttccaaaatatcgtttataggttgtaggtatacctgcataactcaaaattagtaacaatgtatatatgtgtcgaaaataaaataaaataataacaatgtatatatgtgaaataaaaacgttaaaaaaaaaaaattgtatttaccacagcaacggccgaaagttgaaggacagtgaagagattgacgagaaaaataaaccaagtagggacaaagtaatggtttgtctcggcatttaagaaattggtgaagataagtccattggcttttttaccgaatgcccaatatcctgtgatggctactgttgaaaaatgt

SEQ ID NO: 131162 - DNA, 569 bp, Arabidopsis thaliana columbia
gctcaaaaacgacctgtgtctcagtcctctagaccttcagctgcgacaagctcaagaccaaagattagcacagtgaaagcagctgcgaaaacggaagacgatgatttgtggggatccatagctgctcctccacctgcaactacttcaagaccgttgaacgtgaaaaagacagtacagtctgatgatgaagccccctgggcggccattgctgcatccgaccgaaccgaccagagcaaaccgttatcttctggtcgtggccgaggagccaaacctgcagctcttaaactaggtgcccaacgcattaaccgaacctcatctggaatgtgatgaacacgaaaggaagaagataagctgcatacaatgtacatttttttgaaagcatctccagatgacccaagagctcaagccaaggaaccaacgaattatttgatttgtaaaatcattcattttaaaccataagagtgtctctgtttttactctacactaccaaaaagagagtgtttattctgagaagtagaagtgatgtaagaacatcatctattcagaatgtgatcttgttcaagttgcct

SEQ ID NO: 131163 - DNA, 370 bp, Arabidopsis thaliana columbia
ttcttgaatacctttccttgcaaacaaaccccatccatgtatgccagatttaccaaagcagactcgaaaattttctgtcctctgaagaagataatatattgtttataaatattctaggataacaagatggagaaaatattaactcttcatgaatcaatgtttacctgcaaatgttttagccgttctcgaatgatgtaaaatctgcttcctggtgtgtaacaaggtaaatggaaattaagatcttcctaagatattcagaaaacgttgccccaagaaagcaaaacactgacatgaatggagctcggaatgagaaacttgccttaaaagagtttagattctcgattgcactcaaagaatgatggcttggtcc

SEQ ID NO: 131164 - DNA, 412 bp, Arabidopsis thaliana columbia
aaaatattatcttagattataaaaaaaaattagagccaaaaacgatgaatatcatcaagttacttgtggtggtattcattgcagctttgagtggtaatgttggagcacgtaagatcggaggaatggccaataataccaaactcatgaataaaaaacagccaattggaaactctactaacaatgttactggtggagccacaaatggcaccaaagctcctcttagtggtggcattagaggagttgctccgtctcatgtaacagaaggcggatccactaatggcactaaaactcctgttattggtgtcattgtaggagtttctcccatcaaagaaagtggagccactattggcaccaaagctcctcttaatggcgttttaagaccagctcctctagagaaggtgaagcaactctt

SEQ ID NO: 131165 - DNA, 289 bp, Arabidopsis thaliana columbia
ttcgatttcgattcttcctcgagccttccttccttccttcttcttctccaagaggattttgattgtctcctttactctctccatgtcaagttctggtgctccttcacgcaagactctgagtaagatcgcgactaatcgtcttcagaaagagcttgtggaatggcagatgaatccacctactggtttcaaacacaaagtcactgataatctccaaagatggataattgaagttattggagctccaggaactctatatatgccaacgatacttatcagcttcaagttgatt

SEQ ID NO: 131166 - DNA, 327 bp, Arabidopsis thaliana columbia
gacctgtaggaagcttgttgatttcgccggaatcttcgacaaaagcatcggttttggtgattcagcagtacaacggcaccggaatagctccggatttgggtgcggctgagacggaggtattgacttctacggataaagactctgattgaatgaatcattggttaaaaacaagaacggttcggttcgggtcaggggctggtttaccatagttagtgaaaagttggttaatgaatacggtttaatcaaaatgactgtacaaggctttcactgtttcatcttttctttcttttttgtcgtcactgttcatctttaagtttttttgctttt

SEQ ID NO: 131167 - DNA, 451 bp, Arabidopsis thaliana columbia
taaatattttcctagctgaaatctgtatatggcatgttactgtgttgggagaatcattaagatggttgttgtttggatttaaatgcatgattacgacactcgtttcttcacaaaagaagattctctttttgtttttttttctctcttcaaagattttcaatggtatgtaaagtcaataaccatttattcaaacaatgaaactatttagacataaatttggtctttaatcaactcatgaagtagtggttgaatgacacatcctggaattgggcattagtgtttaagctttcacaacataatgatattatttttgggctttccctagagattggtttgtatgatgatacatggagctctaataagtttggtttgtatagaagatagcaaacttttgggtcctagtggagagtagtagctaagcagaaacacgattacacaacaaatttctcat

SEQ ID NO: 131168 - DNA, 386 bp, Arabidopsis thaliana columbia
cttttcattaaacacttttcaaaaacaaatcataatctgttcgaagaatgagccaatacagccaaaaccaatcttcaggagcttatcctacgccgccagtgtctaccggcccttatatgacaccgccaccgctcggttacccgacgagcgacatcagtcatgccacggtggctccggtggagacaaagtccaagggtgatggattcttgaaaggctgtcttgcggccatgtgttgctgttgtgtcctcgacgcctgctaagtttgagaaattcgattgtttatttgatgtttcatcgaaattatttatcattgtattttcgtttacccaaattatattttgggatttgtatgacatttggaacttctaatatttcttaattcattt

SEQ ID NO: 131169 - DNA, 422 bp, Arabidopsis thaliana columbia
aacaagagtatatcagaagtaatgttcgtgtttacaaaggacaaagattttgttgccaaagatctttcaacattatgttaaagacatgtcaatggatgtgtctaagctcatggaagcaacatctcaatgtttaccagaagatgcaaggaaaattgctgagaaatgtttgaaagagaagaagagtaagaattttgaatggttaccggaaaatttgagcttccggtatgttatcgccggagaattggtcggagcaagaaataagacgtgaagggtttattcaagaaaagtgttttttttttgcctcctgatgtgattaaataatctgattacaattagtgttcaatttcattttttttttcaagtgagaaattgtaaaaccagtgtttgtttgtataatcttaataaaccgtgaactactaaat

SEQ ID NO: 131170 - DNA, 405 bp, Arabidopsis thaliana columbia
aaagtccgtactttttcgaaaatttgggccatgtggctaagagaaattagggccatgtggctaagagaaatacgttgatcagaggcccaagtcaatctttggactttctttgattgcgagaactgtgctcggcttaagaagtattaggttgatcgactaaacttgactgtaaatatctttgttttgctagtcggcccctttattgactcgaactcgtcagtttaatcatggagttttagtatgagagttaaactcgagttatgcatgggtgctgacctcgagtttagttgttgaaaagtgaactcgactttcgcatgggagctataacttgagtttacaaagtgtattctgcttatagaataggaaggcaggttattgagccacaatctagagagaaaactaaag

SEQ ID NO: 131171 - DNA, 369 bp, Arabidopsis thaliana columbia
aatagttttttatttcgaagtctgttcttcccggtagattgctcgcaattgttgttgaccacctgcaatttaattagcgttgacgctattcttatttttttttgtaaaaacgaaaaaaaacacgagcttacacagcaacagtttgatttatgatttcacgtgatagtgtactttttctattggaaatatatcgacattaataaacttttgttcaaatgaaaaagttacctggttcccaaagtggaatgcagtttaacaatgacgtcctcttcttcgggagttatgtttcctctcttgacgtcctgatctcaaatagtttatccatctcaatctacagctctttccacatctctttagccctttttaaaa

SEQ ID NO: 131172 - DNA, 454 bp, Arabidopsis thaliana columbia
tacaattatgggtcctgcagagagtccgtattcaggcggtgtgtttctcgttaccattcacttccctccggactatccattcaaaccaccaaaggttgcatttaggacgaaggtgtttcaccctaatatcaacgacaacggaagcatttgccttgacattttgaaagaacaatggagccctgccctccccatttccaaggtgttgctctcgatatgttcgctgttaacagatccaaatccagatgaccctttggtaccagagattgcacacatgtacaaaaccgacagagccaaatacgaggctactgcaagaaactggactcagaagtatgccatgggctaaacatgtttatgttttcatgtctgtttctttcttcttcttgttttaactttaataaaaatgtctaaaatatcaactttttcgtctgtactatatatgtttatgggttttatt

SEQ ID NO: 131173 - DNA, 335 bp, Arabidopsis thaliana columbia
cccccacccgacagttttctcagttgttgctgtaactgtaagaagagtcttgggcctcgtgatgacattttcatgtacaggggagatagagcttctgtagcagtgaatgcaggtccatagagatgatgatgtcagaggaaaatgatactaaatgaaataagtttttatttgagctatatataaaaaaaaagttatgataatgactatgattaataaaacgttagtataggtgaattttgtttgattgcttttgttttggttggagaagagtttggtatcggtatctatgtgtattatgtgtctacatgcataatcatatatacatgttttacttt

SEQ ID NO: 131174 - DNA, 298 bp, Arabidopsis thaliana columbia
gttttgagggtataaatctgcgtaacgatcccataatccatattgcctaaatctgtcttggagtgggttgacataaagcttattcatcgtgtagggtaaggatccggtatatagaattcacctgcggttcgatccggtacaccgatttcccacaatgttggaccgtttctcggcggttatacactaaaggccctacattcatctcgctacctggcgtgatggtaatgttttgctcatacttatagtctccataaaaccagacccccatgcgtagagactataattgcctgccctcaca

SEQ ID NO: 131175 - DNA, 275 bp, Arabidopsis thaliana columbia
atcctcctcctcatcgtcatcctcctcctttccaccatccaccgccaccaagaccaccgccaccagagcctcgccctcctccacctcctccaggacctcagccaccacctccacctcctcccagacctgatccaccacctccacttcccggagctacttggtttccaggacttcttgggccacgccctcctagaccaccatattagtcgtcatgaatgtttggtctatttaagtatataattcgaaatatatattgtcgaaacatcttagatctt

SEQ ID NO: 131176 - DNA, 277 bp, Arabidopsis thaliana columbia
acagagagaaatgattctcttgcggaggaactatcagagtgccagtctaaactctatgctgctacaagctcaaacacgaaccttgaaaatcagcttcttgctacagaagcacaagtggaggatttcactgctaagatgaatgagttgcagcttagcctagaaaagtccctgttggatctatctgagacaaaagaaaaattcattaatcttcaggtagagaatgatacgttggttgcagttatatcttccatgaatgatgagaaaaaggaacttattg

SEQ ID NO: 131177 - DNA, 305 bp, Arabidopsis thaliana columbia
agatgcttttgaaggtaacaaagacttatgtggtagtgttaacaccacacaaggcttgaagccatgttcaatcacatcctcaaagaaatcacacaaggatcgaaacctaatcatctacatactagttccgatcatcggagcaatcataatcctctccgtctgcgccggaatcttcatctgtttccgtaaacgaacaaaacaaatcgaggagcatacagattcagaatcaggaggagaaacattatcaatcttcagcttcgacgggaaagtgcgatcccaagagatcatgaaagcaacagcaggat

SEQ ID NO: 131178 - DNA, 324 bp, Arabidopsis thaliana columbia
aaacaacttacacatttggcacaaagcggccccattacaaacaggagcggcggaccgggacctccactagatttagggaggcagattgcccaaacaaagcacttcactcttatcttatcttatagtgaaattccagatcaaaaccaaacaaagcacgcgtcttcttaactaactatttagttagattccagatgacaaccattctacaagacaaagacgattcaagaagccgtgccttgaagaaaaaacgattccaaattacaaaacatttcgaaatgacctcctcttaataatctaagagctacaacgcagaggaaagaagcg

SEQ ID NO: 131179 - DNA, 411 bp, Arabidopsis thaliana columbia
aggagaaacaacaatgtcgccaatttctaagattctaggaggatgcaggacactgatggcgaaggcggtgactaatgcgacggctaccggcgccggcgttgatagaagaggaggaattcataagatttttccagtctcagagtcgctggctagattcgtcggccaaagcgaagtctctttttccaccgccatggagaaagtggagcagtataccgatgatcacaatctttggaatccggagaatatagaggagatactgtgcgatgataacttgaagacgattttcgatggccaagacaaagtcgtcggagtcagagagatgacggagcttttgttgcgacattttcctaacgttagaactatgtcggcgaaggtgaaggctaccggtggaggtactatagaaaattgggg

SEQ ID NO: 131180 - DNA, 289 bp, Arabidopsis thaliana columbia
atggtggtattgtactacagagttcagattcgttttgggtttgattcaaagggttgaggcgattgtcactgaggagacaacaaagaatgtgttgcagaggattaagatagttgtgaagaagaagatgcttgaatatccttaagagattgataatggtgacgaagattgtcagcgggaatgttttggttttggttttgattttgatttgtgtagtttgggtgtttacattctggatgcttcctgcacaagtaaacaaattcttaagggcggacgaaaacacaaacccttc

SEQ ID NO: 131181 - DNA, 444 bp, Arabidopsis thaliana columbia
tctgcttcatttgaaactgaattttcatgttcaggaagtatctatggtggtatagaagcaagagatggttatgctgtaagaggtttagttaaccttgggaacacatgtttctttaattctgtaatgcagaaccttctctctttggatcaattacgtgagcacttcttgaaagaggatctatctgttagcgggcctctcgtttcttccctgaaggaactatttgctgaatcaaattcagaggcaagcgtttttaggaatgagataaatccaagagaccttttcttttctgtctgttctcaggctccccaatttaggggatatcagcagcatgacagtcatgagttgctaagatgtttgttggatggtttgagcattgaagaatcgagcctgaggaagaagcttggtgtttctgatagtaatgacagtctacatatcagaaaccta

SEQ ID NO: 131182 - DNA, 332 bp, Arabidopsis thaliana columbia
ttctctaatgacgaagatgaaaatcaatggcgccgctttaagcgccagctcatcgagaataaggtaaccgtattgaatttgaacttaatttgttagctggataaagagtaaatcttgactagtgcgtgtgcctgaatttaggggttttatgtggagcgagagctttggccatggtacaactactcggattacaaagtagtccctaatttggatttgcctgccagtttcgggcaaacctaccgagtactttgcagagatggcttgtctctgtctcaaaagtacaacgaagagaaagatcgaaatgtcggtatattatttttggctaattatca

SEQ ID NO: 131183 - DNA, 259 bp, Arabidopsis thaliana columbia
ggcggtggaagaagaaaaaaaaaaataaaatcaatttggtcttcaaagtagtaagaaagaagagaagcaatcgaaattctctgacgatgttgttacaacccaaagatcctcttatcgattatcgtaattcgtagaaaacgccgcagagagaaaatgggaggcgaagatgataaagataagaaatggaatgctccaccaccgctgcagacgccggacctcaaggcttgggaagtgtgcgcggcttttgtaatctgcgcaa

SEQ ID NO: 131184 - DNA, 285 bp, Arabidopsis thaliana columbia
caggagttggagagtgtgaaagttccaataatattggttgggcattctattgggtcttatatatcccttgagttattgaagaaattctcggacaaggtggtatattgcattggcctatatccatttttgactttgaaccaacaatcaacaaagcaatcattaattggcaaacttgcagcgtcttctgttctgtcggctacagcaagttttctgattgcatcgctgagacttttacctatgtcagctgcacggctgcttgtatctaaatccattggagcttcatgg

SEQ ID NO: 131185 - DNA, 327 bp, Arabidopsis thaliana columbia
atcttcttgtatgtcgatttagcaaaccaatgccttaagccactcagccatccctccaagttgttgatcggaattttttgtgcggttggttgcccgaagggctatctgacccgatcaacttcgtaagccgtagcgcgctagcgtactcttcctctatctatgagcgagacaggcgttcatcatccagaaagatgcactgacgtcgtcccattgaatgaagatctgggcgaagtccgttggaattagccttgataaaaggtagctttttatttgacccctttcccttttttttgagagcaagcgcctaaaggaaggaaaataagaaaa

SEQ ID NO: 131186 - DNA, 277 bp, Arabidopsis thaliana columbia
aaaccttattggattatcaaaaactcgtgggggaaaaagtggggagagaatggatactacaagctgtgtcgtgggcacgatatatgtgggattaactcgatggtatctgcagtagccacccaagtttcctcgtagatgggtcttgtctttcctctgctctcttgttttctaatctagggtttgatcatgttttaggagtggagtttggggtttgaatattgggttgtttctttccgtgaccgttcttgtagtaaaagtgggtgattatttccgtttt

SEQ ID NO: 131187 - DNA, 277 bp, Arabidopsis thaliana columbia
ggcatggatctccgccggagcgactctcggagaggtttattatcggatttgggagaaaagcagagtccatggattccccgccggagtttgaccgacggttggtgttggtgggcatttaagcggcggtggttacggtaacatggtgaggaagtttggattatctgtggattacgttgaggatgccaagatcgtcgatgtaaacgtcgggttttagatcggaaagcaatgggtgaggatctgttctgggcgattaccggtggaggaggaggtagcgtac

SEQ ID NO: 131188 - DNA, 330 bp, Arabidopsis thaliana columbia
tatgttagacatagtgatggacatccggttagttcagaaccggagagacaacgtttgatccaatgtttacaagctgcaattgaaagaagaacggttaagggtgtgagattggagttatgcacagcggatagaccgggattgttagcggaagtaacacgaatattgagggagaacggtttaaacattgctagagccgagatatcgactaaagatagtatagcgaggaatgtgttctatgtgacggatgcaaatggtaaccttatagatccgagaatgcaaatggtaaccttatagatccgagataatcaaatcgattagggagaagatcgg

SEQ ID NO: 131189 - DNA, 226 bp, Arabidopsis thaliana columbia
tcttgtccaagtagaatcagatgccgacatgagaggataagattctccttcatttccggttcttcttgctctcttccttctccctttctctcttcttataaagcttctcgattacacgtttggcttcacagttgggaaagttcgaaagatcgtaataatgagaagcaacatcaactagcctatgaatccacatggcaaaagagagatttttttagaaaagaaaacg

SEQ ID NO: 131190 - DNA, 409 bp, Arabidopsis thaliana columbia
tttactaaccgaagctattgcattgtttgccccaatgatggcctttttgatcttattcgtattctgatcgaagaaagaaggtttccattcagtctcataaagcaagcacctctttcacataagaaagtggaggcaggcttggggatacgatctaaaatgattccaaggaccgggcaatcgcctcttttttaatgaagaagcgggctagtccccgaaaatgcccgttaatcaagcaagttggggaacaaaatcgtagttcagattcaagtcggttcagtgagggcgaccacgaaagtataaatgctataagcatagaaaaacttctcgtaatgtatttaaccataaaatcgattatgctcctgcggaagtatctactcgttacggaatctcaggtgtcaaagtgtggatt

SEQ ID NO: 131191 - DNA, 303 bp, Arabidopsis thaliana columbia
gttggatcgacaacaagatttcgtgaatttgttggttgcagctggagttagggttgaagcaaggtttgacgacgccggtttccatagcatcgagctggtcgatccacgacgagccgtcgctcttcttaatatgattagagattttataagttgattattcttttcaagttttcatctaagcattctataaccgttaattttctcattttctattttgtatacatatgacattttacattgaacgttgttacatagcacaaatgttacttcttttgtgttttttgataaaatgttaacattgtt

SEQ ID NO: 131192 - DNA, 307 bp, Arabidopsis thaliana columbia
atcaagaactaggagaagaacgcaacgacgaagataagaggttcatacatttatcagaatgttctaacttttcaattaagtaaatgttttgtgtagttttgacttctcctttctctcattgtgtgaattattttgactctttagctgaaaccgagaatctggttgaccaaatcaacacataacactcttgaatcatgaatattgatatatctcgaaacacatcaatcaatctcgaatcttttttttcttgtagcaacatgtctcagtgtaaactttagtgtcactgcatagttcattgatatagaaa

SEQ ID NO: 131193 - DNA, 281 bp, Arabidopsis thaliana columbia
tgaccctgtgagagagagggtacatcgtgggaacgacccacgtcttgcagatgcaagattcttgggatcaacattgggttggcttgttatgtccgagtccttggacttaaacccacgcaaaacccaccaaactttcctgtacaacccgttcatttcagaactgcagcaactacccgaactcacccttgatagcccatatcccacgggtgtactccgttacggtgtgctcaccggaaatccaagtgacaacaacacttatgcttgcctcataacagattact

SEQ ID NO: 131194 - DNA, 221 bp, Arabidopsis thaliana columbia
gagcccattgctaactacagtgaaaagaccaaaacttttgtatatcaggaagaagggacagctgtttttaagctatacgctgtccattcagggcatgccgggggctatggatggaaatgcgagaatcatgcatcgggttgttggtcataagggtttttgatggatcagagactgtctacgatgcggacgagactggaacgagatggattgctggagatgac

SEQ ID NO: 131195 - DNA, 339 bp, Arabidopsis thaliana columbia
aaagaaggcaaataagcgcagcatccgcatcaagcctattgagaggaggattcaaagcttcatctttatctacaaacccatcagcaagcaagcccaaggtttcatcagtttctgtaaggaaactctagttgtagcaaatgtacttgaatcgtttgtgttgatgttgtttatcagtgttgatgttttttttatcagtgaagatgtttgtagcaattggtcttgttctttgtcagtttgtcttataataatagtcgccagtcacatacaacgaatcaagtggtgtacattcttttttcttttttttcgccgaggtgtacattcatttcttgtagtgttttt

SEQ ID NO: 131196 - DNA, 318 bp, Arabidopsis thaliana columbia
gatttagcccactttttcgggactgtatacaactttaattaggataaggtaaagtataatacaggttccgaatgtttgattagttaagatcagtttggttttcctcttaacaattattggggtgtgtttgataaggtccgaaatggggaaggtactacgttggaccaatacaaatggcggtgtgctatggtgtggttattgccaatgcgctcttgggagggcaatgcctaaaggcaatgtacttggtggtgcagccaaatggggaaatgaaactctttgagtttgtgattatttttggatgcttacttttggttttgg

SEQ ID NO: 131197 - DNA, 275 bp, Arabidopsis thaliana columbia
gaaccggtacgcatggaaagccggtacagactccgtcatgagcctccgtctttacgacagttacggtcaagacgcggttatctccgatttggtgtcatcgggaggtttaatgggtccatttcatgactatttcgggagggcaatctcgacattttcggtggtttaggttcttgcctctcacgtgcggtttgtgcaatgaatttgacatccgatggctctggtgatcatcacggttggtattgtaattacgtggaagtgaccatgagtgagaggcc

SEQ ID NO: 131198 - DNA, 428 bp, Arabidopsis thaliana columbia
ctagaaggtctcggccaaggagttccaatgatctgcaggccttttgcgggtgatcaaaggatgaacgctagatacttggagtgtgtatggaaaattgggattcaagtggagggtgagctagagagaggagtggtcgagagagctgtgaagaggttaatggttgaacaagaaggagaggagatgaggaagagagctttcagtttaaaagagcaacttagagcctctgttaaaagtggaggctcttcacacaactcgctagaagagtttgtacacttcataaggactctatgaagacagttgtgtctactaaaacacacaaagcatcaagattcctttttcaaccattccaagtttgtttgcatagagtttatctgaacatcacttaaaaactcacctgcagaataacaaactataaaaattaatacttt

SEQ ID NO: 131199 - DNA, 332 bp, Arabidopsis thaliana columbia
aattgcggaagaaaggagaaaataacctccggtttgagctgcgtcgacgagatctatcgtcaggatctcagatttgttgttacactcttgctcaagtctggagacatgagttctccggtacggatattatagcagatctacgaaattggcctgagatcttttacgtttcattagttttgaatttggaaaccgtcgtctctgatcttacgaatcatcttcgtcttacattgtttcagggaacgagtatgttcaccaatttcactaagctctgcaaaggacttgccctggtacttgtggtgggacacctcgtggttcagttcattcccgctacc

SEQ ID NO: 131200 - DNA, 610 bp, Arabidopsis thaliana columbia
aaaaataaaacgagagatcatgtcttgtatcttgtgaagtaattctcaaaagatcactttttaaaaatcaaacctctttcaactttccattgccgaaacgaggttgcaaatctaaagattcacaatggcatcttaccatgtttctcagtattcatatcaatcaccaggtccttcaccattgtaccaaccgataatagaggctccaccgccaccgtatccaccaacccgaacgaggtatcaagattactacggtggctacggtcagccgcatccaccacctctacgtccatatagatcagatcatgaatactatggagacggagaatatgttggttgctttccgtttctcagaagctgtttgacgacgctatgttgttgctggttcgtggaacagtgctgctttcgaagtcgttattaattctattatgtgatgagaccatttactctcgatgatctacttttgatccgcgtttatgttgtattaggcaaattagaatacttgttttgttcatgaaacaaggacttctaataataaaaacaaacaaaattacgttttgagaaatgtcatgagacggtaaacactagatttttatttttacatccttctttt

SEQ ID NO: 131201 - DNA, 347 bp, Arabidopsis thaliana columbia
  unsure (1)..(347): unsure at all n locations
ctgttttcttttgtaattttacattataaacaatattatttatttmntattacaaacactttgtttttggccgaaatgagtttgtaagttaagtttttacatgaccatagtagcagcaggaaaaagcctatccaagaaagtatataaacctcctccaagtagaagagcaccacttatgggattgntccatgcagagacctttcgcaacgaaagtaagctctgtaaagctccggcaaaagaagcagcgacgataagttgagcgacgtaacctnttgtataggttaagantaagctttcccaccanttacttggttccctgggaagtagccacgttaccaaggaagagt

SEQ ID NO: 131202 - DNA, 446 bp, Arabidopsis thaliana columbia
  unsure (1)..(446): unsure at all n locations
agcagcttcattgagaatacagttgataatttnttgaagtactatgaaagcttagagtcaagacctatcttcgacaatgttgaagggatgcttaaatggtcaggcttgtacaatctcacaaagctcactctacaggagaaattatctgangctcagctttctcctttgttagtcaacgagctggttacggttattacaaggataaactatggacagagtgtactcatcagtgggttggcaggtnctgtctctttggcgggttcaggtggaggattatggtctnttgaaggtngaaactggcagatggctgcanantcatttaatcattcangatgttacgtttncacctgaacgggaaaattgaatccatttcatatcctngaaaccattacgngnttaaatncnctaaaggaaccagcttcaagtgtgatgtacaggtagttgcc

SEQ ID NO: 131203 - DNA, 391 bp, Arabidopsis thaliana columbia
  unsure (1)..(391): unsure at all n locations
ctaggagcttcaaaatctctgatttctttttattattttttaaatttncttttcgatcaaagtcaaacatgagtagtgatcctcatcgtaagctccatgttgtgttcttccctttcatggcttatggtcacatgataccaactctagacatggctaagcttttctctagcagaggagccaaatctacaatcctcaccacacctctcaactccaagntcttccaaaaacccatcgaaagattcaagaacctgaatccgagtttcgaaatcgacatccagatcttcgatttcccttgcgtgggntctcgggttaccagaaggnatgcggaaaacgtcggtttttttcaccttaaaccaacaatgnatgataggccagtatctgaccttnaagg

SEQ ID NO: 131204 - DNA, 272 bp, Arabidopsis thaliana columbia
cgtactttcgttactgccggtctctacggtttgatgacaaacctgattactcttaccttaagaggctattccgcgacttgtttattcgagaaggttatcagtttgattatgtatttgactggacagttctgaagtatcctcagattggttccagctctggttctagttcacggacacggaatcatacaactgcaaacccgggcttaactgcaggagcttctctcgaaaaacaggagaggattgctggaaaggagactgcgagaaccggtctc

SEQ ID NO: 131205 - DNA, 323 bp, Arabidopsis thaliana columbia
cgagaggaaatctgcgcgacacgcagtttcagccatcatggatccaataaagaccggagactttgattacttaccatttttctactcaagggtcttcgcattctcatggcaattctatggagaccctacaggtgatgttgtgcactttggagagtatgaagacgggaaatcatttggagcgtattgggttaaaaagggtcaccttgttggatcttttcttgaaggaggcactaaagaagaatatgaaactatctcaaaggcgacacaattgaaaccagctgtgactattgatttggaagaattggaaagagatggactctggg

SEQ ID NO: 131206 - DNA, 270 bp, Arabidopsis thaliana columbia
cttcaaagctagaagggctacttgaagaagttcaagatggcaggctaggtaagctcgtcgatctacatcgagcgttttagtgtaggtaacgagagagctgtgcacagagtcgagagcttagtctcagcagcctagaggcccttgaagagcggctctttctttttcttaaactttcttgaggtcagagtgcaactcagagagctccgaagagaaaggctacgcaaagtattcgaaagagagcgactaccactttcctctagactattctct

SEQ ID NO: 131207 - DNA, 230 bp, Arabidopsis thaliana columbia
aaaataaaaaatgaactttcatgttgatataatgaaggtgagacggggaaactctacataatatatcaaattaccaatacatgctcacacaaatacacacagaatcaatagtttacttagatgtatacatgtagcttctatacctcacgagagatgaaaatgtctggaaaccgtagtcaacaaggcttgatatgaatagtagctgtcataattcaattattagacatcag

SEQ ID NO: 131208 - DNA, 275 bp, Arabidopsis thaliana columbia
tgaaaacaccaaccaaacgctcatgaaatctctctccaacaccaaccaaaaaaatctatcaataattttttgtgttcgtcaaataaattaaatcaaacaacagagaataacaagagatctctagcgtcatcatacacttgagaagatttgataccgcaaccaccagtagttccggttccggttcctaaaccaccaaccaaaccggtcgaattttgacctgacccaagaaccccaccacctccgattaaatctttgactccgccgtgatggtgatg

SEQ ID NO: 131209 - DNA, 271 bp, Arabidopsis thaliana columbia
tgaagtatagagagatcaagaagaacatcaagagggcatgaagttctatgtcactctccaagatgccaatcacgaatgtgaagcagcagtgcagtgattttgtgatgacaaggagtatcagtgccagagatatgattgaagatgtgacaactgatcagactagtctggtttgagttttcaggatcatagaagctccggcccatacccatctgtgcatcaaccaacggcttcaagtccgcctcctccaccagaaactcagaatccatctcat

SEQ ID NO: 131210 - DNA, 306 bp, Arabidopsis thaliana columbia
acgaagaccgccgggtcgtgaagcttatccaggagatgttttttatttacattcacgtcttttagaaagagccgctaaattaagctctcaattaggtgaagggagtatgactgccttaccaatcgtcgagacccagtcaggagatgtttcagcttatattcctactaatgtaatttccattacagatggacaaatattcttatccgccgatctttttaatgctggaatcagacctgctattaatgtagggatttctgtctcgagagtaggatccgccgctcaattaagctatgaacaggtagctgg

SEQ ID NO: 131211 - DNA, 251 bp, Arabidopsis thaliana columbia
gaagaatttgaaaagaaaaagaaaaaaagaagatgaatgccggaaagcaagcttcgtgggcggtggcgacggcgatcgcagccgtggaagtgctaaaagaccaaggcgttgctcggtggaactaccttttgcgcttactccacaaagaagcaatggctcgcgtccgtaccattacagtcccatctcgtcctcttctctacgcttcatcttcggctacttccatcagatccaaacctttgtcaccacacgtt

SEQ ID NO: 131212 - DNA, 166 bp, Arabidopsis thaliana columbia
  unsure (1)..(166): unsure at all n locations
ggnacttgctaaaatgcgagcccttggagatgatatcggtgtccccatcgaggnctatggcccagangcaaccatgacaggnatctgcaaggnngcaatccagtacatcacagcagcagcataagcttctntcagtaccttctatgaccaaaactttgtctgtgtt

SEQ ID NO: 131213 - DNA, 355 bp, Arabidopsis thaliana columbia
  unsure (1)..(355): unsure at all n locations
gtcccattctccggttattaggccaaaacgttgtgatctccgagacagtagacgagatttacccatgggtcattccttatctctacagcatcgtgttcaccatgacaatgcaaatgtacctccaagcgcagatgaaaaacgccatcataggcattctttcgaccctagccttggtcttggacattgcggccacgtggtggtgcgtaagntgaatggggatggggatccatggtgcgcttctagggcttaatataagctcatggtcggtggccatagccgagtttgtatatgtgtttggagggtngtgcccgcatacttggaccggctttagaactnctgctttncttgatcttat

SEQ ID NO: 131214 - DNA, 244 bp, Arabidopsis thaliana columbia
ttttttttttttttttttttttttttttttttgttaagaatagaataatagtttggcaaccaacagagataatccataagacgatcaaatcaaccaatcctgggacatctggggcaatatcatagaaatagaaatcaaaacgattaaactaaaagatagaacatgaaaatcgatgagagcgcctttaggttttggggtcagcagctttgtcgttgtgaggatccttttgatttccagaagcttc

SEQ ID NO: 131215 - DNA, 304 bp, Arabidopsis thaliana columbia
cgggagatggctctatggattgcatctgatcttggggaacataaagaaagatgtattgtgcaagtcggtgttggattacgtgaggtaccgaaagtcaagaactggagttctgtgagaaggatgtcgctgatggaaaatgagattgaaattttatctggcagtcccgaatgcctggaacttacaactctgttccttcagaaaaatgattcattgctacatatctcggatgaattcttccggtgtatcccaatgctagttgttttggatctatcagggaattcaagtctccggaaattgcctaacc

SEQ ID NO: 131216 - DNA, 317 bp, Arabidopsis thaliana columbia
catagaagtggtagagatttggtgaacatggcaaagaagagaaccaatgttattccaatcatcgaggatgctagacacccagctaaatacagaatgcttgtaggcatggttgatgttatcttctctgatgttgctcagccagatcaggctaggatcttggctttgaatgcatcatacttcctcaagtcaggaggacactttgtgatctcaataaaggcaaactgtatcgactccaccgttccagcagaagctgtgttccagactgaagtgaagaakcttcaacaggagcaatacaaccagctgagcaagtgacgatt

SEQ ID NO: 131217 - DNA, 228 bp, Arabidopsis thaliana columbia
tttttttttttttttttttttttttttttaatgaaagtaacttttaggcccaagaaatccaaatgagccaagatattaaaagcccataccgacacaataagattgctactgtgaagtgatgccgacacactggaactgtcacttttcaaaggtaacatgtttcttgttatgtgagaaacaaagtgaaatcacattttaaaccacttaggctttgtggtcttcttctct

SEQ ID NO: 131218 - DNA, 386 bp, Arabidopsis thaliana columbia
attctagctacaacgatgagactacaggtataaagtatgtttcggattcggcgtttgttgattcaggaacaacaaagagaattgcagctcagtttcaatcaagtggttttgatagacacttgttgaacgtgagaagtttccctcaaagcaagagaagctgttacgatgttccgacgccgagacggaaaggttttaagtatctaatcagaactcgtttcatgtacgggaactatcgatgatcttggaagagtacccgagttcgatctctatctaggagtaaacttttgggactctgttaaactcgacgatgcaacaactatactcaacaaagagataatcaccattccacttttagacaatgttcagtgtgtgttgttgatagacgc

SEQ ID NO: 131219 - DNA, 319 bp, Arabidopsis thaliana columbia
caagattgagttccttcctgaagattcaccttttcacccgggtgataatctggaatcaatggttatgttggataagcatggaaatcggtttttatgttacttaccgaaagaggaaaaagcgacgagtggatggacttctagtcagcaaaatattagtactgtgatgatggaaacacagcaactggtgaagctaaagactcctgatgaattgcttcaaccacttagtgaaaaatgtctttttaggcaagagggttggtggtcttatgagttttgtcatcagaagtatgtgcggcacgtacacgttgaggatgaaaacaag

SEQ ID NO: 131220 - DNA, 284 bp, Arabidopsis thaliana columbia
atgaggttgaaatcaacggaaaggtcttccaagttaaaagtatccgaaacttgaatggtcacagcattggaccctatcagatacatgctgggaaatctgttcctatcgtaaaaggaggcgagcagacaaagatggaagagggcgagttttatgccatcgaaacatttggatcaaccgggaaaggatatgtgagagaagacctagaatgtagccattacatgaagaactttgacgctggccacgtccccttgaggttgcctagagcaaaacaactccttgcaacc

SEQ ID NO: 131221 - DNA, 327 bp, Arabidopsis thaliana columbia
tttttttttttttttttccttcaatcacgagcctttgcttcttgttctcattgaagatttctctttgaagaactaatcaaaagttcagattcaacagtttgtctaaaaaaaaatgatttttctatattaaaaagtacacactaagactcaaaacttcaacttggttctccacatttctccaataactttcccaggctgtggattatctggtcctctatccctctgtcccgacgtgaagtacaaataaccgttccagaatccggccatcgctgttttgacacggtatggtaaccgtccaatcacagaccaagtcaacgtatctaactg

SEQ ID NO: 131222 - DNA, 195 bp, Arabidopsis thaliana columbia
cttagacaaacaacaagaagcaaagaaatgaatcaaatcaattacaataatacaacaacaattggcaatgagaattctttttgagtagagagttatctacattggagtgcagttgaaggctgtttcgaatatgattgattgattttgtttcaactttcaatcaagggtcgatctgagaacaagttggaattcacc

SEQ ID NO: 131223 - DNA, 107 bp, Arabidopsis thaliana columbia
ctcgtgccgaatcggcacgagtttttttatataatccaataccatagattaaaagatctctgattccaaaatccaacaaagctgagttcaataacatgaaataaatt

SEQ ID NO: 131224 - DNA, 252 bp, Arabidopsis thaliana columbia
agaaaatgtctggtcgtggaaagggaggaaaaggcttgggtaaaggaggagccaagcgtcacaggaaggttctgagagacaacatccaaggaatcaccaagcctgccattcgaagattggctcgtagaggtggagtcaagcgtatagtggtctcatctacaggagacacgtggcgtcctcaagatcttctcgagggggggcccggtacccaatcgccctatagtgagtcgtattacatcactggccgtcgtt

SEQ ID NO: 131225 - DNA, 220 bp, Arabidopsis thaliana columbia
attctgaggatgaagaagaggaggagactcctaagaagcctgagccaatcaacaagaagaggccaaatgaatctgtatccaaaacacccgtctctggaaagaaggcaaaaccagcagcagcaccagcttctactcctcagaagacagaagagaagaagggaagggagggacacaccgccacaccacacccagctaagaagggtggaaagtctcctgtgaa

SEQ ID NO: 131226 - DNA, 278 bp, Arabidopsis thaliana columbia
  unsure (1)..(278): unsure at all n locations
tgaccaatagaataaagagaaagatagttacntataaaaattagaaatgcatgaaaattaagctgtccacaaatatcactattacgacgccgagaaaaagcaactttccagtttgatatactattttgtttttaaagcaaaaattcccaattccacgaaacgtcgtcgtttcatgttgtcttcaacctcacccacactttcttcggtctcatccttttataaaatcccatttcctctacagttttagctctctctctctctctctctctctctctctt

SEQ ID NO: 131227 - DNA, 266 bp, Arabidopsis thaliana columbia
gagttggataaagtgtgtttagaagaagccgtcgaatttcttagtttgaagcattttattgtttggagagttcgatggatttgaatataaacaagacgacccctgttcttagtgaccctactacaccagtaagtaaaacaagacttggatcatccttcccttcagggagattcatgatgaattctagaaagaagattcctaaactcgatgatgttcgatctaacggttggttggacgcgatgatatcttcgtctccaccgcgtaaa

SEQ ID NO: 131228 - DNA, 285 bp, Arabidopsis thaliana columbia
ccttcttagtggcttacaggattatgagtacttgaagctgtatgagtcaaaatacggaagagaggaagcgatggggctattggagaagacaggggtgtacacggggccggagcgctacactttggaacatagaccgatcgatgtattgcgaggagaagtgtacaacacatgtagaccatcttgagtaaccagatcgtttagtatctataaacactctcggttagccctaagttaataataaaagaacataacaagaaaactctaacaatgtctagattaccagtg

SEQ ID NO: 131229 - DNA, 372 bp, Arabidopsis thaliana columbia
  unsure (1)..(372): unsure at all n locations
gaaatgaaaggtagccatttggatgangtgaagagaatggttgctgagtttaggaagccagttgtgaatcttggtggtgagactctgaccattggacagtggctgcgatctcaactattggtaacagtgtgaaggtggagctatcggagacagctagagccggtgtgaatgctagtagtgattgggttatggagagtatgaacaaaggcactgatagttatggtgttactactggttttggtgctacttctcatcggagaaccaaaaacggtgtcgcacttcagaaggaacttattaggtattaatcatattctttgttctctaatcagaaacaattaactttaaatgttagtatatctatggtagatacgt

SEQ ID NO: 131230 - DNA, 233 bp, Arabidopsis thaliana columbia
ctggcttgcattgtttcctacggtttacttatcagcaggaaccgcgacasctgattctgatcggtggagagacaatgaaactcttcttccagatagtttscggtccattattgcaccttcgaattccgttaacaacagttgaatggtatttggtgtttacatctctctgcatcgttctgtctcagctaccaaacctcaattctatttgcgggactctccttaataggagcatg

SEQ ID NO: 131231 - DNA, 336 bp, Arabidopsis thaliana columbia
tgaagatcgacacagacagcattgtagtgccattgagtttgttgatagctgtggggataccatgtctttctatggaacaccttcaagcacaatccttctcgtacttcacttggcattgattcctcaaaacgcaaatcttggttccgtgacatcaaagagggtgacgataagactgggatgttggccgtacaaagcttgaggaacaaaaaaatggtgacaattctaaccgctacaatcgccatccttatcttcctttctctagctgcggtaactaacaacgcatttaaagccagtcatctcatcactgccgctgatgacatcttctttggctcacaa

SEQ ID NO: 131232 - DNA, 306 bp, Arabidopsis thaliana columbia
tggtggaagattggcgttcaaaggaggagatctagcgacaaggaaatcgatcgaaaagaagaagaagaagaagcagaagaagaacaaagaaaagctcgacggtgttgaggatggagcgaagacagctcctgacggttcaccccctcccgccgctgccgctggagatgaagatatatactcaattgatgcggcgaagaagaagaagtacgatgacctatttcctgtggaggcgaagaagttcggttacattccgaaagcaaatttcgaatccagggaagatgctcttgacgatcgcgtcaagaagaa

SEQ ID NO: 131233 - DNA, 180 bp, Arabidopsis thaliana columbia
aaagctccttcacaatcaatctcagcatcgctgtgtcttaaaatcactcaatcgaaattcggatttagatttgagcgaaagtcgcggcggtttttgtgattagggtttcgtaaccgtgtccgccggtatatgagatggctgaggagaagaagaataagaagaaaaagagtgacgctaagg

SEQ ID NO: 131234 - DNA, 295 bp, Arabidopsis thaliana columbia
ggaattcgaagttctcagccgattcaacacctaactctcttcacatcttcgagttcttgttcatctgagctcgtcgatcttctgtttttcgattgtttcttcataaatcagtaaatcaagctcagatttcgcgatggtttccgttgaaaagttacggcgtcgcacgaggaaatcaagcaagatctcagctgagaagactccagatcgtactckatcttcaccgattccaccggttccaccaatttcgtctccgattcaackaaattttgckackagatcatcagtttatccattt

SEQ ID NO: 131235 - DNA, 320 bp, Arabidopsis thaliana columbia
atcgtatcccaaggagagtagttaatgaagaaggcttatttgagaatccgagatacgtgagacgcaacaatcctacgtggttgcctccgcaacaagccgcagctcctttgaaacgtccttctgctgkaaccggtgtttttcttccccggcgatacccatcggccgccccttccgattccctgaaaacaccagtcaacactccagctatgttgcagcctaaagtgaaacctcaaaatctcaactttgatgagttcaccaatattgttgggccaaggcgtacagattcgattacgagtgcatgttggckagaagtacagtac

SEQ ID NO: 131236 - DNA, 289 bp, Arabidopsis thaliana columbia
ggcatccgagccacaaccatccattgcgcagtcacaaggcccaagttgaagaagagatcatttgctctggttgcgacctcgacctgataggtgcagctttcaaatgcacaaagtcagaatgcgattacttcttgcacaagtcatgttttgagcttccacgtgagactcgtcacaaggctcacccggatcaccctttgatactgctgtattcccaccttacgagtcaacttacacgtgtgatgcgtgcggtgagtatggatccggattcacttacactgctctatctgcc

SEQ ID NO: 131237 - DNA, 289 bp, Arabidopsis thaliana columbia
ggaagatggaaatgcgaatatgcaacagaattttaggccattggaggaagatcatatcgagcaaatgattgaggagctgcttcactacggttccattgagctttgcttgttttaccaactcagacgctgtgagaaatggccttgtcgttttagcgtattcttttcatttttatttttgtttccacaaaaacggcgtcgtaagtgatgagagtagtagtgagagaaggctaatttcaagacattttgatctgaattggcctcttttgaaacactgattctagtttctatt

SEQ ID NO: 131238 - DNA, 344 bp, Arabidopsis thaliana columbia
ctggttgatgtgcaaagtgaggagatgttaaaacttcgagcagctctagagggaaaacttagaaccaatggagtccttggttctactgtttcaaagtctgataaagctcaaaaacgccagaaattagctaataggaagctagagacattcgatgattatgtggatgatgcagacaatagcacacataatgtaacakctgataagctcaccaagcttgtgtccaccaaacggaagcccaagactatttctggagatgatgatttaccgcaaagagatgatattggagaactggcgtagaaagtttgagctcagagtttggctggagctggtgtgagtcatgagag

SEQ ID NO: 131239 - DNA, 301 bp, Arabidopsis thaliana columbia
tttttttttttggttgaaacttaaccattttattaaccaattgcgacccggtgacgattcatgaacactaaaaggcatatcttgagtcattttcatacaaatgcatacctttaaaaccacacaaatccgtagaacgaaactgataaccataatatctaaaaagatcactcaaataacaattttttcatcattaccaaatagagagactttgacttagaagagttcagtttccttgtgggtatggatcacacagtcagactgtgggtaagccacacaagtcaaaacataacccttctccaag

SEQ ID NO: 131240 - DNA, 329 bp, Arabidopsis thaliana columbia
atggtcagatatccaccttgccgactatgaaggacctttttctaccttcggttgtgtctcttgctgttccactagccctcatgtctttgaccagtgaggtaaatggaaaggaacaggatcctaaagatgtattggcttctgaaaagatggctccaagagggaagctagtttttggagttggccttggagcattggtttttgttccagtctttaaagctctaactggattgcctccttacatgggtatcttgttgggtcttggagttctttgkatcttgacagatgccattcattacggtgaatcagaaakacaaaagctcaaagtacct

SEQ ID NO: 131241 - DNA, 201 bp, Arabidopsis thaliana columbia
gggcaaacatcacaagtatttaccggttgtatcagggcgtggggatgttaacgcagaaaaagaacagacaaataatgtactcagcaagatattctcaaagcattcgcatgagatcctcaatgttggcaaggcgataaacatgtacaacgtcaagaaggagaagaagaagtcaggaaggtcagacaagttgaaacctaagaa

SEQ ID NO: 131242 - DNA, 284 bp, Arabidopsis thaliana columbia
gcagaatcgattagagaagagatctgttgcttgtatcgatctcaaatcgtaacccgatatatcctcatacggtgaccaataaggaagcctctgccatttccaaacagcaattcgaaaatactttccaatcttaaatccaggaggaaaattcacaacgaatgagaatcgaacatcctctgcatcaattccttttgttctatactcaatctctctaactctctctattgcacaatcgataaattaggatccttttccacatctcaatgtacttatctcgagggggg

SEQ ID NO: 131243 - DNA, 307 bp, Arabidopsis thaliana columbia
aaacacttgagttgccgtgttgatgaggcaaaaccaaacatgacggttgattcatgctgtgttaggcctagaccgcctctttttttcgttgaagagtatgacttgcgtgattgtgtagaggtgtttcatggttcgagttggcgtcaaggggtggtgaagggagttcacattgagaaacagtacacggttactttagaggctaccaaggataagttggtcgtgaaacactcggatcttaggccttttaaggtgtgggaagatggggtttggcataacggaccacagcagaaacccgtaaaggaaagtc

SEQ ID NO: 131244 - DNA, 275 bp, Arabidopsis thaliana columbia
gacgaatatcgcttccgttagctcttaatatattctcacgcatagccaacccagcatagagaaacaacagccaagcctcatagagctggacaggaaacgcaggcaaacatccaccccaataataagacctaaggattaaaagtgtggcagggaaaaaaagaaaaagaagagcagtcttgtctctgtaacgattgtattcttctttaactttaagctgaacatcttttcgcaaagctcgaacattcacaggtccacaaaacattctcacaaagcgt

SEQ ID NO: 131245 - DNA, 211 bp, Arabidopsis thaliana columbia
aatcaaagctcttattaaaggatcaaaatttttgtatagcgaaaaaccggttttcgccattcgggtagataaacatatcgtcaatagaatgaaaaatttagaactatatactaaaaaaataattctgattctatgttactggtttcatgtgcaagttatgttccttatggttcataactagaccaaaacttaataaaagtcggtttatgtt

SEQ ID NO: 131246 - DNA, 246 bp, Arabidopsis thaliana columbia
gtcaaaagcagttacttatcagagaagggaagagagagtagaaaatagatatcttttgcgtgacgctctctttgcccgtacgatcttcgggctctatgagatatcgaattttcttctcaaggtaacagataaacacgaatgttttcagaagtagaaatggctcgagacgtggctatatgtgccaaacacttgaatggccaatcgccgcaccaaccgattctatgcagactactccaagatctaata

SEQ ID NO: 131247 - DNA, 179 bp, Arabidopsis thaliana columbia
  unsure (1)..(179): unsure at all n locations
ttcatcacctatattgaggacaggagattctaacaaacttgagctaaacgtcagtttcctttactagtttccacagagaaatcatcatggggttctggacactaatggaaggatgctactatttgcaaaggcactggctatcttaaacnaagacngttttctagctcccaaaggatgga

SEQ ID NO: 131248 - DNA, 296 bp, Arabidopsis thaliana columbia
tttgtttattccttgtaaaatatatagtgagcaaatccaaatcggtgggagggagattgaagaacggtaaacggaaaatataagacgacgaagggaggcaaagtgatgaaccctactgatgcttatcgcaagcagattcgcaagagagaaattaagcgtaacaagaaagagaggcaaaaggtacgagaggattggaattttgccagccaggctcctgaacagaatcaaggatcagatcaggaagcttgatatgtaaaggcggaaggtgctttggacaaagcaagaaaacataaaaa

SEQ ID NO: 131249 - DNA, 157 bp, Arabidopsis thaliana columbia
gtggttcacggtgatgctgcagaaacaggtctcgacgacgacgacgatgacgacacaggagctagcgatggaaggagagaagcaattggaagaatgttcacgtcaaagaacttatagataaacttggaacttatagcagatatctctacatggcaaa

SEQ ID NO: 131250 - DNA, 206 bp, Arabidopsis thaliana columbia
  unsure (1)..(206): unsure at all n locations
acgtgtcttcggttttctttggccttggaaggcattagacaatgaggatcattccgcggttgttctaggnnngctctttggcgatccggctactatcgagaagcgcttccaagaagctcttgaacaaagctgttggtaatttgtacaatgtttggttgggtttattgattgtttttacgttaaaatccgcttttataaattggaaa

SEQ ID NO: 131251 - DNA, 238 bp, Arabidopsis thaliana columbia
caaagctggaaaagaggttcttggtaatgcttcaaaggttgtcctcacgaaggagacctcgaccatagtgggtgatggaagcacacaggatgcagtgaaaaagcgtgttacacagattaaaaatcttattgagcaagcggagcaagattacgagaaggagaaagtgaatgagagaattgcaaagctctctggtggagttgctgtgattcaggttggagcacaaactgagagagaactc

SEQ ID NO: 131252 - DNA, 257 bp, Arabidopsis thaliana columbia
agggagaggaagagaaagagaggaagagaaggagaagagagaaagataagaagaagaggaacaagtctgataaagatggagataagaagaggaaggagaaagaagaagaagaagtcttgagaaagtgaagaaaggagctgttactgaattcatggggcaaggtattggaattcattcagagaaacctgatatgtggaattaaccgtccagagttcacagcatggttgcttgaagttaagaggttaatttgaaagctt

SEQ ID NO: 131253 - DNA, 228 bp, Arabidopsis thaliana columbia
tcaacacacaccttcaacgagtgaggaagctgtcaaaggcgacgagaatctgagcaagacgatgttgaatggtgcgggagttgtgagcggctctgtgatggtccctatgatgaagtcgaaaccagggatggccttcttttcgatggttccaggggaggtcctcttagcttcacttgatgcccttaataaaatactagatgcaactgaagctgcagagagacaaactct

SEQ ID NO: 131254 - DNA, 223 bp, Arabidopsis thaliana columbia
actggtggcttgcttgtggtgatagttcacgaagctgaagatctagaaggcaaatatcacactaatccttctgttcgtttgctattcagaggagaagagcgtaagacaaagcgtgtgaagaaaaacagagaccgagatgggatgaagattttcagttcccattagatgagccttccataacgataagctacacacgttgaagtataagtctctcagactaatt

SEQ ID NO: 131255 - DNA, 205 bp, Arabidopsis thaliana columbia
tctagatatgtaccgagaatgtggagttgtttagctggatttattgagccaggggaaagcttagaagaggctgtgaggcgggaaacatgggaagagacaggcattgaagtaggagatgttgtataccaagctctcagccttggcctgtgggaccaagtagcatgccatgccaattgatgctcggttctttgcctttcgccaagac

SEQ ID NO: 131256 - DNA, 188 bp, Arabidopsis thaliana columbia
gcacaaatgaagagtctatcgacattggaaatcaaccaaaggatctaagccttgcaccactctcacccgatctccttctggtgacctttgagtcaggagttgtgtttcttcgtgatgggaagtagtgtcaaccatgaacctttgcagttcattgtccactgctttggcagaacacctgtaggaaccgg

SEQ ID NO: 131257 - DNA, 158 bp, Arabidopsis thaliana columbia
gaaaaccctaacggggaagacgatcactctcgaggtcgagtcctctgacaccatcgacaatgtcaaggccaagatccaagacaaggaaggaatcccaccggaccagcagcgattgattttttcggtaaagccagctcgaagcacgagacgtaggtttt

SEQ ID NO: 131258 - DNA, 176 bp, Arabidopsis thaliana columbia
aattactcaatcctctaaagatcaacatgagcagagttgaacaacaagtcattagatatccggccgcaaaggctactcccgtgggttacttacctgatccggcttcatttaacaagttccgagttccggcttcttccaagaaatctgaacaaagcaacgtaaaatcgattcttaaa

SEQ ID NO: 131259 - DNA, 106 bp, Arabidopsis thaliana columbia
gttggattaggcatctggagaaaagagctaacctgcttctatggtgagttgagattatctgtcttgagaagctggtagatttttgtatttgaacaaatttatataa

SEQ ID NO: 131260 - DNA, 188 bp, Arabidopsis thaliana columbia
ggaaagaggaagggcgaaaaccgttagactggactacacggttggcgattgcattggatgtagctcgaggtgtcgcgtatctgcacacacttgcgcatcagagctttatccatagggatctaaagccatcaaacatccttcttggtgatgatatgcgcgcttaaagctctgaacctttggaattaggt

SEQ ID NO: 131261 - DNA, 172 bp, Arabidopsis thaliana columbia
gtcgaatccaaagtttttgatcttaaccaagtcgcataatccagagaggaccaaaagaagatgaagtaacgtcagcttcaggcaggatcatgatttcgagaagaggaaagctgaggctttaaggatcagagagagtatctgacgagtcccgtgattgtgagagtcgagaaaa

SEQ ID NO: 131262 - DNA, 186 bp, Arabidopsis thaliana columbia
aagacaatgctattttattagagatctctataatgaaaaaggatctcaaagattacatgatcatgagataataaacagaaacaaaaatccaagagaagaagtaataatattaagccagccagaaacaacagtctgaataatcaaactgttgaacctaatctttaggtttcaaaaaatcgaattatt

SEQ ID NO: 131263 - DNA, 354 bp, Arabidopsis thaliana columbia
ggatgaagcaatatttcgtcacattgcatgtcttttcaatggtgagaaagtaaatgacatcaagttgcttctagcagagagtgacttggatgttaatattgggttaaaaaaccttgttgataagtctctcatatttctaagagaggatactattgagatgcaccgtttgctacaagatatgggtaaggagattgtccgtgcacagtcaaatgagcctggagaacgggaattccttgtcggattcgaagcatatctacgatgtacttgaagataacactggtactaaaaagtcttaggtatcgcatcggatattaacgagactgatggatcgtatatacatgagagtgccttcaa

SEQ ID NO: 131264 - DNA, 355 bp, Arabidopsis thaliana columbia
ggaacatcgcccaatgctgttgctgaaaggactgtcctgattcaagattgtttaaattcagttctccagtcccgtttttttcccacacttccaaatgcgttacttaggtttttatccctcaagatgcatatgctaattcttcggggttggattcattagtatctccaacaggctctgctgccatcgatgctgctacaaccagttcttcgtatggaaataccatctcgttcattgttgatattcgacctcacaaatcagtaaagcagttgctagaggctcagcattacattgcgctggatgcacagatacttgatgatggagcactctggcgagacttgtgaagctctgatgggta

SEQ ID NO: 131265 - DNA, 369 bp, Arabidopsis thaliana columbia
caggctttactctcgaatagaaagggaagtgaagtgatcttatctagtggagctattgggtcaccacagatgctgatgttaagtgggattggacctaagaaggagcttcagaggctgaagattcctgtggttttagagaatgagcatgtaggaaaaggaatggctgataatcccatgaacacgatcttggtgccttcaaaggcgcctatagagcagtcacttattcagactgttggaattacaaagatgggtgtgtatgttgaagccagtactgctttggcatctctgagagtattcatactcactatggattatgtcgacagatattgttcacatctcacagagacagagcaccgagctacatcacag

SEQ ID NO: 131266 - DNA, 302 bp, Arabidopsis thaliana columbia
attcatttcaccggaaaaactgagtcaactcagagcgagttaccattaccattaccaagaatcatttaacactactgaatacatatgggtatatgcagctcgagcgagtcgactcaagtcgcgacggtgaacgtgatcttacaagatgggaggatgatggagtttgagaatcccgttaaagtcggatacgttttgctcaagtatccgatgtgtttatctgcaactccgacgatatggacttgacgacgccgtgccgctattagcgctgacgagagctcacgttggtcagatatcttgctctc

SEQ ID NO: 131267 - DNA, 149 bp, Arabidopsis thaliana columbia
gagatcacggagacgggcgagaccttgtgcaggtatcgtctctagaatgtatcgtgcaaagtgcctttacgacctgggaggacttgacactacagacacaaggattagtaaaatgtatacataagccagttcaatgcgttatccggata

SEQ ID NO: 131268 - DNA, 154 bp, Arabidopsis thaliana columbia
gctcatcgaaagcaatgaactttggatcgttgagttttttgcaccttgggtggacattgcaaaaagcttgccccggagtggaagagggctgcaaaaatttgcagggaaaggtgaaattaggtcatgtcaattgtgatgttgagcagtcgataat

SEQ ID NO: 131269 - DNA, 308 bp, Arabidopsis thaliana columbia
gaccggagtggaagtggtcttcgcacttgaagagactggactggaagtggtctttttcttaccagcggacaagtctggcaggtaccgaaagtaactctgtagcttgccattcttcactagctgtgttgcttcatcaatcttgcctgcacccatcaaacgctcaaccacgggtttgtacatgttcgggcgagacaggagcttgtgtttgatggcctcttcggatacctcaaccgctctatcaagatcacctttcttgcagagaagagggattaacatacagtaagtcactgtttcaggagtcagaccct

SEQ ID NO: 131270 - DNA, 250 bp, Arabidopsis thaliana columbia
gatagattgaaattagagaaagaaagagaaatagaacgggagagggaaagagagaagatagagagggaaaagagccatgaaaaacagcttggagatgctgatagggaaatggttattgaccaaactgacaaagaaattgctggggatggttctacaggcgcagaacctatggatattgttatgactcccacatctcagacaagtcacattctaattctgatgtgaggatttggaaggcatactctgaggt

SEQ ID NO: 131271 - DNA, 278 bp, Arabidopsis thaliana columbia
ctcgtgccggtttttttgacatttttgtatggaaacggtccaaattaacgtgacatcgtgatttatgattgccgtgtataataaattaaatgcaggtgaggtcaatgtcaaaggaacaagtagaactactcagatctccattggacacttctttcaagaacaattcaagaccgtgtcaacccctcaacggccggagagttgagatgttccacgaccacgagcgtgtcgataaaaaagaaaccggtaacaaaaagaaaaacccaattaaaatgttttca

SEQ ID NO: 131272 - DNA, 250 bp, Arabidopsis thaliana columbia
aacactctcacttgctttagatacgaaccaatctccaactctcctctctccgcagcttcttccaatactctcaacacatcttcaatggcgtcatctcccgccaatccctccacttccgattcaatttcgaacatttcttcaattcttcccatatccatcgacgtcaatttcaaatagttcatctctacccatgtcgtcaaaacatcggaatcttccttgagcttcaaagctctcacctttaatgtcctcg

SEQ ID NO: 131273 - DNA, 302 bp, Arabidopsis thaliana columbia
  unsure (1)..(302): unsure at all n locations
ggaaanttatgggacatgcttcactcttgcaagaagtcgaatcttggttgggaaacacggtatgatatagctcttggtgcagnaaaagggcttgagtacttgcatcatgggtatgagagaccggtgattcaccgtgatgttaagtccagtaacatattgctagatgagttcttgaaacctagaattgcggattttggtcttgccaagattcttcaggccagcaatggcggtccagagtccacgcatgtcgtgccaagattcttcaggccagcaatggcggtccagagtccacgcatgtcgtt

SEQ ID NO: 131274 - DNA, 313 bp, Arabidopsis thaliana columbia
  unsure (1)..(313): unsure at all n locations
gtatccttaacctgcactgcccaacaaaggcatgctcgagttggtggacggaaaatgagcggaagcgngttcaacaagcttctaagccggcttgctgcagnagggcatcatgatctttcaaacccggtcgatctgaaggaccattgggcaaagcacggtacaaaccgctacattacgattaaatgatatgtgcatttaggtgtgagttgttcttacgacattatctgattttaaatcatgtgtactaaattcaaataaactcgagaggaaaagrattgtatgtggagccaatgttatgttgtnttatataaaa

SEQ ID NO: 131275 - DNA, 233 bp, Arabidopsis thaliana columbia
gtatttactcgatgacaaggctgtctttagcacctcatttgatgttatcaaagagttcagtagctttactaagaatgggactggaaatggatacatgggaaagttcagttggagaattgaaaatttcacaagcttagttgatcttcttgagaagaggaagataaccggtctttacatcaaaagtaagaggtttcaaattgggaaccgggattgtcgacttattgtttatcccc

SEQ ID NO: 131276 - DNA, 292 bp, Arabidopsis thaliana columbia
  unsure (1)..(292): unsure at all n locations
caaatcgccaccacacccacatgtatgtnttttcnccccacctccaccatgctactctaattctccaaagnttgagtacaaatccccaccaacaccatatgtttnccactcaccacctcccccacctnatnattcgcnttcgcctaaacctgcatataattttnnaccaccaccttacgtctacagctctccaccaccaccatattantcacctgctcctaagcccgtatacaaatttccaccaccaccatacgtgtacaactccccaccaccancatattantnaccatcc

SEQ ID NO: 131277 - DNA, 262 bp, Arabidopsis thaliana columbia
gcacgagaaagaacaatctttttaacactctctaatgattcaacgaatccaattacccaaccagaaacagcaacacatatagagatatatacgattaaacaataacataacaaagaaaccattttttctcttttgttattgacttaaacaaaaaactatcaacgaataattatccttttttgagtttttccatttcttcttcgtctccatttcatcgtcttctcgctgttctgctatattcgttcgttggatagaggagaag

SEQ ID NO: 131278 - DNA, 300 bp, Arabidopsis thaliana columbia
ggcgaaacagagaagcacaggcgacaacaacatttcgagcacgagcttaagaacatgatctcttccttaacccacatgggaggagataaggcaggacctagccaatacgatgaagaggaagatggtatcagagtcatcacactttctggatccaaccttggagccaccatgaagaccgagcttgacaacaatcatggagacagagaccaaaatggcgaccacgagcttgatttcctaagcacttatgttaatagcaactttcaaggttgtgaacaactcgttattgataggggccaagtt

SEQ ID NO: 131279 - DNA, 295 bp, Arabidopsis thaliana columbia
aaatcaatcactttctctaaatgtatcctaaacaatttagtttatacaattattccctagagaccatgagcaaggatgagaatgtggagagcaaagagacgatcagggttgataagagagtaagagaagacgaagaagaggaagaagagaagaagattgatacgttctttaagcttatcaaacactatcaagaagcacggaaacgtagacgagaagagttagctgaaaattctggcgtcgtgaggaggaaatctaacggcggagaaaggtccggtatagtagttccggcgtttca

SEQ ID NO: 131280 - DNA, 432 bp, Arabidopsis thaliana columbia
  unsure (1)..(432): unsure at all n locations
caacaattgagttattgaagnatacgtttgattgagaagcttcaacgaccgcaattgcccaaattcatcaattggagttttttataaaacaaattgcatcttaaggttgttattgttgttgttgtttatctgtctgtaatcatctttctatctgctgtctgatacatctacgaatcttatgctgtcttttgggttttcttacacaaccaaaaccaaagcctagttttgttttgacttcatttgaagcaaacctctttctttcttcagttatgtgggtttttgagctagactcgaatcagttctgatccagtcggattttgtattgagtcataaagaagggatttttgggggttgtgagtnatatgaagaagcgggaacatttgggattagggttcttcgagtggcagattatcttatgggtnatcgatttgg

SEQ ID NO: 131281 - DNA, 388 bp, Arabidopsis thaliana columbia
  unsure (1)..(388): unsure at all n locations
gtcagcaaaacacaaggcatattcctcttctcttcctcagccttatttttctgatattcagattcaaggatatatccatggcgatccagaagatcctctttgcttcacttctcatatgctcactgatccaatccatccacggggcggaaaaactaagactcttcaaagagctggacaaaggtgcacttgatgtcaccactaaacccagccgagaaggaccaggtgttgttttggatgccggcaaggatacgttgaacattacatggncgctaagctcgattgggtctaaaagagaggctgaatttaagatcatcaaagttaagctatgctacggtgcacctagccaagttgaccgccgtggcggaaaaccccatgacgagctctttca

SEQ ID NO: 131282 - DNA, 348 bp, Arabidopsis thaliana columbia
ggaggttgaagctggattctattacgcctttgctcccaatgcaaggaagtgtgttctcctccccaagtgttgaagaggatattcctatgtacagcccgttgatggagcttgacaccggtgaaggtccacctcggctacatgattctctaccacagtggatgtgggctacaaatgtagccatctattcaaaccatttcgcaaaagccaatgttcatgatgaagaaagacctccatgggggtggaccgaagatggtgcagaagtcgagagctcgttatgttctaaaatcacatctttgctggaaactccactgactgttcctagacggttgacaatcccattgattgagg

SEQ ID NO: 131283 - DNA, 434 bp, Arabidopsis thaliana columbia
  unsure (1)..(434): unsure at all n locations
cgttttttccaacgattacgaatggctgatcgtgtttctaaaaggtatggtgaagccagcggcgcgctcgtggtggtgcttttggcggtgattctttcatactcgcagaacctatctttggaaggagaaatgatatactctgtttcccgatcgtttcttcaactctctgttatcggatttgtncttcagttcatctttaaccaagagaactcaggctggatcatccttgcgtatctnttcatggtctctgtcgccggttacactgccggacaacgtgcgaggcacgtgccacgtggaaagtacgtggccggattatcgatccttgccgggacttcaattacaatgttcttgctcgtcctcctcaacggctttcctttcacttccgaggtatatgatcccaatcgccggaatgttggtcggaaatcccatgaccg

SEQ ID NO: 131284 - DNA, 399 bp, Arabidopsis thaliana columbia
  unsure (1)..(399): unsure at all n locations
cattagcaacgcaaagaaatgcctaaacgacaggctcaacggcgtttcactcgcaagactgactcgaaaacaccatccccatcgccaagctatctgctaagcttgagcaaaggccacacatgccagtacgcccaattccttcacagatctggtgcaagaactttggaaccaaggacgattacgaaaaagagcattaaaagtttttttcttggtttggngngnacccnttaattggtcttcttatttgcagacaatgtgagcataaaaaaagcgcttctagctttgtctatggntttcagagtactgtgaacataataatatgtctttttncttgccatgtaggacaacaccatgggatctttncaactttnnggaatttcatggtttttttcaanaaaa

SEQ ID NO: 131285 - DNA, 400 bp, Arabidopsis thaliana columbia
  unsure (1)..(400): unsure at all n locations
ggcgagattatctctgaggagctcctatcaaagaagagagttaaatatcaagatacaaatctcattgccccaagtaaaatgatatcgagtagtgatggtgccgttacgtcagaccaacagcaacccgtgggtagttctgacttgtctgaggcaagccaaaacgccaaaagaaagagagagtcagttttnttacagaaagaagctgtnaacattctcactcggggtgtgccagagacagtggttgccaaatgggatgaggaaatttcagcttctcagaagaggggatcanngagtgaaggcgcaanagcattngttatntagcggctgagtnggatgaagnatatgnccgcccggaagnaaaagnaggatangnatttangaggcgagctatngagggcct

SEQ ID NO: 131286 - DNA, 400 bp, Arabidopsis thaliana columbia
  unsure (1)..(400): unsure at all n locations
gcttattgctcattgtttaaatgagatattcagggtctctagtcaccctcatgatggcgaaaccagaggcgagagaaggcagaaagccagctacagttctgaaaaccgtgaagaacttgaaatattggacttccatatgtctacttcagcaaagtttcttcttctttcggcatttctcgcttcgagaaacccagcaacgctagacgcgtcaatgtttgactccacagggggaatggataatcgtaaaagaaagcggaaggcctctgagaaatcaatggaaaagaaggaaattgcagagcaggaagcagtcatgaaaggacctggaagctttccactggaaagacctatttggcgatattccaatgtatttgcctccgtttggagattctttcatttngcg

SEQ ID NO: 131287 - DNA, 400 bp, Arabidopsis thaliana columbia
  unsure (1)..(400): unsure at all n locations
ctttcattattatgtcaacaaccctcctctattgaagatttcttcaatcatcttctccacaacaaaaaaataaccctaatttacacagaaaatatgtggggaattggaggaaattactactggcgaaagaaaaacaacaacggaggagaaagcgaagggtncgttgtggtattcgcttggatgtctagcgaagaacgcaatctaaagaaccatgtcgatctctattcttctcttctttgggattctctcgtttgccattctcaatttctcaacatgtttcttccagataaagctgcagatttagcttctaatgttgtttctgaacttgtcaaggngctcaaagcaaagcccagttcctttagtgtttgcttctttctctggtggncctaatgcttgtatg

SEQ ID NO: 131288 - DNA, 400 bp, Arabidopsis thaliana columbia
  unsure (1)..(400): unsure at all n locations
cacgggcacggcaacgacaccgagcttcacctagctgctcaaagaggagacttggcttctgttaagcagattcttagtgacattgattctcagattactggtaccattaccggagctgattttgatgacgaggtagctcaaataatgacatccgtagtaaacgaggtgaatgagctgggggagacaccgctttttacagcagcagagaaaggaaacatagatgttgtcaaggaattgttgccttacacgaccattgaatctcttatgcagaagaatctttctggatttgacgctttacacattgcttgtagtcaaggccatcgatctattgttcagttattncttgagcatgaacctcaattgagtaaaacagtagctcantcaaacggaaccccacttg

SEQ ID NO: 131289 - DNA, 400 bp, Arabidopsis thaliana columbia
  unsure (1)..(400): unsure at all n locations
gnatctcaaggacgtggcttagctccgtgggaacgtaccaagaaacgtgtatggatgcgttagtggaagcgaacaaaccaagtttaacgactttcggagaaaaccatttgaaaaactcgacggagatgactagcaatgcgttangattcataacgtggctagggaaaatcgctgacaccgttaagtttagacgacgtcgtttgttggagactggtaacgccaaagtcgttgtagctgacttgccgatgatggaaggtcggagacttttggagagtggtgatttgaagaagaaagcgactatcgtggtggctaaagacgggtcggggaaatataggacgatttgtgaggctttagcggaagtngaggagaagaattagaaacctncgattatatattttaa

SEQ ID NO: 131290 - DNA, 400 bp, Arabidopsis thaliana columbia
  unsure (1)..(400): unsure at all n locations
ctctctttcaaggataataaccaaaagcttttctttttatcttctcctgcaattcttgaagaaatggatgagtttgttaacctcaaggaaacagagctgaggctgggattaccgggaacagataatgtatgtnaagcaaaagagagagtttcttgctgtaataacaacaataagagagtactatcaactgatactgagaaggagattgaatcatcatcaaggnaaactgaaacatcccctcctcgaaaggctcagattgttggatggccaccagttagatcttacaggaagaacaacattcagagtaagaagaatgaatctgagcatgagggtcaaggaatctatgtgnaagtaagtatggatggtgcaccatacttgngggnaaatagntctgngttgt

SEQ ID NO: 131291 - DNA, 400 bp, Arabidopsis thaliana columbia
  unsure (1)..(400): unsure at all n locations
ctaaagatgatttgctggaggaagcttgtaagaagtacgatgaggcaacccgtctctgcccgacgctgtatgatgcttactacaactgggctattgcaatctctgatagagcaaagatacgtggtcgcacaaaggaagctgaagaactatgggaacaagcggctgataactatgaaaaagctgtccagctcaattggaacagttcccaggcgttaaacaactggggactggtcctacaggaactcagtcaaatcgttcctcctagggagaagganaaagttgtcagaactgccattagtaaagnttcnggcggcaatcaggttgcaaatttgatttncctccgtgccatatncaacctttggnaccnctcctgtttnggttntgcaggagggcacncttt

SEQ ID NO: 131292 - DNA, 385 bp, Arabidopsis thaliana columbia
  unsure (1)..(385): unsure at all n locations
cacaaacaaatatttgctatctactctatagtttcatatacaagtaatccaaaaagatggcagttatcaagaaacacataaccttctcattggtcttgttgtgtctcattgtggtgtctccaatggctaacgctcagagtggtcttggtggtatcaatgtccccnttatcaatggggttctcttttgcaccatcaatggcgcccctctcaatggcactccggccccggctttcgctaatgcggtcgtccagctccagtgtgganacctaaacagagtcgtagcaggaacaattacggacattnccggcttatttcacgatntctncaaacggagttcagnnatccctccccacactccttaaacgatngtncgtatcgntcgtcc

SEQ ID NO: 131293 - DNA, 400 bp, Arabidopsis thaliana columbia
  unsure (1)..(400): unsure at all n locations
agcaaatacgtgctgatcttggatcccggtattggtgtggatagctcttatgggacatataatagaggaatggaagctgatgttttcataaaaagaaatggtgagccttatcttggtgaggtttggcccggaaaagtatacttccccgacttcttgaatccagctgctgcaactttctggagcaacgaaatcaagatgttccaggagattctccctttggatggtctgtggattgacatgaatgagttatcaaatttcataacttcgcctctatcctctggatcttcactcgatgatcctcccttacaagatcaacaattcaggggntaaaaggccgttaaacaataaggcaagtnacccgcnaacaatcttatccatntttggaaacatttagtgaata

SEQ ID NO: 131294 - DNA, 395 bp, Arabidopsis thaliana columbia
  unsure (1)..(395): unsure at all n locations
ctcaaaccaaaaaaaaaaatggaagctgcactgctttctcttcagcccttcccttcctccgccactcaacgacgtctctctccgtttaacctccacaatacacttaccagaccttcttcttatgctcctcttcgtgctcaaaagtctggaatcacagaaggttctgattcagcattagaggctaaagtaagtgagcaagaagtgggaatgtaccagaatgaagtagttgagagtcaaggtataaggataaggagaagaccacctactggacctccattgcattacgttggaccttttgagttccggcttcagaacgagggaaacacgcctcgtaacatcttggaagagatcgtatggcacaaggntaaagnaagttgctcagatgaaagggagaa

SEQ ID NO: 131295 - DNA, 400 bp, Arabidopsis thaliana columbia
  unsure (1)..(400): unsure at all n locations
aggagaacgtggaagctttggcggtttgtctaaatatgatggccaccggtattacgatgaacataaggggagggttttaatggtcggcgatggttctgatgttagaagaaatagtggaatttctgaaggaaatatccattctagtaggattagtcatggtgagagagatagttgtggaggagtagattataatgctcatccgaaagtagaaggacgaccaagttcgttgagcaatgccagtgatcctctctttgcttctctctatgtcccaagaaacgatgggcttntgaagatcgctgggaacttgataattcactctgttttggcgagcgagaaagcaangggtttaggaaagagaatatcactgnacagtaaaaaactanagaaccgcctttttcca

SEQ ID NO: 131296 - DNA, 400 bp, Arabidopsis thaliana columbia
  unsure (1)..(400): unsure at all n locations
aggagatccggttaagcccaacgttccatattacatcagcttcatgacgtcggattacaacatgtggatctgccgaatgcaatatggatctactgatcccaactcatgcccacaacaaccgttaatggtcactcatccaaatttagcagcaccaacaccagttatgtttgtattagcaaacaagtcagatgtcgtacgtgaatcagccaaacttaagattaagttcgtaggtccccgtcagtgtggtaaatccgggttttggaaagtagttcagagaaactcttcagaaggtgnagtattcctcaacggntctaaatctatgtcacacaatgncagcacatttgncattcacaaaactnacgggtactncaagtttactttcggtgacggtgnctntcca

SEQ ID NO: 131297 - DNA, 399 bp, Arabidopsis thaliana columbia
  unsure (1)..(399): unsure at all n locations
agcaatttgccatacagagaacagaggtattcccaatcatcagcaagaattgcaaccatgaaatgcagaagcagctcctatacacaagcattcatgtcttacctcttggattactaaagtgtgtcatactttggttttctgctcatttatcagaagaagaatctcaatccattcttcatttcttaagtttggaagattcttctcccaagaaatcatttccacgcctcttgctacagtggcttcgttttggctattcaggcaaaacctctgttgaaagattttgganacagttggatgttatgttcaaagtaagatgttcctgccaaaaggagcacactgnagnagcatcaggttcattttccaaccaaacacagctgcaactatgtaaagtatctaaag

SEQ ID NO: 131298 - DNA, 400 bp, Arabidopsis thaliana columbia
  unsure (1)..(400): unsure at all n locations
ctcaaaaactgtggagagaagccgttagatttgagtaatcgcttttgcgaggngtatcttttagatatggctgctcttcagtgcctccttcccacccaccagcctcgtgtcagtgatcatatggaacagatcattaagatgatagaaaagatcattgagaatggatgtgggtatgctgtgggtggtgatgtgttcttctcagtggacaaatcaccgagttatggtcagttatctggtcaacggctggntcatactcaagctggtaagcgtggttgctgttgactcaaggaagcgtaatcctgctgactttccattacggaaggctgcaaaatctggtgaaccaagttgggagagcccttggggtcaaggaagaccaggatggcacatcgnagtgcagtnc

SEQ ID NO: 131299 - DNA, 400 bp, Arabidopsis thaliana columbia
  unsure (1)..(400): unsure at all n locations
caagataagaagaaaccaaactcgcaaagaaacaaaaaggaaaaaaaaaaaaaaaacganttaaaaaaagangaaataaatcctcctttttaacacctcattccctctttctccggcactcaaaagngaccaaagangaaaactttagctctcctttttgtgttttctctcttttctttgttggtgttccgncaatggaggaagaaagtagcagctggttcattccaaaggttcttgttctgtctgtaatcttaagtcttgtaatagtgaagggtatgtctctgttatggtggagnccaagaaagattnaagancatttctctaaacaaggaatttcgaggtcctccttatcatttcnttcatcggnaatgttaaaggaccttttttggnatgatgctta

SEQ ID NO: 131300 - DNA, 400 bp, Arabidopsis thaliana columbia
  unsure (1)..(400): unsure at all n locations
aggaggatttggaccggtttataagggtgttctcgctgatgggatgaccatagcggtgaagcagctttcatcaaaatctaagcaagganaccgagaatttgtgactgagatcggtatgatatctgcnctgcaacaccctaatcttgtgaaactttatggttgttgcatcgaagggaaagagctcttgcttgtgtatgagtacttagagaacaacagtctcgntcgcgcactctttggcacagagaaacagagacttcacttggattggtcaacaaggaacaagatttgcatagggattgcgaaaggattggcctatctacacgaggaatcanggctgangattgttcatagaggcattaaaagcggcaaaatntgcttcttgatcctncntcttaaccgt

SEQ ID NO: 131301 - DNA, 400 bp, Arabidopsis thaliana columbia
  unsure (1)..(400): unsure at all n locations
gattttcttgactacttggaggactatgcacaagactgggacaaagcgtttaggaattggatttttgagtcaagacaatggaaagaagataggaggagttctcaaacctattgggatcaatggaatgtagtaaagaggcaaaagggagtaattgcaaggtcggtccttctcagaccaggtggtcgtttagcatgtgaattgtcgcgtcacggagttattctccgtgttaataactggctcttctgccacggtggtctccttcctcaccatgttgcatacggcatagagaggataancagagaagtctctacttggatgagaagccctnctaactatgaagacagtcctcagatgccgttcattgcgactcgtggatatnacagnntagtctngngccgct

SEQ ID NO: 131302 - DNA, 400 bp, Arabidopsis thaliana columbia
  unsure (1)..(400): unsure at all n locations
gtgagcgcttctacatgaaaatatggatttggcgagtgatattcacagaaagcatcaaagccctatagagtcaaaggtnaatcctccttcgtcaggttgctgttgtgtgagtagtcagaaggacataccatcaagaatattaaacttcaataaggatcctgaagcaggattagattgtaaagagagaatacaggcagactgttcaccagatagcggcggaaaagagactgatcctctgttaaacaaagaggttgtcatgaacgtaaatgacataggngactggncaaggaagtcgtgtataaaaacgcactcagcttttagcatttcaaggtcccgtcaaactatgttcttaatcgctacgttcgntgtctnttttgctgtctgtgcgggttctcttcca

SEQ ID NO: 131303 - DNA, 400 bp, Arabidopsis thaliana columbia
  unsure (1)..(400): unsure at all n locations
ctagnaagctctttatcgccaagctaaggatgcgtattacaatggcaagcctttgntagttgntgacatgtttgacagagttgagctaaagcttcggtggtatggttcaaaatctgttgtcaagtatcctcggtgtagtctactaagacagtcaacatatgctgatgcagaggatgatgcatcgcaagtnctcctgttagctaccgtatggattatgattttcttatttggtagttcggcatgtgttttacccacgatatatggcgtcggcctggtttatggaggagatccgtttgactcagggcttgtctatagcagtcagttgtcatcttctgtgcctattttgtcaaagtttaatggcatcctcctctccgtgctagggcctgcttttggntatccg

SEQ ID NO: 131304 - DNA, 400 bp, Arabidopsis thaliana columbia
  unsure (1)..(400): unsure at all n locations
gtaactgatgttcaccttgtcctggacccatggactagagaatctcgcggatttggttttatctctatgaaaagtgttggtgatgctaaccgttgcatcagatctctagatcactctgttctgcagggccgcgtcatcactgttgagaagtttctgtggcagcaggtctgctgtttgtagcagcagtgcttcaccaaatagcaaacgttgcaacagttcaaacacatcaagtttcagacatttagggcaagacgtcgtagaggacgtactccaactccaggaaagtacttggggctgagaactnctcgaggacggcataagtctcctagctactctccccgcaggtctgttagctgctctcgtagtcgtagtcgaagctactcaatctgatcggggcaga

SEQ ID NO: 131305 - DNA, 400 bp, Arabidopsis thaliana columbia
  unsure (1)..(400): unsure at all n locations
aacaaagctaaccccactttcctcttcatatttaatctctctttctctcctttcttcaacaaatatctcctgctcttacatctgagtctttttctttctaaccttctgattcatgagtaatcatatgtccattatgaagttcttgaatcaaatcctctgtctctctcttatcctctccatatccatgactactctttcctttgctcagacatgttctaaatacaagttctccagcaacaatgtctttgactcttgcaacgatcttccttttcttgattccttcctccattacacttacgagtcttccaccgggagcctccacattgcttatcgncacactaaggtcaactctggtaaatggggttgcttgggctgtgaacccaacggctacggggaatgg

SEQ ID NO: 131306 - DNA, 400 bp, Arabidopsis thaliana columbia
  unsure (1)..(400): unsure at all n locations
caaagtccaagaacgtcagaaccgtgtttgcaccacagttgcaatcgccatagtcgctgaaacatgctctcccttcaccgtcttacctgctttgatgaatgagtaccgtgttccagagctaaacgtccaaaatggtgttctgaaatctctctccttcctcttcgagtacattggagagatgggcaaagattacatatacgcagttacaccgttgcttgaagacgctctcatggacagggatttggttcatagacaaacagctgcttcagctgtgaaacatatggctctaggtgtagctgggttgggatgcgaagacgccttggttcacttgcttaacttcatttggnccaacatttttgagncatctnctcacgncattaacgcagtgttggaagccatt

SEQ ID NO: 131307 - DNA, 379 bp, Arabidopsis thaliana columbia
  unsure (1)..(379): unsure at all n locations
ctaaccacgacacttgcactgacggattcgatgaaattgaaggtcaaggaggagaagtgaaggntcaagtgatcggagcggttaaagatttgtcggagatggtgagtaattntttggctatattcgccggaaaanttaaggatttatctngagttccggtggtgaataataggaagttacttgggactgaagaaacagaggaattacctaattggttgaagagagaagacagagagcttnttggtactccgacgtcgncgattcaagctgatatcacggtntcgaaagacgttagcggnacgtttaagacgatcgcggagcgatcaatgaaagnctncgnagcatagtagccnccgatttcgcancttacgtttaagca

SEQ ID NO: 131308 - DNA, 400 bp, Arabidopsis thaliana columbia
  unsure (1)..(400): unsure at all n locations
acaagggaaatgagacggtcactcttgatttggggcgttctctgtttcgatcagattccgtaacagatacgagactgaagctcagcgctttggtcaaagctttggaggagagtattccaaggcaaactgtgacaatgcgtcttatcgctgagagtttaatggattgcgtgtcaaagaagaaagacagttggattataatcgagggcagggacacaaccgcgaagaggagagtagctcgtactgtatctgaatctgttttcggatctttcgagtctctggttcatattgaccttaagaagaaaggaaacgagtcaaaggccagcccggcaacgctacttgcttatnaattgaagaaccctnagaaggttgtgttcttgattgaagacatnnntttggcaga

SEQ ID NO: 131309 - DNA, 400 bp, Arabidopsis thaliana columbia
  unsure (1)..(400): unsure at all n locations
gggaggaggatggtgcaataatgtaacaaattgcgttagtcggatgcatactcgattaggttcatcgaagaaaatggtggagaaccttgctttctcagctattcttagcaataaganacaatataatcctgatttttacaattggaatagagtgaaagttagatactgtgacggggcatcattcacaggngatgtagaagcagtgaaccctaggtgctcgagtttggttagccgttatgcaaganctgctagctaaaggcatgataaacgccgagaatgctgttttgtctggcttttctgctggcgngttagcttcgctgattgcaatttgnngatagatttcccntgctctatttaccnaatgggaaccaanagtnaaaatcgtcttnnaagattnctg

SEQ ID NO: 131310 - DNA, 382 bp, Arabidopsis thaliana columbia
  unsure (1)..(382): unsure at all n locations
agcaaagatacattcagagaggaaatggaaagctccagatagcacatctactgattcttataccaggttcatggaagccctttacaatttacttgatggctctagcgacaatacaaagtttgaagatgaatgtcgagctattatcggagcacaatcatatgttctcttcacattggacaagctagttcaaaagtttnttaagcatcttcacgcagtcgcagctgatgagacagacaccaagcttctgcagctatatgcatacgagaactacagaaaaccaggnagattctttgatatagtgtaccatgagaatgctcgagcccttctccatgatcagaacatatacaggnttgaatattcatctgcccnaacccgtttcggg

SEQ ID NO: 131311 - DNA, 300 bp, Arabidopsis thaliana columbia
  unsure (1)..(300): unsure at all n locations
caccgaagagaattctacagctgttaaggangacggtggaagttctatctgatgtttccgcacctgatttggcattgcgcctctacttgcagtgtgctcaggcagcaaataactgtgagttagaaacagttgcttatgagttcttcacaaaggcatatcttctgtatgaagaagaaatttcagattcaaaggcacaagtaacancactacgnttaataatagggtcacnccagaggatgcgtgtatttaatgttgagaacagcgatactctnactcacaaggcgncagggtattctncca

SEQ ID NO: 131312 - DNA, 314 bp, Arabidopsis thaliana columbia
  unsure (1)..(314): unsure at all n locations
ccgaaccaacactgtagccaatcaatggcgaatgaaatgnctttgttagcttataatcgtgctcttaagctttctaagccaggttttttaactttaccatttccttctttaacattgttgtgttgcttagtaacgttttgttagttgatttcaatggtgagagtggtggttttaactttcatatcatgctttactcgggtatgtacgggattagacatagagatcttggttataacttgctaatttggtggaaggatgtncggttctnggtnnttggttttactggaaccgttagcaacttctcngttccaaag

SEQ ID NO: 131313 - DNA, 411 bp, Arabidopsis thaliana columbia
  unsure (1)..(411): unsure at all n locations
gaagttgttttgactgatactttggagaagaagcaagttgagacctatgtatgggcaaacaaggatgatcctaatttgtaagcttcacatggataaatttatcgaggcgtcgacgaaattcatcgagtggaagaagaatccggatgggagaagtagggaagagtttgagaagtttgtattcgatgatcctcccactgctgtttgaattctcctttcatatcaagctttgtaaaagatcactctattttactgcgaataaaaaagggtcttaatcttcaaagacaataaaaggctttgtgagttgaggaacacaaagatgttgttgtatctatattgtttatgagcattgtggtgtatgtgaatgttgtttcatccatttttagtgtatttgagtttanagcaaaaaaaaaa

SEQ ID NO: 131314 - DNA, 502 bp, Arabidopsis thaliana columbia
catctcccacaaaaatggctctctcacttctttcagtctttatctttttccatgtctttaccaatgttgtttttgctgcttcaaatgaggaatccaacgccttagtttctttaccaacgccaacacttccatcgccatctccggctaccaaaccgccgtcgccagctctcaaaccgccgacgccgtcggcttgaattcaagccaacaacaaacaagaactcaaacacttcataactaaacatcctttaaagccttttcaaaaactcaatcatgtcaagcaactgcggaagctgcgactgtgctgacaagacccagtgcgtaaagaagggaaccagctacaccttcgacatcgtgaggactcaggagagctacaaggaggccatgatcatggcgttggtgccgaggagaacaacgcaaattgcaagtgcaagtgcggctcctcttgcagctgcgtcaactgcacttgctgccccaactaatgaggttctttaatcaaatgtat

SEQ ID NO: 131315 - DNA, 374 bp, Arabidopsis thaliana columbia
  unsure (1)..(374): unsure at all n locations
ttcgaggaacgccaagcgcaccaataacctacctggtgggctttggggtccaaggagagaggttagggtcgatgcgctacagcgctaacgggattttcacgtggcagagagtggccacgtgggcgggtcccacgggacgggttttacaaagtacatccgggtttcattcgtcttcatcaaaatccggtatgtagaaatccggtggaacctaagagattcaagtaaaaaanctgatccgtgttagatagattaaagcatcaatgtgtcctatgatgatctgagtttacctcctgcatctgtacgcttggagcgtgttgaatgtatcgcaaattctccaaaatctgcactttgatcganctgnatgtactttgaat

SEQ ID NO: 131316 - DNA, 437 bp, Arabidopsis thaliana columbia
  unsure (1)..(437): unsure at all n locations
aagcgttcaatatgatgaaaagtttggctagtgcggttggagggaagacggcgagggcatgtnatagctgcgtgaagaggcgggcacgttggtattgcgcacgtgatgatgcctttctttgccatgcttgtnacggttcggtccactcggcaaaccctcttgctcgtaggcacgagagatttcgcttgaaatcggctagcgccggaaagtatcgccatgcctcgccgcctcaccaagccacgtggcatcagggatttacacgtaaagctcggaccccacgtggaggcaagaagagccacacgatggtttttcatgatcttgtgccggagatgagcacggaggatcaagcggagagttacgaggtggaagagcagctcatatttgaggtgccggtgatgaactccgatggttgaggagcaatgctttaaccaattcct

SEQ ID NO: 131317 - DNA, 416 bp, Arabidopsis thaliana columbia
  unsure (1)..(416): unsure at all n locations
cttttatcaaggaacggataggttttggtaaagctgaatctnttctctgccttgttcaacctctgacttnaccaccgtctccggcgatgattgaaggtggtgagatgagtcagaagaagaaagaggaagaagaaggcgagtctcagatgacgcagcagctgctacaaccgcgtattactggaacgccactttacggtttaagngtttataacgcaacgctggacacgtggcaccgagtcgcgattcctgnacggattcctttgttctgcgaatgcgttgcgattcaggacgcggggaaagtgttgttaatcggcggttgggatccggagacgttgcagnctntgcgagatgtttttgttctggatttctttgccggagaaggnagcggaagaaggttcagaagaggcaggcccgat

SEQ ID NO: 131318 - DNA, 444 bp, Arabidopsis thaliana columbia
  unsure (1)..(444): unsure at all n locations
atcagtaaatcgcagcattcaaaagatacttcatcaaaggttagcaggtggaatgataccaagatattttctgatgtatacgcggacagtgaggacagtnacggagacgacatggatgcggagtctcatggccgcagcaaggcttcctctttgttaaaatccaaggcatccgctttgagatccaagaaaagtcggaaccagagtcatcttgaagtggatgagtcagatgatgaaccgcttgacttaatggatcagcacaaaacaagattagctcttcggtcaagtgaacttcgcaaacggaaagctgactcggatgaagaagcagagtttgatgtggaagggcggctagttattcgtgaaggngagaggtcttaaaagganggactatctgatgcagattcagattccaaaagtagcaaggcagccgttctttggaactcatcc

SEQ ID NO: 131319 - DNA, 422 bp, Arabidopsis thaliana columbia
  unsure (1)..(422): unsure at all n locations
gagaaatcctggtgaacttagatgctctccttccgagttcttcatgctctttgatgttgataatgatggtcttatatccttcaaagagtatatattctttgtgacattactcagcattcctgaatcaagcttcgcagtggctttcaaaatgtttgatactgacaacaacggggagattgacaaagaagagtttaagacagtgatgagtctgatgcgatctcagcatagacaaggagttggccacagagatggccttcgaacagggttacatatgaccggttctgtcgaggatggaggattggtagaatacttctttgggaaagatggcagtcaaaaactgnnacacggcaanttcactaagtttatgaaagatcttactgcagagatgctgaggctggagtttgcacattatggctttaacg

SEQ ID NO: 131320 - DNA, 400 bp, Arabidopsis thaliana columbia
  unsure (1)..(400): unsure at all n locations
ggttcagaaagggtttacacttgaagcaaaaaaagatggaaaagatggagaaacaacaagtcagagaggctactaatcccatggaagctggaggttcaggtcaaaatgaaaacggagaaaaccacgagccgcctcgacttgctaccttgaatgctttcgatatcatcgccttgtctacggggtttggtctggcaggactttttggggatgtatatgacaagcgagaatctaggttcgcgtcgcaaaaacctgcttcagagatcatttctaagctagtagaggttgccaagtgcctgaagctgaagataagaaagcaaggcgcaggcttnttcaaactggnaagagtaaaggaaggaaaaaacggattttnacgatggatgcagngatattccaagtgacg

SEQ ID NO: 131321 - DNA, 399 bp, Arabidopsis thaliana columbia
  unsure (1)..(399): unsure at all n locations
gaggattcaagttttggtctgcgatcgtgaaatttacgcagagagagatcagaatcgaagaaaacattgcaatataaaagagtcaccttcgagttcgtgtctcactccgataaagcaatgagtctattcgggcttggaagaaatcaaaagactttccgtcctaagaagagcgcaccatcaggaaccaagggagcagagcttcgaaagcatatagatgcaactttaggtagtggtaatcttagagaagccgtcaaacttcctccgggagaggntttaaacgaatggcttgcagttaacactgtggntttcttcaatcaggtgaatctnttattttggtacactttnccgcgtttttncanccccgggnactnttcttccaatnnttcttggtcccncgta

SEQ ID NO: 131322 - DNA, 400 bp, Arabidopsis thaliana columbia
  unsure (1)..(400): unsure at all n locations
gttgagtctcctctctttctgaaagcagagagattcgatttggagaacaagggctgagaagagcagacacagcagcgagaggaagcttcttcgactgcgacgcttttgaagagaacaagatgttgcctaggaatgctactgataagatacaaggaaatgtgagcaagccttgcttttggaagtctctgtctccaggacaaaactggaaatctaaatccatgaggagttttccggaagagtttntgaaaagcacgnccggggcttttnagcacagagttgtgttcaagtgttcgntggggcaattctttngcaactnttgctngtgcnagaaggaaaagatcttttttattnttagaagaagattttggatnagtttttnggtgncaaccntttttggncc

SEQ ID NO: 131323 - DNA, 400 bp, Arabidopsis thaliana columbia
  unsure (1)..(400): unsure at all n locations
cttcttcttcttcttcttcttcttcttcctcctctctcgtcggatctctctgatttagtgatttttcaaatttcaagttttcttcacctttaattttgtgtctcgttgatctctctttggacattctgctttggattctggaggcttctcattagatctctattagtgggtttaggtcaagttcttgaaatggataaggagaaatctcctgcaccaccacctagtggaggtcttcctccaccatcgggtcgttactctgcgttttcacctaatggaagtagctttgcaatgaaagctgaatcatcttttcctcctttgactccaagtggnagcaatagctcagatgctaaccgattcagncatgatattaggccnaatgccggataaatccacctaagaa

SEQ ID NO: 131324 - DNA, 309 bp, Arabidopsis thaliana columbia
  unsure (1)..(309): unsure at all n locations
agattccaaggaggagagtgcgtgangtgnacaatggaaactgacaaaagatggtctctcgccgggaaaacagctctggtaaccggcgggactcgtggaatcgggagagcagttgtagaggaactagcaaaatttggtgcaaaagttcatacttgttcaaggaaccaggaagagctaaatgcatgcttgaatgattggaaagcgaatggtttagtcgtgtctggttcggtttgtgatgcttcggttagggatcagagggagaagttgattcaggaagcttcttctgccttcagtggcaagctcaacatc

SEQ ID NO: 131325 - DNA, 400 bp, Arabidopsis thaliana columbia
  unsure (1)..(400): unsure at all n locations
gaaacatggcatttccagaaaccaaactccaaatgccagttagatctataagtcttccatcaagaatccaccatccttctgctaagtttcaagctgctctctctcagattcatctctttcaaaactcatctgattctcaatctcttcacgcctcgttactcaacctctctgagctttaccattcccttcaccaactcaatcactctcttcccacagctcaagctgaacattctcttgacgtgtcagccacgttactagactcttgcgacgcagcgagaaacctagttctcactctcagagagcatctccttaatcttcagtctgcattgngaggagaagncaaatccatgggagttcagatcanagagtanttttcctttaggaaggagntcanganagg

SEQ ID NO: 131326 - DNA, 400 bp, Arabidopsis thaliana columbia
  unsure (1)..(400): unsure at all n locations
aagagaatggcgtagaggatgatgaagaggatgttcgccttaattttaatctgtcggtgaaagagttgcagaggaagatactgaatgggttttggttgaatgatgataatgatgttgatctgagattggctcgtttggaagaactgatgaacagaagacctgcactggcaaacagtgtgctccttaggcagaatcctcacaatgttgagcaatggcatcgtagagtcaaaatatttgagggaaactcagcaaagcagattctcacatacacagaagcagtgaggactnttgatccnatgaaagcagttnggaagcctcacaccttntgggttgcttttgccacgttgtatgtaaaccacaaagacctcgtcaatactaggaggtgattttttnncaaaag

SEQ ID NO: 131327 - DNA, 260 bp, Arabidopsis thaliana columbia
  unsure (1)..(260): unsure at all n locations
gtgtgattatggttatctgaattcatgtaatttgaagggattttcacgagctgtgatcgggtcatgaatgcgtgtntgaggacatgcttgaaccaaggggagcggacataccaatattgttcctggttttggttgtacttcctgtggtagcttacattttattaggaaaatggagtaacatttctgaaaaaagagtaagggctaacttgctggctcagatggcagctgaagaagctttaagagctgagaccgctggttaa

SEQ ID NO: 131328 - DNA, 263 bp, Arabidopsis thaliana columbia
  unsure (1)..(263): unsure at all n locations
gcaaataaataaaaataaagagatgggtatgatgagatcctcaagaacgatggggttagggcattgcatggtttacgttgtggtcctaagtgccattgcggctacagtgacatcatacccttactcctctccttactcatcccctcaaaccctacattacaattntcccagccatgaacacaacagccctaagtacgcgccacatccaaanncatatgnttatatttcttccaccacctccatcatactattctccttcttcc

SEQ ID NO: 131329 - DNA, 296 bp, Arabidopsis thaliana columbia
  unsure (1)..(296): unsure at all n locations
taagagtagagatcgggttaaagaaaaggacaaggaaaaggaaagaaatagacataaagatagagaaaatgagagggataacgagaaggaaaaagacaaggatagggcaagagtcaaggagagagcgagtaaganaagtcatgaagatgatgacgagactcataaagctgcagaaagatatgaacattctgacaacagaggtctgaatgaaggtggcgataatgttgatgctgcatcaagtgggaaagangcatctncgttggaccttcagaatcgcattttgaagatgagagagg

SEQ ID NO: 131330 - DNA, 406 bp, Arabidopsis thaliana columbia
  unsure (1)..(406): unsure at all n locations
caacccttttggtacttctctacgccatccatatatatctatatcatataattctcttatataagccttatgccattgaaaaactggcgagtataattagcaaaaaggatcatcaactttgattttttttttatcaagttcgtgatgttcatagagggttgaaaacgaagatgagccaggggatccgactgaaaggatatggtacctctaatcccagtgtagtattgtgttcgtagtcttctcaaatcggagaccaaacaaagtaagtaagtctcttgtccgtctccgttactcgaacctcattaagcttatcatcttccacgtaaaatatgggattatagttttacattcaattgtatcatatatgtnctaaagaattccntaagggtttgatggtttttataag

SEQ ID NO: 131331 - DNA, 312 bp, Arabidopsis thaliana columbia
  unsure (1)..(312): unsure at all n locations
tttaagaatggtgctcttcattacattgatttcatccaacagtcacatcctgctattgcatggggaaatagaacccgtgttatattggatgtcggatgtggagttgctagctttggtggttaccttttcgaaagagatgtgcttgctttgtcatttgctcccaaagatgagcatgaggcgcaagtgcaattcgcgctggaaccgtggtatttcctgcaatggtaaaaggtatggggaccnaaaggttacccgtttcccggtcctgttttgaccctatcccntgngctcccntgtaggggcccctgggaaatt

SEQ ID NO: 131332 - DNA, 476 bp, Arabidopsis thaliana columbia
  unsure (1)..(476): unsure at all n locations
aagnaggagtgtatcaccatctcctgtgaggtccagaagaaaacgctcttctccatccagtgatgaatcctctgatgattcaaaaaggaagtcatcttcaaaaagaaagaatcggtcaccatcacccggaaagtccagaagaaggtagctttctaaacctattagcattatgagatcactggtgtttcttctatatgtttgttagtctatattagcactagactctgtgaagttaaagaactattgaaagcaaaaagtttgacaaaaagacaatgggtaagccaagcggagtagctagtaagaaaactcaccacaaaaagtatcatatatgttttgattgtatagacatgtttcttcgcggtcaccacatagcaagcattctcagcacaaggacactctctactcttctcatgncaaatccaggtatgtaggctgtttcttctggcttaacaggtgggtaaagctggttaaaaaca

SEQ ID NO: 131333 - DNA, 463 bp, Arabidopsis thaliana columbia
  unsure (1)..(463): unsure at all n locations
gcatgccttcgcaggcaatcccttgaagtccaaaactccgaaatctaccgatccattctcacccacctccgctttcgaatctctgaaaaccctaattccagtaatccctaatcactcaacaccttcccctgattttaaagtccttccctttagcaagggtcgtccactggtgttctcaagcggtggagatgctaatacgacgccgatttggcatctgggttgggtcagcttggctgattgtaaggttttgttagcaagttgtggggttgatctgaatgaggactcactcgtgtatttaggacccaagttggaagaagatttggtgtattgggctgttgatttggcagaggatggtttcgtttctgaattgggaggtaggaagttgtgtttttgttgagcttcgaaccctaatggtagctgctganttgggcgggtcaacgtgctatggatgagttggctaatt

SEQ ID NO: 131334 - DNA, 526 bp, Arabidopsis thaliana columbia
  unsure (1)..(526): unsure at all n locations
gatcaaatcgtcgattcattgatctggcttggaataagagatatggtaaatgaccttaggaaaaagaaattgaaactacggcctgttacatatctaagtggaacacaaggatctggatctaatatcccacatggatatatgtggagtcctcaccttgtaccaaagccaaaaggtagtatgacgcattagcttactgatgtaataatgatgtttttatatttagatctttactcttctctctttttttttctcagactgggggcctcaaattgatgtagtgggattttgctatcttgatcttgcatccaactatgaacctcctgcagagcttgtggaatggctagaaagctggtgacaagcccatatatatcggctttggtaggctccctgtgcaagnanccagaggcaaatgcagaaatcattgtggnagcacttcaaaggactaaaccagagagggatcatcaacaaaggttggggtggccttggaacttgaaagaccgagggcttttgttacttgttggtaatg

SEQ ID NO: 131335 - DNA, 464 bp, Arabidopsis thaliana columbia
  unsure (1)..(464): unsure at all n locations
ctcccctgagtaaccaaattcaatggccgacgattgggatctccacgccgtagtcagaggctgctcagccgtaagctcatcagctactaccaccgtatattcccccggcgtttcatctcacacaaaccctatattcaccgtcggacgacaaagtaatgccgtctccttcggagagattcgagatctctacacaccgttcacacaagaatctgtcgtctcttcgttttcttgtataaactacccagaagaacctagaaagccacagaaccagaaacgtcctctttctctctctgcttcttccggtagcgtcactagcaaacccagtggctccaatactctagatctaaaaggaggaagatacagcataaggaagtgtgccatgtagcagcagaagcttttaaactccgttgtctgggcatggcggaagtaccgggcagnaaccatcaagggtcaccatattccag

SEQ ID NO: 131336 - DNA, 316 bp, Arabidopsis thaliana columbia
ggattatcagactgctgcattagctatcgtcaatggggtctttaggatattcgatttcaatgatagcttcgctgagtccaactttatggagtcaaggcttatctcttcgatgggttgtgtctcgatgactgttgctcctagttttcttcagtctctgtattttcttcttcactaggacaacaaggagggaccgaactttaaagcttagatcttccatgtctccgggtatggtaacaacgctagattccgatgttggcatcgggtcttctgcaactactaaaaggtgcttgttccaattggatatgggacggaggtt

SEQ ID NO: 131337 - DNA, 302 bp, Arabidopsis thaliana columbia
ctgacttaaggatgaacctagtgatactagtatctttcttgctcgttctcccaatgttttcttcagggatcgttgagactttgcatcatgacaacatcaaccgcaagttaaagagatggtcatgaatggaagaagaatcgatctggagatggactaacgctggccgcatctaagacctccaagccatccgacctacatcagacacagttgatgaggttgtgacaaggaaccaactgtctatacaagagactatgggactggtctccagacatccaacgacatgcatatgtactctctctctc

SEQ ID NO: 131338 - DNA, 340 bp, Arabidopsis thaliana columbia
ctcggcctgtacactgaaatcggcaaaaaggccagagatcttctgtacagggattaccaaggagaccagaaattcagtgtcaccacttactcttcaactggtgttgtaagtttttattattgtttttatttctgtcaattctctatttgttggtgcgatggttattgttagtgataaattgagatttgtctagtttctgttatgtcaattggttgtacagttgtttcatgtgtactctcacttgactcttcttgtgtcgatggtgataattgtaggcgatcactacacggacacaaggagctgtttggtgatgtcgtaccagtgagacacactcctgctg

SEQ ID NO: 131339 - DNA, 327 bp, Arabidopsis thaliana columbia
gaagaatcggaaatttgagaagacgattaggtatgcgtcgcgtaaagcttacgtctgagatgaggccgagaatcaaaggacgttttgctaagagaacagattcgaggaggaatgatggtggagacgtcggagtttatggcggattcggtcgttgttccgagtttctgatattttctcggtgaaagaaacatggtagtagtatatcggttaatagcagattaaggatattaaactaaatgtttcctgatttaatcaggctagtatgtagagatgtgtttgattatctacatgatctaatatatagttactatgtgactataattcgat

SEQ ID NO: 131340 - DNA, 318 bp, Arabidopsis thaliana columbia
gcaaaaaaagatgcagatcttcctgaaaaccctaacgggaagacgatcactctcgaggtcgagtcctctgacaccatcgacaatgtcaaggccaagatccaagacaaggaaggaatccaccgaccagcagcgattgatttcgccggaagcagctcgaagacggagctacttagccgattacacatcagagatcacgcttcacttgtgcttcgtctccgtggaggtgctaagaagaggagagagacctacaccaagcctagagatcagcacagcacagagtcagctcgctgttcttcagttctacaaggttgatggttc

SEQ ID NO: 131341 - DNA, 348 bp, Arabidopsis thaliana columbia
cgagactggacttggtatgacctctctttatgaagttctgcgccctctactagaggattacacggtcgaaatgttaaacgatataggcagtcttgatgatgttctgaccgatgagaatctctctgatgaatcgacgagtccaagttgccattgcagttagctatcgtaggtaagcctaatgttggaagtcaccttctcaatgcattgttggaagaagagcgtgtattagtgggtccagaagctggcctcacaagagatgctgtgagagttcagtttgagtttcagggtaggaccgttatctggttgatactgctgggtggttggagagaacagagcgagacaagggca

SEQ ID NO: 131342 - DNA, 310 bp, Arabidopsis thaliana columbia
ggagaattaaaaaaaaaaaaaaaaaaaacatgagagaagttccacacgtgtgaaaggtgagaagaaaaatcaatagagagatcacacacgtatatagagacaaagcttcaatcaaaacgtgagaaaggaactatatgaagaagatttgatagcattttttttttctattggaaggtgatagatttccagttaagtggtaaaacagaggatccttttcagagaacttagtaaagagcttgaacttacaatctccaagatatcaagaatctctagctagtagattcagttttttttttttttttatagctat

SEQ ID NO: 131343 - DNA, 323 bp, Arabidopsis thaliana columbia
ctgtcaattctaaagctaagaaatttatcggcactaagatcggcggcaaatagtgcccggatcggagtttcatcgaggggtttctcaaagctcgcgaaggcactgacataacctcggcggcgttcggcgtttctctccagaaagctcgcagctgggacgaaggtgtttcctccaaattctccaccacgccattgtcagatatcttcaaggttcgaatctctcttttctgacaatttcaattcagagggggatttcaatttctgacaaacgttgtggatattgattggaagcagggaagaaagtcgtcatcttggtcttcctgg

SEQ ID NO: 131344 - DNA, 330 bp, Arabidopsis thaliana columbia
ctaagcaaaagctcttgcagaacctatttcaaaatcagtctcagagctccagctctctctagccgaaacagagtcctcgggaaccctctcaagttgcaatgtgcttctagcggttgagccagagcaagctgagcttcttgaccgttgttgttttggcagactcgttctatcggcagagaaaatcaagaaatggattcagttatcttttgaagaagctttctttttgcattacaatctcaatgcatcaaatctcacttcaaggtcgttgcttggagaatgaagtagacacatggctctacatgaatctttgaccaacttcatgtttcaagc

SEQ ID NO: 131345 - DNA, 306 bp, Arabidopsis thaliana columbia
cgcaagaacaagaacaagaagaagaagaacaagacaagaagaaacaaaagtacccatgataaacacacaagcaagaacccaagcgtattggtaatattgagtactccaaatagacgcatatgcgtcgtgcacgagaagtgtccaacgcagtctttcactttagagctagacacatgagctatgtcttgatcccgagacagagagatcaagagatcagagttctgcgtaagtacacagctcttggactgtatgagagatctcctctcaactatcgtgtgccgtgtcgtagcacacgtatgcgacgat

SEQ ID NO: 131346 - DNA, 306 bp, Arabidopsis thaliana columbia
agctgatccatatttcagtggtttgtcaaattcagagcgtgaaccaacaacacagccaatttcaaagcttgaatttgactttgagagaaagaagttagttaaagatgatgtcagagaattaatttaccgagagatattggaatatcatcctcagatgttggaggaataccttcgtgtgtgatcagcttagcttatgtaccagtggtagacgattaaagcattgctcactgagaaatcagtaacagagcgcgagagagagtactgcactacagactcatgctctgcagagagagagtctgctcatgt

SEQ ID NO: 131347 - DNA, 299 bp, Arabidopsis thaliana columbia
attattacttggagaagaatctggatgctagaacaaaggagctagagagagaagcagagctagaagagaaagcaccaaaagtgaaggcaaagtcaaagatgtcaaagcagacaaagagcaggagagcgagtgcaagcatttcacagctaacagagtcaagctagcagactccagagtggactgacaacttgaactgaaggagtcaggtttataaaggtcttcttacaccggtctcacaatcggatcattgtgaatgagtatatgagatatcttgagatgcgagagagagtatagtgtta

SEQ ID NO: 131348 - DNA, 360 bp, Arabidopsis thaliana columbia
gttcttcttgttggtggaatgacccgtgaacccaaagtcgaagagatagtttctgagatctttgggaagagtccttgtaaaggtgttaaccggatgaagcggttgccatgggagcagccattcaagggtggtatcctccgtggtgatgtgaaggatttgcttcttttggacgtggttcctctctcattgggtattgaaacattgggtgcagtcttcaccaagttgattccacgaaacaccactattccacaaagagtctcaggtttctcacagctgctgacaccagatcgagtggaatcaagtctcaggagacgtgaatgcgctgactcttgtgcttgagatcgactgtgcatcacgcac

SEQ ID NO: 131349 - DNA, 371 bp, Arabidopsis thaliana columbia
ctgctgctgcttgaacagaggttttgtcaactgagcagcaggtttcattcctctcagagtttgatgatggcaaaagaagttgcagaaggcgattagctcacaatgaacgaagaaggaaacctgcattctatttctaccggtaagcgccatagcttcttcgcacctctcaagatggtagtaggcaacaagttctgagatcatcattgtatccgagagtcattctggtagtctctatacagagtaatagatgagacgacacgtacatgagactcgtgagttcaagatgactactgtcatgttctactatgagcaacgacggacttagatctaacacgattatccagagtctcattgcatcatggacgcgtaac

SEQ ID NO: 131350 - DNA, 330 bp, Arabidopsis thaliana columbia
ggtttgtaatatatcggttatacgtcttgtcgagaatctagggtttctctctctatctctctctctccttccatggatttgtagcgcctcccttctccatctctccatagcttctgggctcgattcttcttctcgggcttcttaaccatgttcaattaaacttcgaattctcgtcctcaccttacagatctcggtgagaatttccgcctgtttaacctaattatccacttcaaaaccttgaattctccgatcgattctcggagatccagtggaggtctctgatcgtgcgtactcacgagctatggtgcataatgatcgagatcaagctgc

SEQ ID NO: 131351 - DNA, 302 bp, Arabidopsis thaliana columbia
ctgacagctgaatctatttgtacttctctagttggtaacgaaataaaaaataaaatatttttttttttttttttttttaatatatatatatatatatataaatataaatatatgttaagatcattactggagagagagctcgaagaaagcaataatctagagaagctgttctaggttcgactctcgacgccgtacgatttcacagctttgtctagatcatgagctgctttcgagacttgagatatcgcagagatgtgagatctagagcgcttcagaatgcgacgtgaggtgatgactgagtt

SEQ ID NO: 131352 - DNA, 321 bp, Arabidopsis thaliana columbia
tttgggttattcaaccgacatgtttgagaaggacacggaacctttggaaacaacaagtggacagttactggaatctgatgtcatcgaaagtcaaatcaaacactgtgaggaacataatggacatgaaagctcacatgggttctttcgcagctgctcttaaagacaaagatgtgtgggtgatgaacgttgtctctcccgatggtcccaacactctaaaactgatctacgaccgtggtttaatcggaacaaatcataactggtgtgaggctttctctacatatcctcgaacatacgatctgttgcacgcgtggtctatatttt

SEQ ID NO: 131353 - DNA, 334 bp, Arabidopsis thaliana columbia
aatttctttcccaagatcttcccctcaacatactcataaacaacgcaggagttttctctccaaatcttgaattctccgaagaaaagattgagctgacatttgctacaaacttttaggacattacttattaacagaatgctgatagagaaaatgatagatacggcagagaagagtggaatcgaaggacgatcattaacctttcctctgtgattcataattgggttagcctgattgtttctccttccctaattgctccatccattagtaggtatacggacaggcatatgctcagtcaagtgctacatttacatgcgaacgttgagcaggcattaag

SEQ ID NO: 131354 - DNA, 297 bp, Arabidopsis thaliana columbia
gttcgggtgattattacatggatgggaataagatcttcaaagctatggacccaatggttgcttatgagagaggactaaccacatgggctaaatgggttgagataaatcttgatccatccaaaaacaaaagtcattttccgcactgtctcaccgagagagagtggtcagatgtgctacaccagaacatccttgcctcttactcttcacaaccagtgctacagtcagagtgttgacagtgctaggacatgaataccgagtgtattatacgatacacatatgttgcatagagagagagca

SEQ ID NO: 131355 - DNA, 297 bp, Arabidopsis thaliana columbia
gtttcttcatatttctctctcggaagaagaagatggtttgcgataagtgtgagaagaagttatcgaaagtgatagtttcctgatagtggaaggatggtgctcgtaatgtaactgaaggtggtggtcgtaaatcaatgagaatagcttctctccaagagatagatctcactacagtacctgtaccacaaatgtatgatctcgtcacagcagcaagtgcatcagatgtaatctgtcacacactgtgctatagccaagagtgaagccatgtcgagacgttgaaccagatgtacagcagac

SEQ ID NO: 131356 - DNA, 310 bp, Arabidopsis thaliana columbia
ggaaaattttgaaacaatgacgacggggctagtaacgccgggagatgtaatcgcgaaagcgacagagtttaaagctggaaaaggagcttacgtcaacgagcccaccatctacgcttcctcacacgaactgcggatgttctctctccgaatcaattgatcagagagctattgtggaagttacaggtcacaaggcacatggtcctattccagagactggttctgttgtcatagcaagagtgactaagttatgactaagatggctgctgttgatatctgtgtgttggttcaagccgttcgtgaattgctggtg

SEQ ID NO: 131357 - DNA, 301 bp, Arabidopsis thaliana columbia
ctgcgtggagctttatggcgcaaaatatcaaaagctctggccaaacgtttgaatctgaagatgtctcagctagatgacaataatttagaatcctcatcaaggttcagtatgctcacgactttatctgggctatagtgtagcagagaggacatgaagtatcttcaagtcgatcagtatagcagttttggtcttacagacggctctcagactaatgctgaacagatgagcagttgcttgaaatcattccgctatctgcgctgcactctactacaaagtagagttcttagagctattgcaagtc

SEQ ID NO: 131358 - DNA, 284 bp, Arabidopsis thaliana columbia
cctgttgctggcgagcaatccatcaccaaattcctgactcaaagcggtacgtttaaggatggagatctacgtgttacaggatggagttcgaatcattctcaattggagcctgaagtcctgtctccaattaagccagctgatgatcagctgagcttgtcgatttggatatggttaaagtcattggcaaaggaagtagtggtgttgttcagctggttcaacacaatggactgccatttcgctgagtcatcactaacacgatgagcatcgcagcatgcacagagctc

SEQ ID NO: 131359 - DNA, 306 bp, Arabidopsis thaliana columbia
ttttttttttttttgaatcaaatatatatattaaaaaaatataaacaaacattcagacaaattagtacactctcaaatcacaacaaatcacaacaaatcaattgaaccaaacctttatgaaaaaaagagacaatcacttgactatataaacaggagacataatactgagatttggctaccacacatgtctccatacttgcaaggctttcctgacttatgcatctaggagtctgtattgaccgtgagacctgtgagatgagagtcatgagagatcaacgtctgacgacactctacttccgttgtctg

SEQ ID NO: 131360 - DNA, 314 bp, Arabidopsis thaliana columbia
ttttttttttttttttttttttatacccaaaatacaaattctctgttttagaatgatgaagaattccaatttctagcaaaaaagaataatcaaagaataagcaaaagataagaagaagacaaaacagtaaaggacttttcctttggttttctctaaatatatgtttggtctctcacatcctaggcacaacaaatgtgctctcatgtgtaatggtaagatcaagatgacttcatctcagagcatagtcatcgatcggtagaatgatatcatcgtcacgacgattgttgacgtcagagtcaatgatctgatcagtc

SEQ ID NO: 131361 - DNA, 314 bp, Arabidopsis thaliana columbia
gcgaaaatggtgcagcgtcttgtttaccggtcgcgacacagctacgccaccaaatcgaaccagcaccgtatcgtcaagactcaggaggtaaattggtgtatcaaaccacaaagaagagagctagtggccccaaatgtctgttactggcaagcgtatcaaggaatcctcacttgagcctctgagtacaagagtcaagattatcagaacagagactgtaacgacgatacgtgagtctgctgtctcgagtcaggaagatcatcggcatctgtcgaagcaagattgagatgtgactcaacgtaggagtgccacgtacg

SEQ ID NO: 131362 - DNA, 324 bp, Arabidopsis thaliana columbia
ctcacacttaagttttaaacctccaaggatgtctctcttcacgctcttcttcgcttgctttgttccaaaattctggttcaaggattaactcaaccgacagtaatttggagtcttcgtctttgaagaaacccaaaagaaaaaccgagtccataaagaactcctactatcggtcggtctcttatttccggtaggctccaacctttctcggtctataggaactaggaagtaggaggataaagtgaatctgtagtatgatcactccagaaatatatgaggctgatactattgatccagtcatctgtactatgtatgaccatgagatct

SEQ ID NO: 131363 - DNA, 303 bp, Arabidopsis thaliana columbia
gcccgtcgactgtggttggagctgagattagccacaacttcacgaccaaagagaacgccgatactgtcggaactcaacacgcgcttgacccattgaccacagtgaaggcaagagtgaacaatgctggtgtggctaacgctcttgatccaacatgagtggcgtccaaagtcgaacaacaccgtttctggagaggttgattctaaggcgatcgataagagtgccaaggtgggattgctctcgctctcagcctgagagatacacaatggcctgagtggtagatgcgtatcttcgctcaagacatcg

SEQ ID NO: 131364 - DNA, 305 bp, Arabidopsis thaliana columbia
cccaccaaacttgagctcagctagcgacaacggaggatggtgcaaccaccacgtgaacacttgacctagcatgcctgtcttccttaagatcgctcaatatcgcgccggcattgtcccgtctctatccgcaggtgccatgtagaaagagaggaggcataaggatcacaatcaacggtcaccgttacttcaacttggtctgatcactaacgtgctggagcaggagacatcgtaggctagttgaagatcacgactgatgatcggttggcgaactggacaactgcactagcgatgactgctagcacttc

SEQ ID NO: 131365 - DNA, 317 bp, Arabidopsis thaliana columbia
ggaggagtgaggctatgctggaccgcctctttccgtctaacaaaagtcggaatctggatgaagaaggagagccgacaacttctggaatggtcaagacaggaacggacgatttcgaacttcttaggagtaccaaaagaactgtctgagattgagtacatggagagcttgtatattagagcactgtgtcggcattaaaagtattaaaggaaatcgcagtggtagctcaacagttagcgtcttctcgttgcacgtacgcagtgattagagatgattcatgagagagttgtgtctacagtacgaatagtctagtatatatt

SEQ ID NO: 131366 - DNA, 328 bp, Arabidopsis thaliana columbia
gacgacaagtgacattatcattactctcatcgagagcgttggtctctcttctccttcacctttgagtttctcgaggctctttttcttaattttactgctaaatagtagtgttactgtcttcagccgccgtcgccgatccattatcgaaggcgacgaagcagtatcttaggttttgtccgacgaagctccgtttgattgttatcggttccgttgtatcgtcgatcttcatttcgcatttgttttctatatccgagatgggaagcagtcagctccgtttgccgatatggcagaagcaagactctaacagatacatttgacacagttactc

SEQ ID NO: 131367 - DNA, 308 bp, Arabidopsis thaliana columbia
ttttttttttttttataactttatttgctttcataagaacaaaacaaaactcatcttgtatacattttgagagctaacggtatgattccagaatttatgtatacaacttttctcaaagccaaaagatacaaatactactaagaaacaggtcaaatgaatttgatagcagctaaggctgaaagacacttttatctgacattattcagtgtgcttcttcttctgactgtagcatgcgattagtgatcagtctcagaccgacactgagtctcttcactgagctgctactgctgactggctattactactac

SEQ ID NO: 131368 - DNA, 372 bp, Arabidopsis thaliana columbia
aagtaaagaaacccacaatgagttcatcaaaatgtttgtgatgttagtttcttagtttaagctatgatagtgaaagaaaagtttacttcacggagtaggcggagagcggcgggacgagtgaacttcctggcgaagaggaagcacggtgatggtttccctttactgctacaccattctcgccggtattcagtctcgtagttgatattgtcgattccctgagaatcaatgtgtttagttagagattctatttatgttttaagtttgtaagagggctaaagcatggcaagaaaaaaagaaaaagagatacatacattgtaatggatagtttcatttctaccaaataaaatgttggtcttaccggatgcttacctt

SEQ ID NO: 131369 - DNA, 395 bp, Arabidopsis thaliana columbia
cgattgcgacaaggatatgttatttcaaagatcacttacgccgactatggccaatccactggtagttgtgggaaatttaaacgcggtaactgcggacaaggcaacaccttaaatatcgtcaaaaagaaatgtcttaggaaagagaagtgtaagttgtttgtccccgacaagatttttggtccgagccactgcaagggagctctaaggtctcgttattgacgctacttgtagaaaaacttagtttttttcttgtttcccaagttaaaggttctttatgtaatcgacctagtcaagcttttgtttcctactttacacgtttgttacattttttatctctttgttgcaaaccccaaatgtgtatgtgccatacaatatcaatcatctttgccatattt

SEQ ID NO: 131370 - DNA, 414 bp, Arabidopsis thaliana columbia
attgaaagaactaaatcatataagaagcgataaaatattacttacattcactaaagcagcttttgttctgattcaaatagccgatacaattgtgctcttgtaaaagctcctactgcctttgagctataaccgctcccactaaaattcccgcaatgaacaactataaccatcttaagcttcttttccaaaactagatctaccacacgaccaatcgatgttgttgtactcacacatgtgggcgggcttctcatcattgagaccaatggcgcatcaaggttattgcaagtcctcccgatgcaaaaggcctatgcagcttcccctgtcgtctacaattggtacaacttgctccttgaaaaacccgatggccacattcttcaactgcagagtgcctagcagtggccgagtggcttgaaa

SEQ ID NO: 131371 - DNA, 316 bp, Arabidopsis thaliana columbia
ggaaaagaaaagcctttcaggtctcaaacaatggagatgaagattgcttgcggtgtgcttttcgctgctgcctccatgaccgccgtcatgctgctgaggaagtcggagctccggcaccaggacctgcatccgccgccttggctgcgttgccagctcttggctctttggttggagcttcccttgtctccctcttcagctactacttgcactaagctatctttcattatgtaataacaactcattatgtgatcttattcatttcctatttatttccatttcacttgtttaggaataaaacagagaaagtaatttcaag

SEQ ID NO: 131372 - DNA, 610 bp, Arabidopsis thaliana columbia
ggagaatgagattaaagaaactgagataaaggagaaagaagagtcttcgtcccaagaggggaatgagaacaaagaaaacataaaaaaagtcttccgaatctcagagaaaggaaaacaccaacagtgagaagaaaattgaacaggtggaatctactgattcttcaaacacacagaagggtgacgaacagaaaactgatgaaagcaagagagaatccggcaatgatacttcaaataaggaaacagaggatgatagttcaaaaacagagtcagagaagaaagagggaaaataacagaaatggtgaaacagaggagacccaaaacgaacaagaacagaccaagtccgctttggaaattagtcacactcaagatgttaaggatgctcgaactgatctagaaactcttcctgaaaccagcaatggattgatcagcgatcaaagttgctgctgagtgatatttgttaaatgtgtgaagctgtcatgtattgtatgcatattctatacttctcaccaaatgacgacttaagtcccaatcaaagtagtattgagtttttaatcgtaatcagtacatgtgtatgtatacttttatatctaattctctctgagtctctaat

SEQ ID NO: 131373 - DNA, 715 bp, Arabidopsis thaliana columbia
caagaaggttcctgcaacaaacattactgcgattggtagagctattacacaggttgcggtttccatgaaggatgttcttagggagatgaaagaagtgaagccagcgtgtcctttatctgaatgtgaggcatctggtgataatatgtctagtgatgatgatgatgatgacgatttaggcgatgatttgtctcctgaagaaatggaagttgctacaatggttactggaggattgtctctgaaactatcatggtgataaaagaactcattcgagttatcactggtatgattaagatggagaatccaaaggataaatagtgggttgtggagtcgcttgagaagctactgaagctgtgtcaaggaactggtgtacaaatcgaatgcagcttggtgcttgtgtctatccaccgcaggagatgaacaagatgaagcaaacagtgaaggttatacagggaaatctagacgaatttgaaaccgaagttgagcgtttgaagagttcttcagacggcttttcggcctgcttgcgggaagctgcgaaactccttgaaacatatggaaactgaattggataaaagatgtgaagctgagctagtagttgaaatgcagaatgttactcttgacagttagtttggattttgcttttgagttttttttcggtttgtttcagtggcttgtgtcttgtagtaacattcatctaatgttcaatgtgttgtacacg

SEQ ID NO: 131374 - DNA, 289 bp, Arabidopsis thaliana columbia
gcgtaatgtagcgaaggccgcaaacattcaacttgagatggtttatgtcgggaaaagaaaccctaagaatggaatccagccgataatcaacacaatccgggaggaaaatctcagccatactttgccggacttgttccagatctggtttttctggaccagggtcgagagcatgtgggaatcgaagcagaggatgctgaaagcccacggaatcaaggggagagaagggtttaaagaagaggaaaaaggacctttttctgcaagaagtggttgctatgttaggttatggagg

SEQ ID NO: 131375 - DNA, 340 bp, Arabidopsis thaliana columbia
atagaatcttcatcggaaacagctgcattgattgctaaaggaaaagggactctccggcctggtggaagctgctcttttatgtatagtggatcccaaatgatggggcggccagaaagtttgacatctgctgacaattctaatttccctacttttctgccgttatgcaatttggtggtcagcatggtggggttccgacttttggaatggcttatccaggatatgtccagtctgaagatggtgttagaaatccggagatgacatggatgccagttttagctggtccaggagctttaggggaccttcatacagtccaccaccatatgcaccaagcacacaaccc

SEQ ID NO: 131376 - DNA, 542 bp, Arabidopsis thaliana columbia
ggtgttttctgcaatcaaatggatactggtgggtttgtagatgaagaaagcgatggatctcaagcttctgcacagtcatcaagctcccaggcagttagccattcagatgaagcaatgtctcgtccatcaggtgttaaggcggcaaagcgaaagctaaaaggactctgtcagtgattaagagcatgtgggagattaagcagaagggaatttgaattgaacgagaagcttagcaagaagacgttgttggagactctacttcgaaaaacagcgccgcttagtgatctttgaaatggctttaaagaacaaacttatcactgacatattgtcaaatgcttgaatggtgtcttttatgtcttgaaagttagtctttttttgtttcggttaacgcttcttcacttgtttttgttcagttcggttatgaatcttaagttgtttgtgttctgttctaaattggtttggttgtgctctgttctaattggtttgtgttagtgttcaaatggattggtttgtgttctgttctaaatgaatttaaattcgatttc

SEQ ID NO: 131377 - DNA, 422 bp, Arabidopsis thaliana columbia
ttgcacgtattgagaaaggcgaaacaaaggctcttgagaaggatgaagatcaaaaggaaaatggtaacaaagataaaactgatgcaaagagaatagagagtggagttttcaccaatgttcctactgagctgtttcgtcatattctcaagttcttatcttcggaggatcttgtatcatgctccttggtgtgtaaatttctcaattttgctgcggctgatgaatccttatggcgtcgctgtactgtatccggtggggtctaactcttccaagtagaaagttacgtgaatctgcttggaagaagctttatattgatcgtgatgaacaggacatgattgaacttgtcagaacctgtccgtcggatttcaaggagtattacgtacatatcgaagcagcaaagagaagccagtacctctttccagagg

SEQ ID NO: 131378 - DNA, 578 bp, Arabidopsis thaliana columbia
cgatgataaagctcatctgggagtatctgacagcgccctttttgtacaaggatttgatacttcccatccaaggcatgaaatcaagacagcattgtggaatcatttctcttcatgtggtaaggtctatctgatttatgttcccattgcgtgttctaccggtgcttcggtgggatatgctttcattgatatgaaaaatgaaaccaaggggttgacactcaatggaagtcatttgggaggacggaagatcgatgttatgttcgccatagatagagaagaggttttacttctcttcctaaccttaaaacactgtcaaccgctgccgtaattataggccatggcttgttttaaaagccatgtcagatgcctgctttgaatatcaccagaggattaaaccgcggacgttggcactccccatagcaagattggtcgttttacagccattattggtcgtcgctcttacagctagtatttggtcctttttaccgttgctgctaccttgttactccaccagctacatgattttaggtctaagtagagttgtgtctttatgattttaggagttttaaagtctttttctt

SEQ ID NO: 131379 - DNA, 320 bp, Arabidopsis thaliana columbia
gcatttttttgcaaaacgagtctttcttttcctgttccaatagctcttcgaaggaaatgtctgaaaattcatcatctggattgtctaactctgtgctcgatttgtctttgagttccatggaagcgcttatttcaagaacatgatttggtgattgaaactgccgtgagctcagcaggaaaactgaatccttttttgatgttctcctatttttggtgctgtgtatagagagtttcctccatagggatgcgttttctatataacacattacccggttttcaaatcgattttttcagttcggtttgaatcaaactgattcggtt

SEQ ID NO: 131380 - DNA, 361 bp, Arabidopsis thaliana columbia
gaaagtaatgaccaatgttaatccaacaaagacggaaacaggcattgtcacgtgaggaagtgcaggctttttcagagatggaagatgatgacttgaaggcagcaattgcagcaagtttgcttgatgcttctgctgctgaggccaatctcggagctgtgggcacttctgaaaaggaaactgagaaacaaaagtagcagagaaaatagagaacaagtgttattgatggaggtggtgggatattcacttttgtttctttgttttggtttgttatcaagagttatcaacaattttacatacagaacagagaaagaaaaaaacttacatcgaaagatagaaaacagaggataataaatggtttgtg

SEQ ID NO: 131381 - DNA, 279 bp, Arabidopsis thaliana columbia
gcaaaatcagtgaatgttgatattcaaatcttaatcggcgatggaacgaacaagcaacggaggaatgttgtatcacgaggttcaagagtcaaatctgtgcgccgcacactgcgtcaacacggtgttgcaagggcctttcttctctgaattcgatttgggtgccgtcgccgccgatctagacgggaaggagcgtcaggttatgcttgaaggtgctgccgttggaggttttgctcccggcgatttcttagctgaagagtcgcacaatgtttccctcggcgg

SEQ ID NO: 131382 - DNA, 293 bp, Arabidopsis thaliana columbia
aaaaccacgttagccgagttagctaatcggttttgccattcctatcggtttagagaaacctcctgctttgtttcgaagaaccgcggttaagatgggtctcaaaggtatttctggtattccaatccgaaaataaaccgacctgtgttggtttggtacttagatgtatcgtcgtaaagagaaatgtatgacacatttttggtcaacatcatatttaaataattttgttatttatgaatatgtgattaactttttagttacaggaatttttgtttgtctaagtcatgtgtttatat

SEQ ID NO: 131383 - DNA, 345 bp, Arabidopsis thaliana columbia
ctgattttacgctttattgctctcactaaaaccctaattctctccgtctcgatcgcgacctctgtttcttcggcaatggcggattctcctcaaagaagaagggattcacggatctccttcaccccgaaaagaacgagctagatccaggtccaggtctaggtctaggtctaggtctagatccaggcccaggcttaggtccaggtctagatctttgccaaggcctatatctccatcaagaggccgtggaaggtcaaggtcaagaagccgtggaagaagtgaagttgaaaaccctggtaccacgcgcgatgtgactggtatctacaagatgcactgacaaggatcttg

SEQ ID NO: 131384 - DNA, 290 bp, Arabidopsis thaliana columbia
ggaaatcaaagaaggaatcttcaaatgggaaaccattattactcggatcacaaacacaatggtatcgagcacatcaacctctgcttcttccagtgaagagtctagtgttgggaaagaaagtgagacttccgctaaaggtgaaagtgagacttccgctaaaggtgaaagtgagacttccgctaagaatgaaagtaagacttccgctaaaggcgaaagtgagacttccgctaaaggtgagagtaatagttccgcctaaaggtgaaagtgagacttccgcctaaaggcgaaag

SEQ ID NO: 131385 - DNA, 469 bp, Arabidopsis thaliana columbia
caccaatctgctaacaacagtgagaatcatgagcgtcatgcttcgcctttgaaagttcaattagatttgaacttcaaaccagaaaaggacgaagaatctctccctggttctaacaaaactaccaagagcgagactctgactcatgatgacacagtaaagtctagcttcacgtcaccaagctcatcaagtgctcatagccaaaataacaaggaagatgaaggaaaactcaagacaaccacagaaattgcagacaccaccaccacaagctccatgtacattttgcagactcttatagctgcaaggtgaatagattatgatgggaaacaccagaaagtttttggtcaatcacctttttaaccccacaggcttttgcgcattttgtagataaatgggcaagttcttatccttactgatgaattgctcattacttttcttactcgcagctaatgaaaatgggcaattttaatct

SEQ ID NO: 131386 - DNA, 282 bp, Arabidopsis thaliana columbia
  unsure (1)..(282): unsure at all n locations
caatcttccactattttactacgattttgtttttcctttattcacctgacatttccagtcgcaaacaataagccttagtgaacacactgcacaaaactgcagcaaatgttgctctcaagacaaaagacattccgggggaaacaaataaaaaaactcaggagagttatttaagataagcaaaaaaagatacatcttaaactgatgccatttcgtttttcagtttcatgtagacacaaccttcttcaccacttttgtaaccncttccggggccttctctgccgg

SEQ ID NO: 131387 - DNA, 346 bp, Arabidopsis thaliana columbia
  unsure (1)..(346): unsure at all n locations
ttgctgcaatgatgtttcctcaaagtcttcatcagcctttttcctctgtaaatgggtacattctggatttgacactttccttctttttcttcttctttgtattctgaatttttttgttcttttaagggagtgtagtttttcatttacatgcctaacgatgctaactagagagagggaaccgcggagagttgggggaaagtaaaaaaaaaagaatggctcaagtcatgtaaaattgttttagggattctgtgagatgatgaaaccgatatctaatttcattttgtgagttcgcaaatgtgtgttacgntctctaccgctcttaatgattcanggttgtacacaaaan

SEQ ID NO: 131388 - DNA, 247 bp, Arabidopsis thaliana columbia
  unsure (1)..(247): unsure at all n locations
cctaattcaacaaaatcctatttgttttttaatttattttctcgtcaccaaaatgcctctcttttgttggtattaatgtacggaaggagacattagtcgagagttattaagtatgtnattccttattttttttctccgtacgttgtgaaaatgtatagatatattttnctgttaatcaataatgtgtgtggatctatcggtaaaatttttagtgttaaatttctttcatatgaacataaagaagttt

SEQ ID NO: 131389 - DNA, 286 bp, Arabidopsis thaliana columbia
  unsure (1)..(286): unsure at all n locations
cggatgaagagctttatcctcctttggatattaatacagttagagaagatctcagtaaaagaaaatctgtggataatgtaatggaggagaagcaagagcctcatgactcgatttacagtgcaaaaagatttgatgagtcttgtatatctccttcgacgctaaaggcactttctgcgtctggcattcttaagatgactagagtacaggatgccactctctctgagtgcctagacggnaaagatgcattagtcaaagccaaacctgggacgggaangagcatagtgtt

SEQ ID NO: 131390 - DNA, 303 bp, Arabidopsis thaliana columbia
aagacaccgaagctgctgttgacgcagaagatgaatcagcagcagagaagagtgagaagaaaaagaaaaagaaggataagaagaagaagaacaaagacagtgaggatgatgaggaatgagatgggtttgcgttatggtgctttttaagttttgaactcttttgattttgcggtatctatctactctggaacaaagtgagacccaaggcattttatgcttgtattctacgtctcgcttacgttaccagattttatgtttttgtaaggttagtttcagttctaagcagattctccctttagttat

SEQ ID NO: 131391 - DNA, 290 bp, Arabidopsis thaliana columbia
  unsure (1)..(290): unsure at all n locations
catcaacatagctgctgctgtagtcataaaactcttctagctcagcatcttcttcatcatcaccatcaccataatgcagnttggaatgactctttgcttccatatgttttcttacagcttctaagctgctgaatggacggcacagctcattgcagtacagacacatgaagtctctcttgaccttaagaccaaggtaagtgagaagcccttcaggatccttgagatactcaatatcgggaataaagaaaccatgatgcttatgcatgtgaagcatacagctctctaaggtc

SEQ ID NO: 131392 - DNA, 231 bp, Arabidopsis thaliana columbia
gggaaatggaacctgaagctgatacatataacataatagtgaaagggcattgcgaggtgaaagattatatgagtgcatatgtttggtacagagagatgcaagagaagggttttctgttagatgaaagcataggcaacgagctagtgagtgggcttaaagaagaatggaggtcaaaggaggcagagattgctatttctgagatgaatggtcgcatcgtaggtgagtatcagt

SEQ ID NO: 131393 - DNA, 306 bp, Arabidopsis thaliana columbia
attcaaaccagtttccagtttccatcgacgcaacgaccaatctccacgattcctctcttctctctaacttccaggtacgtttttcgagaacccaatgaagcaatcaaagtccttggaattcatttgattttactttcaggtctttggatttctatagaaagaaagatctgtttattatttgattggaacatgataagctgctccgtttctcatatccacttttgttcaatttatttcaatttgatcgataattggaaaagtactggatctggtgtatcggaagttaccggtcaagctatgtatgaa

SEQ ID NO: 131394 - DNA, 384 bp, Arabidopsis thaliana columbia
agtggaaaacagattgatgcggttaacttggcatttgcgtttgaactcacagaacagttctcacctgtctcattactgaaatcttacttgatagaggcaaggcgatcttccccccaaggcagacctggcaatgcatctcctgctgttcaggatgagttcaatgagcgggagcgttataggcctcaaaaccgttataaagtgtatcgaagagcatagcctggaagagcagtacccagttgagccacttcacaaacggattctccagctcgagaaagccaaagcgacaaaaagagagcaacagaacccatgaaacctcagccaaaacgaccacgtggtgctcaaccccgagtcactgacaacaacaacaacatcaacaacaacaag

SEQ ID NO: 131395 - DNA, 326 bp, Arabidopsis thaliana columbia
ggattctcatctcttcttctggtttcagattgagtcttgttactgtgtttcataagactattgaagttaagatgtctggagcattgaatatgactcttgatgagattgttaagaggggtaaaactgcaaggtctgggggaagagggatttctcgtgggcgtggtcgtggacgtggtggtacggtacggaagaggagctggacctgctagaagaggtcctcttgctgtgaatgctcgtccatcatctttcaccattaacaaggcaagctcaaaatctgggatcttctatgtgtatgatttggaaatctgagttctgtgaagcattac

SEQ ID NO: 131396 - DNA, 252 bp, Arabidopsis thaliana columbia
ggctctactctaggtgttgctggattcgtaatagctaacatatcggatttgttctcaaagaagcttggattgtagcacatatgattcttttttttttggttgttttgtggtatttctgggtagaaaatgtatcctagaagattcttggttggaattgaaagctaaaagggaattttccctgtttaatggatgaaagataagaatgtgattaaaaaaaaaaaaaaaaaaaaaaaaaaaaaaaaaaaaaaaaaa

SEQ ID NO: 131397 - DNA, 265 bp, Arabidopsis thaliana columbia
ctatttccaggtagctgattatggactcgttggagatctttcgaggtgataccggagttgctggagaagcttccagaaaagaaatgagaccccgagagaccgaaactcgtctctgtttatcatctcttaagctctctgtattttgaggtgcagaccatagtaagtagtgtatatagcaaaactgtaataaaaaacggtctggagaatctttgtcataagctttaaggttaagctctcacgtttctaaaaaaaaaaaaaaaaaaaa

SEQ ID NO: 131398 - DNA, 311 bp, Arabidopsis thaliana columbia
ctggattctccggtttcctccgtgacgacgagtcaacaacaacaacatcgaagctaatgatgatgaaacgcaacggaaacaacgacggaaacgccgcggctacagggagggttagagtagaagcagtagcgaacgtggccggtgcaggctgtggacaagcgtttgaggttgtttattatccacgcgctagtacaccggagttttgcgtaaaagcagctgatgttagatcagcaatgaggataagatggtgtagtggtatgcgtttaaatggcgttgaacagaggattcttctagaatcagttggttatggt

SEQ ID NO: 131399 - DNA, 244 bp, Arabidopsis thaliana columbia
cagccaaagaggggcagagagcaggtgaaaaagcggctaaactggcgacgcggcaagcaaacgtatcataggaccaatagtagcagctgggtgggatttctttgaagcgctttactttggagggactttaactgaagggttcttgcgtggtactggaactatggttggtgcttactcaggagggtacgtaggtgagcagagatttggtagattcggttatcttgtgggaagtaccttaggaatt

SEQ ID NO: 131400 - DNA, 256 bp, Arabidopsis thaliana columbia
aagtaacaatctaattgtagtacggatgtctcttgagatgttcaagaattaagaaataaagaaagagggatcggagaatgaattttgaggatcaagaagaagatatggagatgtcaggtgttaatcccccctgcggttacgactctctaagcggtgagggagccacatctagtggtggtggaggagtaggaaggagtaaaggagttggagcgaagataaggtatagagagtgcttgaagaaccatgctgttaacat

SEQ ID NO: 131401 - DNA, 388 bp, Arabidopsis thaliana columbia
ttgtaaacgacggccagtgaattgtaatacgactcactataggcgaattggtaccggttttttttctcgagtttttttaataacgatacggaagatagccgacccaggaagacaactgaagacgggttacgagtgttcacggaaaatgaaattggtttcaacaggaaagaatctggtggtactcgtttttgtccctttgactgttattgttgcttctaaatcttcttaaaccatttcgttttgaaccttttgttttatggtgccaaaggagatttaactcgttctgctattaatggatgtatgatcttataacttaaaaccatatttttcgttcttgttcatgtttgatgagaaaaaaaattacattttactaaaaaaaaaaaaaaaa

SEQ ID NO: 131402 - DNA, 413 bp, Arabidopsis thaliana columbia
ctgacctagattcccatttgcttgtacaagggattgataagttaagaaccctaattctcctttctccagatatggtggtatacagaagggcacactgaaaaccgcattcagctccatcttgtagtttgtcatcatgctttaatgtcaccattatagctttgtcacagtcaatcgcaggtagatcgatgtcagttggtatgcgcttacagaagttccctgagtattcttgcacttgaataccctgactgcatctgactcgcatgacagcctcaaaaccttggggcctcgtgatattccatctaagatcgttgtataactttggggtttctttgatcaaaccagagagccgtcaggagagcaaaacaaagatcggagaagatgaagacgattctttcttccgaaacgatggacat

SEQ ID NO: 131403 - DNA, 216 bp, Arabidopsis thaliana columbia
  unsure (1)..(216): unsure at all n locations
gctttatcatgaactganaatagttgataaaagtaagaagcaaatgcantgnaatggctgggtattgtaaatngttacaacaganagaactcaagggaaacaaaacttcaacanattgcaacanagttattagnagnacanatgaaaatagtacttctctaactccaaatctgcttctctcccagagaaaaacacattatataatgtcgacatata

SEQ ID NO: 131404 - DNA, 377 bp, Arabidopsis thaliana columbia
  unsure (1)..(377): unsure at all n locations
cacagtgagcttcatgctgaagatggtaatgaggttnagcctaggagaagaattagactnntggttcctaacanttcttntggaggtataatcggaaaaggaggggccaccatcaagtcattcattgaggaatctaaagctggtattaagatatcccctctggataataccttttatgggttgagcgataggttagtgacattatctgggaccttcgaggagcagatgcgggcaatcgatttgattttggctaagcttactgaggacgatcattactcccagaatgtncattccccatattcatatgcagcgggatacaattcggttaactacgcacccaacgnttctggaggcaagtatcaaaaccacaaggaaga

SEQ ID NO: 131405 - DNA, 401 bp, Arabidopsis thaliana columbia
  unsure (1)..(401): unsure at all n locations
gcctcctccatccactccgaatcctccgccggaattttcacctcctccgccggatttagatacaaccaccgcacctcctccgccttcaacggatataccaatcccaccaccacctccggctccagtatcagcatctccgccgttaactccgccgagctccgtcgtcactagtcctgctcctgtgcatgccaagctagtcaacgattaaagacaaaacctttgtaaattccgacatttttctttacttcacatttcccagttcttgaacttgattcgtttgttttttgttattcctacttagatcatttttctctaatctaaatctttaatcatgttgaatacttaattttnnttttctataacattgcttttgattttacatccggattcattgtacatag

SEQ ID NO: 131406 - DNA, 200 bp, Arabidopsis thaliana columbia
  unsure (1)..(200): unsure at all n locations
ttttnctgataataagtcattatcacactagtttaatcaaaaaccttttggggcatatacgcaacgacaacatcaaaaatcaaagctcttacgagaataaaaaaacgagtnggttccaacacaaaaattagaaacaagangtcggcaacaattcacttactacatacactaaaagaagaaatttncttaccttagggcag

SEQ ID NO: 131407 - DNA, 354 bp, Arabidopsis thaliana columbia
cgaaagggtccactatcattagtgcgttacactctgccccctcttataaattatgtaactattattagggctacttattagtgtactatatgtacatattacatcatattcagatgataaattaaagtaaggaaaatctattgttgatcggaactggccggtgcttccaccgttacggttgcagaacgatcacttccttgccggcaaagacgctcgtactccaacgatgacctaatcttaggcaacacaactttaccggaatacttgaggcacaaggcacatgtaatgataagtatagcagacaacatccaactaaactgcagattcgccaatgcttttgccctaatctcagca

SEQ ID NO: 131408 - DNA, 450 bp, Arabidopsis thaliana columbia
  unsure (1)..(450): unsure at all n locations
cttccaggaatcacacaaaatctaaccaggttgagtttatggcagaggacgagctggtcgagattgttcctaatatgaacatggagcaactcaatttcatcagtggcgatttcggtcggttcattcctcagattccgacaaaggtgcctctgtggcttgcagtggcactgaagaggagaggaaaatgcactttccggcctccgggttggatgtctgttgataatttgactcagatcttggaagcagaacgtgaatctcagtcgacattccaggcattaccatttagttacgtggagattgccagactactttttgaccatgcacgtgacgatattccagacatgtatatggtgagatccctagtcgaggacatcagagnatgtacggccttcacaaacttgnagactaactttagggatcatttcaaagggtacatcctgcagtaaagat

SEQ ID NO: 131409 - DNA, 186 bp, Arabidopsis thaliana columbia
  unsure (1)..(186): unsure at all n locations
aagagcaagaactccttcacgggtcacggcatgggagatcgtcctaaaacaccgcgaaaagcantcacagaacagctatgccccacccccactgcttaaccaagaaaaaggtcgcattgcttacccgatggacccagtaaancaaaaagtctggagctttaaatcgggntgaaacagagaaggcga

SEQ ID NO: 131410 - DNA, 401 bp, Arabidopsis thaliana columbia
  unsure (1)..(401): unsure at all n locations
ggctttggttgtattcacactcttctttgtagctgcaacagccaatgctatcataatctctcttctgatttcacttgctgttgctggtggcttcttggcactcttctttctctgcttgactggtgnttacattggagccttatccgttgctgcattcgtcatctctaccgctacagtttctgctgtcgtttctgtcttaatagcttcaggttggattgggtttttctatgcggtgtggttgggaacaagaggaagcctacgcttggctaagcaatcggtttcagtggtggggatcagccatttcaggtaacactatcagtcgtcatcaacaccaagaccgggaggtaaacatcgaatcaaccaactgaggatccgtccttaccgngtttgtaaataaaccc

SEQ ID NO: 131411 - DNA, 362 bp, Arabidopsis thaliana columbia
  unsure (1)..(362): unsure at all n locations
caatcgcggtagtctatgcagagaacagcggaagatgcagcaagaacgataaggacgaaaaggctcttccaaatggtgaagcgtggatcccgaacttggttaaggcgataactgatgtagcaacaaaccagaggaaagcaattcatgtagacaagaagatggtagatggatcttactctgatgataaaggaaagaaactcatccctcttatcataggcgctcagtatttgatcgttaagatgattcaaggngcaatcagaaatgntatcaagacaagtggaaagccactttaagaggctctgaagaagaggtttttgttgtgagcaaatttccaaggnggaagaagagtttttcgattgccc

SEQ ID NO: 131412 - DNA, 358 bp, Arabidopsis thaliana columbia
  unsure (1)..(358): unsure at all n locations
aaaagaattgacccatatattgcaattttaccttaaaaatttgataaaatgcaagatggttatattaaagaagtcgaaaaaataattaatgacaagtgaatcctcctatagcgaataattaattacctcacaactcaaacgctcttgtgcttctaatccagcgagatggaatcaagacaaaaatgcctagatcctcacacttctcccggaaacgatgatgtcgaaaagacgactttgaaacgtctcggtagaaacctttaaattaagcagatctcgagatctcggatcagatcttttgagtcgagacaaggaggcgntcacccaatctaaccggggtcacaccgaactnacacaagca

SEQ ID NO: 131413 - DNA, 304 bp, Arabidopsis thaliana columbia
  unsure (1)..(304): unsure at all n locations
gtaatcatcggngagacgaactctcggagtaaaaagcttccgantgtatcactaccatcccaccncggaaattcgcaagttaattagtggaaagtaggatctagggtttgggttcattcgaaataatttctgcaaatttgggctgatcatggaacgaaggttagtcgctccaatgcttattcttaagcatatccgtcgcgagactgcttcattagcttaatttggaaggcgttaggttcgttgagcggttaattttatttangttcatttgggtcagtctcgagaagaatangttgtatgcgta

SEQ ID NO: 131414 - DNA, 224 bp, Arabidopsis thaliana columbia
  unsure (1)..(224): unsure at all n locations
tttttttgaaaacattcttacacaaaaatagaagaaatcacatcttgaagtgaaaaatgtatcatacatatttttttgtttagtcttgaaacaatacaagagaaatagaatgacaagaagtagtattgtcaagacactaaacgtgagattggtaataagagctttgattaatggcgaccgcgccgncaccactaccgcttccgctgccggaaccttgaccagag

SEQ ID NO: 131415 - DNA, 366 bp, Arabidopsis thaliana columbia
  unsure (1)..(366): unsure at all n locations
aaatcgtagtactatcaagaagcagaagatggcccaaaaggtggaagcacaaggagggaaaggagccaacttatgggacgatggatcgacacatgacgccgtgaccaagattcagctcgcagcaggcatagacggaattcaatatgttcagtttgattatgtcaagaacggncaacccgaacaagctcctcttcgtggtaccaaaggccgtgttctcccagctgatccgtttgtgattaaccatccagacgaacatctagtttctntagaaggttggtatagccctnaaggtatcattcaaggaattaagttcatctccaacaagaaganttctgaatgtccatttggatccgaatgaggggtact

SEQ ID NO: 131416 - DNA, 450 bp, Arabidopsis thaliana columbia
  unsure (1)..(450): unsure at all n locations
attttgtatcttataaactttaccaaatctggctatgttcttgaatccaatcaggtagagaaagagaaagaggagattatataacaaaagcccaaaatcaatttcacaaaggcccaaaatggtaatacagaaggaaaaaaaaacacaaagatgatcatggttcatgcatggntcataagcatttgaattggttatataaaccagaaatgaaaagagggagagagaaaaaaaagactcaagaatcagaatgaaactctgatcttattgttttgttagtaaataagatttaatcaggcgacatagtaggatgggagttagggagcttgaaggttctcttgggaactgggacaacccagngaagctgtttcccattgtgcacccattcactccccaaatcttcttgtacccaaaggactttgttaaggccatggtccctccaaatcttgcttt

SEQ ID NO: 131417 - DNA, 289 bp, Arabidopsis thaliana columbia
  unsure (1)..(289): unsure at all n locations
tttttntntcccatggaatcaacaaagaagcaagtctcgttggagctacttccatggttagttgtccacaccgatggaacggtagagagactagcgggaacnaggtttgtcctcccggtttggatccaataaccggggttttctctaaagatatcattatcgaaccgaaaaccggtttatctgcccgaatctatngacccttctcgattcaacccngtcagaagattcctctcatgctctnttttcatggcggtgcatttctcatctcctccacttcccttcccctctt

SEQ ID NO: 131418 - DNA, 450 bp, Arabidopsis thaliana columbia
  unsure (1)..(450): unsure at all n locations
ttagatcctaaactttctcatgaatcagaaggtcttaagattcataggctctcttgtttttagcatcaatgactgtttaaaagtatcgaaattttaattgaatagaaccggagataaaagagccgcggtttcgtctgaagtgtcttaccattcttcaagccagttttgagcatcttgatcttctgttgtgtcaagcgatttagaagtttctagagggagaacgttatcattctccaaatggtgatgaattcgcgagattatctcttgaggaacttgaaattcgcggttactaatagcttcccatttaagaccattngaaccagggatgtttcttgattggattctgggacctccttggnctaccaaaaccgcagtttttccattcaaactttcaaaggcaacctttttgtggattgnaggatctttcagctttcttgagctttaggaacc

SEQ ID NO: 131419 - DNA, 246 bp, Arabidopsis thaliana columbia
  unsure (1)..(246): unsure at all n locations
gtttattcgtgttggacttttntttgantaantgattttttttaacgggcacaaaaacccacaaaattttnttgtnttcatatctctgcacctttttttttntgtatgactttnttgtgttgagaaactaagttggaattnttttaaggtttcgtttactactaaagattcgccatntttnttnctttattgtgggctactcgccaagcaatctacactcaacagacactaataaggataaaaaaa

SEQ ID NO: 131420 - DNA, 379 bp, Arabidopsis thaliana columbia
  unsure (1)..(379): unsure at all n locations
tttggggaactgttagcccatccaattttgaaaagtctgcttggaacaaatgtggaatggctttaccacattctacaagcattcaaccacggagatttagttcagtaccaagaactctgtcgtgtgcacaatgcatcgttgagtgctcaaccagcactggttgagaatgagaagaaactattagagaagatcaacattctctgccttattgagatcattttcagccgacctgctgaagataggaccatacctttgagtgtcattgccgagcgtactaaactttcaatcgaagatgttgagcaccttctcatgaagagcttatcggtgcacttnatagaggggaatactagatcaggtgaatggaccantttacggcttc

SEQ ID NO: 131421 - DNA, 195 bp, Arabidopsis thaliana columbia
  unsure (1)..(195): unsure at all n locations
gtttggtgttattatttatttttnagtgatatgtaagagaaagagatactcccattatttcattgatattcaatcttttgcttctttctttttttggtaaggtcaatcttttgcttctttggtatgagatttttcctctcttccctatttgatttatttgattaaaactgtatggntaaataaatatgttcgaat

SEQ ID NO: 131422 - DNA, 422 bp, Arabidopsis thaliana columbia
  unsure (1)..(422): unsure at all n locations
catcaacgacaagtaatggcggcagnctaacgtgtatcagcttcaaattcaagatcacagtaggttctgcggtctttgctagttaagttttatggtgtaaattgtgtctttgtgaatctctctctcgtttacttttgtggtgtccaaataaagaatgctctttagagacttgagttttttttagaggttaagaaaatgtctgagaacggaaaaaggaaagacgaggatgtcagagcatcagacgaccgcgacgaatctgagacccacgcgccgcctaagaaagtggcaaagcagcggnacgagattnaggacatcttcatctgcaatttaggataaggaatcggagagtctttgtgagggaattgcaatgggaggnttttggttgccntcgtcattctttgtcaaggacggtataactttac

SEQ ID NO: 131423 - DNA, 319 bp, Arabidopsis thaliana columbia
  unsure (1)..(319): unsure at all n locations
ttttttttctccaaaatattgataaaaaaaagnaaaaagaatccatgaatgaaacaattcatgttagaaaccatacaaagattgtatagcctctgagttatatcattcttcaacccaattcttttatacaacagttaaaatattgaggaaaacagattgaaaatcgcacagcaaatacattttctctgcaacccaagaacgagaatccaattcaagttgaagaaaggccgacaaatgttacctcgccaatcccacatcagtatttgacattatgtgcttcgaatctagagtcaggagagtgattttgttggcttgaaag

SEQ ID NO: 131424 - DNA, 370 bp, Arabidopsis thaliana columbia
  unsure (1)..(370): unsure at all n locations
ttggagatatatgaaaaaattaatagaattatatatggtacccgtatacatgtgatgcgatacacgagtctaatgttggatgagtctgtacagtacccgatttgtagatgttatcatatatatacacacttaatatttctacgatctgattaccaaaaccctacacaagaaaaatttgaacaaaatcaaatgttctttcttttttcaccaatgctgtgtttaatctcccctaaccggggaggcgagaggggacattggaagggaatgagagctcaaagattcagactttaacttgagctggtcgtagggctaggtgccaaaggttgaaggtgggtgtaacttaaagcttggcattttgtttgaggagnct

SEQ ID NO: 131425 - DNA, 213 bp, Arabidopsis thaliana columbia
aaaattcgttctccaccgtagatcagccttccaagacctctccttctctgtcgtttctcagccgccaaaacgtggcctcgattctctagtcatcgcttctctcccaacgttcgtggttggaatcaagaatgacgtggcgggtacggaatgtgcggtttgtctaagcttattggaggagaaagataatgcaaggatgttaccgaactgcaaaca

SEQ ID NO: 131426 - DNA, 174 bp, Arabidopsis thaliana columbia
ccattttcttcttctctctttctctctgtacattatccatctcctctatgatcttgagagatttaatagataaaataggttaattagccctacaaaatgacccttaatagatttatttacacatttttcaatattaggacaaaactagtcagtaaggtgaacacttaagatggt

SEQ ID NO: 131427 - DNA, 352 bp, Arabidopsis thaliana columbia
  unsure (1)..(352): unsure at all n locations
tttcactttaagttttctctatgttcattatataggtttttgtttatacacaagatttccacattcttccttctaaagagatcactacaatggaaacatcatcgtggtaccgtctccgttccccttgtggtatctcaagcagttcatggaaatccataccagctttcttagcagcacggaaaagaagctcttgaaccaagtgctgagccgggtcaccttccggctgtaacgtgatgaatagttcaacctctgaaaccgcttcttcgtttgtgaaatantggtaaagaccatccgatgatagtatcagaaactggtctttcgagcctaatctatgatggtaaagtgatggcaa

SEQ ID NO: 131428 - DNA, 399 bp, Arabidopsis thaliana columbia
  unsure (1)..(399): unsure at all n locations
gggaagctcgagccatggcttgggatgaagcagaacgtgctaaattcatggctaggtataagagagaggaagtgaagatacaagcttgggagaatcacgagaagagaaaggctgagatggagatgaagaaaatggaggtgaaggcggagaggatgaaagcaagggcagaggagaagttggccaacaagctagctgcgacgaaaaggatagcggaagagaggagggcgaatgcggaggctaagttaaacgaaaaggcggtgaagacatcggagaaagctgattatatanggaggagttgtcacttgccttcttctttttctttctcctttaagcttccctctcgtttgttggtggtcaaataatttgtctattttcattaggaatgtaatccgtatgcct

SEQ ID NO: 131429 - DNA, 334 bp, Arabidopsis thaliana columbia
  unsure (1)..(334): unsure at all n locations
tttcttaaaaacnngattacatgatcatgaagaacatttacacaaaaancattctttcaagtttcaaccaataataaactcgacaaacttcttcaagaatttcaaagccttatcagatttaggattctgcaaatgaaacacatggncctcaccttcttnctcaaccacctcaacagtacctncccactcacacttctccagcttcgncgcataagccaatccttgcctaacaaacacatctttcccagctaccgcaaccaaaaccttatcacantcccaacccangagaaantccgacccggatccgtttacatttaaacaacggatcatccgt

SEQ ID NO: 131430 - DNA, 251 bp, Arabidopsis thaliana columbia
  unsure (1)..(251): unsure at all n locations
caagtttcgtgtagcaggtgccaacgaaaccgcattccaacatatgaatcaaagtgcacaagtaaaatgtgaccaaaaccacgaaagcagtaggtgaaatcttcgattacagttttaccaaaactatataaaaggtagtttttttctaagttctacgtacaatcacaaaatccatcgacatatcccaaaaaaaaaagcagaacantancgaaaacggcaaccaaaaaaaaaattcagataatgtttgcccc

SEQ ID NO: 131431 - DNA, 318 bp, Arabidopsis thaliana columbia
  unsure (1)..(318): unsure at all n locations
ttttttatcaaatcatatgaaacanttnnnttaacaaaattaacaaatcaatacaaagatgagtcaaagagttcgattctcgttaactcttttgactccaccttctcctcaaatggaaattaaattagtcttccaaaaactcaataagatacaggncataataaacagatcaatagccagcaaaactaaattaattcatgttaagggctatttagagtgnacctaattttcgggatgatttacggagaagctctagtaaagaattagcttttcgtttagctctctctgtaccgtctcttgaanagttccatcaatgga

SEQ ID NO: 131432 - DNA, 356 bp, Arabidopsis thaliana columbia
  unsure (1)..(356): unsure at all n locations
ttgaacagtatggtaagattnttatagagcacaagccaaaagagactattgatatactcatgcgactttgcactgagcaagggattcctaatggtgtgttcctgtccatgttgccatcacctgtggacttcatcactgtgtttgttcagcatccacattcattaatnnatttnctcgagagatatgctgaaatagttcaggattctcctgctcaagcagaaatcaataacacactcttggaattatacttgtctagggncttgaattttccatcaatctctctatcagaaaatggtctagataaggacttaatagatcattcggtagcagctgcggtgtctaaagccgatcctgaa

SEQ ID NO: 131433 - DNA, 425 bp, Arabidopsis thaliana columbia
  unsure (1)..(425): unsure at all n locations
cgtgaacaggtggaactagcaagattacagttaagaagagcaatgcagagatatggntcgttaaattcgaagaagttctcgagtggtttatctgagccaatggagaaagatgcctcaagtaatagaaaagttattgaaaagttggagagtattccagagacagtgcattctttatcagatgagaagaaatttgaatcaccccctccttggaagagctcttcagtatcattggccttctttttatcaaaggatggtgatgatgagagattagagaaagcagttaccgagaacagcgatgactcacagaaatcggataatctcacgattccagaggactttctttgtccaatctctctggaactgatgaaggatcctnctattgtttccacagggccagacatacgagaggtcgtccattcagagat

SEQ ID NO: 131434 - DNA, 409 bp, Arabidopsis thaliana columbia
  unsure (1)..(409): unsure at all n locations
ctgcaaacnttctcctctaagtgttccaaaaaaaaaaaccataacatacaccaaaaaaacaaacataataactngtcgacatctatgcatctttncctgagtgatggcacagattctcagaaatgtatacaagaagaagcatagngccagtcccaacttcactagcacaactcactcttacacaatatctaagccgataaagtagattcaaaggatacctcacattcacagaatacacagatgccacaaagtttatgccggcctcacttgagttggagatgtttcagccgccttcccttcaggcgtgaagagaattaagatgttgcatctctagttttgctgatgattcctttcccaaaagtactctgcaatcacagnaaacccgtccttcgagnctttcacttgctgg

SEQ ID NO: 131435 - DNA, 298 bp, Arabidopsis thaliana columbia
  unsure (1)..(298): unsure at all n locations
acctcttgagtttgtatggcagccttggtaacaagaaagagctgtaccgagtctggcacgtctacaaatctgttgtcccgagcattcccaatttgggttaccatgccttggtctcgtcgctggtnaggatgggagacattgaaggggccnagaaggtatatgaggaatggcttccagtcaagtcttcttatgaccccaggataccaaatcttctgatgaatgcgtatgtcaaaaacgaccaactagagacagctgaggggttgttcgnccacatggttgaaatnggaggaaaaccaag

SEQ ID NO: 131436 - DNA, 340 bp, Arabidopsis thaliana columbia
gaaaccggaagacacgaacccgcctaaggcttttaacatatgcaccataatgtacaccagcggcacaagcggtgatcctaaaggtgtggttttgactcaccaagcggtcgcacttttgttgttgggatggatctctatatggaccagtttgaagataagatgacacatgatgatgtgtatctctccttcttgccgttggctcatattcttgaccgatgaatgaggaatacttctttcgacaaaaggcgcttccgtcggctattaccatggaaatttgaacgtgttacgtgacgatattcaagaagcgaaaccgacttatctagctggagtaccaagagtg

SEQ ID NO: 131437 - DNA, 367 bp, Arabidopsis thaliana columbia
ccccgacacggctaactacgacgtcagggcttccagtgacaacatgaggcgcgtgaatgaattggttgggaaaaacactgacaaggcttcaaccacgctcaaggaaatgacagtgcagatggagaaactccttgatcttgcagctggagccgccgatgccgttgatgacgacgatgagaacatgcgccttcgcgtctaatggatgttaaaccgagcgggtttcgttttttttggttcataatacaaatggaaataagtaaatgaatatgtatacatcacatagaaactgtgttatggtaaattagtaattcagtttttgaaataatgtggttaagttttgcatctcttactaattttgtatctatct

SEQ ID NO: 131438 - DNA, 431 bp, Arabidopsis thaliana columbia
cacaacaaatttcggtagcatcagatatttgcaagacgtagatttaaatgttatatattgccaaaagaaacattggagatcacatcacactgcagcaacatcaagccagtcgtttgattttttcttctcttttacctcttttagctgaacccaatctggtgattttgtgtctgaagaatcagaaccagagttagtaacgttcttgtaactcaccttcacgtctccttcattatcgtcgtcttcttctagatcactgaatgatacatcttcttcgtctccaccaaaaggatgatttgtggttgatcttccttcgatggcgctaacagatgacgtctcttcatcgttcaaccaatcatctgcatcgtctgcttcttcgtcatccacttgcacattgataaatctagatgaagaagcagttgatgtgcttgttc

SEQ ID NO: 131439 - DNA, 436 bp, Arabidopsis thaliana columbia
gactcggccaaacaaccttttactatggtcatatgattaccaaatgttataatactaattcgtatattatatatagaacaaatagagaagtgtaggaagaccaaagacttcagggaatcaggtgaatcaagaacttgattggtttgattgaacatctacgttaggaacatcgttagctaaccacggtgtcgatatcaataagcattctccaaattcaactcttagaccaactatactgatgactgatgatgactctaaaccagcctggttcaacaacttggtcttgtgtttctttccattttcctcccacagcgattacatatctagcccgcgttatcgctgatgtagtgatgagcacagaaaaaagaaagctgtggcaataacatttgcttggacaggagtcagttctccttgaatgtggctgtcttcatggctg

SEQ ID NO: 131440 - DNA, 393 bp, Arabidopsis thaliana columbia
agaaacaaaaacagagaggtgaactcatgaaagatcaattgaatctgcttgtgatgattggctaatcaagaggattgaagagattcacgactacacaaattcaattgttaaagacaagagtagactgctaattattattatggttgttaatgtttcttgagagcattgaccttgtccctgaggtaataaagcttggctcttcttactttcttcttgtcaccaccttaatctccctcaggtttggggaatacaaggggaacatggattcgaacgccactccagcaacaagccttctaattctaaatgttgagttgagaccagcattacgcctgctatgacgaagctttacgatgatacacgctctgtctcaggcacttcactttagctgcacat

SEQ ID NO: 131441 - DNA, 444 bp, Arabidopsis thaliana columbia
cataaaaagaagaaacatggaatttcaaagctaagaatacaacataatatttctcaagaatgactcgtttgcagtcctaatttattttcggatgacaaaagaaaaaaaaacacaacacaaccttattgaaatatcaaaccggagtctcctagtctatagtcaataatctcatcaaaggttttcgccatttgtggctaagatgattcttccaatcaccaacttcacctttcctaaagaacacctgagaatctacaccaattctcgttgtcccattcttattaacctccaaattgccttaaatttcgtaaactacacaacttcaagatctcctccaccgatccactttcttcttcttccttggtgaatggacattccaagactcggcgagtcttcttgacttgaacacgaggctcctccaattatctcttcgacttcatgaaagag

SEQ ID NO: 131442 - DNA, 655 bp, Arabidopsis thaliana columbia
tcactcttctctgcgtctccttctttcacccgaaattgtctctgacaccgttttgattcagccatggctaatgctgcgtcaggaatggcagtccatgatgactgcaagctaagatttctggaactgaaggcgaaaaggacacaccgtttcattgtctacaagattgaggagaagcagaagcaagtgattgttgagaaagttggtgaacctattctaacttacgaggactttgcagcaagtcttccagctgacgaatgccgatacgccatttatgatttcgactttgtcactgcagagaattgccagaagagcaagattttcttcattgcatggtgtcccgacgtagcaaaggtgagaagcaagatgactatgcagctctaaggacaggttcaagcgagaacttgatggaaggcaagtggagcttcaagcaactgatccaactgagatggatcttgatgtttgaaagccgcgtcaactaaagaactctctttgataagcttccgattatattcgactattatgaaatggtgttttctattctcttacagtctcttgtgactgttagatacacttgacacccttcattctatctgtctggtctgttctctgtgtctatgttaccgtacagtgtctcatctatattcaaaattatcac

SEQ ID NO: 131443 - DNA, 344 bp, Arabidopsis thaliana columbia
cgttttcttgagtctccgactctattcgcctcttgtttcacgagttccagatctcttcaaaccctagcctacgaagaagtccaaacctccggtgatcgggagtctgaatctacagctctcatccttcatggcctcctcggttccggtcgcaactggagatcgttttctcgctcccttgacatcatctctctccgtctcctctgcttctgattggaagatgatattggttgatctcaggaacctagggagatctgcggaagtggaagggcttaatccgcctcatgatctgtgaattcagctaaggatttagctgattggtaaagcaagtggctggaatggctgag

SEQ ID NO: 131444 - DNA, 393 bp, Arabidopsis thaliana columbia
gtgataagtttattgatgttattagatcctcctaaacgtttgtacattgttgaaaggatatgctaatgcaaaattaggaaacacaaacgggaaaaaccgcgcatcgtcaaaatagttgcgattggatttgctatttctgcatatagatactgaacaggagtgaaattgtaagcaaagacgaatgccattttcgtagcgcatcgtctactcgtgtggggagaagaagttgggactcacaatctctaggagtccctttggattgtctgtgtgtacccaatggccagagttacgaagaagatgcagtcgcaaccttcccttctggctacattctgtctctggttagctattgtttcaagcccgcttggttgtatcgttgtccatcggtcactcttt

SEQ ID NO: 131445 - DNA, 403 bp, Arabidopsis thaliana columbia
atccggttctagaatcccggtttaaccgccataccggtggaagattacctttactacgctctccgcttcttcttctcctcgattcgattctcctcatgggtttatcatgaatttttaggttttgagtaattcagaaacatggagtgatgatccaatgatgatgatgatgcaaatttctatgaagaattatccgttaaatgatgatgatgcaaactctatggagaattatccgttaaggtcaattccgacgcagagctttcacacacttgttcattgataccaccttctttaccaaaccccttcagaagcagcagcagacatgtccttcaattcagaactcaatcaatcacggcaaggcttgtgatatgctccctgccaatggtggagctgttggtcataaccc

SEQ ID NO: 131446 - DNA, 188 bp, Arabidopsis thaliana columbia
ctgaagtttacagtttcattatttcctattatatatactcttaccattgggggtattgttgtattggtttgtattatgattctatgaattaataagagtttaacttttatgttaaaaaaaacttgatgttatcttctctgctatgttttctggtgatcggactccatatagccctgctcatttgcttt

SEQ ID NO: 131447 - DNA, 297 bp, Arabidopsis thaliana columbia
  unsure (1)..(297): unsure at all n locations
caaatcccttccttttacagtcaaaaaaaaaaaaaaaaaaaaaaaaaaaacgatgattcattctgattttaaacccaagtatataaagtcagatacacgcaaaacantcaanttctgagacatgcacatttacacacagtagacatacattttcaaatcangaaattacaaatccacaccaatcgattatcaaaagaaacaaacgagggattaaatttataaattnccngaggttaaaaaacagagctaaacggtgtcgtttggatgaggngcggcggagagagcgcaacatccgcc

SEQ ID NO: 131448 - DNA, 352 bp, Arabidopsis thaliana columbia
  unsure (1)..(352): unsure at all n locations
caaaaccccaatggtaatattaataaatatttatccaaacacaaaactttagctcaatttnctttatttcctgcaaaagattccaacaccactgctggatccaccggtgcaatcaacagtgttttgattcagcaacaatggctcaatcttgtccaaacttcttgagccaccagagtaaacacatgcattacaacttgtttcaagaagtgacgctgttctgtatttatctncgccaccaacaaccggcatagcaacgccaggtttcgccggattcttgaaatctnctttatacgtncttcctaaaacaccttccacgtttgatgacaacttcaagaaccggaactgaacctca

SEQ ID NO: 131449 - DNA, 308 bp, Arabidopsis thaliana columbia
  unsure (1)..(308): unsure at all n locations
caagagtgaacatttttcatttcataagacacacaacacaagaacaccaatagggtttatgctacagacaagaggacttattcttcttcctatatcttacttttcaattgcttaataaacttaagaaaacacatttctacgcaatgtatttagtagcaccaaacagacacaatacatagatagatatagatattgataacatagctgcatctcgctcttctccgtcttcttctcatcccaaccattgttttnctcgaaacctacacacagttgaatcaagattccgatgaaaatgtgtctgtgtaggt

SEQ ID NO: 131450 - DNA, 837 bp, Arabidopsis thaliana columbia
tggaaagcaactgggaaagagcgtgatgtgaagtctggttctgaggtcattggaacaaagaggacgcttgtttttcatattggtcgtgcacctaaaggcgaaagaactgactggattatgcacgagtactgcgtgaaaggagtctctctggatgatgctatggttgtttgccgggttaggaggaacaaagaatacaatagtggtacaagtcagaaggcaggaaagccaaatttatcagccgagaagcatgcgaaagtccaaaatggcgctacgagttcagggagcccgtctgattgggacaacttggttgatttttacctagcaggtgaatcaggggagaaactactcgctgagatggcagagtcatcagaaaatctacaggtggataatgacgaggatttctttgcggatatcctaagagacgaaatcatcaaactctgatgaagcggtgatgacaggaacacaccaaacgaagtgccaacactagaatcagcatcaagggagataagggtacttcctttaccaaacatgatagacaaacaaatgtcatcactgttagaggaaagaccatcacagaagaagaaaggaaaagacgccacggaatcattgtcgagctgcttcgtgggtttatactcgatcaaatcagtgaacagggcacgatggatgttattataggtgtagtggctctgatagcaatgttgttttatctagaataagaggcttatggaagtagcgaaaaacagtgtcctatctatgtttgtatcatcttttctcggacattgacaaggattatatgatgtttttgtgtaaacggtttatgttttacactcctacttc

SEQ ID NO: 131451 - DNA, 430 bp, Arabidopsis thaliana columbia
aaattctgtaatgtcattgatagatcgcatctctggtcatctctgtcttcaagatgtatcaattgcgttgttaggtttattccttttcggttgcttgcaagcgaagttaaccaacaaaggcggaccagtgcaatggcctgtgtttggtatcacacccgagttcttccttcatgttcacgatatgtttggatgggtcacccgatgtttgacgaaaagccgaggaacgtttccttaccaaggaatctggtttagtggatcttacggagccatgactagtgttcctgcaaacattgaatacatgctcaaaaccaatttcaagaactttctaaaggagagtttttacaaagagagattccgtgacttactcgaagatggtattttcaatgcggatgatgaatcttggaaagacagagacggatcatcatacgaa

SEQ ID NO: 131452 - DNA, 393 bp, Arabidopsis thaliana columbia
gattgcaattttttctttgtatataacatttgatctgaattacacataatacacacactgtacattttactaacaaagattatttatgtgtatttcagtaacaacttcacagtttagctgtttgtttcttctatatttatgaatcttgcttcttctcttctagagatctcggtgtaatcctgaccttaagaccatgtttcatatacaaagtcgttgttactcgcggaacaacaacatgatcttgatcaaccttgattgagagtaattcagcaagatcgaagcagccaccattttcagtctgcaagtaagcaaatgctttgcccctaagccaaagtcttggacctgcattgaacacgacgatttaactgatcatcactcacgattgccctcctt

SEQ ID NO: 131453 - DNA, 514 bp, Arabidopsis thaliana columbia
aggtctgcctttgtcttccaacagaaaaacacttcagcgcctacataactcctaagctggctaaggctaaacaaagactctatgatacagcaatcagacttggtgaacttcaagctcagtacaatttacaaatagaccctgaagaatatgctcaggagaatctcaaattcggtctggtcgaagtcgtctatgagtgggcaaaggggactccatttgcagagatatgtgaactgacagatgtcccggaagtctgatagttcgaaccattgtgagattggatgagacatgccgtgaattcaagaacgcagctgccattatggggaactcggcgttacacaagaaaatggatgcagcttcaaatgccataaaacgtgacatcgtctttgccggctagtctgtatgtgaccggagtgtaagatttgatcacaattcatacataagaccagagacgcttctcacttacttgaattcaatcactaacatgtcacaatatgtagttaatttcgtacgctat

SEQ ID NO: 131454 - DNA, 322 bp, Arabidopsis thaliana columbia
attgataactgtggatgggtgcaccaaagcagaagtggacaccggaagaagaagcagctcttaaagctggagttcttaagcatgggactgggaagtggcgtaccatactctcggatactgagtttagtttaatccttaagtctcgctctaatgttgatcttaaggacaaatggagaaatataagcgtgacagctttatgggttcaaggaagaaggctaaacttgccttaagaggactccaccaggtactaaacggatgataacaacacagctcttaccattgtggctttgactaatgatgatgcaacgtgcaaaaccaactt

SEQ ID NO: 131455 - DNA, 446 bp, Arabidopsis thaliana columbia
aaaaaggttgtctttgtgattgctgagtatcacaagtggtgggagatgaagtatggagatgttctctctcagctctctgattactctcttatcgatttcaacaaagacaagagaactcactgcttcaaggaacgtattgttggtcttagaatccatggtgagttaaccgtcgatccttctcagatgcaagatgatggaacaaccatcaatgagttcagaaatgtacttgatcgagcttatagaccacgaatcaacagactggacaggctagaggagcaacgattccacgcaagactagcacagagaagaaaggctaagaggccaaaactagcgttgttttcaagcaaccgggtctcgagggataacaaacgaggacctgatggtgaaaatggctcagaggatcggttgacatcgaggtttgagactgacagacacgactgcagatt

SEQ ID NO: 131456 - DNA, 345 bp, Arabidopsis thaliana columbia
ccatatcttatgaagtcattggcacagctagttataaagttaccaaaagaaagacagaacgttgtgcttggtgaattgtatggtcaagtggctgagtcagacgatgtgattcgcaagccttctttggtctcttggctacagtcactgaactacttatgttctaataaccgtactgaagttttagcttctggatcaacggtagacacttcgaaccagttggctgctcgactctagggatctcctcatagtttacaaacatgtgaaatagaataaagtttgtatgacttgtatcatggaattatgttgaaaagaattataaattaacatcatctccattttttgatc

SEQ ID NO: 131457 - DNA, 486 bp, Arabidopsis thaliana columbia
tacaagcagacaagagaagagatggagagagtaaggaaggagagagaggcaatgtttcaggcgaagaaggaagcgaaagaagaggctgaatctaggaggaaagaagcaaaggggaaaatgttgaggaagactcgacatggtcagcctgtaatgaaatacagaattgagcatcttcttgaatccatcaagaaatctgccggaatcaacgaaatcgcctaacttgtgcgggttgatacagtgcagatgaagaacccagtgaggagaagttgctggtgttgctgaggctcaaagcagaaaccttgttgtcactcagatactgacctttttcttccggagatattatgttacactactgcttatactttgagagatgatttgcggccacatatgtagttttttgctaggccttaccgtttagctcattgttttgatgtttctttacaaacttcttttactataaatcttataaaatgataattttattcc

SEQ ID NO: 131458 - DNA, 380 bp, Arabidopsis thaliana columbia
ctaatcacataagatattctgattcattcaaaaacaagtagagtagagacataacagagaagctattacagtttttagttttcacttcagagagttccgaagaataacacgttaacaacagaaaataaataaacccaaagcgttgcctgacagaatctttgtgctattttaaggatgatcaattacacaacctaaatcaacagagaagtttttgaatcctttgtcaaaaggatgaaaacaggtcatctcgagccacggggttcataccttctctctgacctctcagaccttctctctgatcttctctctgggcttcttccatgaggagagtaagaccgatctcttctagaccttctttcatcacgaggtgaatagtcgcg

SEQ ID NO: 131459 - DNA, 425 bp, Arabidopsis thaliana columbia
gttctgaagggtcacggtggtgctgtcactgccttgcactctgtgacaagaagggaagtctgtgatcttgtgggcgatcgcgaggatgctgggttctttatcagcggtagtacagactgtctggtcggtataaaatgcttgattggaaaaatgtttatatggttatttttcattcatcagttttttttgatcatctagttgacgttgctttgcacctataaatgttcttgatatctacattgcgaacacataaagagtgttatattatattagatctaattatctaaaggatggttgcattcactatttgttaggcctaaagatcattacttagagggcaaagggtagttcgcctcatttgctattaattcttatctagattagtgaattattttgcttttactgttaccacagtcgtggatata

SEQ ID NO: 131460 - DNA, 255 bp, Arabidopsis thaliana columbia
caacataacttgctctgttctggtccatgtttcacagaatctggccttaagcaattttatcatatttaagctacaaatccataacagagtttaacaaagataaaataaccagaaagttcacttgaaagataaaaagtgaagaagacaaaaaaaaagagaccctaaatcctaaatcgaaaacaaaagaaggcattggcaatagcattccgattttaaaaaaccgataaatctatgtatctaatggcttgtccttcg

SEQ ID NO: 131461 - DNA, 405 bp, Arabidopsis thaliana columbia
aacagtatcttagaaaacatgaaacaagagattaatcatagtctaaaagaagaagcacaagaagaagaagagattctaaagaagagaatctcaagccaccctttgtatgggcttcttcttcactcacatctcaattgtttaaaggtgtgttccggcgactttgactcaccggagatcatgaacacggctgatgatcttgccctatccaaactctctctccaccctgactcttccccgaagctacctcttcagaacttgatcaattcatggttcttttttttttttttcctccttgccaaaaacatatttacacaacaaaaaacaacttttcacgttcttttattttttcctttgcaattaatttgactttcaagtatctaagttatttgccagaaaaacagagca

SEQ ID NO: 131462 - DNA, 432 bp, Arabidopsis thaliana columbia
tgatacctatcttcacagggttggcagagctggtagatttggaaccaagggtcttgcaatcacatttgttgcatctgcttcagattcagaggttcttaaccaggtacaagagaggtttgaggttgatataaaggaactttccgagcagattgatacttcaaccctacatgccttcttaaacaagtagcacgtccctcaggaaagaagctcttcagatttcaaccttgtaggtgttcgaagggtgatgggggttcacaactatctctcgctccgtttgttttagtgttttctatgacgacatttttttccatatgtttagaacgtctgttgtactctttaaaggagattcgagtcactctccaaatcgcacagttaaaagctgtccagtttttgtacaagagattattatgttgaaatatcaggattgtctcg

SEQ ID NO: 131463 - DNA, 500 bp, Arabidopsis thaliana columbia
gtgaaacgttcgaaggccattttctttggacgaccatcggcgttaaggagagagcttagatctcgtgccgtcgtgcgacgttgttttccggcttgatcaaaaatggggttgtcattcggaaagttgttcagcaggctctttgcgagaaagagatgcgtatctgatggttggtctcgatgctgctggtaagacgactatctctacaagctcaaacttggagagatcgtcaccactattccaaccattgggttcaacgttgagactgttgaatacaagaacatcagcttcaccgtgtgggatgttgggggtcaagacaagatccgtccattgtggagacattacttccagaacacacagggatcaagacaagatccgtccattgtggagacattacttccagaacacacagggacttatctttgttggtggacagcaatgatcgtgaccgtgttgttgaagccaggacgagcttcacaggatgaattaggatgaattgagga

SEQ ID NO: 131464 - DNA, 340 bp, Arabidopsis thaliana columbia
ttgaagagaaactaaagatttaagatagaaaagatactccaaaacaagatgctcattttatctcaagcatttgtcccaaaactcatgttcttgagcagaaactgaaatctttggaggaattatccgagaaagtatctgaattaaaatctgctttgatagtggctgaagaggaaggaaagaagtcgagcattcagatgcaacggaataccaagaaaaggtaagtaaattggagtcatctttgaaccaatcatcggcgagaaactcagagcttgaagaagatttgagaattgctttgcagaaaggtgcagagcatgaagatattggaaagtgtagtactaaa

SEQ ID NO: 131465 - DNA, 465 bp, Arabidopsis thaliana columbia
gaataattcaattcctgtcactcggattgatgatgctgtcagaagaatcctgcttgtcaagttcaccatgggtctttttgagaaccctttggctgattacagcttttccagtgaactaggaagccaggcacatagagacttggcaagggaggctgttagaaaatcccttgtgctactgaagaacgggaacaaaaccaatcctatgctcccacttcccaggaagacttcaaagatcctagtcgctggcactcacgctgataatttaggttatcagtgtggtggttggaccataacttggcaaggatttagcggtaataagaacacgagagggactacacttcttagcgctgtaaaatcagctgttgatcaaagcactgaagttgtcttccgcgagaacccggatgctgaattcatcaaatcgaaccactttgcttatgcaatcattgctgttggtgaacctcatat

SEQ ID NO: 131466 - DNA, 255 bp, Arabidopsis thaliana columbia
ccgataaataaacctttattatttcgaaatctcaaacacacaaattttattacaaagactctctgcttttagtagagcagaacaacaacaacaacatgaagagtagagaaactcacaacaaggaggaaaaaaaaaaacttatttgctttataggaacaagttgttgttggcttccaaatcaacttgttccccagtattatgggatcttactcaagcccgcattggtacaagtaatactttcccatagtcctacgg

SEQ ID NO: 131467 - DNA, 534 bp, Arabidopsis thaliana columbia
gggaaagcttcggtggagttgaaacctgtctctaccgtaatgtcttcgtttctcaaaatcatgaaagagaaagggtacatcaagaacttccaagtccatgatccacacagagttggaagaataactgttgatctacaaggaagggttaatgattgcaaagctctcacttataggcaggacgttaaggcaaatgagatcgggcaatacacagaacgcacacttccaacgcgccagtggggttatatagtgattacaactcccgatggcattttggatcatgaagaagctattaaacggaatgtgggtggtcaggttcttggtttctttcattgaactgcaatacggaaagaaactctgatggagggactttgatatgtcaaaccctgccataacatgtcatttgtctggctttttcgacattgtttgtttgtttgttttcttgcactgcagtttcagcaagatggagaattagagaacaaaatttatttctattatgacaacatttcgaatggtattataaaatctttctcttgc

SEQ ID NO: 131468 - DNA, 314 bp, Arabidopsis thaliana columbia
ctctcatcaccgacgaagatcacggctcttttctctgtttaatcggcggaatctctcttcttattttatttttcttccggtagatcgatccagctccgagatcaatcatgaatctgaatatgactatttgttcaagcttttgctcattggtgattctggtgttggaaagtcgtcgttgcttctaaggtttgctgatgattcctacctggatagctacatcagctcattggttcgacttagatcgaacagtcgactgatggaagaccatcaactcagattggatacgcagcagacgttcagacgatactacgagt

SEQ ID NO: 131469 - DNA, 370 bp, Arabidopsis thaliana columbia
  unsure (1)..(370): unsure at all n locations
atgctattcgtattagaaaagaaaaccaggtttacagtgctgaagacaaacgggcattggccatgtttaactacgaggagaaggcgaaggcgaggctaaggttatgtctgatctgcagcggcttgtgcagcgccatatgggagaagaggtggggccaaatcatgaccctttcggtgctggaaagactgaagaagatgatgattgattttgcttggcttcctgcttctgttatgtgggtactcatcttatgctttatcttgttgaatgttccttatttgcatcatagatactgctgtttgctacttgcccgttaatgagcttcgtagtttatgctttaatctgctatgtatccgttaatgangcttcatag

SEQ ID NO: 131470 - DNA, 208 bp, Arabidopsis thaliana columbia
  unsure (1)..(208): unsure at all n locations
gcttcaaattttccttttcatcgtgtaagaaaatttgtttcctctttcttgtttttctcatcttgttgcatctttnatggtaatgcctctgaacttgaaaatgtttatttttttccttaatgtttaagattaattttggttctgttcggttttgattactatagaatacacactctaccatgttggtgaccgttgccttttaaaaaaa

SEQ ID NO: 131471 - DNA, 398 bp, Arabidopsis thaliana columbia
  unsure (1)..(398): unsure at all n locations
ctgaaatgctggttttagagtctgtgggtagtgttcccaaaatggctgagatctttgcaaagatggtttcacattacactagttctaacccgagaagagtgcaaatcaaataaagacagactaatcatacagaaaacaagacttgatgatgagaaaactcagggcttccataacttcatagtgcaatcttcactataggtagcaaggaggtttctatgcgggtggtgtgttataccaatcacatccttctcatgcaccatcatgaaatgctcaagtccaccagattgatagttgaagcagtacagtttcttgtcttcgccgatgcagtatatccaatctccttttgtaggatacacatgctgctacaaaatctcctccttccctattaccggntgngg

SEQ ID NO: 131472 - DNA, 173 bp, Arabidopsis thaliana columbia
  unsure (1)..(173): unsure at all n locations
ctttcttcttttgggtctctttgcatttctntncatcgtctcanaaatggctgccgcggacggttgaagtcaganagtgaggaaactgtgaaaccatgggccacatggtggtggattcggtgacaatggaggaggaagataccaaggaggaggcggccatggtncacnggggg

SEQ ID NO: 131473 - DNA, 288 bp, Arabidopsis thaliana columbia
  unsure (1)..(288): unsure at all n locations
gctctgtcttggttattagtggtgaagggtgttcaaaaatcagtgacttgctttgctcaattttcacaagaggtcatgcgtccatgagcaattggcataatacgtaattgtcagatggtatacaacaactgtggacaagngtgtatgtttttcagtgtggcagtgttggaaaaagaagcaatgcgngggaggcacacctcttcacttaaaggtgtttgttaagagtcgtaacttttacatttggctgtgttgttttattttagagagaaagagacacaactcttcact

SEQ ID NO: 131474 - DNA, 266 bp, Arabidopsis thaliana columbia
  unsure (1)..(266): unsure at all n locations
taaggacacacctaatttaacaactcaacaagcaccaaaagatgtgaaaggcgatatcatgagcctgtttgagaagacgaatatagtatcgccttttgccatgcatcagaacaggttntatgctcgctcagcagcaagccctttacatggctgcagcgaaantggtagngcactccaaacggcgtgaatcaacaagctattgctaatgctcttaacgtagcttctgcaaattggtcaaaccccggcggctaccagatccccggaat

SEQ ID NO: 131475 - DNA, 350 bp, Arabidopsis thaliana columbia
aaattatctcagctaagcacattgctcaggcggctcgattagatttgaactaagaggaggtgattggaaaaatgcattcttgcaaatggatggtgaaccatggaaacaaccgatgaagagtgattattcgacttttgtagagataaaaaaggttccttttcaatcgttaatgatcaatggcgaatgatcgaggaaactcttttcaagaagttgtaaaaggattaaaaaagcatgattctttatgtatttctgttccatcaattagtcaaaatagtgatctatgttgagcttttgctacggctgttgttgtgctagtgaagcatttaactttgtgtaattttatcaaaaaa

SEQ ID NO: 131476 - DNA, 501 bp, Arabidopsis thaliana columbia
ctggcctcctctctcttgagaacttcaaagcagcactttcaagtatgcaaaggcaaccaaagttggaagccgttagagattgttccgtactggagctttatcttctggtctgtatgaggaggttagaagtgaaggagcaaagccatacaacttcatcagtgtgatgaaagagtataggcgatacacgattcttttcatacctcagactactacgcacaaaatgtctgcctaagggcatttgagcacctgagagagcgacaagttatatgctatgcagagaatagaggacagtctcagacaggagagtaccgtttgcagaagcttttgtatcagcctctgagcttcatcagggaatgagatctcatgcttgttgcccccgccatccttctcaagttattggaccattgatctctgtgttttgtcccttggaaataagacaagtctctcaaggaaatgtgatatgtatgtttatttcatggtaaaagcatcttggttacaact

SEQ ID NO: 131477 - DNA, 406 bp, Arabidopsis thaliana columbia
ggtagaagcaaaaattccttagaaccacgaaacaatcaaacaaacaaatccttcataaataaaacaaaaaagaaatcaataatttttcccaacaatgatacctagaatgacagagacaagagccactccaagtgcgatcttcaatgttcatgagatgccatgttcagctttctgaatcataacgtgccctgaagacgaagcagcatctaagttcttcttgatcttagtttgctttggatttgaaaaagataagtcactgtctcgagatttcacttctacttcttcctcttttcccgtagactcaatttccttagatttagcatctgcaagcttccacttaatgttcaagctcattcaacttcgattcgagatgacgatcacagacctttttagcatcaagctcttc

SEQ ID NO: 131478 - DNA, 288 bp, Arabidopsis thaliana columbia
gttagctaaggatgatatcgaagggattcagcatttgtacggtggtaatccgaatggagacggtggtggttcgaaacctagccgtgagagtcaatctaccggtggtgatagcgttcgtcggtggagagggtggatgattagcttatcatcgattgccacgtgtatattcttgatttctgtttagtgtaggttttatttatacttttattccatcttattttggggtcaattaatcgatttgtttttgttttcttctaaaatgaacgattctatgttatcgatggaaaa

SEQ ID NO: 131479 - DNA, 255 bp, Arabidopsis thaliana columbia
atatttaaattatgaaaacttacatttagtgttcgttcatccccaagtcgggtgtgtaactaaaagctgatgatgacagagagattcaccaagccgagacaaagacacacagtaacagagagtttttagagactcttacagacacatcataacaagcatagagacagagagacccaggaaaaaatattactaggttaggtgaatgtaagaacacaaaaataagagagagaatcacaagggagaaagtcaacggat

SEQ ID NO: 131480 - DNA, 318 bp, Arabidopsis thaliana columbia
cgatttggcaacgagcgatttaactccaacgcaatcagcaacgaggattggtcacaatactacggttcttcttatagaccgttccctactccatataaggttaacacagatcgaatgttcaatgttacaacacaatatatatctaccaccgttgcgtgtagagaactctgcgtttagtgattccgatttcttcgacgagtatgactcacaacaacgaccatggcgttttcgatgactttacttttgctgcaagtaactccaaccacaataatagcgttggtgatcagtgatccacgttggcaattatgatgaacaatt

SEQ ID NO: 131481 - DNA, 318 bp, Arabidopsis thaliana columbia
gcgctttatgccttcatttgaaaacattagaagagagagtttgaagcaaacgtatggtgctgatttcactgacaacaggtctctagttattaataacgccaattccttcgcattgagaagcagctttgttcatgagcatagaccttctatcagttcctatttaaaaacagacatgggatctgctggaccagcctggacaggatcattatccagttctgttcctatgaatgatcgtgcttctacggtggggatttgaaatgggatagtttatctggatccggatcacttcaacgctgcagggtagctgttctctgataa

SEQ ID NO: 131482 - DNA, 265 bp, Arabidopsis thaliana columbia
aatgttatcacgatttctacaataagaaaaatccacaactgtatcatatatcgagcatttgttgatcggtttcaggaaaactctcagaattggcgttccatcaagaccgaatcattgtttcctatgtgacttcttgtgctgtttcgttttggaagacacaagtccatttgcaagatcaaacgagctaagatcatctagaacttgatcaagaccaagactaggagcttcttcacctttccttctcagctctgtgaaccttctcttg

SEQ ID NO: 131483 - DNA, 258 bp, Arabidopsis thaliana columbia
  unsure (1)..(258): unsure at all n locations
caaaggtggaaagaagaacaagtcatcaggagggaagaagagatgcccattcccttgtggtccctcttgcaaaaagtagaagatatttncacaccaagtcacatttttccaatagaaatttttacttgactgtattggtgaatcgttgagtgacttatgaggcttttggcatcttaaaatttttggattattataatatatgttatgttgtcattttggagtgttaatgggtttaaatgaaatatgatttttgctaaa

SEQ ID NO: 131484 - DNA, 248 bp, Arabidopsis thaliana columbia
cggatttggattcagctctgaaactgaagagatttgaaccaaaagagttggagcaagcaacagattcattcaacagtgccaacatcattggctcaagcagcttaagcacagtgtacaaaggtcagctagaagatgggacagtgattgcagtaaaagtattgaatctaaaggaattctctgcagaatcagacaagtggttctacacagaagctaaaacattgagccaactaaaacatcgaaacctggat

SEQ ID NO: 131485 - DNA, 387 bp, Arabidopsis thaliana columbia
attcgcagtggccgcctaaagctttcgcctttcgccgggcttgagagttaatgcagcttttatccttccttggatgtctgagatctttattcactctatcgattatcttgtctgtttaggttattccttctagtagattattatcgtctattttttgtgttgaatttgcaggtaatttcttggtggtagcttcttcgctttactggcttttggagaaagagttccttacgtttcctgtaatttcctttaatctgtaaaaatcattgtcagatttatttacaatctgtaaagagttctttgttgtaaacaattttgttcattggtgatgaaattttgttctcattatgaattttatttgtgatgaaataccgtgattcctttattaaa

SEQ ID NO: 131486 - DNA, 264 bp, Arabidopsis thaliana columbia
tataacttgtgttgtaaaaactcaatattacaggtcttgatacatatgaaactaaaaccaacaaacttataaccataggcccaacgagaaaagcccaatcgagaaacataatcctttaaggaagtaagctaaataattcccgactgcaaagccacgtggaatgctaacaaataaagttgaagacgtggatagatgattcttcgtcaccgttcatcgccgatctgttcagcaacaaccggaaaactccaaagccaccggaaacag

SEQ ID NO: 131487 - DNA, 446 bp, Arabidopsis thaliana columbia
gtttcggtcacccagcttccacagccactagaagagttctcatcgctcttcacgagaagaatgtcgactttgaattcgttcatgtcgagctcaaagatggtgaacacaagaaagagcctttcatccttcgcaacccctttggtaaagttccagcctttgaagatggagacttcaagattttcgaatcaagagcaattactcaatacatagctcatgaattctcagacaaaggaaacaaccttctctcaactggcaaggacatggcgatcatagccatgggcattgaaattgagtcgcatgagtttgaccagttggtcaagcttgttggagcagtcttaagcttgtatggtatgacacagacaacgtgtgagagagagctagctagcaagtctgagttagaacacagcttggtgagtcagattgcttgacatactgtgacttaacat

SEQ ID NO: 131488 - DNA, 283 bp, Arabidopsis thaliana columbia
gtctccttctttcacccgaaattgtctctgacaccgttttgattcagccacggctaatgctgcgtcaggaatggcagtccatgatgactgcaagctaagatttctggaactgaaggcgaaaaggacacaccgtttcattgtctacaagattgaggagaagcagaagcaagtgattgttgagaaagttggtgaacctattctaacttacgaggactttgcagcaagtcttccagctgacgaatgccgatacgcatttatgatttcgactttgtcactgcagaga

SEQ ID NO: 131489 - DNA, 404 bp, Arabidopsis thaliana columbia
gacaatagttcgattaaaattggaagcttcgggggtaagaacataagttttgaaaagtatttatctttgtggtaaatcaaagctaaaattgaggtctaaagggcaaaagggtgtcataattggtctctcgcggtggcttggcgacacggaacagagaattaatcgagaatctttttcagcttgtaaccggaattcatggcgatgcaagccggtgttcagacctctaaggtccttatcctactcggcgcaggtgtatctggttcgatcgtattgagacatgggaggttgtctgacctaatagcccaacttcaagacttactcaatggtgctcaatggagttgaaagcactccttttaagtatgacggtgcactccttgctgctcagattcgacagtttgcaaacg

SEQ ID NO: 131490 - DNA, 318 bp, Arabidopsis thaliana columbia
gctaaggcgtaccctggcatttaccaaaactccattactaacgcgggtggcttctacgcgagcagtggatacgaagatgagttgttatgggctgcagcttggttccaccgtgccaccaacgaccagatttatcttgattatctaacacaagcatctggtacaggaggtccgaggactgctttttcctgggatgataagttcgtgggtgcacaagttttggtcgccaaggtactatttcactaaagcaacatatcagtaacttatgtgacaagatataaacatatatacacaaagtttttgcaaatgcagcttgcactt

SEQ ID NO: 131491 - DNA, 319 bp, Arabidopsis thaliana columbia
  unsure (1)..(319): unsure at all n locations
gttattcaattaatcatttataaagtcatatgaaatccattgttattcacaatttcataaatttgttaagaaagagctttggaaaggattttaaagactttatttacagttttagttgaaaatagtgataagaaaaatcgcacctctagatagggatgtcaaatgggcctaatgaccatatgataaaccagtccaagttataatggtttggtgcttgtcacgcccaaaatcgaatcggtcaatattggacatcttggtcaatttatgatctaatcatgtaggaaataatttcagtttaagnttaatttattggtttaac

SEQ ID NO: 131492 - DNA, 401 bp, Arabidopsis thaliana columbia
  unsure (1)..(401): unsure at all n locations
tgcaacatttccagctgctactccggagtgtcctgaaatgaaactatatatgtaaacctcttgccaaaattctcgagctattcagagaaacatcaagagaagaagaaaccaaaccggcatgagcaaaaacatcccaaatgctaggacgttctcccatcttcgtcagcagctccttccacctgttgggaatttatagacaaaacactggtttatctgatagtttctgatcttttatcattctaacatganggtgaatatatatgtaatgttacatctcaggnaaaatactcaaaaaaagggttgaagaacctgataagctgatgtgccagagccaaagtcaaagcctgggggggtagtcatttctgctgtattttaagcgncggaaactgcggttaaaggcc

SEQ ID NO: 131493 - DNA, 423 bp, Arabidopsis thaliana columbia
gaagagcctgttaacaaccacatcaagacccaaatggcaaagagcactctgaccatgttaccacttcttccgactgctacaagaccaaattggtggtaaggcacaagaatttgaaggagatccttgacgccgttcaagactacttcgacaaggctgcctccgctggggaccaggtctccgccatgcttgagatcggccgggctgagctcgaccgcagcttcagcaagctgaggaagacggtgtatcattcaagcagtgtgttcagcaacttgagcgcaagctgggacctcaaaacccccattggcagtcaaatacaagctcgatgcatctaccctgaatgatgaacaaggcggcctcaagagcctcttgttcactctagaccgacttctcgcttgggaaaagaagctttattgaggatgtaaa

SEQ ID NO: 131494 - DNA, 355 bp, Arabidopsis thaliana columbia
  unsure (1)..(355): unsure at all n locations
tttnnaaatatgctcttttctttcctgagaagaaaatggttttgtttcatagatatggatttacatacgactagaaaatggaaatttttatctggatggaaattgatgtgntgacaagtgtttcgnctaagaggtatgggaaactttggaatagagactttgcttttcgtggcttcctgatatagtattcactaatgtacatctgctgcgtagatggntaacagtggagacattggatcacttgggtcacaatattatatcgggatttctgtaaaactatattggctcgatggatttgacaatatggaatctgggttctcttggggacgtccgnggctcattttggcaacacaag

SEQ ID NO: 131495 - DNA, 398 bp, Arabidopsis thaliana columbia
  unsure (1)..(398): unsure at all n locations
tttaaatgagaaagattgtgagtcctcacaaaaccacaagactcaatttaatcaatcctcaaatttacatgataccaacgtaatgagagcttaaaantaaatgagaaacttggacataatcagttgatggagtaggaacgagaacagacagtctggagagattcagtgaagagagatgagaagctggtcaaggcctggaatacattgggcaggccggtttgtagattgttgagagtcatagctcgtgtcaccttccacagccttcacgtgcctcattacctcatccttccacctggcctttgacatgccggcagtcacattttcttctcagataggggggtcccgtgagttccacaacttcggttccaggggctattccaaccgttggggtattgcct

SEQ ID NO: 131496 - DNA, 359 bp, Arabidopsis thaliana columbia
  unsure (1)..(359): unsure at all n locations
gaaaggcccaacttcttcattcatggcctnttttgtttctttggattgatctccctttcgtattcattcgacctgaggcgttcctctcagtcatacaaaaaagaaaggttctntcatgcaatgcataacgggtgggcctcctatggattcctctaactcaatgaatgaagggaggagtatgaggaaggccggctttctggatgaaaatgaaaacaaaaaggaaaagggtcaaaccatatcttacttaataatctgactgantnacggagagctctttaatgtggtctcacttttaccaccatcttgaaatgcgcgaaacttccgtttggtgggaagccagtccatgaaggattcttccc

SEQ ID NO: 131497 - DNA, 388 bp, Arabidopsis thaliana columbia
  unsure (1)..(388): unsure at all n locations
tcgaaccttaggcggaccatgtttcccccgatgcatacaagtctgaatcccaaacatctatctgttagtcattggctggcaagaagaggaccccttggctgctgacaagtgttggcaagtnctgctagcggttccgcagctctccttcnccactttatttagaactcctgttgttgaagagagagcattcaccgaaaatggaagattctattcttgctggtagcatgccagttgtgagtagaaatttgatgtattggcttacctttccctacaaatcttacctctccagaggccatttaccttctttcctctttgtggttgggaagtatgcggatagaaggctaagaaggtaaggcttgagctcttcacttcagattaaggtaaagca

SEQ ID NO: 131498 - DNA, 178 bp, Arabidopsis thaliana columbia
aagacgatgatgatctttgcaacaacgatgcaatgataactttgcttttggttccgactattgaagcacaaactgagtgcgtgagcaagctagtcccttgcttcaacgacctgaacacgacaacaacgccggtgaaagaatgttgcgactcgattaagagcgtgagagacttacatgt

SEQ ID NO: 131499 - DNA, 219 bp, Arabidopsis thaliana columbia
ctttttgtatatattaatatctcagtgatacaaatgataatcgataatgtaacaacgatgattataaggaagaaaaataattaaaacagggagtgtgggaggattacaaagaaacacacatcaacttaccattaacatacatcaaagactgtggctgacacatgtgctatgctcggctcagtacagagatagcgactgacgtcatactaattgacgatc

SEQ ID NO: 131500 - DNA, 233 bp, Arabidopsis thaliana columbia
gctcgtgccgcgaatgtattctgctctttaggtaatcaagtacatatgtgaaggaaacataagtttatatccaaaaattggaattcagcccaaagcccattaaccaaaccaaatttaacctttaaattccttaaggaattccttggccaggaaccttcatcttgggccttccttgaaggaattccttccaccgaattgaagttatgaaagagccaagaccacccaagagttat

SEQ ID NO: 131501 - DNA, 246 bp, Arabidopsis thaliana columbia
ttcgtttgttggctcttttgcgtttcattgttagatctggcatataagttccttgaacctcttgtttaaagggattaatttgttttccacgcttatcgatttacttttttgagaacaattaagatgcgattaggttttttgtcttaggttgaactattgacttgtgggtcttctctagtcatctagtggagagcggtctttgtctttaggtgatcgagtcactgctcatctcagcgcagttcgatc

SEQ ID NO: 131502 - DNA, 157 bp, Arabidopsis thaliana columbia
cttaaacgaaaattttgagaagaatgcatatatgcttttgcaaaaacaaatttctaaactttaaacaaatgcataaccacgagagagaaagagggagaatcatatgattgatcttgcatttgatgaactctgggagagcatacatacatatagctag

SEQ ID NO: 131503 - DNA, 348 bp, Arabidopsis thaliana columbia
  unsure (1)..(348): unsure at all n locations
taaaggaaaaacacaagaaagaatcatctgcatgtcttccatagataatcaaactatattcttgcctaagaaacagacaaaatggcttgatcaagatcaacttgagcagcatccaaccttcttaacctcagaaacatcatccttagacccaacattaatactttgtcctttaggaagagtagtgtgatcatcaccaatatccaacgncttcttgcttgcaacacggtatatttgagaaagcacttcagtgaaagcattctcaacgttcaaagcttcaagtgcagatgtctccataaagaatgtgttctgtcnctctgcaaaggctttagcatcttcagttgaaacagc

SEQ ID NO: 131504 - DNA, 308 bp, Arabidopsis thaliana columbia
accaagccttgagacgagccagtgaaccacctcatccatttctttaggaaccgtatagtgaccaagcccttcatatggtttgaacatagtttgtcggaatccagccatggcaagtgaatgagcagatttttctccaaatctataaggaactacatcgtccgaagttccatgtgcaagtaagatcggtatcgatgcagcgcgccttgcaacctcattcgaactttctattttgctccttaagctcctccaaccaggaagccaaccgctaagtcctacagtagctcgtaggtttatagtataagcatgta

SEQ ID NO: 131505 - DNA, 343 bp, Arabidopsis thaliana columbia
  unsure (1)..(343): unsure at all n locations
ttttntttttttgtttaaaactcatagtattaaatcantctatgcgntacataatcattctccaaatttgtccttaaactagcaaacaaaaagctttagtttaagactagagtnccaccagtgacgtactcggtgaaggccaacgcaacgagaccgagcatcgcaaaccgaccgttccatagctcggcgtctgaagtcatgaacccttttgactttgcctctgcccttattcccttgaacaacggaaccatcgatgccaacgtcaacaacgctgttgttcctagaaaccacccgacaccaccgtcagagatctgagcaaacacgttttctccctttgataact

SEQ ID NO: 131506 - DNA, 437 bp, Arabidopsis thaliana columbia
ggatcgaagaaagccatcttgccttgcgtcttgtcatatgcagcaaccctgaaaggaaggatgttgagtcgttcgagtcctggtgccatgcttagtactttctctccatgatcagtatcgtaaagatcacgtgtctctactggatgacccatcccagtaggatcacgacccacactgtaaaggttagcaccagcattgattctagccttggcgtgccactcgtgccgaattcggcacgagcgatgtcgatcttcgcgttacaatgggaagtgcccgtcgtcggctatggtagggaagaattgctttcggctatagctagtgatcggggggttggtgtgcaattacaaaatcaatcggtctccggttttccagaggagtattctaaggatccaaggatcatcttcttcatcgcgactcatccagttcttcggccaccg

SEQ ID NO: 131507 - DNA, 442 bp, Arabidopsis thaliana columbia
tttttttttttttttttttataacaatggggacaatatccttgagagaccttatttattacaatctggagaaacaataaaaatgttcggtaacacaacaaggagaaggaatttttcaagttggtattactaatcgtgaagcaggagagatttgttggacgagaaaccgacgtatagagacgagcaagatcaattgtgtcaagatatagaaaccgagcttacatgtttttcctaagatgtctccactcgtgccgaattcctgcagcccgggggatccactagttctagagcgggccgccaccgcggtggagcttccagctcttggttccccttttaggggagggttaattttcggagctttgggggtcatcatcggcaatagcttgtttcccggtgttgaaattggctatcccctcaacaaattccaaaaaacaatacgaccc

SEQ ID NO: 131508 - DNA, 354 bp, Arabidopsis thaliana columbia
  unsure (1)..(354): unsure at all n locations
gttagctctatgtgaganttgtttacccaatatgtggctacaagaatacatatatattaatgaataaaactctcaagacgtttacttgagtttaacgaaagcggttttnttttttgaaacgcagacgtaagtaaaancccagagagtttgtcacacacaagtgcatcatagaaacganaacaaaaagggaaatgaaacaaacaaatggagaagcaaatataaaagaaaaaaagaaactttgatcccattcataaaaccccagctttttaagcctttgatcttgagagcttagaaacattttctgtgaacgattcctggncctgcctcatcatactcggccttggagatccacat

SEQ ID NO: 131509 - DNA, 415 bp, Arabidopsis thaliana columbia
cgtccaaaacgatatctggctttgcattctttcgatggaacatgtttcaatttcaccgcttttcaaccggctattaacattttaagggagtttcaagtgtttctagagaagaacaaagaggaagttgtaacgattatcatcgaagattatgtgaaatcgcctaaaggtctcacaaaagtgtttgatgcggctggcttacgaaagttcatgtttccggtatctagaatgcccaaaaatggaggggactggccaaggcttgatgacatggtgcgaaaaaaccaacggttgctagtttttacatccgattcacataaagaagcaaccgaaggatcgcctatcaatggaagtatatggttgagaatcaatatccaaatggagggttgaaggtaggagtgtgtcaaatagagctcaatca

SEQ ID NO: 131510 - DNA, 297 bp, Arabidopsis thaliana columbia
gataaatgataattgttattaatttctagctacaacataaaataaatctttgtgactgaaatttgaaactagtttattttattcaagtataaatgttattatttataaaaatttatttagataatctcacccatagctaaaacaaataagaggatgaaagtgaatatatatatatatatatatatataaaaagtaaacattagtttaactaatgcttgaaggcttgaagctccttgttgaagccaaccatttatttctggtaaacattatgagccatcaatttagaaaaagaagaac

SEQ ID NO: 131511 - DNA, 278 bp, Arabidopsis thaliana columbia
acagggatcataaccattaaaaacatgcattgtgatattaatcctttatcatcggtcaagtgtttgctactattatagatattaatccttctaatcacaaagtctatatcaaaacgctacccaatgattcccattgacaaagagacaaccgtaaagatggtcaacatgagtgtaccactgcttgtttgtcgttgaaccaatggagttgttccattgatgtgttcgacatagtagttccttaaatctatttagttcctcatctgtagtagtttcaagat

SEQ ID NO: 131512 - DNA, 324 bp, Arabidopsis thaliana columbia
agttttatttttcttaaattaaaaagcaggagggcatgccataaattacggttaccaataaacgatcatacaaacgcgttacgtaaacgcagtacaataaatcgtgagtagactgagtagtaatttggcaaaatgcattgacatagtagcaccgaacagttgttcatgttacccttttttaagggggtgatgacataacgatgtcgtttagctgagtgtacaccgcatccacaaaacgatgcgtttcggtaagaggcttctccattgcttccttgagctcccgtagagtcgagcaatacgcttcctattatgtgatcatttaca

SEQ ID NO: 131513 - DNA, 224 bp, Arabidopsis thaliana columbia
ggatgtgagatcgaattgtgggattacctcagcaaaacttgcttattgtgttgcctttttagaagttttagtttcacaatgtgtggatttattagttgtagagcttttcgtatgcttggcacaatggttttttctcagagaacctttttttgttttggagaaatgcatagcagcattaataaagtgtaattggatcagaactgaaacaatgttgttaccgattc

SEQ ID NO: 131514 - DNA, 244 bp, Arabidopsis thaliana columbia
cgagacgttctctctcattccctaaaccctagcaaaaacctctctctctctctcaatcacttctcctccttcaatggctggcgcaacgcaggatctgccgctcgttcttcgtctccgccaccgcaagatcaccacctctcccgttctcccaccacggcgcttcctcgcctccgtcctcctcaatcctccttacctagccgtcgcttcaccttctcatcaccttccaggaatctatggagcagtt

SEQ ID NO: 131515 - DNA, 224 bp, Arabidopsis thaliana columbia
  unsure (1)..(224): unsure at all n locations
gttttcttctnttcttcttaagagatttttctccaagaaagttcgctccttttctctgttcttaacaaaaaagtctcggtttttttctctttgttttgggtactagcgtgatgtcttctgagaatgatttcgttgagttttcttctatgttcgagagaattatacaaggaagaggtgatggctctctctgatttttgccggtgattgtagctttagccgccaga

SEQ ID NO: 131516 - DNA, 239 bp, Arabidopsis thaliana columbia
caagagtatcgatgtgatgcggagattgttgaattggtcaggctatgtgtttctcttaggaactttcatattggtttctgttttaggactatttttctacagtcagtttttgtctctttttaagattttcaacttggtttatgcattttcttattttaagacttcattgaaactaaataagctgtggttgctttgtctctggacaaagttttaatgttataaaaaccattaatgttctt

SEQ ID NO: 131517 - DNA, 157 bp, Arabidopsis thaliana columbia
  unsure (1)..(157): unsure at all n locations
acgggttcttggaaaaacattggcaccgtgccttgtcttcctatgagttgtagtcttaggccatacagaagaactggacatatttttntnngaggaaaagtttactggctcgtttctttagatncnccaggtaagattctctcagtagatttggaan

SEQ ID NO: 131518 - DNA, 233 bp, Arabidopsis thaliana columbia
gatcttcttgctttgggagataaccgtggatagtccgacattcgagcattaggtgcatgatgatacacatctcggatattgtcagaaagatgctgcaattttgacttttcattgtctttttatctttctcatatgtatctcaagagacaacaagtagttagagttttgagattaaacagttgtaaccttttaacatagagagacaagaggagcaatgttggaatgtgtttaag

SEQ ID NO: 131519 - DNA, 183 bp, Arabidopsis thaliana columbia
  unsure (1)..(183): unsure at all n locations
taatttgcgggtaagttgattggatttatttatatctacttaggagaatagcaanancagtttctaataagcataattttttggccttgagagagttttgcatttcaattttcaggcatttgtgttttttcttacatttaaaatcttaatatctgattgaaaatanataagatgattatattc

SEQ ID NO: 131520 - DNA, 252 bp, Arabidopsis thaliana columbia
  unsure (1)..(252): unsure at all n locations
aaaaatcaattaanctttttaccctaattgattcctgcgccatagaaacatctctttaaagtgttataatgttaactgtctggtacggaagcagaggtgtggttcaacgccatcctttacttttgtccaaaatccacaaagaatgcattctaaaattagcaatcaacattacagagcaacaacaactaatctcacgttgttcttgtcctaatcctcgtccatcatcaatgcgtgttcggaagaggtagtctt

SEQ ID NO: 131521 - DNA, 234 bp, Arabidopsis thaliana columbia
cttttttttttttttttttacaaaaaggtacaactaacaagttagaacaagtacaaatgagttcaaaacaagaggtacaagtagtttatagagaggtacaactcaattccaaaagaggtacaaattacttcaaaacaagtcaaaaaagtacaaatgactctagaaataggaattcaacatagtttcaaactttaacatacttgttgcaacataaaaggaaatacaatcacaaaa

SEQ ID NO: 131522 - DNA, 247 bp, Arabidopsis thaliana columbia
aatgcaggtctcttcagactctgatatttcggatctcgtagaccttaaattcgatgctccattgcctagtcatatgcaactaagctttaatttgttgaaatctagagtcgaaacttgtgacaaaaattagattttttttcttaccgagctttcttctttgtgttcattgaggcccaagtatttgtgtatttggacctggatattctcatacaaagataaataattataattaaatgatttttcgcat

SEQ ID NO: 131523 - DNA, 279 bp, Arabidopsis thaliana columbia
ccaagttcctctgctccaaaacctcttaaaccctaattcgaatttagcctaaaccctaaaatggccaaatggagacttgcgactgcgacgctccgtcgacaacttcaatcctcatcgccaactatctaccttcaagaatccaaccaaagcattgtctgcggcggctcatcagtctactcgcagctacagtacaactcagaccgatgattcgagagggaaatggttaactttacctcctttttctcccaccatcgatggcaccgcgttgggaaagggatc

SEQ ID NO: 131524 - DNA, 261 bp, Arabidopsis thaliana columbia
  unsure (1)..(261): unsure at all n locations
ctgcaaaagccagtgagagcttgatcgggatgcanaaggaagttcgtaatggtaagaccgaccataagagtaaaactctctatttatagttacatttgatcataggttataaatttggaggtcattaggtgatatttattccagagagaaggataagcaattatatatttaccagggcaattggagaaaatcatttgtaaaagtttttcagtataatgtgnngannnnagtcgnttattattactacttttctgttataat

SEQ ID NO: 131525 - DNA, 277 bp, Arabidopsis thaliana columbia
ctccagtaaacttcaccaagtctcttctgctgaaatcacgatccaatgaagaagatccaagttatatagtgagacctcaaaccttagcttgagctctgcttcttctctctttcactgcattgaagatgggatctgtatctttaaagatcggcgatggaactgccagattccgacgaacatcaatttgttcatccgccgtgaacctcctcatgctcttctccgtcgtcaccacaaatctcttcgccttatacgcgttctcctctcattcccaagcaaa

SEQ ID NO: 131526 - DNA, 361 bp, Arabidopsis thaliana columbia
  unsure (1)..(361): unsure at all n locations
ttttaatccaaacatgttgtgttttatactgttcagcaaggtcctggagcctctccttctatctcacagagattaagaagttgcaacaaataaaaaaaaagaaacataaaccaaactattctnctacttagttaaaacataggtgataggacanaggttttataagccatgtggccaaaaaaacttgtgttgccaaatgagccacggacgtcccaagagaacccagattccatattgtnaatccatcgagccaatatagtttnncagaaatcccgatataatattgtnatccaagtnatccaatgtctccactctnagacgaaacacttgtcaacaatcaatttccatccagatattaatt

SEQ ID NO: 131527 - DNA, 325 bp, Arabidopsis thaliana columbia
ctaacatgccggaaaatattaattaaaagaaaaaaagaacaagtgaagatcatcattcagatccagactcttgactgttgtgcttttattaatcaaccgatgagtaacttattctcttccaggaagctgtaggttggtacttccaggttgtatggtgcaggacctttcctaattcttccagatatatcgtaatgtgatccgtgacacggacaaaaccaaccaccataatcaccagcattaggcaaggggatgcaccccaaatgagtgcacactccaacaaccactaaccattctggattcttgaccctaaccgagtcttcttgtg

SEQ ID NO: 131528 - DNA, 390 bp, Arabidopsis thaliana columbia
  unsure (1)..(390): unsure at all n locations
tgtaactnttttgcatttaagaagaagttgttctgaacaatttaaaagagagaatcaaacgacaaattatttatccaaagattcaagaaggaacaacaacagtttgcatcatgttcttgaattcgaaaaagtcaacgcgaccatcatgattactatcaacagagacaatcatcttctccacttgttcaatctctcctgcttcaggtaatccaagcttcttcaaaaccttttgcaattccacagcggagataaaaccatctccgtcttcatcgaacacattaaaagctncttcaagatctgattccggagacccatcacagcaacttccttctccnccaaagaaagattcgtctaaggtttttgtgggagtgcagcaaagncatcgaaccg

SEQ ID NO: 131529 - DNA, 230 bp, Arabidopsis thaliana columbia
  unsure (1)..(230): unsure at all n locations
ggcacgagccaagtncaccagagtttgattctggtgtggatgatttagtttctacgaagaagtatatgtgtggagtacccataacactcatgttttgcctgagtttcttgtttgcatcaaagctccatttaactaactcgaagtccaaagagattgagatcaccatggatgcattctgtatgatcaagcattgtcagttctacctctctcaatcttatcagaactacaat

SEQ ID NO: 131530 - DNA, 196 bp, Arabidopsis thaliana columbia
  unsure (1)..(196): unsure at all n locations
gtgagggaggttcttctctctatnctgcctcctggtgctcctgaacagttttaggaaattgttcccaccaacgaaatgggctgcagcagttcaatccgctcttacagtgccttcttcactggttggttggtccatctcaggtcatagaagtggaagtgaatggtgtgaaacagagaagtggagttcgtatcaagaa

SEQ ID NO: 131531 - DNA, 304 bp, Arabidopsis thaliana columbia
attgtgacgagtgagaggtgtcgtgagagtggagaggttttagtgttcaagctttctcgggtttgtggagtttctttaaactctccgccgcttctgccgtgatgctttgccttgagacttggtattttcagattctcgttcttcttgccggacttctcgagaatcctgaacttgctcttgattcactctctatttgcatgacgatttcagggtgggtgttcatgatatctgttggattcaatgcagcgataagtgtaagagtgagcaatgaacttggagctgggaaccctaaatcagcagcttt

SEQ ID NO: 131532 - DNA, 292 bp, Arabidopsis thaliana columbia
caaactcaggcgaaaatttcgcagcttctcttcctccggcggtgaaacacaggtgagccgcgagcctttccgaaagagaagcttctctctttccaacgaaaacaggcgccgcgaatatctctctcttcgtctcattctccggcgaacacatacgagctcctctccgtcaccactcagcttgcagagggtgttcgagtctacatttgctggaagaagatccatcgtgaaagaagctttctcgaagaaatatagacatccgattttggatgcaaaactcacacttaaacgcttg

SEQ ID NO: 131533 - DNA, 382 bp, Arabidopsis thaliana columbia
agatgatagaatcaatcaacagagataatatctccgaagaaatttgttatttagagaatgacaagtgacttaacattacgtttccagataccaaaatacctaatcacgaactgttacatcaaatctaaagcagaaccagaacaaaatagagaacacacaaaaccaagtagaagcataacaagcgagagagagaacattcattggtaatcccaaacctaattaaaggaattaccatcctccaccaccaccgccttcatttcctcgatctccgtcttcctccttctccgtctgtcgcagagcatcgctcagattagggtttctgctgagagaagatgagggaaattattagcattcatatcggacaagccgggatccaagtcgg

SEQ ID NO: 131534 - DNA, 406 bp, Arabidopsis thaliana columbia
gggaaggcttgtacagagagtaactctgagtcgtagttggaacttacctcggataagtcagattgctcaagcgtgtagcttgtctttagcccgttcgcacttcttgttacctggtttattggctcttacctatagacaagtggcgtatcgcaaagggtggttccaaatcctgtggtctattctccttcacacatttctccttataggagttcgataaacttccctatcgttctctcgtctttagtgttttctgcggtcaagggtgttgttctgatcgggagagctctttatttagcaattttgttttctccaaatgttattatggcgttgttgggatttgcttgcgggcctcgttacagacagctgcatagtggatcctccatcgaactctggagaaagcaggtcc

SEQ ID NO: 131535 - DNA, 300 bp, Arabidopsis thaliana columbia
attcaattttgcagagatggaggaagaattgctctccgccgtgccgtgctcttccctaaccgtcgagtcagttctccgagtcgcgacggccggtggattatatgggttatgcgccggacctcgtgacgctcgtaaaataggtttaagcggcgtttctcaggcttcctttgtggcgaaatccattggcagattcggatttcaatgcggtcttgtaagtggtgtgtttactatgacacattgtgggcttcaacgatatcgaggcaagaatgattgggtgaatgctttggtaggaggagctgt

SEQ ID NO: 131536 - DNA, 390 bp, Arabidopsis thaliana columbia
cttcagattccagcttccaaaggagacgcactcgaaccaaaggcctccgagcaaaaccaacatggaaatagcccagcggtactgtctcctcctggtaaaatgaggagagtgatgggtcctgaaggattcacttgagaagatgatgtttcatttcttttggaaaatatcaatggatatgcccagaagatttcaaaattagatttttaccattgataattcaatattagttaactatcaaagagaaaaaatttaaagccataaatgtccttcttagttcttactttgtttaatttaccaaatatgtcatgtatcaactattgttataatttcactatatatcaactatcttaccatattaatataaatatacagataaaaaaaaaaaaaaaa

SEQ ID NO: 131537 - DNA, 378 bp, Arabidopsis thaliana columbia
ctaaaaatcactttgaagaatatgaagctaattagagtcaccctctttctttgtgcactagccattttattgcttgtaactccaacatcttctctacaacttaaacatccctactcatctcctagccaaggtttaagcaaaaagattgttacgaaaatggcgacgcgaaagctcatgatcatctctagtgaatatgtgatgacatcaacatctcatgaaggttcaagcgaacaacttcgagtcacttcttcaggaaaatctaaggatgaagagaagaaactagtgaagaagaagaagagaaaaaagctctaggacaatatctatcagtggattatcgtacgtttagagagagccagttcacaccaaggctttcctctt

SEQ ID NO: 131538 - DNA, 321 bp, Arabidopsis thaliana columbia
gaacattaaaataagactctataataacgtaaatcttcatacgaaaaaactttaaataaggaatttattatactcattccttatattagcaaacaatatatataaaactaaaataaaaaccaagagtaagataattaaattctcaaaagaaatgatagacgttcacaactagttcttcttcttcttccaagttccaagacaccaacgttaaaaggcgtttttgtcctaagaacgaaccaacatttcttgtagctaaaaaaggtttgagtagtcaaatgaaccggtttggtcattttcataatttgtccaataaccggttgc

SEQ ID NO: 131539 - DNA, 320 bp, Arabidopsis thaliana columbia
gagaaggggtcattcgagcgtatctaaatagatactatgtttacatagggatccctacgtcgttacattccatttaggattaggaataggcgaaatctgacctactttttacatatctctcgttatttgggaccctattcacctctttggttggacttctattgaatcgagaaatagatttgattgtccatctttttgatataatatatattaatatatatatacggcatcctccggataattcaaatctaagcaattagatgtccgactcgggcctatatgacatgaccgatccaatagaaatactttcaacactccac

SEQ ID NO: 131540 - DNA, 414 bp, Arabidopsis thaliana columbia
  unsure (1)..(414): unsure at all n locations
aatggaaatattataattaatgtaatgagattgattatatgtttctctgaaattacattttttcctgagtttcttttgatatgtggtcatattaagaatacctttgcgaacattttnattttctgtagaatctgctgaaatggggtggagctttacttgaactttcacagttccagcctattcctgaagctaagctcatgttaaatggtatgatctcttctttaatgtcttaaaataaacgcctcaaattcatctttgctctgaaatgtaacgaaatattattgatcatgtagatgctatttccaagttggaagaggccttgacaataaatccagggaagcatcaggctctttggtgtattgccaacgcgtacaccgcccacgcgttttatgtcacggtcctgaggagcaaagg

SEQ ID NO: 131541 - DNA, 398 bp, Arabidopsis thaliana columbia
  unsure (1)..(398): unsure at all n locations
agtgttcctcttcttcttcttactactctgctgcaaaagcaaggcaatttntcagagcaaccacgaaaacttataacccacatatgatatgagattntttcactctctgcttatgttcttntgaacatgctgctactagataataagaagatgacacttttcaaaacattggacagcatacttaaacacatgataacttacgctaacattagatgaagccattcctcctccacctcctcctcctcctccacctagtatttgctgtcccattccttgattcataaactgcatatgcagttccggggcctattcacataggcagacagaancatgngctcanatgtaaaagganatacaggagnnggngatgggataaaatgttctctccttgttatata

SEQ ID NO: 131542 - DNA, 340 bp, Arabidopsis thaliana columbia
  unsure (1)..(340): unsure at all n locations
ccgaatttnatcaacaggtattcgttacaatattcaactttaagtgaagaaatgttgtgtttctccatatagagtttagttgctgacagaatcgagattttcataccttattgaatagatagctgagtcggctggaccggaatgtgaaactgcgctacaagagactaataaactcttggaactagggcttaaagtgaataacagggctgttaaagctctcttcaatgccacggaggtctagctttactgtttctgtcttcctttgtttgaatcttaagggagtaagcagtctatctccaatctggatttaaggtttctgaaatctgtaggcttgatggtt

SEQ ID NO: 131543 - DNA, 432 bp, Arabidopsis thaliana columbia
  unsure (1)..(432): unsure at all n locations
tttagaagaagtatcctcagatcagcacaccttagaggtagaggcgatgagcagcctatggtgcccagaaaccagctcaaacataatgagatggggtgaatcacattcactgtcgcggacgcccatgtgcttcgtaattngcctaaaagagtcaagtctggctgcatacgataaagtagccaagaaaacgatgttganttaatggttcacatacttccgaacaaaagtaacaggagatccacttatccccccgataggtttatatgccgcctggcttagcaagttcatcttccctttgagccccctactacctaatagggagagacttcgctccagtttcagttttggttaagtgctcagtcagtagtaactagatctcacggcaggtgccgcttaatcagtctaccggattccttctgtcttttatcacag

SEQ ID NO: 131544 - DNA, 311 bp, Arabidopsis thaliana columbia
  unsure (1)..(311): unsure at all n locations
tttgaaagaaaggtaaatgtnatattgagtataatttgaaaagattagtcttaagttacatgattccatcatgttgttcaagttagaaaccgaaaccaccaaaaccgccaccaccaccaggaaaaccaccctcgaaatggaaagtgtattgttgtccaccaccaccaccaccatggaacggnttatatcctccaccgcggctccacccatatcttcaagatcctctcctctgtcaaatctcgcccgcttatcgtcatcttccaagantctcataagctgcagcgtttttcttcggaattttgttctcaggt

SEQ ID NO: 131545 - DNA, 325 bp, Arabidopsis thaliana columbia
  unsure (1)..(325): unsure at all n locations
tgccgcttgatagtgttaccatggggaacacggtgaatcgaagaaaggcgatgaaagcgagtttncaagcgttgaagagtgctggtgttgangggattatgattgaggtgtggtggggtttggttgagaaggaatctcctggaacttataattggggaggttataatganttccttgacctggctaagaagcttggccttaaggttcaagctgttatgtcgttncaccagtgtggtggcaacgttggtgactctgtcactaattcctctccctcagtgggttgttgaagaggttgacaaggatccagaccttgcatacactgatc

SEQ ID NO: 131546 - DNA, 318 bp, Arabidopsis thaliana columbia
  unsure (1)..(318): unsure at all n locations
tttagaccaaaattgatatctctaactcattactccatttagatttnagacccacaagataatggtacattgatactacatatcaaaccaaatcactatgtcaccaattgaaagaaaaaaaaactctcgataaaatactaaaacggcaagcnttctgtaattcanacctctcgacaacaaaaaaacgttaaattaaaanttataagtaaccaaaacgttgaaaaatcaaaaccctacttagcccttttttgacttaaaanatttccgttacaacggnacgtaacgggtgcnccatctcacaggtaaggttcaaggcct

SEQ ID NO: 131547 - DNA, 315 bp, Arabidopsis thaliana columbia
  unsure (1)..(315): unsure at all n locations
aaaaaaaaaaagtacatcaacccaaaataatggagttgatgaatttggcttcaaaagaaacaagctattggatgattgcactgcctgccggttttggttcccaaaacctacatgatgtttccaccctaggctatctattccttgccgtcgtttttctctctatagtcacgtgggctntcgccggaggntgtgtgttgcttggaaggacggccgtaaccggttgggtcgtgtcgcgatccctgggtcctcgtggnataccagnattcggnagtctttttnactnttagncgggggntttggctcatcggacgttag

SEQ ID NO: 131548 - DNA, 324 bp, Arabidopsis thaliana columbia
tttagcagaactgaaaaactctagattctgaactttctccaccaaacttattacaagacctgtttctgttctttccaagaaactaacaataccaccaagatgattgtatccaattgaattcaaataaatttcttttataaccaaaattaataagaaaaaaaagactgcaactttcgacatctccaacggcaggagaatcataaaaatcatctgaaagttattgttgaaacccttttatcagcaacccatcaccgcgcaattgtaaacaaaattcgatgaatgtttcctaccggcaatgtccatagagggcgggcttcgatcact

SEQ ID NO: 131549 - DNA, 318 bp, Arabidopsis thaliana columbia
  unsure (1)..(318): unsure at all n locations
tctgtagttctcttttatttattgttgcttcatatgccgaaaaaggagccgtcggtcgaagnaatagcccagtccccggggtcgcatatctgagctgttcttggtgtaaagagtaaatgtagctcagtagggcttggttcttaatagagaaacttgtgccttgactttcctccttccccgcgtccgtgaatggaatgggttcttggcacgtgttcattctttttgctggtctttctacgtcttcctctgctgttgaatgaaagctttgctcgcctacggttcggcttgcttgttccccttcactgacttctacgacta

SEQ ID NO: 131550 - DNA, 334 bp, Arabidopsis thaliana columbia
tatgaaaggaaagcactaactcctgagcttgggcaaagttggctaatcgatttagactattataatagaataataaatccgcgacttgggaaaccctttcttcattcgtttggcgggaaaggagaaaccatttcttcattcattggcgagaaagcatttcgtgccttcgtcctaggctcggctacttctttctcaaataagacaaagattgcactagatcttgagcccgggaagaccgctactagccctttactctattggattgatttggtcgagacccggtttctccttcctagaaacctgaaactgcaatccgcgaacgaccgctttcttc

SEQ ID NO: 131551 - DNA, 424 bp, Arabidopsis thaliana columbia
  unsure (1)..(424): unsure at all n locations
tcagccaatgagaaattgccggagatattgncactaatcgaacatcccggaaactggcaaaccaatctaacaccaggcaaaacgtggagattacctttaccggtgatgtttaggtcacgtgtgagattcaaatcagcgacgagcttacacgtggaatctaaagagccaacacctcctaggtcatctacacatgaaaccgacgaatcatcatcatccggggaaggctccggcgccggagaaggtgacagtggttcgaatctaatcgcagtctcatcccacgaatttgattaatttcggatttgcagatacgaggntgacggacgcgatacagtgtcaggttcttcaccattgggaatcgtaatcggaattcatttagaggatgatggagtccatgggttacacaattcaaccggaggcattttgg

SEQ ID NO: 131552 - DNA, 434 bp, Arabidopsis thaliana columbia
  unsure (1)..(434): unsure at all n locations
gtcatttcttctgcattattgtcgccattatccttttttgttttgtaatcagtattttatcattaaacgtgacaagtactgtcttcattctccaacacataaaatagtcagaactcaataaataatcataaaattgagtactctttggcccctgtatgattagccgttaaactatcactttcgcaaaaaacttcatgtgattactttgatatttatatgtactaaaatagttttttttcttcgtcttatgttcgcatataacttaaaagataaataactcctacgagtatatgatacgtgactccaatcaaaatctttgacttgtgagttgtgaatatggattttaaggtgaanctggtcgnccaggtatttttctacgggtcaaccagcatgtgggntacttttaaatattttntggtttaaccaaatttaaa

SEQ ID NO: 131553 - DNA, 333 bp, Arabidopsis thaliana columbia
  unsure (1)..(333): unsure at all n locations
tttaagactgaatcaaatatatatattaaaaaaatataaacaaacattcagacaaattagtacactctcaaatcacaacaaatcaattgaaccaaaccctttatggaaaaaaaaagaagncaaatcacttgaacctatataaaaccaaggaagaacaatcaaatactgaagaatttggctaccacacatgtctccaatacttgcaaggctttccctgacttaatgcatctaggagtcttgtattgaccggtggaagcaccttgtgagatgaagaagtccntgagagaatcaaacggttccttgacggnccactcttatttcgngaggccccga

SEQ ID NO: 131554 - DNA, 388 bp, Arabidopsis thaliana columbia
  unsure (1)..(388): unsure at all n locations
ccgngctcccaaccttcatcctctctggtaagttcttgctcctgacctctctcgctattcctccatcggaaaatacacgatttcggctgtnttccaatctctttccctaggtttggttaggttaggtttttagaagaagattcgtcttgaacgatgaagaagcctacgaacaagcaggctaaggcttaacattggtcttttgggacatcattaactctccggttccagatggttgtaaccctcgtgtggtccgtccgagtattaaacggcttttggagaatgaaggctactgtggtcctctcaccgtcactgctgttggcaactagcgaacgccctactgacacctgagagcactctatttccagtggaatccatcttatcatcttcc

SEQ ID NO: 131555 - DNA, 393 bp, Arabidopsis thaliana columbia
  unsure (1)..(393): unsure at all n locations
tttaactttttcccactctcaaagtacacttggacgcagacatttgggcttatcttattctgtnctgatcttatctactacgttggagttttggttcggctgattattattaacatccacaaaaatcaaaagaaaagaaaaaaaaacaatattgatggtcggcaaaatcctcccattattactagaaaatacgttgacaaaaattaataaaaaatgctacaaatagaaatatctttccgtctgantttaaaaatttgtaggttgaagtaaacaaagacaatttttaaatcccgaagttcggttactaatcactaatattataccattcgattttnanctacttatgtgtgttgttggaaaaanataaanggtangngagttttttgacagggg

SEQ ID NO: 131556 - DNA, 388 bp, Arabidopsis thaliana columbia
gaaaaatatgcgaatgtcaaatgggaagagcttggattcgctctgactccaatagattatatgtatgtagccaaatgcagacaaggagagagctttacacaagggaagattgttccttatggcgacatttcaattagcccttgttctccgattctcaattacggccagggactatttgaaggtctcaaagcttacagaacagaagacgaccggattaggattttccggcctgaccaaaacgctcttcgcatgcaaactggtgcggagaggctttgtatgacacctcctactctagaacaatttgtcgaggcagttaagcaaactgtgcttgccaacaagaaatgggttcctcctccggtaaaggaactctgtatataaggcctctgct

SEQ ID NO: 131557 - DNA, 311 bp, Arabidopsis thaliana columbia
  unsure (1)..(311): unsure at all n locations
tttctcccccttcccttttaaaattaaggaaactnttttattaatagggctatcaaatacaacaaaactctaaaacattatttttaacaagantcaggtaaaatatgaccgtaaagaacgtctttcatagtatggtattgccctttaattagatgaatttcataatcgtaaaggcgaaagcaaatagaagatacgaaagcttgagagagtgcgaagaggaaggcgacgacgagggtggnggtggagcaaaccccattggctctcctccgtttgcccgatccggtggagatccttgtcattaggaggttttc

SEQ ID NO: 131558 - DNA, 388 bp, Arabidopsis thaliana columbia
  unsure (1)..(388): unsure at all n locations
gtaagtactttcttcttcttattattattattattattattatataancncttccttgttaaagattctccattgttctctccttcttcttctccgctaaaggaatcatattcagatcagtgattcgtttttctgggttttctttttttgttttccgagtcaaatttggaatctaaagatctgactttttgaagctaccaaatttgttttggcgattgatgtttcaataaagagncaaantttttgtttttnccttctgaaatccatttttatcaatcgggntttgggancatctaatcggncttttggatttctcaggatctctctcntctctttttaggccatttttgcaatttcggtggtttgggcctcgncctcggatcctgga

SEQ ID NO: 131559 - DNA, 301 bp, Arabidopsis thaliana columbia
  unsure (1)..(301): unsure at all n locations
gtttcacctacctggtagatatgtgtatttgacctctaaccatacctttgctatctatgctccaaccatgataatgatagcgattggacggtagcaattggtgcttatttcggggattcaaccgacctggntaaaccacttctgcctttggctttgcctcatacccggtctaactcaaactttgactttgctatgcttgctttgttagtatagcaaagtttctaaagctgttagcgcgtagtctgtctgctctaaaggaagtcgatttattgattcgtccttctcggatcgtgtcggtcct

SEQ ID NO: 131560 - DNA, 317 bp, Arabidopsis thaliana columbia
ccacttggccaaaggtcctagccgtacttccctccactcataatcaccaactctatcaaatttttagaattgaaatgtttgactattacaaaagtacattttccatagagtgcaggaaccccatcccctcacccctcatcatctagcacacccttggggttcacatacggttttaaaaagcgaagaacctcttcatactcatggcgaagacggcaacaagccgaaccctcaatcccagtgaggactactccgttgggggttacttcgcaaggacggcgcatgtgcagttcctcagtcttccttctcctccatatgaa

SEQ ID NO: 131561 - DNA, 338 bp, Arabidopsis thaliana columbia
aaacatcacaagactcaaaaggttgctctttgatccagggtttgacaggattgttgggtgccgagaccgatattggagtaaaaaggatgggagaacttgatgagaaacctttcctggatgtttgcaagctgagatattctgcaaatgaagctgcggtcgaagctgccaccctttgctctacatggcaggagaaccttaagaatccatcatggcaaccattcaagcatgaaggaaccggggatggagcagaggtaggttcattcattttacaagtctttatcacactgaatcattgctttaggttggcgccaatatgactttgaaaagtttcttggcca

SEQ ID NO: 131562 - DNA, 373 bp, Arabidopsis thaliana columbia
gtagactgcacgaacaactgcagaactagcaaggcttccacaggtcaaatgagggaacttaagccggaaccaagcacttaaagctccagaataagaagctccgaagaaaaaccacggattctcaacatcgccacttctattaaacttaacattcaaagagtcctgcatccacaaaaaaattcccaaaacatgctactataaacgcaacttctcaaacatatgatcctagagaaacaaaaaccataaggctagtacttgcctggtaatattggcgggaagcagcttaatcggaaaggggcctgtttaggaggaaggttacttgaggattttcagtgggcttaatggccttaaacgggtggggttcttttccgta

SEQ ID NO: 131563 - DNA, 292 bp, Arabidopsis thaliana columbia
cagctgagaatttcatctgcaaaatccttccagattctccttcttcctctacccaatacactcaaggaggattaatgtacaagctacctcaaagcaatcttcagtacgtaacctccataacattcttgctcacaacttacgccaaatacatgaaagccacaaaacacacattcaattgcggaacgtccgttatctccccaacgtccttgataagcctatcgaagcgacaagttgattacatactcggagataacccaatcaaaatgtcatacatggttggattctcttccaa

SEQ ID NO: 131564 - DNA, 240 bp, Arabidopsis thaliana columbia
  unsure (1)..(240): unsure at all n locations
caatttctcgcctctacncgcaaaaaccctaatttcatcatcttcctatctgattccaattatttcttctacaagtttccttcttcttataanccatcgtttcttccttctatcgcgtttcacaaagcttgtcgtttttctctccttgtgggttggttaggccaatttgtttcgattgagcgattgaatctacgagacgcaacaatctctttctgggttagggtttcttcacataacttt

SEQ ID NO: 131565 - DNA, 370 bp, Arabidopsis thaliana columbia
tagagaagaacgttgatgatgattatgatgcttacgacggtggtgacgctgacgtggcagaagcaatgctatggatggggaacggagacagcagaggatatggttagaaacgaagcagagcatgctaaaaacgcagccgagaccgctaagaaaatggcgtccgatgcggctcatgacacaaaggacaaaaccgcctcttgggctggtttggtttccgacaaaatttccacagtattgggaggcaagaaagctgaggcagaagaagcggctgaatctgtgagaactacgcttatgacaaggctgggtccgcctattgacaatgcgggttacgccaaaggactttgcatcagacaaagccgggatcttgctt

SEQ ID NO: 131566 - DNA, 309 bp, Arabidopsis thaliana columbia
  unsure (1)..(309): unsure at all n locations
tctctctgttcttcttattaccttttatctatcagtttganactgtgtcaatctaaagtcagctggggcttcaaacgctggtttgcgnactccttacccatgtanacaaccgtctcaaccaccgccctctagaggatactctccatatggtaaccctccnccagcgtctacacagtttacaccacccacaccntctacagagtctacaccgccacgttctcggtgncctcctgctccgaagagagnntggtgaacacacacatcaggtccaccatccgcggcgangtattctcccccgtctccatattt

SEQ ID NO: 131567 - DNA, 333 bp, Arabidopsis thaliana columbia
  unsure (1)..(333): unsure at all n locations
tgttgagagagttgatgttatctctaagatggttggtggaaaaagtcatatactcagggggagtgtatcactggtcttgctcgcccttattcttgtggacattatactcctggtttctgaggaaaccccgcttcgtgactctctctgtgaagtaaaacgacagttcacatcttcttcttcttcttcttctacagtgtgtatctgngcaaagggaaaatgggttgaagcccggaagagcaccatcgtcttctggtggagaatgtaaacaatggttatcaccgatgtggacatgtagaataatggacagcacccatttctcatgtgagggtcacc

SEQ ID NO: 131568 - DNA, 331 bp, Arabidopsis thaliana columbia
gagagaacattgtcgtcgtcgagggagctacaatagttggagtacacatacagaaacaaccgccccacgacgggtctccacaactccatctacatgaacaccgacaacacggccgctcgttctctcgtctccggcgcttccaccgcctctacaacagagattccttctaggagatggtcgtcttcggaccaccacagtttcgctgcgggtcttcttaacacgggtggggagaacgcgttgctcccttataaggcttcctcggcggcgcacacgatatcatctgtgttggtgaagtatacagtgtcgacagatgtggctatgatgatttgcg

SEQ ID NO: 131569 - DNA, 425 bp, Arabidopsis thaliana columbia
caagcggagcagggagatgcacaatcaacaatggaggttgttggtatgaagagcgagatggatcatgcgctctctgcttgtgtggacaaggacagtgttaagtgcgagtgtcctccaggatttagaggagatggcactaagaagtgtgaagacattaatgagtacaaagagaagaaagcatcccagtccccagagtgttgctacaagaacacatggggaagctatgagtgctcttgtagcggagaccctctctacatcagagatcatgacacttgcatcagcaagagcgggtacacaagtgagatcagcatgggcggccgtgtgtcttataatgttatcatcgggacttgcagctgctggtacatacctcgttcaacaaattattggctaagagaatacatggtctcagagcatcagccgccatt

SEQ ID NO: 131570 - DNA, 361 bp, Arabidopsis thaliana columbia
actaccgtcgtgaattctccaattataccggaatttatcaccggaagaaacacaggcgtctaggaagatgccgctccgatggtgtctcgccttaaatcacgttccggtgtccggtttagcggaccgtatacggataagtttctacaaggtgtgataaacaacgatgtgcggagattcggagactcctccggagagaagaactcgggggctcctacgccgaacatggcttccgacacgaatcccgctatgtgcggagcggtgatatctccacaaggaaggtctctatacgattttctcttgtatagccccgcgagcacccgaagaaatgcttgctcggtctggcacaagcacccgtgcgtat

SEQ ID NO: 131571 - DNA, 354 bp, Arabidopsis thaliana columbia
cttccacagaagaggtggaacgtttacaacttcgaacaatcgagaaaaagtccgaggaggacgaagaagctgcctctagagaagagcagcacacacgcgaggaagctagaaaacgagattctgaatctcgtctcgaagtgcttcgaaacgtccgtgtcttggcgcctctcaaacgagcgtctccggagagagagaagggtaagtatgaagcggtggtggcggcgtctggtgatatctcgtcttctggtggtgtggagagtgttgtctcggaggagcctaagacggcacatattactctgcgcgaagggattagtatttgtgatccgattgagcatcaagaagaatgataacgcc

SEQ ID NO: 131572 - DNA, 457 bp, Arabidopsis thaliana columbia
  unsure (1)..(457): unsure at all n locations
tagtcgtatatccagaacctgggacacaattatgcacattgagcattccatataggttagttcttgatgcaccctcgtccaaatgcaagattttgcaatgttttgagtctagcataaccgctatgacacacgtagctgatattggcatgtcctcactattttggacccacgaaccatatagctttctattccgacaagtgagagctcctcgcaacggaatgtctctcgtggtcgcacttggcacaacgcatatggtagggagcagcatcacacagccccatgcttccagcgggtgcttatgacttcagtaagggatccatcacacttcgacttgctagcagtttccatgttggatgcttgagcctcaacactcgaggcacagggtttctcaacacaggttcataatgggtgggacccgnaatttcttctctcaggatacccacacacactcgctccc

SEQ ID NO: 131573 - DNA, 430 bp, Arabidopsis thaliana columbia
cgaggatcctcgagctttttgatcggagactttttctctcatcgtcgttgtttgaattctccggctgagagatgcttgcttgacgacgaatctccaccgatcttttaccttttcgcacaacaagtaagagaaggatgtcgactccagcgaggaagagattgatgagggatttcaagaggttgcagcaagacccacctgcaggaattagtggtgctccacaagacaacaatatcatgttgtggaatgctgttatattcgggcctgatgataccccttgggatggtggtactttcaaattgtcactgcagttttcggaagattatccaaataaaccaccaacagtgcggtttgtttcacggatgttccatccaaacatttatgctgatgggagtatatgcttggacattctccaaaaccaatggagtccaat

SEQ ID NO: 131574 - DNA, 386 bp, Arabidopsis thaliana columbia
tggtgttagacccacgaaatatactgtacccgtttgttttgaaagcatgtgctggtcttcgagcaattgacgatggtaagctgatacatagtcatgtgaattgtagcgactttgcaactgatatgtatgtatgtactgctctggttgatttctatgctaagtgtggggaacttgagatggctataaaggtgttcgacgaaatgcctaagagagatatggttgcttggaatgctatgatttctgggttttctttacattgctgtttaactgatgtcattggattgtttttggatatgcgtagaatcgatggtctgagtcctaatctatccaccatcgttgggatgtttcctgcactaggaagggctggcgattgagggaagggaaag

SEQ ID NO: 131575 - DNA, 215 bp, Arabidopsis thaliana columbia
tttactaataattcatagctatgatttttttttgtctaaatagtccatccacttcgccgaaaaaaaatcccaaaagctaagagacgatattggtatattacagaccagagaagaacagagtaaaaaacataaagaaatggccgaacaaccactctctcttgctaactaatagtaactaaagaatttcctcaatcaacacaacgcatcaacggaaa

SEQ ID NO: 131576 - DNA, 344 bp, Arabidopsis thaliana columbia
  unsure (1)..(344): unsure at all n locations
cnccattacctgaaaatggtgatcaatgaaacatggaggctacatcctccagcaccacttctagttccaagagaagtaatgtctgantttgaaatcaacggctacacgattccagccaagacaagactttatgtgaatgtatggggtatcgggcgtgatccagatacttggaaagatccagaggagtttcttccagagagatttgttaacagtaacattgatgcaaaaggacaaaactttgagctgttaccatttggaagtggtaggagaatgtgtcctgccatgtacatngggacacaatggtggagtttggtctagccaatctcttgtaccattttgactgg

SEQ ID NO: 131577 - DNA, 196 bp, Arabidopsis thaliana columbia
aaccggaaaatggtacaggtacgatgaagagactaaggaatataaagaggtggtttctgaagttgctagtgaagaagtttaattttcgtttgtctgtacttttgactaacacagggtcttgaaatatttcccttgttgtttttagtttgaaagtaagcagatcatacatgagtttatataaatatatttggatttg

SEQ ID NO: 131578 - DNA, 397 bp, Arabidopsis thaliana columbia
  unsure (1)..(397): unsure at all n locations
cacttgatgatgaaagctactatggagangtttaaagacattcacttttataagtttggtaaacctgtgattgtggaaggtagtagtagtnctngtgatatggcttggcgttatagacctaaggatggtaaagcggctgcgttttataaggattataggaggtttgtgattgaaaagtctgggaattgtagtgttagtgtgatggggattggtgagtatcattcgggtgtgaatgcgaggaagcggaagaggcccgggtttcgaaattcgagtggtggtaaggttgatgatttcgcattgcctgtagttggtgaagcagtgaatgattcacttccacttgttgagtctgaaaatgtgtttaaagaaggtcattacttggtttattctcgtggaggag

SEQ ID NO: 131579 - DNA, 417 bp, Arabidopsis thaliana columbia
ggaacagaacatacgattggggcaagctgaagtttcagcacctggaaaggaagttcgagctgcttttgtatcattcaagtcaagatatggtgctgcaacggcactccacatgccacaatcaatcaaccctacttactggctcacagaaccagcaccagaacctcatgatgtccactggcctttcttctctgcatcgtttatgcagaaatggcttgctaaaattctggttgtgttcgcttgtctcctccttactatcttatttcttgttccagtagtacttgtccaaggtctcaccaaccttcctgcactagaatttatgttcccgttcttgtcattgatcctaatcaatgaaagttgtaagtcaaataataactgggtaccttccgagtctaatacttcagacaactttcaaagtcg

SEQ ID NO: 131580 - DNA, 400 bp, Arabidopsis thaliana columbia
  unsure (1)..(400): unsure at all n locations
aattttcgatcacgctgctcaattcttcaccgcggatgattctcggtttatcaaattggtcgatgggtggttagagaaaggacttgttcgagagtggaaaggtgccgtgggagagcttgaaattggaggtagcttctcacagtttccctcatcatcacctccaagatacattgctgctaatggcatgcgatctctcgctgattctttgctattagagagtcaaatggtgaatctggtaaggccttgttggatcagtaagttggaaccacttaatggtatgtggcatttaagtgagaatggaacacctcgtggtcagtttgatgtcatagttattgctcataatggtaaatgcgccaatcggttgctttcagcatcaggcttgccccnagtggctaaacag

SEQ ID NO: 131581 - DNA, 200 bp, Arabidopsis thaliana columbia
  unsure (1)..(200): unsure at all n locations
aaaaaaagcaaagaacacttgacgttttctagatagagatggaagggaaagaagaggatgttcgagtgggagctaacaagtncccggagaggcaaccgataggtacatcggctcanacggacaaagactacaaggagccactgagtacgnggtccttctacagagccggaatcgccgagttcatagccaccttccttttt

SEQ ID NO: 131582 - DNA, 243 bp, Arabidopsis thaliana columbia
  unsure (1)..(243): unsure at all n locations
cttctcttttgctctgaaataaaaagagtaagagaagaaggaagaagaagataaaggattcaaaaaaccctaaacactccaatgtcttcttctactcttcaagctnctctttttcttcgtcctcctctccatactncttcgtttaagctttacccttgtctattctctncttcttcattgagtttttgtccacantctctctcaagtttcctaccgtctttcttcagttcttcacaactctcg

SEQ ID NO: 131583 - DNA, 401 bp, Arabidopsis thaliana columbia
  unsure (1)..(401): unsure at all n locations
acctttgaatctcactaagcaagcttacctccacgaatccatctcctctcttaccaatccatttnattgacattgcatatagttattgctttacgctccgtatctataatggagagtggcaatctgattcgcttggtgcagcaacaatggtgttgactgtttcatcagttttgggtcacaatggacaaccagagaccataaaggaagtgttgtccttttgcttggaacagacatgctcttcagcttataaaaaccttggtggtggtctgaagttcggnttgaatctggtggatgatgtgatttgtttnctttctcttggctctggagctatggtatgtcttgccccggtgaatctccaaagggtngattcttngggtgcaatnaaaggaagtaaaantcat

SEQ ID NO: 131584 - DNA, 163 bp, Arabidopsis thaliana columbia
  unsure (1)..(163): unsure at all n locations
gantccccgggtcgacccacgngtccgnaaaanggctcgngccacagagatctgagtnncnntncttcgngatctgatcgccgaatctcataatcncccatcgangcagnatggagacttttctatncacanctgngtctgtaaacgngggacacccagacaa

SEQ ID NO: 131585 - DNA, 274 bp, Arabidopsis thaliana columbia
  unsure (1)..(274): unsure at all n locations
agagatgtctctggagaaggtgttcaacagtcattgctaaaattnctggaaggaactgtggtcagtgtcccgattcccgagaaaggattacggagagatcctcgaggagatagcattcagatggatacaaaagacatcctttttatttntggtggtgcatttatcgatctggagaaaactgtttctgnaaggcagcatgatgcctctattngttttggtgcttccgttcgtacaaacatgagtacttctgggttangtagtgctgctgtaacat

SEQ ID NO: 131586 - DNA, 364 bp, Arabidopsis thaliana columbia
  unsure (1)..(364): unsure at all n locations
aataaccattaacaaaaaccttttgcttcatctcaaagaaccacaaagagcgaaataagaaaacaaaaagagagtatcatcaatggatggtttaataccaatggcccttaaggccgtgaagaagaacctaactcgtcgtcgttacgaacgtctctcctattccgcaacaactcgtgagtcttacgacttcgcttccgatattgaaatgaacgtcgacggtcgtcaccatcgccntggctggtccgttggagatttctcatcgttatcaagccgggaaaccaaaagaaacgggtggtgtagctccggagaagagtcttacnnctnccncgggagggtcaacttttaagattcaaagaggccatag

SEQ ID NO: 131587 - DNA, 437 bp, Arabidopsis thaliana columbia
  unsure (1)..(437): unsure at all n locations
atctcaaagaagagtgttggtccagtccatctcaaagtttgaggactcaaagtatggttcaaaatctgaggtatgagttgaggatgggctatgttgccactgcgaggtcgttcttctgtttaggtctccctccggctccggtcaaggcattatctgggcgctgttgaagcacgctaagaagtcgctttaggaagtcaatgctgaacgcttttgctttcccgcaaacgaatgaatgctttcccgccaaacgaggcttttgcgccaacgaacgnacgaaatgcttgaatccgaagatgccgagtaagtcgatgttcggtggtagcgtttctgagaatctttttctttcaaagatacgggattggtctttctttccctcttccctttgtcagagatcaaattcaaaaaccaaggtttccggtttgaggggcagatgaggt

SEQ ID NO: 131588 - DNA, 213 bp, Arabidopsis thaliana columbia
actaaacagatcaccacatacaattaaaagatcagttatactgaatctcagattcggagaaagaacatacatatgatcaactgcggatttacactgttactaccaaaaagagagcagataggtttggaaccttaaaaaaactctgcaggtgatgagatatcgcctgattcaagatcggcactcttaagaaaccagtaaacccactaagttatt

SEQ ID NO: 131589 - DNA, 265 bp, Arabidopsis thaliana columbia
gtaaaaaaactttatttttgattaatatcaaccagtaattcaaagaaaagacgtgctggtttgctggttcatattaaccaagccaaaattacaacaaagaaatatcgacatcggtccaagattttaatttatttgttggacaacacaaaaagggaaaaggaaaagcaaagttgcgagagagactcatataatcaaagacttaaacatctttcatctgccaacttgactaaatagagacaatgccggagctgggcaggttactttg

SEQ ID NO: 131590 - DNA, 322 bp, Arabidopsis thaliana columbia
aaagaggccaattccactttaaaaattggtcaatcgtcttggtgatcaacgagagagatcaaatctgggcaatcggtagcataggtatccgtatcgccaatgttgatcatgcattccatttaccatagcaaagatttaggttcggcgtgaagcgtgagagaagtttttttcgaaaaaaaagttaactcatgtaacccagtaagtagctcgaaaaaaaagacccctagttttctctctcgcaaaacccagctgccgtcgaaagagtttttgccacttttgccgctagtatgcggtggctacgttagcaatgattctggccttg

SEQ ID NO: 131591 - DNA, 439 bp, Arabidopsis thaliana columbia
agaccgtcctgaactcgcaagggtgcttcagacggtgtggtctttttgcaggtctccctggtcagcagagagctaaagttgctgaactctctaaattcggccgacccgctaaaatgcgtagcgcatcgtggtggaaccgctttttcgtccagacaaacttagaagaaaacgatgcaccaagcaagaagttcgaacaggctgtttccaaaggattatacaaactagcgtaatcgatatttctccttgtattttgtaacaggtcagtttttatccttcaatgttgtatccgccaacacaatttttcctattcaattaaatcataattattatcaccacagcctgccaagtcttccacctcaagccattacattaaccagccaccaccaaagcctactggttccacaccaaagcatatttacacgtagagccgcacgcgaaa

SEQ ID NO: 131592 - DNA, 465 bp, Arabidopsis thaliana columbia
ctctagcaagaggtgaattgcagtgtattggtgcaacaacaattgatgagtacaggaaacacattgagaaagatcctgcattggagagacggttccagcctgtgaaagtacctgaaccaactgtagaagaagctatacagattttgcaaggtctgcgtgagcgctatgagatccaccacaaacttcgatacactgatgaagccttggttgctgctgcacaattgtcacatcagtacatcagtgatcggtttcttcccgacaaagcgattgacttgattgatgaagctgggtctcgggttcgactacgccatgctcagcttcctgaggaagctagagagcttgaaaagcaactcaggcaaatcaccaaagagaagaatgaagctgtgcgaagccaagacttcgagatggctggttctcatcgtgaccgtgaaatagagctcaaggctgagatagctaatgttttat

SEQ ID NO: 131593 - DNA, 273 bp, Arabidopsis thaliana columbia
gagaagtgagaggagaggaggaaaaatgccggcgggatcatcggagagggcgagaacaagagatctgttcgcgagaccattcaggaagaagggttatattccactctccacttacctcagaaccttcaaggtcggtcgattacgtcgatgtcaaggtaatggagctatccacaagggtagcctcataagttctaccatggtcgtactggtcgcatctggaatctcactaacgtgcgtggtgtgagtcacatcgatggacgatcatagagagta

SEQ ID NO: 131594 - DNA, 258 bp, Arabidopsis thaliana columbia
ttgctctcgtttactttatactctttattatacatcatccgcacttacacaaaagagctcagaaacttagcaaaggttagcagtaatctttaaggagtctgaatctcttcaactctagtcatatttatacctgatgcagctagatccaccgcggtcacacagtgctatagctccaatgcatctcacataccaacaccactccgtggcacagccatgtacgagcacaacgtctgtattttcatgtctctctgctcacat

SEQ ID NO: 131595 - DNA, 288 bp, Arabidopsis thaliana columbia
ttcagagatggttccgtttcctcaactaccgatgccaatagaaaacaactacagagcttgcacaattccttacagatttccttctgatgatcccaagaaagccactccaaatgaaatctcgtggatcaacgtctttcgccaattccattccttctttcaagaaacgtgcagagagcatatcactgttcagatgctctgcagagctgaaattgcagaagatatgctggattctgagctgagaagtcagagagtcatgcgacacaagtgctctctacggccttgcactct

SEQ ID NO: 131596 - DNA, 224 bp, Arabidopsis thaliana columbia
  unsure (1)..(224): unsure at all n locations
tgttccgcacattcccgttcattggagtagtagaagaagaagtaggtagatagatagaatcagaagtctatttgtgtctcttctcttctccctnatttttcaatgttctttatcatcatcattgttcttgttaacactacaagaaatatggacattcttaacacaccgaaaacgctataataacgtttacatagcggattcataaacgctgtgtttgccggaaa

SEQ ID NO: 131597 - DNA, 326 bp, Arabidopsis thaliana columbia
gagtcggattaacaatatgtaggtgcccgtggtgatccaacaccgcaccaagaagcatcgggacccgaagggcggtcgctagaatcgaggtaataaaacggcatcgcttcagtgtgcaaaaacgtcagctcccggttagcatgggctttaatcacgacaaattacatttggtgtagtgtgcaaggaattattggtagaacgggcgtacacggccgtcttaaattaatataaaagttaacattctaattcgtataattaacagtcataagagcgggttacggggtcaggtgcgaattaatcaaaatggtagtaacgaaaggattgtc

SEQ ID NO: 131598 - DNA, 405 bp, Arabidopsis thaliana columbia
  unsure (1)..(405): unsure at all n locations
atcgagttctgtgagatctgcttcaaaagaaaaaaaaactggtggagaagaagaggtgaatcgagttataaccttacgtggtgatgtaaaatatttatatatngagcattttatacatcttcttcttacttgtgtttggtttcttttgggccaaagtattgttttgggtaaaaaatgaggattcggaagaacacgaaactgtcatcggttcttttatcgacagcaggttgcggcggagagagaccggacacgtatgtgtgtcacttaacccagtctccatgggatgtgattcctgtttcttcctccggcgattgcgagttaactaacctagtcgnctcgtcgtggttcctccctttatcgtcttcgtcttcttcttcttctccgcctctcattcacaagttcatt

SEQ ID NO: 131599 - DNA, 335 bp, Arabidopsis thaliana columbia
  unsure (1)..(335): unsure at all n locations
tttgtctcacaatactctttttttatataaatagatccaaacataattgaatggtgtttcaagtacaaaatttggaagacaaagagcatcggaaaataacattgttttcttatttcaatacttgacaaagttcttgagagatttcaaccacagtaagtgctctctactatccttgttgatcatgtactcgtgcaagaagttgatcatgctcggctttatccctctgagctcaatgtacctatggaaagccntccttggcttttcatccaaagcnctgaaggaaggngcttcataagcaagctcatctttggaaggagcatcaggaaatgtaaccc

SEQ ID NO: 131600 - DNA, 286 bp, Arabidopsis thaliana columbia
  unsure (1)..(286): unsure at all n locations
cgaaaaaccgttctttcgtttactcattgttggaccagtncncttctggccggagacatctgacrccgtcggttgaccggaatgttccatttaccacatcgaccaaaaagagagcttctccaactgatccgcttcttcgaatcattgaagaggagattggatacnccgagaaagctgatgattatcatcgagttgaagaaactccaagnngcttncctttcgaaatggaagacaaaccaggagggaagattgtgacattgactagagaatatgaaggagagactgt

SEQ ID NO: 131601 - DNA, 311 bp, Arabidopsis thaliana columbia
  unsure (1)..(311): unsure at all n locations
aaaatattcataccattaaaataccttgagatcttttgtttttaaaaaccatatacaagagaaaataagaatctctggtgggcacataaacccagcggtgacatttggtctgttcttggctcgtaagctgtcattgacgagagctgtcttttacatcgtgatgcaatgtctcggagccatctncggcgccggagttgtcaaaggcttccagcaanatccttaccaaactctcggcggaggagccaacacagtcgctcacggctacactaagggctctngtttgggtgctgagataatcggaaccttcgtcc

SEQ ID NO: 131602 - DNA, 225 bp, Arabidopsis thaliana columbia
  unsure (1)..(225): unsure at all n locations
ggctgggactaccgcactggcgtcgcggangattgatcagagtcaatgggtngaggagagagcaagagttctcggcgagactttgacagaggatgaagttacagagcttattgaacangaatcgatantagtgactgtacacgacagattaatctcgggaaaggtngtatgactcacaatatgatagatgatattcataaccattggaaganagctgaggcagtg

SEQ ID NO: 131603 - DNA, 356 bp, Arabidopsis thaliana columbia
  unsure (1)..(356): unsure at all n locations
tttttttcacaacaaaaactaacctctttattatgtataacatccaaatttcgaccatagnttcttggagttataagagttacccttttttttgttaagtaggctcaaattttaccaaatgatgcattcatcattcgttttggaaatttcaaatacaagaaagtagaagcagaaaatcattacataaggtaaaaagatactaaaagttaagcgtagatcgattagaaaatgtaaaagaaaaaacacaaaaacaacangaaagataatcaaaacttccacctccaatgcatggagatgagatctttgtttaagtatctttcttctcttttgggactnggatcaggtactggtaacca

SEQ ID NO: 131604 - DNA, 306 bp, Arabidopsis thaliana columbia
  unsure (1)..(306): unsure at all n locations
ggatgcacaagttgcgggcacgaccatcgtcaactacaccgactgcgtcttcggagccatnnagagcatttacgacaatggtggccgttacttcgtcttgcagaacgtagcgcctttgcaattgtccccacagtacggactacccggcaaggtggnctngcgaccacgcaatactggccggacaagccgngcaacatcaccgagatcagctacaagatgctcgaatacgtctcgctcgtcaacaacgttttcaaatacgagacgccgtacttgaccaaagttgtcaaccaatttccaggcgcacaa

SEQ ID NO: 131605 - DNA, 366 bp, Arabidopsis thaliana columbia
  unsure (1)..(366): unsure at all n locations
acaatttttgatagaatagcccgttacatatcacacacaaaatatcaatggagatgagaacagaaaaagcacaaatgaaaagaaaagcttaagtgaacatttttacacaccaaaccatgcatttnttaaagcagtggaaaagaaaactcatatttcaggctaacaccagatcttcaatggcgtcgagaaagagcaatggctgataggagaataagaagaatgaggaggacaatggcaatgaaagatccaatcaaagaaccggagatacgctcacagaaggagtttgaactgttgacaaatagcaaaccagtttgttttattgttcccatttgtgtgccaagtagnccaatggcttgctgctggagg

SEQ ID NO: 131606 - DNA, 331 bp, Arabidopsis thaliana columbia
  unsure (1)..(331): unsure at all n locations
tcttgttactccnctctctccnncttagntttcantagagagggtcagactcgagagactncgtcctttcgaaataaaaaaacaactttcagaggagtaaactacgcttctgcagctgccggaatccgagangaaactggtcgacaattgggagctagaataacatttgcagggcaagtagctaatcatgtaaacactgtgtcacaagttgtgaacatactcggagacgagaatnaagctgctaattacctaagtaaatgcatctactcaatcgggttaggcagtaacgactatctcaataactattttatgcctgtttattactccaccg

SEQ ID NO: 131607 - DNA, 400 bp, Arabidopsis thaliana columbia
  unsure (1)..(400): unsure at all n locations
gagcattgaaactcacgggcttccttaaggagaagatgcaagaaaacaacatttcctttcanntcactctacactgttcgtactcttaaagagaaactgtgttatgtggctcttgattataaagctgaactttcaaaagacacacaagcttcagtggaagtttcaggtgaaggatggtttactttatcaaaagagcgtttccaaacaggggagatattattccaaccacgtctcgctggaatgcgtgcaatgagtctgcaccaggccgtctcgctctgtatggaccactgtnatgcagcaggacttacaggtgacgatagttggttcaagactgtagtactaactgggggaagcgcgtgttttgcctggactctcagagaggctagagagagacncccaa

SEQ ID NO: 131608 - DNA, 315 bp, Arabidopsis thaliana columbia
  unsure (1)..(315): unsure at all n locations
antgattttnttattaatttagaaaccacattacacttaatagtatcctgctgcatgtaagttcaagtaatcgccgaggaagtaaaagctcaaacaagctaaacaaaagacaagttgtagtagtagactagtagtacatgaacgaacaagacaagaggagaaaacagttgatgagctttttcgtcttattaatttagaaaccacattacacttaatagtatcctgctgcatgtaaagttcaagtaatcgccgaggaagtaaaagctcaaacaagctaaacaaaagtcaagttgtagtngtagactagtagtacat

SEQ ID NO: 131609 - DNA, 313 bp, Arabidopsis thaliana columbia
  unsure (1)..(313): unsure at all n locations
ctgcattccctcgttctaaatagggaaagaagnggaagattntctaactttaagggtccngnttcgagttcttctggtggaaatatgactgcaccaaacagtcgcccttccaatatgctcaagcagagaggaaatcatgtgccagttgatcaaggaatcacttcagctagcgaagaagatatagttgcagacataatggggcaacacgatcaatttgtcagctctatgcactctcgtttggctaagttacaggtcgtccgtagatattgggaaagaaatgatattaaaaactcgataaggttcaatagaggag

SEQ ID NO: 131610 - DNA, 399 bp, Arabidopsis thaliana columbia
  unsure (1)..(399): unsure at all n locations
cttcgtcctnntacgaccaaccaaaggactcagtactctctttccttcagaccacactttncacgctctactctgatcactttcccggcaagatcatcgccggcgagggctatgtccagaaccgacgaggaggcttcaatatctacaaggctcgagcaagaaagctatgggctgacgacggcagaggacattcgccgacgggatggagaagcaaaagaatccaagaggttgagagacacgtggcggaagatccaaggggaagatgattgggccgggttaatggatccgatggacccggttctgagatctgagctgatccgggtacgagaaaatggcccaggcctgttacgacggcttcgattttcgatccattttttcaagggtactncggngagcttg

SEQ ID NO: 131611 - DNA, 400 bp, Arabidopsis thaliana columbia
  unsure (1)..(400): unsure at all n locations
ggcacttctgctgttcacgtctatgctaaagaatccagcaagctcatgcttgatgtcatcaaacgtggtccacaggaagaatccgaggttgaggtgagcaaggatggtgatntcttttttgatatatctggtgggagcagagcttttattgaagaagaggaggcacgcgaccttttgaggcctctggctgacccgcgtaactcctataccaaaatccgttttagcaacaggagttttgggtctgaagcagccaaatttgctgcgagcgttttgncttccatcaaggatcagctgacggaagtggatctctcggattttgtttcaggaagaccagaggcttgaagcgctttnaagtccatgaatatgttttcancctgcttttaggaggggttctaaagct

SEQ ID NO: 131612 - DNA, 318 bp, Arabidopsis thaliana columbia
  unsure (1)..(318): unsure at all n locations
ttttattggacaatatatataataagcagataaagtttattatctgtataattacgnaaaaaacttcttcacttgctgttgtcgaaactntggacagcttaaaccttctgtatagttctggtggttgccgtcgtagcatcccatgcctgtaaagctgcacgagatagaccagaattatcgtcagcaccgacatgcngngngaagtaaccaagcaaacctctctgcttggcatatctaactttcgtcacaatactctgattatcatcgtaaccaatccaattcgtgccggcataacaataaatctccgaccactgtggg

SEQ ID NO: 131613 - DNA, 306 bp, Arabidopsis thaliana columbia
  unsure (1)..(306): unsure at all n locations
tgnagtttacatttggagataaacattgagtctgaataatgtagactacataacttcaatggntcagctgaacgttgcttcaaagctggatcacatccantttgtatcacaagcaaaagctttgcagccaaaccaacttcaacagcaagagatgagcattcttcagaagctaatttgcaaactgaccaaagaatcgatatcgnatagtttgngcanttctctggtaccttcatcagtancctaacggtatgcggaatcgtgttaaccgaagctttcaaagcaattctgccttcgctttcgaaacat

SEQ ID NO: 131614 - DNA, 247 bp, Arabidopsis thaliana columbia
  unsure (1)..(247): unsure at all n locations
gatttttncgcctcanttaactggaaaactcccaaaattgggttcgnaaaacaaaaaaccttcagctntctaaagggaagagtataacaataaaaatagantcagangancaanatccaaaccgagtgagatattacagagaaacgagtccagacagaagctgaaggaccaaaccggagagattgccttacttacccanagtagggaactgtgcactgtccccaatggccggtgttggtgcctgtgc

SEQ ID NO: 131615 - DNA, 400 bp, Arabidopsis thaliana columbia
ggaggtgcacctgcggtgctgtcctgctctagaactagtggatcccccgggctgcaggaattcggtacgagctctgttgaagactgtactcgtatgatcggacctgtggatgctgacggtgatgggaatgttaatttcgaagagtttcagaagatgatgacgtcgtcttctctcctcaacagcaatggatccgccgctcctccttcgacctagggagttttccagatttcagatctggatttcgggaataagaataactatggaaattaggtactcttttcttcttaaatgtgatcaatcatcatcagtctaacttcaatcggatctcttttcattcatacatggttgagatttagatctgaatatggatatatatcgtttgctctccttgttcaaaaca

SEQ ID NO: 131616 - DNA, 211 bp, Arabidopsis thaliana columbia
  unsure (1)..(211): unsure at all n locations
ttttaaaaccatataattctctctttatttaaagcttttgatgatgaatcccaatttgctagtaaggcttttggccaattacatttccaggaggattgtaaaaacaaatggtcaacaccgttgctnctttcgtacacgtggcttgagcacacccgngctctttagagtttctccagacgacttgtttataanccccnnacgtgtggttcgn

SEQ ID NO: 131617 - DNA, 345 bp, Arabidopsis thaliana columbia
  unsure (1)..(345): unsure at all n locations
agaacaatcgtctgtngtcagcttcagtagacaatagtgttcggctttggcagatcggctgtaaggactgtcttggaatctcctctcacaataactacgttacatccgtncagtttaacccggttnatgatgatcacttcatcagtggttccatagatggaaaagttcgtatctggtcagcttcacagtgccaagttgtagattgggccgatgctagaggcattgtaaccgcagtttgtnatcaacctgatgggcaggcagtgattatcggaactttgacaagcgattgtcgnttctacaatgtatcaggncactgccttcaacttgatggtcatatatgtctgc

SEQ ID NO: 131618 - DNA, 347 bp, Arabidopsis thaliana columbia
  unsure (1)..(347): unsure at all n locations
ctttcttctcagctccaaagccaaactctctttggttactttttacttaaaacaaaatggtcattaagatccctaatactttcattaaagccacttcacttctctcattgatccgctatttcctaataatagcaacatctaagtctaactcggttttagccgatgaagttgtcgaccangaagatgacccggagtactacattctcgacggaactccctcgatactttcaaacgtgcaatttcatccaaaactaggctactagtttcccactacaagaaggtcaaggaaagggattgtggttgtcacggtcgggggttaccaacatttgcaatgggggttaaagcgg

SEQ ID NO: 131619 - DNA, 467 bp, Arabidopsis thaliana columbia
  unsure (1)..(467): unsure at all n locations
tttataacaatttatttatttatttctattaaataatcatgtatgtgtttacatatgtatactctcactcacaaaatcattacattacatgcgtatganatatgattttgtatacgtgaaatccttacgtatgctaataacagtttcttcaaaaaaaccaaaaatataacaactcaaaattacggtataacacttttttcattttttcctataaaaatcaagcatacccacaatacccgtactcgcatttaaccccggacggacatttcctagtgcatttcccacaatggttagggttaaaggtaacgtaagtgccaaacggccaccggaacaacggtgcccaaaaccgattttgtggccggttcggccacaattggttcctatctcctaggcacatttccggcaatggtttcttgcaggcatgcagggggttggtccctttattcggttttaggcattgcaaatgt

SEQ ID NO: 131620 - DNA, 327 bp, Arabidopsis thaliana columbia
  unsure (1)..(327): unsure at all n locations
tttcaaaactagtcttgtattctttgagatatataacttgtgcagttcngcgacacaagtnatgaaagacgnatataacatatacatacacaagacttaagaatctttgatggtttgaccctaatatataaacatctccnatctnggnaacatgggtcaggngatgctgcacttagcatttggcaaaaaatactaaaatgaaatattgaactttcaagcagtaaggaactgaagcagcatttgcgaaagttttgngagtgaaatganccttaacgggatttaaagagctccctgaaatgntttatggggttttccttgtttctgcgg

SEQ ID NO: 131621 - DNA, 384 bp, Arabidopsis thaliana columbia
  unsure (1)..(384): unsure at all n locations
tctgcctccccctcctcctatagcccctgaggaacaagaacctcccattgtcactcttgatgatctattcaagaagacaaaagcgatccccaggatatattacttacccttgtcagaggagcaagttncagctaaacttgcagcgaataataacaagtgatcttgctggttcttgggaatttcaggtcattgttttcnttagcaggctcttaggaatttagctcagnnnggacaaaagttgagtactctgttgagtttggtttgttatttttaatgtagaacggatgggaagactcttcttatgtttagtagactttggtttgaacctgtgatgaactaacagagttgtttggctctctgtgtgttagatcttttcctctcaaa

SEQ ID NO: 131622 - DNA, 342 bp, Arabidopsis thaliana columbia
atagaacacctgttaattctaaaatggtgaagagccgttattcgtcgggtgctgcttctcgttctttcacttcctctgcctttactcctgtaaccaaaaacgattttgaactaattaaagtcgagaaaaacccgaaaaagaaagggtatgttcagtttcagacaacacatggcgatttgaacattgagctccattgcgatatagctcctagagcatgtgagaatttcatcaatctctgtgaacgtggttactacaatggagtggcctttcacagaagtatcaggaacttcatgattcaagggggcgatccacttgcacagggaaaggggggtgaatccattt

SEQ ID NO: 131623 - DNA, 401 bp, Arabidopsis thaliana columbia
cttaacgaaagggtttaatggcgacgagatccgatgtgaagacgatcgtcaaggacaagagattctggattgcttccttcatcatcgtctgggctgctggtcttcagggtcacatgatgtggctgcagaagcaagaatctttcaagcagaaatttggaacaatcgatgaagacgaccacaagtgattcatgactttattacgtctctgaaactgctttctttttttgtatttgtgagtcttgaggaagagttagatttgtatgaaatttaatcatacagactctggcttactatctccaatggttaatttgccaaatgctagtagtttttgattgctagagatgtctctgtattttgagattttatagtatttcagcttgagctttgtttagtggactaaa

SEQ ID NO: 131624 - DNA, 312 bp, Arabidopsis thaliana columbia
gacactaccggcaatgcgaagatttatgtcgatgacacgttttcgccttctgatgctgcaaccgctgcggtgttaaccggaaaagatagtacgagtacaacaattgtagaagaagtgatggagccagatgagattggtttacctagtgtcaagattaccgaggctgcgacgggtacagcaagaaatggtggggggtcacctagaactgtatcatctcctagattttcaggatcaccggtgagcactggaacaccgaaaaatgtggactcacatcgaggtttaatcgataccgcagcgccatttgaatctgtt

SEQ ID NO: 131625 - DNA, 317 bp, Arabidopsis thaliana columbia
agcacggcgcggatgcatttcggtggtattagcttagtttcgaagagaaattggagcgacgtggtcggcagtagcagatgtactaattgatggagtacaggtacagatgagtttagaagaggccggtagagccattggagcttgagcggcggcgaagagaaccattgtggccataagttcagaagcgaatgccagagtacgatccgtacccctcacgtcacctctgcaatacaccagttcgcatgccaccatcttttatgctctacgaacctcaaatagagtttctagttggcataatgattgttagttgccgaaga

SEQ ID NO: 131626 - DNA, 490 bp, Arabidopsis thaliana columbia
  unsure (1)..(490): unsure at all n locations
gaggatgaagtagatttcacagcaacggcaacgctggagcccactgagtcagaagcaaaaactaggttttgccatggtgttgtgttgtggtttgacacaggtttcaccagtaggttctgtaaggaaaacccaaccgtactatccacatcaccctacactcccccaacacactgggctcagacaatcttaacttttcaagaaccaatctcagtggcaccggcctcggttctgtctggtaatgacagaagagaagccatcggaaccgaagagtgtcccgcctcaagcattcatctgcgtgtgagttttgcacgagcacatggagcatcgcagcatagacatcttcgttagggggttactgggctgagctcaaagggtcagaagcgtcaattggcggttcagtantttatctatggatgtggattgtagccattgtaacatcttttctggcaaatttgctgagggttttttcataagtngcaggttgtttaaa

SEQ ID NO: 131627 - DNA, 344 bp, Arabidopsis thaliana columbia
gagcttgtctgtgtcaatagtgaggcactacatcgaggaataagaaagaagatctaaggagctaaagctattatgtcaacgaacactgaatcttcttcttattcttctcttcctagtcaaaggcttttgggtaaagtggcattgatcactggaggagccacagggataggtgagagcattgttcgtctgttccacaagcacggtgccaaagtctgcattgttgatctgcaagatgatctcggaggtgaggtgtgtaaaagtctgcttcgtggtgagtccaaggagacggcttttttcatcccatggcgatgttagagtggaaggtggcattaagcaatcggttt

SEQ ID NO: 131628 - DNA, 330 bp, Arabidopsis thaliana columbia
  unsure (1)..(330): unsure at all n locations
tttacatcaaacatttctacaatgctaaaagtaacaattaaaaccacaataagctccacagttaaattatttgatagacatgataaattggcggacaataaacattaaacaacattctttagcaaaatgcatcanctgangactttaaaggagtggttagtgcaagtgaatccnccatcaatcatcaaattatctccgcttatgtaccgcgagtcatcgctagccaaaancagaacagcgttcgctacatcatcaaccgtcagtnccaccccttttagattcgcggtttgcagcagcaaaattcctgaaaccaacaaatgcatcctccgt

SEQ ID NO: 131629 - DNA, 336 bp, Arabidopsis thaliana columbia
ctcatcgcaagtaaatgtataccattacaagtagcaattaaataagagaaaaaaaaaaaattaaagatatggagggactcttgaagttgtcaactttggtgattgtgtgcatgttagtgaccgctccaatggcgtccgaggcagcaatctcgtgcggcgcagtcaccggcagcttaggtcaatgctataactacttgacccgaggcggtttcattcctagagggtgttgctctggcgttcagaggctcaacagcttggctcgtaccacccgtgaccgccaacaagcttgtcgttgtatccagggagcagcgagagccttgggttctcgacttaacg

SEQ ID NO: 131630 - DNA, 316 bp, Arabidopsis thaliana columbia
gagctgaaaaccctaaccttcttcttcaatctccaatggcgcgtaaatcttccctcctcaaacgagcagcaatcgccgtcgtctccgtcatcgccatctatgtaattctcaacgcctccgttagtcgctctctcccttcctcatccgatctccctcgccagctaatccgtgaagatgatgatgatgaaggacgtgctccgattcagcctagggttagggtttacatgtacaatctccccaagagattcacttacggtttaatcgagcagcacttcaatcgctcgcgggcgggattcaagaagcccgtcggtgacgt

SEQ ID NO: 131631 - DNA, 329 bp, Arabidopsis thaliana columbia
  unsure (1)..(329): unsure at all n locations
tttgatattttctaaatattggcaaaattaattcaagctttgtgttgtgcttcgcttttatgacatgtacagtaacagagtagaaaagaatggcagttgggtccgtataaattgtaacactatcgagaacaataaaactaatggaatctacagaagaagaaggntttcaaatatatctnccttatgaatctgtcaccatgcatgtgctctcagtttgcttaccggagaagtagttatgccacgggaggggggaatatctgcttgtgtaagtctcggtgaactctctccttctcaagctcctccacagtccaaaaggtctctcccaaaag

SEQ ID NO: 131632 - DNA, 425 bp, Arabidopsis thaliana columbia
aaaggtaccggaaatatatttgccgccggtaaccctaaaagaaccggtttcaggtgggtttgaaagtggaacccagggtttagtcccttcagcgaaaggattaatggaagggattgcgggattagggctcacggctttgctcctagttgagcttgcgacgggtaagagtgtgttgaattaccacacgccttctgtggtgtttcttcagatctatttcgttgcggctgtttctgctatgtttgtcaagattgagaaggagaaggttagtgtttggcctaaggattaagaaagacttgagagattgtgaaaattgttgcttttgttattgaaatgtgtatgcttttgttttaagaatgtatgtatttgtatactcacagagttcaagatcatctgatcatggatataagattttactattaaagaaa

SEQ ID NO: 131633 - DNA, 312 bp, Arabidopsis thaliana columbia
tcttcgtctccctcacaaaagctctcctcgttcaccttcctatctccttctctgtgttcttgctctatccttcttctccttcaccgctcttcttttctacaaggttgacgactttatagctcagacaaaaactctggccggacataacttggaaccaacaccgtgggcatatcttcccacgcaaatctttcagcgcagtacggaaacattctcaggcttaccgaatcctccagtgctcctacttctcatgtccgtacaaagccgtcgtccaaccaaagagtctccactcggaatctgggtcgggtcgtcaaa

SEQ ID NO: 131634 - DNA, 330 bp, Arabidopsis thaliana columbia
  unsure (1)..(330): unsure at all n locations
tttgtaagattacggtttctttctttattctattaatcaagtcgtaatcaattatcatctcgtgctacaactgatgaacaacacacacgtatgtcaaaaaaagagagaggatacaccaaaaattcatgtccctaaaaagacaattcatttagaacccctctgtgttcttgtcatctccatgtatctaacattttcgattgttttattcttctgttggatcaaccactcaagcctattcctatctgctactggaaatttacatggttgatccagagnaaggtacgactctgggatctttcgagtagttcccgctcttttttgttctgcaat

SEQ ID NO: 131635 - DNA, 308 bp, Arabidopsis thaliana columbia
aggagcagaggttcaggaaactgatggaagaggatgtaaggcttggcggctcttgtggataagaaagaggcgcagcttctggccatggatgagcagtccccaatggtggccctaagctccaaatgatgcttagaggtggaaatttctctacttaatctttcttccacttgtaacaaaaagaaactcttatttgaaaccacttccatgtttgttgaaatcctaaaggcccccaaaaaattttcctgggagaccctgtatgtggttggacaatcttaacacatggaattgcgctattgtttggcgtgccc

SEQ ID NO: 131636 - DNA, 308 bp, Arabidopsis thaliana columbia
tcacatgaggcactgccgagcgaataaggagctgccagactagcttgttcatcgggtactcagttgtgagagcaagagatggctatgaccaagctgcccttgccaagctatgtatgaagagattgggtgactttagttataattatatggtttggcgttatgctggaacatgatgatgtggttatggttcttccttcaattgttatcatgcggattacattacatattgtatacaatgatataaacaagagcagaagaagcaatgtggatatatttagagaggcttaggagagaagcttatttgatgt

SEQ ID NO: 131637 - DNA, 343 bp, Arabidopsis thaliana columbia
tgatagcgcgctgaaagatgcgaacatcccaccagggccaagacttatgatactagatcatatccagagggacccggagataaaggccaaacgaaagtaggagccatgttgtttaatcaaatatgttttgatggtagcgatcttcaaacacatatgtaatgccttttacttttagctgctattgccatgaagagctcttgttagatacttctgtttctattaccaatgtttgattatctttaaaaaaattgagtagttcgtctcaaatcaaattggattataggttctgaataaaacgaaaatgaaatatgctttgtatgagaataagatgtttatattatgt

SEQ ID NO: 131638 - DNA, 421 bp, Arabidopsis thaliana columbia
tggcatgcaaacaaataaacataggaggatggagaggatggagactgaagatgattgaaccttcattatcagtgttgacggtcaacgcagcttctctacctcatgttgatccatgccggttcactcagcaccaaatatggtcctggatacagaggccaagactatgctacaggccaagctcatggtcatggtcatgtaccacacactgtgggagagcacaaggctggtgttggatctaccatggcagtctgatggaaatctgtgtcttttaattgtgttatgacgtttggttaagaagtacttattatagtttatgttttttcaagttatgtaataatgtaattcctatccatctgacaaacgaacgaatcttgtgtgttcttttgttaattagttaaatggagatgtgtttctttgtgtt

SEQ ID NO: 131639 - DNA, 407 bp, Arabidopsis thaliana columbia
ataacttgcctgtggatcacttatggtctaccaaaaggagctctaaatcagctagctagaaatttggcatgtgaatggccaaaagacggcataagagccaatgcggttgcacctaatgttgtcaagactgctcagtctcaattctttcttcaagacgtcagtaaaaaggagggattgtttagtagaactccacttggtcggtctggagagccgaatgaagtagcatcactagtggtcttcttgtgtcttcctgcagcttcttatatcacaggtcaaaccatttgtattgatggaggcctcacggtttacggtttctcctctcaaccacaggcttgaaaatggtcttgtcgtttcttgtctgtttaaatattctctccctaataaaatctctcatcacgctatgagtt

SEQ ID NO: 131640 - DNA, 306 bp, Arabidopsis thaliana columbia
gggagagaaggatgtgaaacttgattccggtggtatggctgaaggtttggcttccaagttttcttctggggatttccaaagaaacttcctttagagcttgttggaggaaacttgttttggcgataaatgtaaccaattccaaatattgttgggactttataccccaaaagagtatttcctaccaaatcttggtttttcttttgctcctgtagtctttttttttcacatgcaaactaagttaaacaagaatcgacactttatgtatgttctgtggtagattattaaatgaggatattttggatagtc

SEQ ID NO: 131641 - DNA, 427 bp, Arabidopsis thaliana columbia
gggacaaggatcaagattcttgacataactgcactttctgagctaagagacgaagctcatatctcagggtctaaactcaaacgccgaaaaccgaagaaggcaagtaacgtgacctcaactccaacgatcaacgattgcttgcattggtgcttaccagggatcccagatacttggaatgaacttttcattgctcagatttgaagtattcaacatcatcacacacacaaagctagctcaatggattggctctgttgattctttgttatagaaaggtttttttttcagattctttcttgggagaataacaaagtttcagttcttaaaaataggttttagatggtttgtcagtaaatgattcatctgtaacaatcacaatctggtttttaattatacacgagaacattgaaattgaaacaatctttttctt

SEQ ID NO: 131642 - DNA, 360 bp, Arabidopsis thaliana columbia
ccactgtttagtcacgcaaggaacggacgtgcgtttcccgtactgacgggttatgagagagttgaggtggaccgagccatagacaaagccatctcgactttacctgcattggaccaagaaatcttactcactaactggctccaagatttctcagtctcggcctccgagtgggccaatcttcagccagcatatgaccgttggtgccactccactcgccaacttttcatgtagacgaccaataccatagtcatgttccaaagagaaaacctgaacatttgttgtacttttcttttctacgagttttgatattaccttctgtgtccacatatttatcttaggtaataaaacaagtttcgatct

SEQ ID NO: 131643 - DNA, 341 bp, Arabidopsis thaliana columbia
ccattgggcagcctagccgagatgccgaaccacgtgaatgatggacgcgcctgagaaagccaaacagtccatctatttattccccgggaaggagccaaggtgacacgttcttttaactgatgtggcccttaacggcgatgttttctcgcctctgtatctttgtaactctttttttttttttttaccattacagtgtatttgcatacaaaagaggttcgagtgactttgtgcttttttttctcacttgtgtccatgggacttctgtaataggaaaactctgatgtaagtagcttcggctaacaagacaagagagagttacttgttttagagttcatgttgtt

SEQ ID NO: 131644 - DNA, 396 bp, Arabidopsis thaliana columbia
agaagatgagtgggaagaagagcttaaaggagttgagggaagaaaggttgaagagggagagggttgagaaggaaagagagagagcccttttcatgaaacagagccagagagccggtggtttttcccggaggcggtgattaaatcacaaagataacaaagaagacttaatctagagattcaaaggtggttccacgtctgaaaagccctttttaatctatatgtgtgtgtatagagaattagagatgtttcaacagatagaaaagtggaaaggatgtgtattgagtttgatggtggaaatcatttgtcattgcgtcatgctcaaagagttatgtggccttaaatttgatactcatagcaaaagttttgtaaaactgtttgcaattcaacagacttcgg

SEQ ID NO: 131645 - DNA, 383 bp, Arabidopsis thaliana columbia
agcagatgatgcatgcgaatcggggagcgaagcatccggaagattcgacgaggcaatacataaggttggggagaggtatgtgcagctaaggattctatgtcggaggacacaaaagaagcttatgagagtgcaaaggaggaggcttctgatgctgctggtgaggacggttcatatatgagagaccgtagcgctgagctttagaactgaaaaaattataacgtataaccgtatagggtaagtttgcatttagatttcaaatcttcgtttgtacaataaatttcttatatatatgtgtatatcagcagtatatgtatatgtaagaatggtggagttgcttgtattagttgcaaaatcagattctcaatgaaaggcgagttgtttcc

SEQ ID NO: 131646 - DNA, 215 bp, Arabidopsis thaliana columbia
atcgcccgtctcggttgatttgagccccaaattttttgagaagaaatattattgtaaccacttggtaaccaataataaccaaataacgtctcatgcgcggtttgccgatgcattaacccaccttccgtagcctagcccaaagccttcctgtcatgtaagtatatatctgtttctcttcgtataatcaaagataagtgaatattaaaacttcgcac

SEQ ID NO: 131647 - DNA, 404 bp, Arabidopsis thaliana columbia
  unsure (1)..(404): unsure at all n locations
gaagaatcagaagacgaatcagttactacttgttcatagaagcaaaaacacaaagaagcaattgggtaaggaaatttagagtaatgaaactaaccagtacagtactantctctaaataatctaaaacaaaaactaaccgttactacactagctaaaactttatggaaaagatgacacaaaggtgacaacaaacgcagaaagcctttggttatgggagttgcttctggtggctcagtctttcttactatccacatttgccgtcagccttgcacgctgcaaagttatcgcaaccgcatatcaaattgccattcgcaacatcaaccgcttgnggctccctccaccatcgcttctcttgtaggaaatcgacttctatgaagttaggncatcggntgtcccgcgggctt

SEQ ID NO: 131648 - DNA, 179 bp, Arabidopsis thaliana columbia
  unsure (1)..(179): unsure at all n locations
cgagaaaggagataaagtgaangttactacgagctcacattcgagaagaagcttagagacaaagtcttgaactcttatttaacccacgttgtagccgcatccgaggagatcaagaggaatctgagagtngtgaagctttntagcagagatgtgtatgctagtnatgatgatnatggact

SEQ ID NO: 131649 - DNA, 350 bp, Arabidopsis thaliana columbia
  unsure (1)..(350): unsure at all n locations
gtaaatttaacaaaagacatgtacaatgaaaattagaagttcaacacaaacaatcaacgaagaagacaaaaaaaaatttaaataatctgaaaaaacaattctttacaaaaacatacaacattttgtcttaacatatgtcttaagattaatgttacaaatcaagattcttctttaacagctactgatccccaacgcttcgaatacgtttctgcagatgttccaagctctcaactctacgcatcgaagctgttctgttcatcttgcaccctatcaaggccttgcctttgttccccgagctaatgatctctggtgtagtcacttgggctgcttgtagtgtctggngaatttga

SEQ ID NO: 131650 - DNA, 396 bp, Arabidopsis thaliana columbia
  unsure (1)..(396): unsure at all n locations
aaaccgtatatatatacacaaattttaaaaattcttcatcgnaaattgttttcaagaataccaattcaaaccaggcaattggtaaatcccaccttggttctgcattaacggcgtcgccccatagaagtcgaacaatctccaacgccgccgccagaagatgagctcatgagaatcttaatcctcatgcgcaacttcgtaccagggtacaaccaggtcgtcaaaggcgagtggaacgacgcgggcattgcgtacagagcttatgatcttgangggangacgataggaaccgtgggagctggaagaatcggaaagcttttgctgcagcggttgaaaccattcgggtgtaacttgttgtaccatgacaggcttcagatggcaccagagctggtggaagag

SEQ ID NO: 131651 - DNA, 357 bp, Arabidopsis thaliana columbia
cggccggcggttacaaaccggcactataaatgtccgtcaacagaacaatgtcaagagtatcagtttgttcccggagattcctcccttgtgttctgtctccgtaactaatggtgtgcaggtacgtgcttcgtctgtttttatcccggaaatatcgaaccttcgggatcagccaccggcatactggtatgcatattcaatccggatgtctctcatgccagaaggatgcatcttgaatgggacacatcatagctcttgccaactgtattggagacattgggttatccgagctgataatgaagtgatagataatgttaatggagaagctgtcataggaaagtacccgctcttacaagccgg

SEQ ID NO: 131652 - DNA, 348 bp, Arabidopsis thaliana columbia
cgaattggcagacattgagtacagattaagttttggttgcaacgacaaactgcagcttggagctatcatttctactttcacacatgcccggtctatcattgttggtgcagcaaagtaaaccatgtttttaccattttggaacccgcagtagctcgccaccttaacaaaccgctaggaatgttttatctccgtgatgttttcctgatagtctctgtacattttgtggcgtttgtgaccaataggcttgctttttatttcttatgaagagtttcaatgccaccttgttatcctcttctcatctcctcgaatttgtaactttcaatttcttgatcaaattatgttttaatg

SEQ ID NO: 131653 - DNA, 426 bp, Arabidopsis thaliana columbia
  unsure (1)..(426): unsure at all n locations
tttcaatctaacacatgtagacttatatactcttctttgagtgcggtgtggtaaggtaaggtatatgaatgaggcagtggacatgtaaganctaaaaaccatacaaaattagatgaacaaacatcaaaatgcgaacagagtaacaaaacaaagaggtgaggaaactgtattaaccatgcttcttcttaacgntcacgntctacatctttgatcagaagataagatgggaggaaccggggaagaatcaacgcgacaacgagacacaaaactactaaaaccaccactgaccagcttgagtgagggatgcctaagagctgttcttcacaaactatgttgtaaatgatggacggtctttctttaacatttggtatagcacggttccttcaggttccaccgtcaccaaacatacatcctcctgtatcactt

SEQ ID NO: 131654 - DNA, 317 bp, Arabidopsis thaliana columbia
  unsure (1)..(317): unsure at all n locations
gggaggtatttctcattggttatacttnggtcctttttcactagtacaatacaaagagaaagaatgatactatattactgtaacangaaacaattctgtggtttgcgagtgtctcgccttaatatacaattnaccatttcactgagaagaaaagaggncctatggggatggtgcagaagatggtgttntggctcgaagaagttgttgcagaaaccgagctgcaagacgttggcctacaccgnctgcaacacgtcctccaagtcttcgtgcctctggttnttgtaacacctgttagtattggtttgcaaaatagcagg

SEQ ID NO: 131655 - DNA, 370 bp, Arabidopsis thaliana columbia
  unsure (1)..(370): unsure at all n locations
gaggtttcttaagaatgttaaagttcaccatggatttggtaaagtatttctaataatccaaggttttttgtaattnataaaagtaattaataatcaaaggacccacgtatatttatgtattatacatgcctaatcaaggcaatcctcccatgagagtagtggatgacaatttcgtatattcaacatccctcagcgagtcttgtccttgcaggctcttacattggaaataagcaacggtgtaagtcacaagctgaaacatcctcaccacaaagaccgaactcataaggaccaaaccggtggttaaggtaccgggatggactncttccatcgnccgccgaagtttggctatccatgcatacccagaaggttt

SEQ ID NO: 131656 - DNA, 342 bp, Arabidopsis thaliana columbia
tttggggaaagctgcaaagattgttaaagggatgaagccaaaactattcctcttgaatcttttctttgggttattgtcatttggattagttcaaatcttgcggctggtcgattggagtagttcattctcggttaccttaaccaccggtttggtccttatgagttcggtctttgtggtgaggatgtttcagcttgtgacttacaccgttgcttatttccaatgtaagagcctgcaaggacaagactcgctgagggatgttgaatatacgaaattgtcatccactactctcatgggaggattgccttgattaggcatgtataatacataaatatacgtggggcc

SEQ ID NO: 131657 - DNA, 415 bp, Arabidopsis thaliana columbia
  unsure (1)..(415): unsure at all n locations
tttaccgaaccacaattaaaatccaatcccacaaaagttgattgagcatagttttgcataagacatttagacaaaacacaacaaggccattatcaagcctgtggcttataagagaaggcattaacagtgaaaccaccatcaatacaaatggtttgaccagtaatataagangctgctggtagacacaagaagaccactagtgatgcaacttcattcggctctccagcgcgaccaagtggagttctactgaacaatgcctccttgaaaccgacgtcctcgagataagattgagacaaaggagtcttgacaacattaggtgcacagcattggctcttatgccgtcttttgcccattcacatgctaaatttctagttaactggttcaaagctcctttagttagactataaatggatcc

SEQ ID NO: 131658 - DNA, 331 bp, Arabidopsis thaliana columbia
  unsure (1)..(331): unsure at all n locations
gaggtcctggaaaacaggttgggaaatgtaagaagagccagggngttgtttgatgcagccacggtggctgncaagaagcatgtagcagcctggcatggatgggcaaacctggagataaaacaaggaaatataagtaaagcaaggaatcttctagccaaaggcctcaagttttgtggcagaaacgagtatatctaccaaacacttgccttgttggaggccaaagctggccggtatgaacaggcaaggtacctgttcaagcaggcgactatatgcaattcaaggagttttgccagttggtttgcatgggcacagttgggaatacagcaggaag

SEQ ID NO: 131659 - DNA, 447 bp, Arabidopsis thaliana columbia
tttaatcaaaaggaaaagatactttattattattcatcttaaaatggaaaaacactcagtatcaaagtacaatcgccaaatttttattgtggaagtgagaaacgacgatgaaggaaagccttgaagctttgacagatctaccaaacttaagaaaggccacgaacttttccagtttcagtgtcaatatcaatctcgtagaaacaaggtcttgtaggaagtccaggcattgtactcattgtaccaaccagtggatatatgaaaccagctccaatgcttcctcttacatccctaattggcaatacaaaccctgaaggtgctcctttctttgatgcatcatgtgagaatgagtactgtgttttcgacatgcatatgggaagattcgagaagccttgttgtgtgtcactcaactgttcctgctggctgatatcacacactggctccatatgg

SEQ ID NO: 131660 - DNA, 356 bp, Arabidopsis thaliana columbia
  unsure (1)..(356): unsure at all n locations
gaggtttgttccaatttcgaagaaacctcgtgaagacgaaccaacccattttgccttgtaggttgcttgtttggaagcaaaactggcagttggggaaattcctcttttgagagaaaagcattcttcttctttaagctctgtttcatggattgacaatagctcaaggaataatggattacttatctcaagaggaagatttgcagtttttcgatgctaacgaagagatgatggcattgaatccaagtggttttggatttgatgtatggaatgattcacctgggaagtgttgtggagcggcggaggaagttcttngagtggatggggagttgaagaagaagggcgtgtttgagacgaag

SEQ ID NO: 131661 - DNA, 325 bp, Arabidopsis thaliana columbia
aaaatctgaagaagaaaattgaaacatatgatcaagggcttgtaataaggagacaggaaatcgaacaggcgaaagtgggtctggagaaagatgcagcagaattgaagaagctgaaaagtgagcagaagattctgaaaggccttgttgatcagctgaaagatcgtaaagaacaaattgagaaggtagaggagaaggagcgtctacagaaagaaaaggaggaaaaggaaaagaaagaggccgaattagcagcccagcaaggaaaaggggatgctgaggagaagacagatgacagtgaaaaagttgaagaaagctcacatgatgaagg

SEQ ID NO: 131662 - DNA, 329 bp, Arabidopsis thaliana columbia
ttttttttttttttttttgatttggaattttttcttgagaaatcacttagaaaatagctgaaccactttgtcataataatacaattccgtgtgtaacaaaatgattattacacaaagaccaaaaaaaaaggtctaaatcgtttttttactttcaggaagccaagtctaaaaatccaagttcttcttttgattacacacataaaagaaaagatgaaactaaattaagtttaaagagttgcaaatcaatcatacgccttcttgctcccacacatccaccaaaaaatccaccatttcagggagtggtattggaacgagaaaaccgcttgttc

SEQ ID NO: 131663 - DNA, 345 bp, Arabidopsis thaliana columbia
ttttttttttttttttttttttttttttttgaaaatccatatgattgaacagtaaataatgcgtcctgaaaactgtagttgacaaggtacatcagtgtaataataataacttaaaagagaagaaggtaatcctagttaaatcaagaacatcaaagccagcattttccaaacaaacaaaatacagagaaagtaactcattttaactggtgcatactagagcaaggttcagctggaatcactaccaagcaactccactaattcggctttcttcatctttgacaacccttttagtccccgtgactttgctatgcctctaagttcgaccagcttccaattacactcaag

SEQ ID NO: 131664 - DNA, 337 bp, Arabidopsis thaliana columbia
ttttttttttttttttttgaagtagaaaaatggtggattcgtgaataaactggctttcctaagaaacagcatggctattaacatacactttattaaaaatcagttttgatgttttaatttttctatgactatctctatcttgtaaataacattatacagtaataagcattgatgcaaatacggtttcgggttcgagggactttgtgtgtacatgatgactacagagagacaagaccaaaagtgtggtctatagaaaagaagaaccatccacgggttcagccaactaaatggatcgaaccggagagtcagtgtattgatcttcaagttccaattccat

SEQ ID NO: 131665 - DNA, 360 bp, Arabidopsis thaliana columbia
ttttttttttttttttttggtagttaaacgttttgtaataatggtgttgtaacattctttatttgtcatatgttcgttgacataatcgataaatatagtaactttctaaccgtaatcaataatgttgctttcttaagtacttatatgagaatgccctgcttgacatatgttctataatcgttttctggttgaaaaaatcgatcacacatctcagcattgataccttaatactgatcgacaaattggatcgctatcgaataataatacaggacagattttgggtggctttgtggtcaaagttttaaggacagtaccactggagaacttggctcatcgcctcatccaatcatagtccgcttt

SEQ ID NO: 131666 - DNA, 354 bp, Arabidopsis thaliana columbia
tttttttttttttttttaatgaacgatgtcgtattggaccttaaacctttgaacatactgccgcctcttgtatcttaagagttacccattatttattacaagtcccatgataaaaaaagaagaatcctaataaaaaccaacacatgagaagaaaagatacacgtttgagtacatagaatcatcagctttctaaacttcttctttcaaccttgacaaggatcaatgtccaccatccaacctttcttatcttcaacaactcccatctgaatattggtcaacatcgagtgaagcttcgtagacaatgctgcttctcctgtcctgtattttacctttttgtcatggaaggtcacagtt

SEQ ID NO: 131667 - DNA, 292 bp, Arabidopsis thaliana columbia
aaaaacactcccaaaccaaaaaaagaagaagaagaagctaaattcgaatctctctcttttttgaaatatggctttttccaaatctctagtgtttgttcttctcgctgctcttttgatttcttccgcagtggctcaactccggctccagctccatctaacgtcggaggtagacggatctcaccggctccttcacctaagaagatgactgctcctgctcctgcacctgaagtttctccttctccttctccggcagccgattgactctccagaatcctcttgctttcaccaccat

SEQ ID NO: 131668 - DNA, 358 bp, Arabidopsis thaliana columbia
tttttttttttttttttttttttttttttttttttttttttttttagtggaaatttcttttgcgttatgtcgcgtagttaagaagtgaactgaagaaaaattcgaaaagtttgaaaaataaaaacgaacaagacattggttcttgttactctagcctcgcgacctctccttgtcgcgatgaagcgtcgcagattcaatcgttcaagccttcttctactacaaacgactcttcaagcatttggatttctcctgatttcatccttgattcgtcaaaggattatcctcagattaaggaggttgcttctgagtgctttcccaactaccattttccggtcaccacggcaaccacacgtgaatt

SEQ ID NO: 131669 - DNA, 345 bp, Arabidopsis thaliana columbia
tttttttttttttttttttatatgtaaaatgggatttataattgtgaatgatgaacaacaattcggagatgtttcaaggaaagacaatgggagtgtgccataactgattgaaatttaaacgtacatatattcacctccgcggacagcattctctgcgcccttcctctcttcttcggcctctttctctctctctttccagttttcgtatttctgatcgtctgttggtaattcatggcggcatatagggcaagagttatgctcgtccagccaaggctttaggcaaggagggtgaaatgtgtgcttgcatggcaattcctgcatcttgtcgccaataactagattctc

SEQ ID NO: 131670 - DNA, 342 bp, Arabidopsis thaliana columbia
tttttttttttttttttttagttttagtgttttgtcggccattatcattaatataagaaaaataacacgaacatgttcctttaattacaataatatcgccaaaacttgttcctcaatggtccaaagaaactaaactacagttactacaaccaattaaccaataaccatcctaataacaaatattaatctagctagaacttttattagttattttgaaataatataatgtttcatggatcaagaggtaaagccttgttgtgaacttggtctctctctaaaccgtaccgataatccatcgatagatattcgctagagccttttctcttcttcttcttcacttag

SEQ ID NO: 131671 - DNA, 311 bp, Arabidopsis thaliana columbia
  unsure (1)..(311): unsure at all n locations
gagaaaggttagtccatgtttaaccaacagaaactctggtcttaaaagtttgtggattagtcggttttcttctaaaggttcgttccctcagaaaaaggcaagtgaaagcgctaaagaggccaatgcttcagcctcagacgcagctaaaacccgtgattcacggaaaatgctggcagacaagaatgttataagacccagtatcagctcggtagatgggcccgataaaccggacactgtccttcctatagtttcgtcaatgagattagagtttcagagcaatggcttctttggtttnctagaagtttaggngc

SEQ ID NO: 131672 - DNA, 407 bp, Arabidopsis thaliana columbia
  unsure (1)..(407): unsure at all n locations
tttagattggacatccagttttagattgttgtatggtttgagacattcgatgccctctgaactaagaaatttacactctccttttcaaccgaaaaaatacacgggtaatcgtaaaacctataacttaaaaacatttatctacttgaacaaatgtcctaaaagcctaacatttttctctgctgaattttccgactaagttcctccgccgacgggatgccgtcgtagccgcttgtnctggcacttttccccgcgctctgccaccaggcctttaactcctcctcaagaaagtcttggtttgagataaactgagactcaacaaggcaagtcacacctttaaccttaacctgaaattaagcttttctctgaatgtctccttgagctttgtcctctgtgtccccatctatgcg

SEQ ID NO: 131673 - DNA, 297 bp, Arabidopsis thaliana columbia
ctgcagtgaagacgacataagatgcttaagaggactcaaagcatctctcacagatcctcaaaacgcgttgaaatcatggaacttcgacaacacaactcttgggtttctctgtaacttcgttctccgaacaagacgacgacttccctttgattttcgacacgcagagacgagaagtgtgaaatgaacttatgatacgagagagtagagtatatatgtgctatctctgtactactgtagagcactatatgtatgtaacgatgtatgtatgtcctgtcagtcttagactgtaggtgcagt

SEQ ID NO: 131674 - DNA, 312 bp, Arabidopsis thaliana columbia
agatcttgcagatgcttacttgcacccaattttccattcattcgagaaagaagtagaattatcatcatcatcatcatcatcagaaaaagagactcaccaagaagagacaccagaggtaagagtggacaaacatgaaacacagtcgtctagtcctgtgacagagctcggtacttcttccccattcaccatcatgtctacatccacttccccttcttctcactacgcttcagcttatagcagtcatcgtctcagtatgaatctcactacaatcatcatcagtcagagagcatgagtcagtcaatgactctagca

SEQ ID NO: 131675 - DNA, 378 bp, Arabidopsis thaliana columbia
ctccggcattggagtggtgtggtttttccggtaagcgtggcagcggtggccctttctcggtggatgagaggcttctcttccgtttcttcctggttatggacgtcggtggagatcggtgaagtctttcttggttcaaccacttggttagacgctgtagctgtggcgaagacgctgtggattggtgggttttcagtgcgtgtttgatggttaacaaactggatctgagatggctgttgcgggttccggttgctgaagggttgtctgagccatcacccttctttagcctccgttttttgtctccatcaatccggattgaaggttgctttgcttttggaaatttcagatctaaggtttggaggtcagaggcttggaatgcgt

SEQ ID NO: 131676 - DNA, 364 bp, Arabidopsis thaliana columbia
  unsure (1)..(364): unsure at all n locations
ttttgctttcccttgttttggtcctcttgtctctctcattccatcaccttctttctcaaataatctctagaaaatatatagacaagaaaagggtttttggatcctcaaatcttggaatgtttggtgctgcaattgtcgcatctgcagagtctaccggagtatttttcgctgcatctagactagcaggagcaacagcgcctccagcacatgtcgtctctcgtagtatcggtctacagggtattggtgtgctccttgaaggaatatttggttccattactggcaataccgcgtccgtgggaaaatgtcggtctcccttggnctcacacggatagggagtagacgagtggtgcaggtttcaangttt

SEQ ID NO: 131677 - DNA, 235 bp, Arabidopsis thaliana columbia
  unsure (1)..(235): unsure at all n locations
caaagttctttaatcataaaagattacagattgaaaatgctcttctgtaatattcaaangagatcagaaatattcaattaaagaataatttgacaaatcttttttctctcaccaccaaagaacaaaacaaatagacaacaactttcttcttcatctctatatctacaacacattcttgcaaaantaacaattctcgtaacaaaattaaatcttctttttcttttcatttttcatc

SEQ ID NO: 131678 - DNA, 398 bp, Arabidopsis thaliana columbia
  unsure (1)..(398): unsure at all n locations
ctctctcaatctctctcagatctgaatccatccatcaccgatctctaatggcggcaccaccagcatcatcctcggcgagggaagagttcgtgtacctcgcaaagctcgcaggaagncggnaacgttacgaagaaatggttgaattcatggaaaaagtcgctgaaagccgttgacaatgacgaacttcgaaccgagatgggactgtggatttacatgactactctccttcaattgctcaaatgaattgaaaataggtaggncatgttggaatatgtcgtctactgttcctactgcattaatggtgtaggagttttccntttatttttgtagtagtcaataacaggacggtttaaggcattgaaggattttncagacgctttttccattggtnggttata

SEQ ID NO: 131679 - DNA, 262 bp, Arabidopsis thaliana columbia
  unsure (1)..(262): unsure at all n locations
tacattaataactttcgtagaagttacatatttttttttgttcttttttgttttaccttacaaagtacaacaaacaaaaaaagatgcaatgcgaattgcatatagtgcatcaaaattcatgagtaatgancaaatttcagactggtggtcttttgtcaagatgaattttctaccaaactcgaaccgagatgggnctgtggatttacatgactactctccttcaattgctcaaatggaattgaaaataggtaggncatgttgg

SEQ ID NO: 131680 - DNA, 318 bp, Arabidopsis thaliana columbia
  unsure (1)..(318): unsure at all n locations
cgcgtggctttactttctccgatgatttcatcatcatcgcgatcccttaagctcagccaggcagcttctgggctcaaagttggggaatcttttgcaacagacataattagtcaggaagaacgagtttcaccgccgaaagagaaagctccatttattacatttgtactagggggacctggaagtggaaaaggtacacaatgcgaaaagattgttgagacttttggattacaacatctaagtnctggagatttgctcaggagagagatcgcaatgcacacggaaaatggggctatgattctgaaacttgattaaagatgg

SEQ ID NO: 131681 - DNA, 321 bp, Arabidopsis thaliana columbia
  unsure (1)..(321): unsure at all n locations
gttcacacatgccaatattagctcagcccgaaatgaattcgggtataaaccgacaaccgatttggaaaccgggttgaagaagttcgttagatggtatctttcttattacggatacaatactaaagccaagcttgtacattaaccgtgactattattattatttttaagcttttgtctgcagaattccaaccttctctagaggaattgatacagtttctaccccaaaatcggtcagtttttgatgttttccgccacattccctngtcactgttaaggcttttaagggatcgacatctcccgnaagccctatgttatcaatct

SEQ ID NO: 131682 - DNA, 301 bp, Arabidopsis thaliana columbia
  unsure (1)..(301): unsure at all n locations
ctcatctatgtgtatatatatataatcaacttacaagacagagagtgagagagttcaagngagaagaatcgtttacaaagtatacaaattttttgagaatcatcaataaggacgattcggtggctgaaccgtaatctgagccggtaaaggtctaccagttccagaaccaccacaattgctacaagccgcacgacctgaaccagaacacctacgncatccaacgtcaccatcggaccatcgagaacagaaacacgtgactcgtnccagttaccgtttacaagtcgggncaacggggggtttt

SEQ ID NO: 131683 - DNA, 326 bp, Arabidopsis thaliana columbia
  unsure (1)..(326): unsure at all n locations
tttttttgaacaacttaattttattggtcttcttacaaacgaacaatcacgtttagcggattttccacccttaaacattagctataggaaagcaaagtaggatgatacaattactgctgttttatcaaaaagaataacgagaagagaacacagaagtggtgtctttaaagaacagcactactcttgttttcctcagactcgatagctcggtacttgtacctatgcgctgaccaaaggnncacacagaaattcaaaaagctcagaagtgtgagcaaccngtacaagcagtcgaatctccccgtgtttatgttctgcgataaccccgg

SEQ ID NO: 131684 - DNA, 315 bp, Arabidopsis thaliana columbia
  unsure (1)..(315): unsure at all n locations
attggaaccatctccatggaagctatgcacagtaacacaagtagaggaagtgaagattctgatcagattgattccaatcccaacatgcactataatgctgagtctggtcttgactgagtatcttacactctcagtgcaacaagcttacacactcaacacacacattcaacacctcaagcttccagtgacctgcatgccagttttcccaggcctaagcattttcctcattctctccctttattactctgtcttcgtccctatcaccngaaggaatcacttggcaatcctcatggtggcttcccagatttcaaagtg

SEQ ID NO: 131685 - DNA, 265 bp, Arabidopsis thaliana columbia
  unsure (1)..(265): unsure at all n locations
gcagtgctcgtggataaggagttgggctatgcagaatcatatgaagaggattaaaacggagaatgttgagaaaggtttcgtggaggttatgagccaatgtaggctaacgatttgtagtatcttgatctgtctttgtttcggtgccaagatcagcgaggaaaagattaagaacattgagaatgttcttaaggacgttatgcttataacttctccgacgttacctgactttttgccggttttcactccgttgttttcggcgtnaagt

SEQ ID NO: 131686 - DNA, 371 bp, Arabidopsis thaliana columbia
  unsure (1)..(371): unsure at all n locations
gaaactgcatatgattatatatattttacactccttgagaatagataaagatagacataaacaacattaaaaatagcaaagattaatgtgacgtactaaggaattataacttttaattaccccacacgcttacaaaaactaaacatatccgttagtgccttgacctggatttgcgctttgagagaatttttcataacgaccgtgaaggcgtacgtctcagtcgggtcgggtggagaatccgggaaccgggnatccatttaaacggaatggatcatccttgcaagcatncaagttgatgtgccagaatccctaaaggaccaagccgggcagatcctacggacccgcaccaaaagggaaccttgttaacacca

SEQ ID NO: 131687 - DNA, 336 bp, Arabidopsis thaliana columbia
  unsure (1)..(336): unsure at all n locations
tttttttgttcaattggtttcgatttattacgtttctaacacctcacatacatcaattttaagaaagcaaaaaagcataaattagatttccacacatttatcggtacataaataagatttcttttgaagaaaatcataagagatgtagtcactaaacactggaatttctttttggcaaactcgatggaactcggcaacggtaggcatgtaaggttttacagcttcatgggccctaaatttctcagcccactgaatcaggcccggtgttgtgtctggacgcaaaaacttaacacctggnaaaagcttcaatggacagagattgggacctactatggg

SEQ ID NO: 131688 - DNA, 356 bp, Arabidopsis thaliana columbia
  unsure (1)..(356): unsure at all n locations
acggcgtcgtattggcctacaaaataaaccttgttgaagtcccagaaaacgtcaccgttttcagaatctcccggacgttagaacaaaatgcgacggatatcattcaccggtggcaacaagttgcaccgaagcttcccgacgagcttttcataagancagtcattgacgtanaaacggcactgtttcatctcaaaagaccgtcagacaacattcatagcaatgtttctaggagacacgncaactctactgtcgatattaaaccggagattcccagaattgggtttggtccggtctgactgtaccgnaacaagcttggatccaatctgtgctatttttgggacaaatatcccaggttg

SEQ ID NO: 131689 - DNA, 400 bp, Arabidopsis thaliana columbia
  unsure (1)..(400): unsure at all n locations
ttttactaaaagaaactatcttattatactatttgtatttaatatcaaactttataaattactaataataaataaaaatacgacatataatcattatacaacaacaaatttcactaaccaataatcaaataaatacacttatggtaacacaggaatactctgttcgttcctaaagaaattaccactatcaactctcgtcttaatcttcaccaatctctcgaaattacctgcgaaatacttcttcccgtaacgtttaccttccacataactactgattttaccattatgagaattaatacccaaatcaacatcacggtnattgaaaaacggttgtctcgggnttcttgggaaaccaatggtggtccaggaattgggtacaacttncctcgngcaattcccn

SEQ ID NO: 131690 - DNA, 311 bp, Arabidopsis thaliana columbia
  unsure (1)..(311): unsure at all n locations
catagatcatccaatgtcctagattcgtctgatcgatggtggactatgccctctttcttctctttttttttgcaggattattacagaacataaataaatggcagaatcatcagcaaaaatgaaaaaaaacgagtggtgcatatgtagaagatgtttcttcgcggtatttttgactgcacccattgttttcttcagtatttaggttttgtaacgttgtcctgtgttaagatttgcacagacatacccaacttctgtatcttttttttttacattgtttgtactnagganccaagtataaaaatgggaagaaa

SEQ ID NO: 131691 - DNA, 216 bp, Arabidopsis thaliana columbia
  unsure (1)..(216): unsure at all n locations
aaagaacttctagttatagataaagtaattacagtaatgaatgaagtcaaagaccaaaagaaagcacatgtatacacaatcgaccatatatgtaatgtctcgctaacaattctgtacacatctctcaaaagtcctcttttgtcatntgcgattctgcagctttaaacaactctcgccattgctgtggatcacttcctngaccatcccccttttact

SEQ ID NO: 131692 - DNA, 356 bp, Arabidopsis thaliana columbia
  unsure (1)..(356): unsure at all n locations
gcaacacctcaagtaaatagaatgaagaaaccgaaaaagtaaagtacacaaacttcaatacagagctaaaacctatacagccaaacaaactacttccataggacagaaaatgttatgcgaaaatgtcaaacatctctccctccacccttttttcttgtcgtcatcgctaagcagtgtaagccgatctaagtcagaaagcatacttatctttttctttgggacgacgacaatggccccgaagaaaggagttnaaggtagctgctaaagaagangaccgcggtggaaagttttcaaaaccctcttattcgagnaggaggcctaagcaattcggtnttggttggggcttttaccttnct

SEQ ID NO: 131693 - DNA, 267 bp, Arabidopsis thaliana columbia
  unsure (1)..(267): unsure at all n locations
acaaatttgatttcttaatcatcaaatacctatcaaataccacattcaagaaacataaagaaaacgtaacaaatcagcaagctaaggttgatgatcttcaacattcctctggatcttccttggctctggcacgatactgtcggccaggtctttttgtgacatgttgccccncccataaataacaatgtacttcccgtaagaaaccgccggaaacacgcttctcgccgccggtacatccccggtagtctccacagccttccacngttc

SEQ ID NO: 131694 - DNA, 315 bp, Arabidopsis thaliana columbia
  unsure (1)..(315): unsure at all n locations
agacaacaagnncacaagagaacgtatgtgcattcatgggttcttatcatcatccacgttttggacggagactctgttcccaaacttctcagactcagccaaatcgaattacaggtttctcgcantggacctgttgggttatgggaaaagtccaaagccgaacgattcattgtatacattaaaagagcatttagagatgatagagagatcggtgatttctcagttcagactcaagacattccatttagtggctcactccctaggcttgcattttggctctttgcgctcggngtgnaaacacccagggagccatca

SEQ ID NO: 131695 - DNA, 396 bp, Arabidopsis thaliana columbia
  unsure (1)..(396): unsure at all n locations
ttcatagtngaaacacttctctatctttgcataactttttctttaagtttcagtctctgctcaacattcttcaagtcagttcttaatgcttcaagttagtagttgtgtgcttgtgagtaagaaagctagaggtaaagaggctaaaaacctcacagcaggnaacccatctttctcatcagggagatagatttgcatagagaaaccacgactgtcttcgcgtccttctctatacggtagattgaggactttgnaaaccttcttaaacatcaagactgtcttcgtggggcaccggttcatgaagggcacacgtactttggttccatccaagaaggtgaaagtcgggattcttttgtttagcgatggattgaattgactatcccatcttnccgtggnaaa

SEQ ID NO: 131696 - DNA, 363 bp, Arabidopsis thaliana columbia
  unsure (1)..(363): unsure at all n locations
gacaattataagtcaccaataaatttatatcgtcgaaattacaagtatacagattacaaatattatcccaagttgggtcgtatatatgacatatcgcatccaaataaatagaagaataatttcgaaaacaataaaaaagaaggaaaagagaaaagagaaaacaaaagtcaaagggaccatgttgataaatggaagacaggactcccatctcttgtttgtctccccatctccactgtctcacgtgcctttgctctctgcatggaatcaactgcatctgtctctgagttaaagtcataaaacgaacttgctgcagtnagtttcatcgagaggaactcgactttgattctgtaggngactgggcca

SEQ ID NO: 131697 - DNA, 305 bp, Arabidopsis thaliana columbia
  unsure (1)..(305): unsure at all n locations
agaagagtgatatagatgttgaagatgatacatctanggaagcatggaaacaaactcttgnngtcttttaaagagcaggtatcaaagatgcagagtgtgtcatcggaggcatactccgttaactcccaaaaggcgatgacggtcttgaaagaaacttctgaacaacttaggattcaagcggaaaaggcgaaagaagagttgggtactaaagcgaaagtggttagtgaagagggtagagaatatattttgaaagcagcagaagaatctccatcagatgtgaaagagattnttgaagcatttgcctc

SEQ ID NO: 131698 - DNA, 308 bp, Arabidopsis thaliana columbia
  unsure (1)..(308): unsure at all n locations
gctccattagacagttatcgtgcacaaatagctgtagcttcgtaaaaggaagattattccgctcaacgatcagaccagtacgtcgcccacttgctgttgcccttaacgacgtcgacaaactcgcgagcgatgacacggtcggtctgctcgctggggtgcaattcgtcgtaccacaagaaagaatccggactagcggggtttccagtgccatccacattggcgtacactnaacgtcgagtggcgcggtgccgttgnaggtagttggaagggttgttgtagatgtccgtcagcagtccgttaatgtccct

SEQ ID NO: 131699 - DNA, 303 bp, Arabidopsis thaliana columbia
  unsure (1)..(303): unsure at all n locations
aatggagcttctccatttcccagattcatcgtcttctcaggccagaaccgttaccagtggngatatttctcctaccactcttcaccctttcggggctttgacttttccttctaactcgcttctcttggaccgcgccgctcgtttctcggtgattgctacagagcaaaacggtaatttttccggcgagactgctaactctttaccttctaatcccggcgcgaatctggggcagagtcaaagccgagcctgctgagaccgattcaatggtggagaatcagacncagagctactctttctggnaaa

SEQ ID NO: 131700 - DNA, 289 bp, Arabidopsis thaliana columbia
  unsure (1)..(289): unsure at all n locations
tttgagcccaagataatataatttaaaaaatcaaggaaaaagacaccataaaatcaaaaaacaaaaagaccccaagagaatcattacatatagacacagtaactgtgttttttttcgtttttcttccttttttttttccaataaaatggngacacgnttttncagcattttaagaggaggaancaacttcaaagaaganggattcataatcgngatactaaaggtgggtgagctccaaatcatcttgggaacctttttttttgtgtgtttgggtaatttcaaggaaagc

SEQ ID NO: 131701 - DNA, 327 bp, Arabidopsis thaliana columbia
  unsure (1)..(327): unsure at all n locations
ctctttcaaaagaacaaaagttacaaaatgtttaaaaaacattacatcacacaagaagtcngcacttttgtttaccagtcaccaactcaacaagcaataaccaacagagataaacagngaagctttgaagttctaatcactattgtaaccaccatcatcgttatccttatcttcgtggtccttcaccactcgttctatgaactgtcttcgaactccagccatcacagcttccctcgaggagttcatcgtctcctcctttgccatcgttaagaactggctctgattgacacagaagtaaggntacactctttggggtgcacctacggc

SEQ ID NO: 131702 - DNA, 225 bp, Arabidopsis thaliana columbia
  unsure (1)..(225): unsure at all n locations
cactaagtncagggacgttcaattttntttatctgtaatgtaaaaaggcaatgacacaaattaggaagattaaaaaccaaaaaaaaatcgataaattacaagagttgtgatggatgatggagttgggtgaggagttggtgtatgtcaggagcatgttgatcatctgcacggatgcgatcaggttgaatccaacggccgtcagtgttcctcaccatccctttgttt

SEQ ID NO: 131703 - DNA, 308 bp, Arabidopsis thaliana columbia
  unsure (1)..(308): unsure at all n locations
tttttttcagctaaaagatcatttaaatattcataaccaaaagaccaacaacaattctggtttacacgaggataacaatttcgcttcaaggaaataaatctgaagacaatcttagatccttagatacctacttaactatgtttaccgaatccagaaagagagataacactgaacctacctacatagcancaaaagcatcacatcattcctccccttgcttgattttcagacttccaagctttggttccaattcattgccatcttcgccttgntcctcttcgtcttcatctncaaaatcttctccttca

SEQ ID NO: 131704 - DNA, 400 bp, Arabidopsis thaliana columbia
  unsure (1)..(400): unsure at all n locations
tcttcctccacaaaatccatcgtctctttctcctccttcctcaaccgccgcttctcatctctcactctcgtcaaagcctcatcgaccgataccgaaaccatcttcttcgaagacgaaacaccagaaataaccgcaaatgtcgtcttcgacccaccaattgctcccgaagattcgtctctcctccgtatttcgacgaggaagcgacgagacanaggaagagatcgctaccgcttttgaagagctctatggacctgcgtatagtggtgagagtatgcttggggaaanatatttatgtgnatggactcaaagcataaggagggttcaggtatttngtggggaaggcccaaggnaaggttaaggtttggaggatgggttttttaagagnaggattttttncaag

SEQ ID NO: 131705 - DNA, 314 bp, Arabidopsis thaliana columbia
ttacaatccaaatcctctgtttttgttgtttactttttcttattatgttacatctgtaaaattcgtaatcaagaacacaaacaacactcaaaatcatcagcactcataaaattgatgtaagataaacaaatcaatgaagaatcaactgggaaaaaaaggtcagattttttcacagaaaaaaagaagaaaaacaaatcacgcaaatctgttaaaagccctcctcccaattgttgcaggcatcgaaacagtaggattcaatactcaaatttccaacgggtttgagggttttgtgcttctcaagccccacagcacca

SEQ ID NO: 131706 - DNA, 392 bp, Arabidopsis thaliana columbia
  unsure (1)..(392): unsure at all n locations
aaaaactatatcacctttcactcccttatcaagtcaaccaatgcagagtccaaaaggaccanaacccacactgtgtactggtgncctatataaattcttcatatgaccaacacataatttaataccaaaacctgaaagagccattaaatgaatgaaatgcgttatcacagtcgagaganggtcgagatatttggatcatgttagaatccgtatccattttggtgttgatctcctgctcttctcgatcttcttgtcgtacttggangcgccgagtatgagctgcttgtcgaatactttgaagatgtcagtaactcctgatgttttgacattcctncgctgcttgtcgaatactttgaagatgtcagtaactcctgatgttttgacattcctnc

SEQ ID NO: 131707 - DNA, 374 bp, Arabidopsis thaliana columbia
  unsure (1)..(374): unsure at all n locations
cagtttctccttttctgcttcatatatttaccattgtaaatgaaaatattcacaaaccaacaaagccaaatttacaaattatattccttgcattgccttgtcatcttccccggtttcagttcagatacaggacacggatcaatggtcgatgatcacggngtttcgttgaattccatcacctttccgcagactggacagttttcacttctctccatccactcataaatgcaactaaggtggaaatggtgtgaacattttgtcacaatctttgggttctctgatgtatattcttcaagacaagttggggcagacatcttcgtcttctgcaaaccaagtcacaatctttgggttctctgatgtatattcttcaagac

SEQ ID NO: 131708 - DNA, 391 bp, Arabidopsis thaliana columbia
  unsure (1)..(391): unsure at all n locations
gaagatactctggatgcatatctggttcccgacgaaccggtgtaccggaattttgttcgtcatggtctggcttacccanaagccgatggaattttggtaaatacatgggaagagatggagcccaaatcattgaagtcccttctaaacccaaagctcttgggccgggttgctcgtgtaccggtctatccaatcggtcccttatgcagaccgatacaatcatccgaaaccgatcacccggttttggattggttaaacgaacaaccgaacgagtcggttctctatatctccttcgggagtggtggttgtctatcggcgaaacagttaactgaattggttatatctccttcgggagtggtggttgtctatcggcgaaacagttaactgaattggt

SEQ ID NO: 131709 - DNA, 371 bp, Arabidopsis thaliana columbia
  unsure (1)..(371): unsure at all n locations
gcattaccttcacctcgcagctccaagatgcagcaagattgtncttatgtattgagcaatgagatatctgcagatacagcaaccacaggatcaaccaagatcaggttcgaggatgtaaacgcgacttcacttacagtggttctcgcctctaatgaaattccctcacctccaaacatcgttcactacagtatttggcatcgtaaggtaccagaaaaagattacccggagaaatcgacttgcacattgtttattccaaacacaagatttgttgtctctggattagctccagcttctgagtactgcttcaaagttgtgtcctatagtggnaccagagaaaacaagatttgttgtctctggattagctccagctt

SEQ ID NO: 131710 - DNA, 389 bp, Arabidopsis thaliana columbia
  unsure (1)..(389): unsure at all n locations
atttgacatacacgatcaaaacgaagcagttttgtaacaagataaaaatcgattgggttaaaagtgtaagngagaagtaaaaatgtagtcatcactcatcatagtgactgaattcaagggaatattattcttcgaaatacctgaaagatgggaaatttgaatttcagtagtgaatgacgcccagactcttcaaccaagggagcatctcctccaatccttcctttaggcttcgagggttataaccaagttccagcttagccttatcacaagagtatgaccactgatgtctcagcactgtcactgtcggaggactgataagtggaagctttcctgtacatgtctcagcactgtcactgtcggaggactgataagtggaagctttcctgtac

SEQ ID NO: 131711 - DNA, 314 bp, Arabidopsis thaliana columbia
  unsure (1)..(314): unsure at all n locations
aactccccacgcctgtagacagcgagaagcactttcggtatttgcatcaatggagagagctctttggtaaagttctctagctgttgttgtgtttccttctttccattccatccaaccccaagcctaaaccggaatacactttcaccaatcatttcccctttcatacacgattgtaaagactcttgaattcgctagccagatagaactgggtaaaactaaagtctgctaagtgttaatttacaagataaaccaataaaacgggcgtaaagaactattagcaaaatctaaagctcaaactttaaggaaaacgtnta

SEQ ID NO: 131712 - DNA, 298 bp, Arabidopsis thaliana columbia
tttttttttttttttaaaccaaatcaaaacagataaccaaaagaaaagaaaatggaaaaatcaaacgttttcctcctctccatacttctcatggcttcactcttctccatatcccacgcctttcaactctggggctacgcaatcgaccgagtcagcattcgtggtgtcgtgtattgtagccttgacggagatccaagcgcaccacctgtctccaatgacacagtctatattgaatgtccaggcggctcaaactcaaccctcgctcaagcagtgaccaatcaggttggtgtatttaccc

SEQ ID NO: 131713 - DNA, 352 bp, Arabidopsis thaliana columbia
  unsure (1)..(352): unsure at all n locations
tttttttttttttttttttaccaagagttgggcttgggcttatgaattggtgtaaaagttacagaaccaggggttccctggaagtncagagcatagtcatgctaccttatgggaatcttgtccccccaatgaatatgaaaagaaagagaactattanctaaaaaaaagaactcatgaagatgttaaaaacaaaagcttaactctcgatgttttaagtatttcaagctgcagactcttggccgccttcttgattctccacggggcaagtaacaccaccctcaggtggccttataactcgatcgcacaatgagtatccagactttaggacatgagcaattgtgccttgggggct

SEQ ID NO: 131714 - DNA, 321 bp, Arabidopsis thaliana columbia
ctatgccatcggtgcttctcgacaatgatgtatgatgcgatcgtctctgccttaaagtgtgtgcgccttatatgtatactgtgattttaatgtatggtcgtctactattatatatatagggagaaataagtgaggcatatatatgctccacaaaagcttatatataagcagctccgtctttgtcatctttatgtacttaactaaaaggatactacataatagtaataagtgggtatgtattttatcatcaataattctcttaaatactagttattactgtctttatatatatatacactaatggattttgaaaaacgttag

SEQ ID NO: 131715 - DNA, 465 bp, Arabidopsis thaliana columbia
tgtctcctcaattcctggagccacccccaagatgggtaacccaagaggggtggagcaataagatcctcgtttcctcctacgggaaaatgaagcccgactctcgtatttgctgaagtcgttgtgagatgggttcccacataatatgtcgtcccccccaagcaggcctgcagagcaggggtggagaatgtcagaatctctccttaatcctggccgggctagggtatctcatgtgtgggggggggagtaaacatcgcctgttgagactggtcaccgacctgaatcggcttttatagatatttcactgtcacactctaaattttcctgtcttggtttcatgaagaaaaaaacaggttttgggtggtacacgttttattaaccaggctgtaaaaaatagagcgatatgtagcttttgtaaaatgtgagaatgccactggtgtaatttaacagatgaatcttctttgtgtt

SEQ ID NO: 131716 - DNA, 362 bp, Arabidopsis thaliana columbia
  unsure (1)..(362): unsure at all n locations
gtagctcctggtggttcttcctctgcacaggcttgctctaatactctactttctactggtaccggtgcaaaagatggaaagaaagaaactgctactggaacactcttggtcggttctgatggccatggcanccacccagagaaggatagtgaaaattgtaaagagaaaaatgttgccccacctgttaatgaatcgccacatgctaaagatactgatgatgggttgatagagattacagcccctgagctggagatcacccctgcagaagcagaagcagaagcagaagcgcatgtttgggagagtgatgaggacttacccaatttttctnacattgaggctatgatacttggacatggggttgg

SEQ ID NO: 131717 - DNA, 400 bp, Arabidopsis thaliana columbia
  unsure (1)..(400): unsure at all n locations
tcaaaggatgttcttctcgagatatatgctccttggtgtggccactgncaatcatttgagccgatttacaacaagcttggaaagtatttaaaaggcattgactcgttagttgtagcaaagatggatggtaccagcaatgagcatcctagagcaaaggttgatgggttcccaacaatcctgttcttccctggtggaaacaaaagcttcgntccnatcgctgtggntgttgaccnaacagtagtggaactgtacaaattcctgaagaagcacgcatcactcccatttatacttgagaaaccggcgacacctgaaccggtgtatctcgaccatgaattctgatgagaaggatcgagggtgatagttccaaggatgagttgtgatgatcggaacagagtgtgta

SEQ ID NO: 131718 - DNA, 347 bp, Arabidopsis thaliana columbia
gtgaagagatcttgtatctctgacgttattttgtccaagagacttggtgctattcaatgtttacaagctggagaaatccatattctttgcaagcgcagacgagattctcaacctcagagaccacggcggtagaagaacacacccgattcatgtcgatgatggggatctcggatatgagaccagaatcatgggcgccgacttcagttttgtcttgatcataccgcacatatctgggaggagcggtcgtgatcatcttatccttcaccatctcctgtgcagaaggagctaaaatagagctccacgggtttcttctttggcttccatgggggctttcttctccttggatg

SEQ ID NO: 131719 - DNA, 401 bp, Arabidopsis thaliana columbia
ccttacaggtctttggtttaggaaaataagctcagcggtccaagagtttgaccacgcagggatgttgatctctgacccaatcaggaaagaccagtttgctcataaaccctcgtgccttgacgcttaaggatgttggcgttgatcctaagaaatcggctgctgcagctcactaagtttttatgaaggctgggttatgtgttttgttttccatgtttctgtcgataaataaaacatctggaggagatcccagagttttcccatggggcgggtaaggttttatcctgtttcctcttggatgtattacagtgatccagcaacttttgagtgtatttgtgttgtctccacagcatgtaaattgtccccatgaaatttcggtcgaagtaataaaacaacttcgtttt

SEQ ID NO: 131720 - DNA, 289 bp, Arabidopsis thaliana columbia
agactcgggtaccggagtagaccggtgcgcacgaatctccatctccagcgatgcgagatactcccaaatcctcctacaccaaaaacaccaacctgatgtagtgcctccgatttgggaacccacctcgacccaccggatatcttcccaccggagagtccaccaccgggaattgacccgccaccgcctttaggacccaccatcatgtagaactcttctctgtttctgttgacttttttagcttaaagtttctgtttccacgagaaatagtttatacacaaatgttgttacc

SEQ ID NO: 131721 - DNA, 285 bp, Arabidopsis thaliana columbia
  unsure (1)..(285): unsure at all n locations
gtgacacaccaccagtacttcctccaaaacccttaccgtcaccgttgtctcctccgnaaaccacaccacctcctccaccaggtattacaccaccacctccaccagttattacacctccactatcacctcctccaccagttattacaccaccacctccactagcgaccacaccaccgggacttcctccaaaacccttaccgccagcgttgtctcctccacaaagcacgccacctcctccaccaggaatcacaccaccactatcacctcctctggtttggaatatgt

SEQ ID NO: 131722 - DNA, 354 bp, Arabidopsis thaliana columbia
  unsure (1)..(354): unsure at all n locations
cggcacgaggccccttctgagcccaaacaaaaacaagagaagtaaccttgagttgatcctggccgttagatttattataacgtttcccttcagccgncggatgagtatatcctgtctgatttgaaccgacaattttatattagcttttaacatatgaaggcgacgtggcatttgtattaccacgaccataatcaataatgtaagccataaaaagatcacatgattattactttgtgtatttaaaagaaaaaagatattgatctcaagtgtttcccccccttgtaacaacactccaatcaagatgtggccattatataattattatggcattgtntatgtgggggtaagagtttt

SEQ ID NO: 131723 - DNA, 329 bp, Arabidopsis thaliana columbia
  unsure (1)..(329): unsure at all n locations
gattttataagaagactaataaccactctctttctttacaagagacagccaccattagccatgatgacttgaccgttgatccattcgccagcatcactggctaagaacccaacaacaggtgcgatgtctttggtctcaccgatcctaccaaataagtncttgacttaactttctcaacaatctcattgatcaatcctgtgtaaaacatttctgtggcgacgggacccggagaaacacagttaactgtgatctctgttcctttgagctcttttgcaagaatcttggncatggcttctacggctgcctttgaagccgcgtatgagccatag

SEQ ID NO: 131724 - DNA, 340 bp, Arabidopsis thaliana columbia
  unsure (1)..(340): unsure at all n locations
cttcaactttcagcggcgatgaaactgctcctttcttcggattccttggcgctgccgccgctctcgttttctcctgtatgggagcagcgtacgggacagcgaagagcggggttggtgtagcgtcgatgggtgtgatgagaccagagcttgtgatgaaatcgattgttcctgttgttatggctggagttttaggtatttatgggttgatcattgntgttatcatcagtaccggaatcaaccctaaggncaagtcttactatctattcgatggntatgntcatctctcttccggtcttgcttgtggtctcgctggtctctccgccggtatggctattggaat

SEQ ID NO: 131725 - DNA, 317 bp, Arabidopsis thaliana columbia
  unsure (1)..(317): unsure at all n locations
tggaaaagcctccatctttgcttcccgtcaaatctcaccaaatgctattcttcgccgtgtattcctccgtcctccgccgatcccgacggtatcatccaacctaaccgtccctccatcgttcttctcaataacttcaacctcctttaccacaatgacaaccaccaccacccccatcgggtcattgacttaccttcttcctccaccacaaccactccgggcgncacctcctcctcatccacgtcatcatatgaatctgatatctctcctgatgtatccgccgctttgggttcccgtcgcttcttcttctcttcccctgg

SEQ ID NO: 131726 - DNA, 343 bp, Arabidopsis thaliana columbia
  unsure (1)..(343): unsure at all n locations
gacaaatcttagatctggttttaattccactctaaatataacatttccaggtaatcttattccctgaaataatatatcctccaggaacaattttatttactactagatacacataaaaattgggaaccttcttcttaagatgtttcccacaccttgtagtctctgccttcaacgggtacagaccagttttgggatccgtttggtggttcataatgccctggtccgatcttcattggaaccttttcatctattatagncgcatacacatctctctcactcttgtctatattcacctcactccgacagnggagtttctgtctgttcctgagagagagaagtgcag

SEQ ID NO: 131727 - DNA, 331 bp, Arabidopsis thaliana columbia
aagatattgaacacttggatcttaacaacggcttatttgtgagtgtctcatcaggttgatggcataagtattggctctctagatgatatacctggtacttctgtcaccaatttctttaggtccataaggagtaccctggactttgattttgaagatgaaaacgaaggtatagctaaaactgtcctttttacttattttaacagatggattattgcattttagtcatgaggattatgtgttcctacaggaacttgggagcccaaggagccaccgaccctttatatatttatcaattgcagcactcgggaactctctttcatagagaagtttg

SEQ ID NO: 131728 - DNA, 318 bp, Arabidopsis thaliana columbia
  unsure (1)..(318): unsure at all n locations
gagctcgtgctcgtgattttgatatctatctcttcgttatcgattttgaacatccacattgttcttagatctgaagaaaaaaaacacgggttctgttattacgatttgctcggcgattttgacaccaggctttcaattcttttcgttggaggtgattcgatttcagatccatcggatctaatctcggcgagtcgattcgtggtcgacatttttcaaaaactgctcgcgtggatctgaagaagagacattgttgtcttttgtatatcggcactgaatntttctgggaatctgtgtaaagatggatccantatcagcggc

SEQ ID NO: 131729 - DNA, 346 bp, Arabidopsis thaliana columbia
  unsure (1)..(346): unsure at all n locations
ggcatagaagattcgagacgttgtttgacatcaaaggaaggcgggttcccttcgtgggtcaaacctggtgaccggaaactgatgcaaagctcgacgccaaaagataacgcagtggtggcgaaagacggttctggcaattttaagacgataaaagaagcgattgatgctgcttcggggagtggtaggttcgttttttatgtgaagcaaggcgtttacagtganaaccttganattcggaaaaagaatgtcatgttgagaggtgattttatagggaagacgattattaccggaagcaaaagtgttgggggaggaacgacaacctttaactcagctactgtcgcggcgg

SEQ ID NO: 131730 - DNA, 311 bp, Arabidopsis thaliana columbia
  unsure (1)..(311): unsure at all n locations
gagtatcgatgttaatgcaagagctacgttttgcttgaccaatgatgttgtctggcgggatttagcgacacagaacgggacaccggtgatgttgtctcgaagcagtaagatgtnagcngcggcaatcgcagtggcactcgctcgttgagcaagaacaatncccactgttgcagctgctagagctggagcatcattaatcccttntcctaccataattaaacctccacctgcttcccgagcaatgttctttacatgatttaacttatcctctngctttaggttgcagtagacttcggtaaaaccactgggtt

SEQ ID NO: 131731 - DNA, 331 bp, Arabidopsis thaliana columbia
  unsure (1)..(331): unsure at all n locations
gaggtctgggtaagctttaaaatgtataaacccttccttagaatctgtctgaaggatttgaggcaaatttacagaattacagataagctacgcctcctctactcaggcttcctctggaagaacaaggatcctattatcacagctattcccgttattgctatcgtgaagaaaagccttttgttcgaaacaccgttcccatctcttcgtcttctcccgtttccatctccttctgctgctctcgggatccttctgggatgattcaacagtgccagggcatttggtttcatgggttatanctttnctctcaatcttaaccataggctgtttgcaa

SEQ ID NO: 131732 - DNA, 327 bp, Arabidopsis thaliana columbia
  unsure (1)..(327): unsure at all n locations
tttcactaataataattttnagtctctcttctctctctcttatatctcaaaatccgagaaaacgaattcaaagatccgtggttgaattcgtgattctnaaattncgtttcttcaggtctctgatcgtccnggttctcctctgatctgttatttgcttcgaaatagaagtttgtttctcgtttgacgatggagacngcgactggagaaatcaccatcgtctgcaaccactgtgacagagacattccatcactgaatatcgatctgcatcgtgtacattgtgctcggaatttaggaaaatgtaagatttctggtggatagggtacccaa

SEQ ID NO: 131733 - DNA, 297 bp, Arabidopsis thaliana columbia
  unsure (1)..(297): unsure at all n locations
tttgaggtcaaaagaactattttgcttctgtaaatnactgntcagcctagacacagaacaacagttttacaaacaattacaacagtttttattgttacagantaacaaagggantantangaaacttacagatttgatatgttacatatcatatgtatctaactttgtaacangggctcaactctctctgaacattttatccaatgcccctacatatctatctatatacatcatagatgattgtttgatcgggaaaaacaagtgactacattggtgcgggtaatctccggttatagg

SEQ ID NO: 131734 - DNA, 270 bp, Arabidopsis thaliana columbia
aatcgatgaagaagagaaatgaaattcacagattctccggtgatcgatctgacggtgaacggtacaagactctcaatccatgaagaaactggctctgtgcacgtcggtgcttccgacttgccttgctcactactccgatccaaattcgctgaacgctggacaacactagactcatcatcatcatcaacatctccaaatccagacgccgaactcttcgatttccgacgccgtcgaggaatcgagctaggaacagcctgtggtgtcgccggt

SEQ ID NO: 131735 - DNA, 304 bp, Arabidopsis thaliana columbia
  unsure (1)..(304): unsure at all n locations
tttttttaacaccatgaacgagagttaacgactcccaaggcccaacacatgacaataattaaatgatccaattgctcctagatgacaccatattcaatgatctaagtgaagtgaagtaaatacgaccaaaaaaagatagggaaaaagattacaggtagtagtagtatagtacacccactcgattctaatctaaagagaacaattcacttaccaaaatgggaagaaaaaaaaaaaaaaaaaaangaagaagatgaagagacaaaaagcccccattgaagattatattatgttccttcaatataat

SEQ ID NO: 131736 - DNA, 401 bp, Arabidopsis thaliana columbia
  unsure (1)..(401): unsure at all n locations
atgggatccttcgtgtgaccatttcacccataaaactcgtttgccatcttaatatttctgttcattaaagtgaacttttcgtcacaacataaaagatgctaatatcaaaggagtatgtaccacaatgcaggagaaacaagtcatatattaacgataccgatacatgctgctggtgttctaacttctcagggagttcgaccaacgttggcacagaagatacctgacttctactcacttaggcaagggcgtggaagctacctagcgtntgccttagaggtctccttggttcattgttggtttcacgctgttgtctactacttctgggtgtctctgtctacatcagcctctnggtggtcatgcttataaaatgcttctaaggntcttatcacaaatggggcgta

SEQ ID NO: 131737 - DNA, 332 bp, Arabidopsis thaliana columbia
  unsure (1)..(332): unsure at all n locations
ttttttttttttttttttttttttttttttttttttttaaaaggaaagtacacaatttattggatacaacatgaaacgtgaaacaaacatgtagaaagaaaaacatattaaaaaaaaaacaatggtcaagctggggaaggttcatatggtggtatgcggnccttntcctcaatatcctcctaataaggttatgatttgggatgttcaccagggccgntgtntcgacgaactctctttcaggtccgatgttagatccgtccggctttaggagggntcggcatttattgccgtttctttgagcagaagatttttntctacaatttctctgacct

SEQ ID NO: 131738 - DNA, 326 bp, Arabidopsis thaliana columbia
  unsure (1)..(326): unsure at all n locations
tcgcacannctcgggtatattaaacaaaacaacataaaacattctgtaaacggtaggcaangcttttaacatctattatcacattcacagacagtcaaagatggntacaacgctcttatggctcgacaatgatcttcccagtagcatgaccatcgatacttttggcccaagcatcctccgctttgctcaaaggatgctttgagtcaatcactgtcttcactttcccttctttcactagattcaccataaactccaaattctcagcttttgggatcaacaagagtggcactgaactgcttctttgacatggttattttcttaaccgc

SEQ ID NO: 131739 - DNA, 317 bp, Arabidopsis thaliana columbia
  unsure (1)..(317): unsure at all n locations
aagaaaccnagcaaaccttaaagagtaaagagagaaaatnaagtccggtcaggctgaaatcatggaaacaagcaaaggtatccaaaagagcggtctgatgagcagaaggatcgcgattcttgagtttatcctcaggattgttgcattcttcaacactataggtagtgcaatcctcatgggaaccacacacgaaactctgcctttctttactcaattcatacggttccaagcagaatacaacgaccttccagccttaacgtttttcgtggttgcaaatgctgttgttagtggttacctcatcttgtctctaaactttg

SEQ ID NO: 131740 - DNA, 307 bp, Arabidopsis thaliana columbia
  unsure (1)..(307): unsure at all n locations
cactctccaatgctcaatggcacaaactgtcgtaaaagcttcgtactggttcccggcgagtgaatttccggttaccgacattgactcatctctcttcactcaccttttttgtgctttcgctgatctcaactctcaaaccaatcaagtcactgtctcctccgcaaaccaacctaaattctcaacctttacacaaactgtccaacgcagaaacccttctgttaaaaccctcttgtccatcggcggtggaatagcagataaaaccgcgtatgcttcctatggcaagtaaccccactnctcggaaaatcat

SEQ ID NO: 131741 - DNA, 381 bp, Arabidopsis thaliana columbia
  unsure (1)..(381): unsure at all n locations
gngcaagtccataaaatttgaaagaaatacaaaagtgactatcataatatatctaagtaataataataataaaanccgaaattaatgtcattaagagagacgtaccatacgtttaaaatattttggttttccacatcaaatattttcttaaaattatagttttctcatcaccaagcgatcgacganggatgnaacaccaccaaaaccctaaaatctcaagacggatcaacagtacggcgaccntngtctccagcggcggctctcggctgctgaaactggagtgatctgtccaatgggcaagaatcccaccgtcgtagttgttaccggccggaacatccaagccaccaaacatttgttcctctagggaaaaaactggtggtg

SEQ ID NO: 131742 - DNA, 358 bp, Arabidopsis thaliana columbia
  unsure (1)..(358): unsure at all n locations
ttcaagattgcaactgagagaggtgattaacatttgattatttatctgttattagccaaaaacttacaaacttaaccatccaccctaaagaccaaaccaggccaagaactatgcctngagangaggcagaggacataaacagagtcttgattgtaaagttaatcacagagacgctctatcggttcattgcttttcgctgctaacatcatctccctgtctttctgaacttgttccctctgcagcttcagtctatctttcctttcttgccatccttcctctaaataaacctcagggaacttatccttaatagcaagcaaaggggtctctatcaacaagcttcatcgtgcttttataaagn

SEQ ID NO: 131743 - DNA, 328 bp, Arabidopsis thaliana columbia
  unsure (1)..(328): unsure at all n locations
gttcggacgaggtctaactttgtcgtttcaataccgtacggaagaaagagtggaagtttaagagtctgggcttcataagccttgtcgttcaaattttaaagcagttttgcttgatgggaaaggcgacgttaagtctcaccggaaaatctttttggttgcttacgtcatcgtgaatgcttcatgctgctttggaaatggtggattctttccttgcatatgaagaaaggtttgacacggggcttgttgttggagtggttaataatttcagttaaataaggtgggactttgtgggttttctgaatgatgatgtcatgtcctttatccatna

SEQ ID NO: 131744 - DNA, 310 bp, Arabidopsis thaliana columbia
  unsure (1)..(310): unsure at all n locations
ggttcaaagctacagtgatattgtaaactaaccagtccttacacatagttttcaaaatggcttagctcgagtttaaatagtccgtacttatccctacccataaccaaaaccaaaaaccgacgcttncngtatcactaccaaacgtttacacagtttgtttctgcagtttttcattacgactccttcaagaattccatctgttccaaagttgccagaaaactcgtgtggatggacaggaccggggaggcggancgggncagaaaagttaccgggagggccagagactccgcgtttgcatttcaagcacatg

SEQ ID NO: 131745 - DNA, 240 bp, Arabidopsis thaliana columbia
  unsure (1)..(240): unsure at all n locations
gttttactttagactttactacttcaaatcaattacatttgtatatcacgttcttaatttcgctccgaaaaggtaagacaatgatcacaattctccaatgatattaggaccaaaactttgtatctgnaaccagttacagtaatttcttatgacattgtttctttaaggaatctcaatgtaaatctggaaatcacttgccttgtttctgcctgaggcgttctttgacaaaatcattacggg

SEQ ID NO: 131746 - DNA, 316 bp, Arabidopsis thaliana columbia
  unsure (1)..(316): unsure at all n locations
atgggtttccctttcatatcaagtaaccaaataataacaacaacaaacaattttggccaaacttaatcaaagaaacaacaaatccttgnattacacacctccccacatctttttccttatttcaatcttcctcccttcaacaaaagatctaacataaattcatcttgtcggtagaaacccacaccattcattcgctgacctctcaaaaacatatggaccaatcatgagccttaaatttggaagtttaaacacagtggtcgtaacttcacctgaggctgcaagagaggttcttagaacatacgaccaaatcctctct

SEQ ID NO: 131747 - DNA, 489 bp, Arabidopsis thaliana columbia
gccaagctcgaaattaaccctcactaaagggaacaaaagctggagctccaccgcggtggcggccgctctagaactagtggatcccccgggctgcaggaattcggcacgagctccgaatgtccttaccattgcactaaaacgattccaggcagggaaattcgggaagctcaataagttgattaggtttccagaaactctagatttggctccatatgtcagcgggggaagtgaaaaatcacatgactacaaactctatggagttattgttcacttggatgtaatgaatgcagcattttctggccattatgtctgctatattagaaaccaaaataagtgtacaaggctgatgatagcacggtagtaacttcggatgtggaaaggatcttgacaaagggagcgtatatgttgttctacgcaaggtgcactccaacgctccaagattagcagtatgtaccaaactgaagcatccaataaaaaaagcagagtggc

SEQ ID NO: 131748 - DNA, 293 bp, Arabidopsis thaliana columbia
  unsure (1)..(293): unsure at all n locations
ttttttttttttttttttggaggcaaatatctatattaaacagtctcaaagtctcataagctgagagaacgaaacaatancagacaagaaaatggtacatntcaaaacgaatgacagaatgaaaaactaaaaagaacttggtaaggacatntntaaagagcagaaattgtaagcatatctgtcctgaatattactagaagatgagtactctatnatttgagaaaatttgtgattggagagacatccattcatcangttactgaatttccacaggtgatcgagagaggaaaccg

SEQ ID NO: 131749 - DNA, 325 bp, Arabidopsis thaliana columbia
cgcaactattcgtcgtttcgggccacctaaagatgcacctaatccgttagggaaacttaagaagcgtttgaaacagaagacgagtgcgtgttacggttttcctctagctcttcagttacaagttttggaatccattccggtgatattggagaggataaaagatccaaacgatcttcgggacttcactgagaggtcatctgaggggttgtcaatagcgtttctgcttcgtaagagttatattcttgatgctgaagttgatgacaagcttgtggttgcacatacattggaacctaagggaatgattaatgaatctgagttggtttgg

SEQ ID NO: 131750 - DNA, 391 bp, Arabidopsis thaliana columbia
ctgaccttgtcgaagaagggttcgggggtggttaccgctgccgatattcagctggatcatgatgtcgagatcgttaatcccgatcacgtaatcgctaacctggcgtctaacggcgccctgaacatgaagctcaccgtagctcgtggtcgtggttatgaaccggccgactcgcgtcagagcgatgaagacgaaagccgcagcattggtcgcttgcagctcgactcttcgttcagcccggttcgccgtatcgcatacgtggtggaaaacgcccgtgtcgaacagcgtactaacctggacaagctggttattgatctggaaaccaacggcactctggatcctgaagaggctatccgccgcgctgcaaccattctgcaacagcagttggctgcgt

SEQ ID NO: 131751 - DNA, 311 bp, Arabidopsis thaliana columbia
  unsure (1)..(311): unsure at all n locations
gtgatttgatgcaacaacattattcaattctcaaccgtataaaataaaacaacggatatgaatacaacacatacactgagncaatcaatgtttctgtaggtcttattaatttacattcacancncttatttggggaggaatctgggagnattcttgcttgggttctataggttcacaaaacttcaaaaggttacaggtgggcttgatatccctttgcatatggacatatatatcctctttatgcagnagatcctcttttgggttgattatcacaacagggcaaatgggcgtgggtgggtgcagtaggttgc

SEQ ID NO: 131752 - DNA, 403 bp, Arabidopsis thaliana columbia
ttttttagtacactaataatcaaatggaatgagaaatgaagccacaaaagtatctgcaatcaaaatatcctgctatctccatctcaagctctcaatagtatcctctccgaaagtgaaatcaacatttcaaactctatttcttggtggaatcgatagactgattcctctgatgaaccagaagtttccggaactcggcttacgatctcaagactgttcggaaatgagctggatcgaatcgataatgttcttcaactggagatcaggacagccgttagagattttgctcaacagagacctaaggattcgaggatcagtatttcaaagcaaagtcaggattatggttcaaaaacccgttcctgaaaacgtttttcgaagaggtatccaaggggtttctcgagcaagt

SEQ ID NO: 131753 - DNA, 401 bp, Arabidopsis thaliana columbia
  unsure (1)..(401): unsure at all n locations
gcttcttcacccacatagctataacaagagagagagatagacatagagcaaaaattagtttcttagaagttacaaaatcaaagatcagaaccaangagcctaaagatgatgaagggaagcaagtcttacacggagtattcgtcatctttctcaacagatgaatttggttatgatcagaaccgttcaaactcctataacttcaatgggccttgtatcaacacagatccggagatgaaaagaaagangagagttgcttcttataatctttttgccacggaggaaaagctcagngagtactctcaagaacagtttcaaatggntcaagaacaaattctcaggcgatgataatagtatccggtacaacgtctagattagtccactttgctcctgatctttttatt

SEQ ID NO: 131754 - DNA, 413 bp, Arabidopsis thaliana columbia
  unsure (1)..(413): unsure at all n locations
tttggcataaaccttaaatcaattaaaaaaagtagtaagggaaaatgcgtcaaaatctttggccaagttaagagtcagcaatcagcaaagggaaatgcatcagccatggagataacttgataactcaactccttatgagctttttgaatcactgtctcttgtgcatagaacaacatgtaacactcacatcctctcaccacttcttcttcaacctcattgatccatgcatcatcacatctataccacaaccctttaagcctcagatacgtcacatagtccctgnattccaacatccccttgtgtgtcacaacccgcaaatatctcaaaactccgctgtatgggggnttgattgatggacgnactgtcatacttcacccttcttcctcntaaagggcaaattattctgttncccn

SEQ ID NO: 131755 - DNA, 333 bp, Arabidopsis thaliana columbia
  unsure (1)..(333): unsure at all n locations
gcaaatgcgtgtaggtattgcaactcccaaaagagcgattgctaatcagcaacaacattctccacaagctgtgattctggctggtggacatggatcaaatggttccatgggttatggctcgcagtctgatggcgaatcaactaacgcaacaatatttgttggcggnatcgaccctgatgttattgatgaagacctcagacaaccttccccccagggnggggaggttgtttcagtgacgctcccagtagggaaaggatgtngattcgnccaatttgctgacaggaagagtgctgaagattctatcgagagtttgggcggaacagtcatcggcaa

SEQ ID NO: 131756 - DNA, 252 bp, Arabidopsis thaliana columbia
  unsure (1)..(252): unsure at all n locations
cccccccaccttttctaattagtagaataaattagaaaaggtgggggggggggggaaaggtcataaaaacgagggttcancatccaatgaaattagtaatagaacgaaaaaaagtgttggtagggaacccatcagatacttaaaaaaactactnaacaaagattttnnttntagtnaacacaaaatcataaatcattgtnttacttatctcattnatatanttactaataantataatatcaattgtcacga

SEQ ID NO: 131757 - DNA, 296 bp, Arabidopsis thaliana columbia
ggcacgagtctctctctctctctctctctctctctctctctctctctctctctctctctggacaagctatttggggatcttgtggacatctccaaattcaagcctacaaaaccgacttccggaagagctggtaccatgtgaaaattcctccatccattcatcatttaccagtattcatctcctctatcctcctcagctaactctctttcttctctttgttaagcttttttcatcattgattttattaccctcttgggagatacatagatatacatatgtgttatgttcttctataa

SEQ ID NO: 131758 - DNA, 265 bp, Arabidopsis thaliana columbia
ggcacgagggaaagtgtgtgtggccgttctctctatctcagctggaactaatgaggaaacttcagggagaagaagaagaactggagatagtatcaagattctgtgtatatcttctcaacaaaaccttgtctgaaaattcgttttcttggctaagacactacgagctttaagaatacacctccctaccagaattggggtgtgccgtagagagaatatcggccatttttgttgtctgcgttcagagagcttaacgaatgagtgatgg

SEQ ID NO: 131759 - DNA, 282 bp, Arabidopsis thaliana columbia
  unsure (1)..(282): unsure at all n locations
ttttttttttttttttttttttttttttttacataatcataataaaattgcattatggatgaagaaactgaagctacaatttacataagacaaaagaaaaaaagattacataaaatgaaaactgtggaatggtcgagcctgacaaaaaaccgcaagctggaccgacacagagagactaatacaaaccataataaaaaaaaaataatcaaatcctcctcctctgnttcaccaccaaaaagnatattcttctctcgncttctccgggtaatcaaaatctctccg

SEQ ID NO: 131760 - DNA, 322 bp, Arabidopsis thaliana columbia
  unsure (1)..(322): unsure at all n locations
ctccgtgatcaacgccggagctacttggagcatgtttgctgctctaagaagacggaggaggaagctacaagtgacggaatctttctgtggagggattatgctgattaaagattcgacgatcattcgttggtctttgggactgattcctagtccggcgagacaagcgacggaatcttgatgtctgtttgtttttccggcggagagaaccatatgaagaccgcctttccaatctggtccggagcttcctccgctgctgttgcttccgcagcttatactcatttcgnctcctcctaaacctaatcctcctccaatggggggagga

SEQ ID NO: 131761 - DNA, 305 bp, Arabidopsis thaliana columbia
  unsure (1)..(305): unsure at all n locations
ttttttttttttttttttttggccaccttgccgagcttggggctagggtcgtcgttaattactcaactagccccgttgaggctgagaaggttgccacggngattaccaccaactgttcaaaggacgcggnagtcgccggnaaaagtccacgtgtcattgtggtgaaggntgatatctcagagacgagacaggtaaagtcgcttttcgatgaggcagagcgagtcttcgagtcgccggttcatatcttggttaactcagcggtatagccgatcctaatcattccactatctcagacatgtcagtag

SEQ ID NO: 131762 - DNA, 359 bp, Arabidopsis thaliana columbia
  unsure (1)..(359): unsure at all n locations
gctatgaacattgatggatgtaacggacttgcttgtttgacaaagattcaagatgaagcatcggagacgacgattacaccgttgcctcatatgtttgtgattaaggatttggttgttgatatgactaatttttataatcagtataagagtattgagccgtggttgaagaggaagactccagcgtctnttcctgctaaggagattttgcagagtaagaaggatagagctaagcttgatgggatgtatgaatgtattcttngtgcttgttgtagcacatcttgtcctagttactggtggaatcctgagtcttaccttggtccagctgctttgctacacgctaataggtggataagcgacag

SEQ ID NO: 131763 - DNA, 389 bp, Arabidopsis thaliana columbia
  unsure (1)..(389): unsure at all n locations
ggtgaaaaaagatcattgaacaacaacaatgagctattctcgtcaaagcatggtttctggtagtagaagtacaaggggntatgagtttggaaggacttatgttgtgaggcctaaaggaaagcaccaagctactattgnttggttgcacggtcttggagacaatggctccagctcgtctcagctattggaaagcctacctcttccaaacatcaaatggatttgtccaactgctccttcgcgtcctgtttcgcttctcggtggatttccttgcactgcctggnttgacgtgggagaaaatttctgaggatcttcatgatgatatagaaggcttagatgcttcagctgcacatattgctaacctattatctgctgagccaacagatgtcaaa

SEQ ID NO: 131764 - DNA, 496 bp, Arabidopsis thaliana columbia
cccaccaacaccaacagctctggttcgctgcgcctcctcctgttcctccaagctccgaccatcatcaccaacaccaccgtatttttctccgaaccggtgtgctaaacgacaaaacttcagattactcttctacagaagcgccgctttacttcacctcctcgcctaaaacagacacgtcatcggctggttatcaagtggttgggtttccgatgatgaattcttctcctccccctgggacggtgagacgttgattagccattgaactcaacgagcctccgccgctttgggtttgaaaacaaacgataaagatggatatagcggcgccgggttgactacttttctatacggcgccgtttgagaccactttcggtggagctactttagtttctttttttagcaaatagtatctttttgttagagttagtagacttgtttttataatttaatccttcttttgttcgttatgtaagagtcggagatcgattgttgttgtgag

SEQ ID NO: 131765 - DNA, 304 bp, Arabidopsis thaliana columbia
tgaggcgcagagagagtctgttattactcccaacgccagcggcagctcaccgccatgttggtgaaatggttagcgaccgctttgtttgaggaatgtgtgaaagggtttctttttgtatgttatgtatgtagataaacatgagtatgtatggatgtatgtttttgtttctttgaaataacattaataaaggtgatcactaaagcatgttatgtatgtagttataactatgagtatgtatggatgtatgcttttgtttctttgaaataagattaataaaggtgaccactaaagcatgttatgtgag

SEQ ID NO: 131766 - DNA, 356 bp, Arabidopsis thaliana columbia
cgtcactggtcttttccagtgtagaggagatttaagtaacaacgactgttacaactgtgttagtcgtcttcctgttctctctggtaagctctgtggcaaaaccattgctgctagagttcagctctccggctgttatcttctctatgaaatctctggctttgccaaatttcaggaatggagttgttattcaagacatgtgggaagaacaacgtcgccgggacaggattcgaacagagaagagacacagctttcggggtgatgcaaaacggcgtcgttcaaggtcacggcttctacgcaacgacatacgaatcggtttacgttttaggacaatgcgaaggcgatataggcgattcaga

SEQ ID NO: 131767 - DNA, 306 bp, Arabidopsis thaliana columbia
tctgttcttccacgtgcaccggagaagcaactttatgatgctgcaattcttcatacatcattggcaagactgcttggtccaccaatatctccaactgaggctggttctgacgaccatctccagcttctccatgagttggtcacaagactaaacaaccaaatccgaggattcaaggcaatagtatcagaactgtggtatgtagaagagttcgatctgctggcgctcgcttgggaggaagaatgaatgttcgatcattcccactcggctgtgcaaagagctaatacttatttcatctttaagatcatc

SEQ ID NO: 131768 - DNA, 300 bp, Arabidopsis thaliana columbia
gtcctgtcctcttcattatcacgtctctcccgaacacaaattcaaaagaaatcacaattgacgccggagactcatcggatgcatcgactgctactggaatcccacggcggcgggaacgagacgagcggcacggcgggggagatgggtacacgagggacatgaacttcgacgcaaacatggtgatcatacttgcggctcttctctgcgcgctgatactagcgcttgggctgaattcgattctccggtgcgcgatgcatgcggtttcgggttatcatcctctgcggcggcggggacggttgg

SEQ ID NO: 131769 - DNA, 223 bp, Arabidopsis thaliana columbia
gattgcattccttctgcagaacgatccaaggatcctaacaggttggtgcatgtttggtgagccaaaatggtgtaatccttgggattggctataatggtttccaagaggctgctctgatgacaaacttccttgggccaagaaatcaagaactggggacccattagagaccaagtatccatatgtttgtcacgctgaagtcaatgccatactaaacacaaaccac

SEQ ID NO: 131770 - DNA, 329 bp, Arabidopsis thaliana columbia
ggatgttctactcagattaagaaatgagagacttgatagaacaggtagttcttcaaatatatctcctgagggaagcggaggttcctctctgcttcactgtgcttgtgagaaggcagaccttgggatggtagagcttttgctgcagtatggtgcaaatgtaaacgcctcagattcaagtggtcaaacgccgctgcactgttgtcttctcagaggaaaagtgacaatagcaagattgcttctcactaggggagcagacccggaagctatgaacagagaaggcaaaaccgctcttgatattgctgcagagtcaaattttactgatccagaag

SEQ ID NO: 131771 - DNA, 251 bp, Arabidopsis thaliana columbia
ggaaaaagaaaaaagcaaagacaaacataaggaacggaaggagagaaaagagaaacataaagataggaaagacaaagatcgagataaagaaaaaagcagaacttcagaggacagaaaagctgctggtgttttgtcaaacaccggggacagagaaaaacttgtaacaaataccttgcagagtaatggtacggagagtctaagtttatcggacctggcaagaaggttcggaaatgaagaagctacagaaagtc

SEQ ID NO: 131772 - DNA, 331 bp, Arabidopsis thaliana columbia
cgcctatactcgccaatgtcgtccccggaaaagaagaggaagacgacgacgaagccatcgccgacgccgcaatcgacaaccccaaatccttcacttccagatgatttagtagtgagctgcttagcacgcgtctcgagattgtattacccaactctctccttagtctccaagagcttccgctccttgattgcttcaccagatctctacaagacccgatctctgttaggtcgcaccgagagttgtctctatgtgtgtttacaggagaaagattctgaccctaaccctcgttggttcactctctgtctaaaacctaatcgaactctaaccaatg

SEQ ID NO: 131773 - DNA, 436 bp, Arabidopsis thaliana columbia
cactgtgttcaagtctcttcagtgtccaacttcagatcccaatcaaacccatcttgtttacttcttcaaaagtccatctttcccgggtccaagttaaccctccatcgaatttttcgttatccgaagaaaatctcaaatggctctactcgtgcttcactgcttgagacccctatcttatgggctggtcggatttgtgtcttctacgctctcgtgaaagctggctttgctggatccaagtctaaccctatcgtttctggtttggaaactggtggtgttgatgttgaatatgatgatggtgctgatcttggtttctcaaagtggcttcagaacattaagggcaacaaaccagataaggatagcagctgataagaggaagctaggtgagcaaatggcacccaacgacaaagggaacacttagaaggaactacaggatacc

SEQ ID NO: 131774 - DNA, 324 bp, Arabidopsis thaliana columbia
  unsure (1)..(324): unsure at all n locations
gagactcantacaccttaatcagaactccacaaacaaaacaacgtctcattttccactcaaaaaccccaaacccagacggttctaaagatccatctccaccggagcatccagttgaagtaatcggccggttccgagattaccctgaccggaaagagaaatcaccttcgntcttacaagttaacacagataatcaaacggtacgagtcagagctgatgttgggtacagagacttcacactngacggtntttctttttcggagcaagaaggtcttgaagagttctacaagnaagtttataggagagagggttaaaggngtgaagtt

SEQ ID NO: 131775 - DNA, 260 bp, Arabidopsis thaliana columbia
gactgtgagttgtattggttgtgaaaagatagataagcggagttagggcggaaatgtaactagtaaagaagtttatgctgcgtttgggttgtgagagaatgaataagagtttatgctctaatcatcagtggaactcttgagattaaggacatgctctcttattgtgaagtcgttgttgaactttcagagagtgattatgattgatacacatgagtttgtaacacttaaaatgttgcagatccattttggaagttagtatg

SEQ ID NO: 131776 - DNA, 295 bp, Arabidopsis thaliana columbia
ccatttcctcctttatggcatgaagacaatagcaaccgacgccgacaagcccgagataggccgcaagtggttggagctatagcagggccttctctgggagaagcagctcatcgtctgatcaaaaacacccttaacatgaaatcctctactggtgcggcttcgggattaattgacccaaacggatactaccgaaatgtaccgggtaattattcttatggtggagtcaatagaccaagagcaccgggtccgtctccttaccggaagcttatgacgatgactcgagctattactatgg

SEQ ID NO: 131777 - DNA, 256 bp, Arabidopsis thaliana columbia
gagaagttgatcggatgccaagggagcagaaggtgttagtacggttgaggtgacaacaaagaaaagcaagaagaagaaaaatttgttagatcataaaactgacaatatggaggaggatagtataaagaaaaatgaaaaaaaggaagaagttgatcagaatgatttgggagcagaaggtgttagcaaggttcgaggtcaaaacaaagaagagcaagaagaaaaaaaattctttagatcataaaactgatgatatgga

SEQ ID NO: 131778 - DNA, 367 bp, Arabidopsis thaliana columbia
caaagtttctgatttttagaagaatgtcaccatcacattttgctatccttttcatcatcgtaatttctctggttcctctacatggatctggaaacacacaacatcataacgcgaacaagccagctccaaacgcacaagctgttgacgcaagcaaatcagctggagacaagacacacagttttgacgccaacaagctgcaaacgcacaagctgttgacgcgaccaaatcaggtgcaaacgggcaaggttttgacgcgaacaagttaggttcatcagtgtgccatcttggcaaatgtccaaaacacagagaagaagtgtgttattgctgtttcaatgatcgtagcaggtgttatcgtagtttatataag

SEQ ID NO: 131779 - DNA, 243 bp, Arabidopsis thaliana columbia
gttcggttgatttgatcattagttcgttggggcttcactggacaaatgatcttcctggatccatgatacagtgcaagctagcactgaagccggatcggttatttttagcagcaattcttggtggagaaaccttaaaggagctgagaatagcatagcactttggctcacatggagcgggaaggagggattagtttcggctatcacctttggcacaggttacacacgcagggaatctgttgacca

SEQ ID NO: 131780 - DNA, 224 bp, Arabidopsis thaliana columbia
gcttaatgagagaattgctaaattatcaggcggtgttgctgtaattcaggttggagcacaaactgagacagagcttaaggagaagaaattaagagttgaagatgctcttaatgctacaaggactgctgtggaagaaggtattgttgttgaggaggatggtacactgctaagacttacatcgaaaagttgagacactattaaagagactctagcgaacaagttga

SEQ ID NO: 131781 - DNA, 271 bp, Arabidopsis thaliana columbia
caaagttgtgtctctctgaagtctgaaccaaaaagattaagacgaaaaggagatcaatggaggaagaatacgtaagagtaataagcataacaacaataggagtaatctcatggggtctcattttcatccttgtaagacgaatcttctcaagctactcgttcgacttcagcacccgtatagtctcaacgcttcacgcaacaatcgctgtcactttagcaactctctcgattcaagattggtcttgtcctgtttgtccattgcttctacatcg

SEQ ID NO: 131782 - DNA, 334 bp, Arabidopsis thaliana columbia
cggcacgagagaaatctacagagactccggcgagaccggacgcaactgttaaaactcagaaacctcctttcagacctgccgttgatgacaccaaacctgttcttcaggaccctatctgagatcggatccaatggagacagaagaagctgtgctgagattgccttctttcccaatgatcagaccatctgaatcgtagctacctggattaacaaggttttttatctgatttgttttacattttgagcttgttgttgcttgtaaaaaccaatggggatttttttgtatgcttgataagcttaaattacaatcccatgttgattaataaagacacagc

SEQ ID NO: 131783 - DNA, 400 bp, Arabidopsis thaliana columbia
ggcgtttgctcatccgccggaggaactcaacagtccagcatctgggtcaataacctctggcttaatctccaatctgccatcgacccatcagatttcagctcagctctcgtcatattccttggcgattactgcgatcgtggaccggagactcgaaaagtcatcgatttcttaatctctctgccggagaaacatcccgatcaaactcatgtctttctcgccgggaaccatgactttgccttctctgggttcttaggtttgttgcctcgtccttcagatggatctgatttgaaggatacgtggaaggagtactcaaaaagtgaggagacagaaggatggtatacaggtgaagggttcgaagatatgcatcttcaaggtagaagatgggctggtaaaattaagg

SEQ ID NO: 131784 - DNA, 270 bp, Arabidopsis thaliana columbia
ttttttttttggacgtaaaatcttttctaaattaagaatttgaactcaaggtaccaaaaacctaaacagacttgaagatacaaaatagattactcgagaatgactggagtagacaagagacaaatcaatgcttggatctcttaggagtttgtgcctcggcggcatccaaagaagcaacatccccaccctccttcttcatcttctttctcgtaagtatcttattgatctggtgaaggtcattattgagcttcttgtcacggtcaccgttct

SEQ ID NO: 131785 - DNA, 209 bp, Arabidopsis thaliana columbia
ttttttttttagctttattgattgattaaaataaaaggcaaaaccacctattaaccaaggttaaattccggtcccaattacgtggataacaatttcaaggggcaaaaaccctctttccccactatacactactatataccaccacttctctcattaaaccacttttcaccaaggcctaaatacgggttgttaataaaaccactccatct

SEQ ID NO: 131786 - DNA, 213 bp, Arabidopsis thaliana columbia
acgagcatagttcgctgagagttttgagttttgataccaaaaaagttttgaccttttagagtgattttttgttctttctgttttctgggtttttttgaggagtgggtttaacaatggttgcgattagaaaggaacagtcttttagttgtgtttgttgcggaattttggagagagcttagagaacactctttcgtccctttcctccaggakcca

SEQ ID NO: 131787 - DNA, 408 bp, Arabidopsis thaliana columbia
  unsure (1)..(408): unsure at all n locations
tttttttttcagaaagacaaacatcatacgattatctagtttagcattgccttaagatagtaaatccagaaaacaactgaatcaagacagacatttcaacaaaggactcgaacgaagactatcaaacattcatcattattctggtttggtgtcttcttcttcttcaatcttaggcgccagatagtatcgaatgtaacccatctcagccaccttgtactccaccacgaccggtaactcagaggacaaactgatggtcacagtttccgacaatggagtagcctttgtgaaggagttcatgtacctcaatgcaaatgaaagcgaaacaggctcgttcatctctatcacaatagcatcttcaggtttgtcgacggtngattctgccntgagcacaatgtttgctgtccccga

SEQ ID NO: 131788 - DNA, 409 bp, Arabidopsis thaliana columbia
  unsure (1)..(409): unsure at all n locations
cgtttctccatcaggtaattattaatctcctcttaatcatccctctaatctctttcccnnttcttcatctcccgattctcaattccatctacacagatcctcgattccgatccaacagttcgaattcagtttccgattctgatctgatcgaaccaatactcactgagatttgatcggcgattatggagtctatatctccggtatcgaatcagcttcttcagccgacgacgacgagctctaattccgatcgctctcgtcgtaagcgtaagaagaaatcatcgccatcatcggttgagaaatctccatctccgtcaatatcgttggagaaatggagatcggagaagcagcaacagatctactcaacgaggctagttcatgctttaagagagctacggattcagccaacaac

SEQ ID NO: 131789 - DNA, 408 bp, Arabidopsis thaliana columbia
  unsure (1)..(408): unsure at all n locations
ttttaatatctacaaatagtcaaatactttcaaatgggtaactcgtcatattcaagcgtcacacttcacagttcacacaagcaaataaaaacccttttacctacattaaaacctctgagaatgttaaataagaactgggagcacaaagatcacctgcctacatcttaagaagaattgttctgtacccactcaacaagtgtcgcaactccaaacccagtcgcagctttcttcttctcgttccacacccgtccagccatatctatgtgcaaccactcaacattctcgctaacaaaccgtttcaaaaagagagctgcggtgatggatccacctgcacggcctccaaagttaaccatatctgcaacacctgacttcatcatctcccaataactctcttccataggnatttct

SEQ ID NO: 131790 - DNA, 342 bp, Arabidopsis thaliana columbia
gaaaggctctaatatttccttaggtgatatgcttgcacttccagatttaagagaagatcttataactgaagaagaagaaacaagcaatggtaatgaacaggagggtcctaaagtatctgcatcttgctttgatggtaatttcagtagagaagaaggaaagttaaagcctcctaaaggccttacacgatcaaaatctctccctgaatcatcgacaagtcttggtcacaaatccctagatagttccaacaagagtaaatcatccagagttccagaggagctgacaaagtcaaagagcttgaaatggtctctgaaaggtaaagtctcaaactttcttttctcaag

SEQ ID NO: 131791 - DNA, 307 bp, Arabidopsis thaliana columbia
  unsure (1)..(307): unsure at all n locations
gtaactgatacatttcaagattgaaacaacttttacacaatggaaagaaaaacaaacaaacatgcaaataaaattttaataaccagagagttcatctgacatcagataaaaccattcaagcccaagaagaagaaaatagacgggacatcaaatgagacttggtgatcttatttatgactttaataaattaatttagtaatataaggntgggggaggnggagatttgtattcagcttttggagaaggagaatatgatggtggtggtggngaactgtagacatatggtggaggtngagatttgtactca

SEQ ID NO: 131792 - DNA, 356 bp, Arabidopsis thaliana columbia
  unsure (1)..(356): unsure at all n locations
cttaccttcaattcctaaggagcaccataatagcgtggcacactttttggagtcacgtggcatgacagaagatgctctagaagtagcaactgatcctgactacagatttgagttggccatacagctcggtagattggctgtcgcaaaggacattgctgtagaggcacaaaatgaatctaaatggaagcaacttggagaattagctatgtcaagtgggaagctggatatggctgaggaatgcatgaggcatgctantggatttgagtggtctgctgctgctttattcttcattgggagatgcagntggaatgatgaagctggcagcacttgcaaaagagcaaggaaagaacaatgtc

SEQ ID NO: 131793 - DNA, 331 bp, Arabidopsis thaliana columbia
  unsure (1)..(331): unsure at all n locations
gtgaatactcatattcatttccagatatctcctcagagatgatgatccgtagagatgaacatagcaccagtatgcggnctgactgaaattcccgactctgtttccggtgtacaaaacaccattgcccatcatcagccagaaagagagcaaggaagctgtcccactgtgctcaaagatgatagtcctgcaacattacagagctacgagcctaacacatcacaacatcaacacggtgatgacaaattcacagtcaaagaattcgtctcctctgttcccggacccgcaccattgcctttgcatgttgaaccatcacaccaagtgaattcccact

SEQ ID NO: 131794 - DNA, 396 bp, Arabidopsis thaliana columbia
  unsure (1)..(396): unsure at all n locations
tttttagtttataaacatctcttcttgaataaggaagtaatcttgagacaacagtgtattgtattatgatcctaatatgttctggctattcaaagtttggatatttcactaagactgatttcctcaaacctcttacatggagtaactactacattttacaatatgtaacagtgatctggatctgtagacaagtttttttgggttcttacatagcgaacctaggagcagaaactggtgtcatcatgttgtaaacaaggttggtttgtttagagccagttagagaccatcttgtttggtgttgctttantggatgggatcttctgggagctttanccaatgaacgatactgaggcttcacactctctgcgttgtcccgtgttttcaccacataccagc

SEQ ID NO: 131795 - DNA, 420 bp, Arabidopsis thaliana columbia
  unsure (1)..(420): unsure at all n locations
gctgaggaaaaggagaaaagccaccgcatggaactcagaacccgaagaggatcaagtgtggnccagaaggagggaataagacactgcttggtgagcctaagccaccacaattccgtgatcttgatgcatgctaaagctaagttctgtttgccgcagttttatgtggttcaataacgcaaaggctatagcgatgtatgtttgacgcctgtaccgcatcaaattgagtttgcatactctttgtagtcttcttggttttggaatttagacccattttaaacaaattgcagacgaaccgttcaaacaaaccgctctgcctcatgttctgtttccagagcataatgaacatccccacggttcgtcaacctcattaggaaggcatcccgaggcattaaaccgtaaaggnaaatctatcagtctacg

SEQ ID NO: 131796 - DNA, 350 bp, Arabidopsis thaliana columbia
  unsure (1)..(350): unsure at all n locations
gttggaattcgccgatgagattactcgaacactgaaacccgaaggcgcgctggttcatgttggggctacagatacgtacagtttcaattcattccttgatttgtttaattcttgcagattggtgaagatgcgtgatatcgatggttttgatccttcgatgcctcatatcagagaatttgttattcagaaatactcagagattgatggtggtggtcatcaccattgcgtggctgatntncatcggctggaaagtgctggattccgggttacaaaagagatttgattcgggatgcagagcactgattcaagaggagcctcttaagccatggattacacttaagaggaacatc

SEQ ID NO: 131797 - DNA, 363 bp, Arabidopsis thaliana columbia
  unsure (1)..(363): unsure at all n locations
gatccattgtactcagcttatcactactcacatcctcctcttgttgaaaggcttcgagcanttgatggagaagacaagaagacagattaagtccgcttaactcgtctcttgtacgggttgatgtcttttaggtgacaggtcgaaacaaaacaaaaaaaagtgtaaaaccatataggcagaggctcttttgtttgttttttacttttacagtgggttttgcctagttactactagtttttgagtttcaagaaggaggctgctagtaagaagaaagcagcgaccacgggtacttcgaaagacaaagtgtcgaagangaaaggatcattctccacctcgaagcctntctgatggaaaatgaccaag

SEQ ID NO: 131798 - DNA, 409 bp, Arabidopsis thaliana columbia
  unsure (1)..(409): unsure at all n locations
taagaaactgaggctctttctattgatacacacactcttgtcacaaaaaaatgaattggnaagtatccaaaactggattctataattacactatacaatttaactagaggaacaatagaatttgagaacaattcaaagtttgtaagaaaaaaatgtgcttacttattcatcttctgctataaagtttggctcttcccctcggcaggttanctcatcgcacgtagaggatgttccccaatctttccttagcctcaatatatcttctgtgaaaggttgatcccgaggctccaatgaatacgctgggacatgggcggcatatcgttttatccaaggcattgcatccacctgaggagtcatcctctattaccatgtcggttataacaatgcatcccacttttcagctggaatt

SEQ ID NO: 131799 - DNA, 411 bp, Arabidopsis thaliana columbia
  unsure (1)..(411): unsure at all n locations
aaaaaatctttcagactgaaatatatagcaaggaagatagaaagctagtgcaggtacataagtcaaaagtcacaacatatagtaagtacatcataagttcatttctcttgaaaacgatctctagtgatgatgcactttttaggtatttattcacatccgagagttttctaaatcacaacattgaaacgtgttcatgaatttaaatcaaaacaaacctgctcatgaatttggggatgatcgttataagcaacgtcttcaaaagctttcgatgggtttttaccatcgatatgcgaatgatggggggaaattcaaacggcctttcttcgggagagaggccagcttctcttaaaaactctcgagacttcatccaaaaactaccccattgccttcaggttgaggtgggngccctca

SEQ ID NO: 131800 - DNA, 413 bp, Arabidopsis thaliana columbia
ccgctttaaccaacaaagctttcgtcgtcggttcacttgtcgccgcgattatttacgccgtcgtgttggcttaggatctcattgtttacatcttgaaaacattatgttttacattttatagtttcggtgttaatttcgataatttgattgatttttcgttattcgattgtttacggtggagttaaaatgagatgttgacacgtgtaacttttcatggtttgttgtctacgtggaatatgttgtgtaaatccagtaataggctaataaaataagaccatgtctctgcctccgctacgtctggtcacattccttacggacggatatgggaggaaatccctcatcctgactctatctatgggtggctgcctccgatttgaattcccgatgggtctcaattgggttgctcaccgatc

SEQ ID NO: 131801 - DNA, 412 bp, Arabidopsis thaliana columbia
tttttttaccatgaaaatgttcatatattaacatgagctaaattctaattaactacatgtccaaccataaggaatttaaaaacataagggatttgaaatcaataaaatgaagatgggttctctatgccttgcaaaacaccaaaatgagtatgaggaaaatcaaaggagcaacgattattctcctcatctctcctcgattggttcattgccatgaaagatgcaaagaaacccgccgattcttcgaaacccttaaaagtcttattcccttccgcgcgtgacatctcctctacctcctctttgttactctctccgacggaccgatttcttaagggaaccgcttaaaccatttgaccgaatcttttgggataacgtttgaggaccattgacaaaatcaccatagtataggcccaaa

SEQ ID NO: 131802 - DNA, 412 bp, Arabidopsis thaliana columbia
  unsure (1)..(412): unsure at all n locations
agaatcagggcatagtgttttgtatttgatgtaaaaatccacaagttgcttcattttcaagccacccaaaacgaacaaagcagcaggggtgttcactgtagtgttcagtttccttataccaaaatggaaacgccacaatcacaatacgcaattggaatntcttgccagaggttttcacacttatctctaatccttcctgcctcttctattctatgtacctatgaatacaaaagtggatatctcttggaattgtatatctggacgaccttcctctgatctttgagctgtttttgggggctgagcaaaaccgttatgtttttaccattcctctgtttatatgtcaaaacgtggcactccaaagagcctttttcaccttcaccgcaacgtctatgaacctctttggatgcgntnt

SEQ ID NO: 131803 - DNA, 325 bp, Arabidopsis thaliana columbia
  unsure (1)..(325): unsure at all n locations
ctgccgagnngnanaagcatctgggccgattacgaagccatcttccatgatctgctgccagaagtggttgaagcgtatnaccaggtgtggattactggccttcctcaccattggtatccctgacagggatgagacgcagcatgcaacccatccacagctgaaggggatatccactactggggtgtgtggcacaatgtagaaccattcgagaactacaacgtgcatgtgggcctttattaaaatagagcacaagaagaacaaagaaaaaacaacatcgcaagagtacaacgcgtaaaacacttatcaaaggatcaccattcaccag

SEQ ID NO: 131804 - DNA, 363 bp, Arabidopsis thaliana columbia
  unsure (1)..(363): unsure at all n locations
caataatatcacttttatataacaaaagtcgtctgccgtttagttaggcaaccggataaaaagcatactgagccacaccacacatgccttgaggcatgcacatctctacggatcctaatgtaaccattctctccccaagtctcaccccacgagttcttagccagccagtacttgatcccctctggnctcgttccgtatccaacgaacgtcactgcatggttcacgttggtcccacagtacggctcatcgtacactccccctgagtaatgcatgaaaccgggcccatccgcgtcaatggacactgagacaggcttgnctttggatacagccttgagcaatgcacgctcgttgttgcttggnaac

SEQ ID NO: 131805 - DNA, 353 bp, Arabidopsis thaliana columbia
  unsure (1)..(353): unsure at all n locations
gtcaggttcagggtatgagaataaaagaagtgttggacttttgcaagcttgtatgatccctggtgttataccgtttgcgttgtgtctctttttctcgaagctggtcgcgtacacgttcttgtactggttaccgttttacttgagccaaacaactattggtggagagtacgtgtctgtgaaaacagcagggaatctctccacactatttgatgttggaggcattgtaggagggattctttgtggttacatttcagacaaattcaaagcaagggctacaactgcagctgcattcatgtacgctgcggattccggcaattgcttgtgtaccattccnatgggggtgtctctcagac

SEQ ID NO: 131806 - DNA, 398 bp, Arabidopsis thaliana columbia
  unsure (1)..(398): unsure at all n locations
tttcttcgcctccgtagcggtgatggcctttggattcttcttttaagaagtttcttctttgctttttatgtttaaatgaatttaaagtaaaatcaactaattgatgatgtttaagtctggtcttgttttgagttctagttgatttcatgttggttatgtttgatgtcttttatctctctattatgtatcgctgttgaatttgacgttcaataacaatggcttaaaatgagtttcaagcgtatataatccataataactggatcaaatagatatacaaacacataaactgataaacgcaaagtcctcgcaagtacctcctttcatttccacacaaaggcaacacacttggcttaggcacaccaccntttcatccttcttccctcttcctttcacaaact

SEQ ID NO: 131807 - DNA, 306 bp, Arabidopsis thaliana columbia
  unsure (1)..(306): unsure at all n locations
agaaagacccccaaaattcggaggaattattattatcatacgattcaaaaaaaaaaaacaaggccagaagcttacaaaagcgtttaaatgattttgtaaccaagggtaaaacattttgacaatctttgaggtacaaacaatttcagagactggattgtaaccaaatgggncaacatcaagaggttctcatacgtgatcatgttcatccatcgaacgagccgagctatttcaggtggtgctcaaacaacgacgccatttcgagcgccgtcaaagcagtttcagctcccttattgccggctttgcacc

SEQ ID NO: 131808 - DNA, 296 bp, Arabidopsis thaliana columbia
  unsure (1)..(296): unsure at all n locations
cctttttttttttntttttttttttccgancgttaagtacgttttaattatgtcgataactttatgaaagtnaaatgccatagaatacaaaaacatatgaaagaaaccaaacatgctatacgttaaaaaanaggagatgaagtgaaatgtatatacattttcttattaacaggacataactttttttcttttctctacatacaatcttgcaagaaagtggacaccaaacatacacacgcaaacaaaacatcaaccaaccatcaagcaatcacaaaacccagtcaattacactcgga

SEQ ID NO: 131809 - DNA, 309 bp, Arabidopsis thaliana columbia
  unsure (1)..(309): unsure at all n locations
ccccattgctggcaaaccaacgaaagcaagtccaggggcaagngctggtggaaanacatgcttgtatagnggttcaacacgtttttcatcaatgngcaaatagccatttgtttcaanaaatgggnagttatacttgtacccggtgcaatacacaatgctatcaggaaatatcaccttcccgtttttnaaaacaatcgacccatcctnatgggtggtgtngatttcggaatgcatccatagattgttttggggaacggaaatcttntcgtatgtgtggggtttcccttgctctagacgcaatgtggactt

SEQ ID NO: 131810 - DNA, 396 bp, Arabidopsis thaliana columbia
  unsure (1)..(396): unsure at all n locations
cggtttataaaaaaaaaccgcgtctcccaaaaaaggacgctttgaccatcttggatatgttgggaacaaacggatctcagagcgtaaaacctctggttaagcttctcacgcctctgcctctctgcntctacatggttcaaaacttccgctcttccgttggcaggtctccttccgcgttttcttggtctgttgttaccagattcatcagcacccactgcatctgcccattcccctcctccttctccatntgaattattctntgaagcccttgaactngcagnanagaaatctatctgcatttgagcaggaggaagcagcctctgcgatgattgctgcaaaggtaaaaacttgaactcatccgtgcttggaacttccttcacgttgattggcctcgtg

SEQ ID NO: 131811 - DNA, 389 bp, Arabidopsis thaliana columbia
  unsure (1)..(389): unsure at all n locations
tgtttcccaaaatcccaaatatgtgactccaancgacaagttcttctataaaaagtaactcctctatactgtgaacttctagaccttggtcctctcngactctttttaacctgagccggaaccggagccggagtcggaaccggagttaccaatttcgtttctccgtcaccaatanggtcaaaagaaagatctatccagtttctagagcttgatgatccttcaacatctcgtagatgtccacagtctccactcaccggaaaaaactctttagtnacggaagctgaagcggcggggctttcgtctccgccgctactacttccgacttttaaaatatcgaaactgagagtgaaagctcgagtagagcaagagtcttcgtctccatcggcatt

SEQ ID NO: 131812 - DNA, 239 bp, Arabidopsis thaliana columbia
  unsure (1)..(239): unsure at all n locations
caccaaactttcttccgnaaacaagaggnnaaanccangcggtaatacccctctttgntgttaagtttaccctctctgtaggtctcttaccagttacaagctccagcaaaagaacaccgaaactatacacatctcccatgtctgattcttttccagattcgatacattctggtnagagatacccaatgttattacccttggtgcttttgttagctccatcatctggcatcagcttattg

SEQ ID NO: 131813 - DNA, 321 bp, Arabidopsis thaliana columbia
  unsure (1)..(321): unsure at all n locations
agaaagctatcgttttgtctccaacaagggcttgatcatgactctctgcatagacganacatttttctccccacctcctgttggtaagcgtgaaagttatatcaccaacctgccagtcctcgtctctcttcttaagaagntcaatccatttatctgccactgccatgtgtagacggtagttaaaacccacaccaccgcttcgacaggaangnaaaaagctggcatcccgctaacatcttcgccgacaanaatagcctcagggtatagcccatgaatcaaatcgttcaccagcattagatacaccacagcgtcaacatgcag

SEQ ID NO: 131814 - DNA, 338 bp, Arabidopsis thaliana columbia
  unsure (1)..(338): unsure at all n locations
tttagaaagaactcttcgcaaaaatctcncccaagtacataccgganatgattttctnaagaatctgttcgcctggattcagactctcgaaatccagcgtgtgatcaaactcggttaatggaagatgtgatgacctgaagtttccccattccatgtttataaccatttctcctgantttggaagcagaccatgccatttagggatcgcggttgcacgctcaacataggctgcgtttgncccagtgcctaaaataacagcagcaacnacatccgggttatagtatctaccaccggctagtgtnccaacggtatcattaacaagtgctgcgattcgcatg

SEQ ID NO: 131815 - DNA, 391 bp, Arabidopsis thaliana columbia
  unsure (1)..(391): unsure at all n locations
aacaacctacaatcntgggaccaagagtnccnatcttgttnaaaccccgggaatatanccgggngatagaaccgtccgtgattgagtgtagaaatgaancttgggtcattagagttttgcttcatcagtaattgatcataatcnctaggcaggacatccatatcatcaatgtttaggatttggatagtagctttactttgaatgtttagcagaaaccacattgagattgctgggtaattaagtgaatcagtcacnacatggaagactattctttctggctcctttgatgaagatatcgtagagttaacaacgactgnagaagccaaaacattgtcagagaagacaacataatgattgaaattagcgtnaaaataattttgctggttaggca

SEQ ID NO: 131816 - DNA, 370 bp, Arabidopsis thaliana columbia
  unsure (1)..(370): unsure at all n locations
ttttttttttggtaactacaaaacggattttantatgcaaacaggcaagtattacaactcaaaccacataaaacattacataancaaactttattcccatagttctcttcttaatctatagtgccttaaaaacttgaggcagttcattacaaacgcaccatggtttacttaaaatcatacatacataatgcaatacatgcatggtggtgattggttaatatattgttttagtgaccgggctgagtctgaacagcttctccggcatacgagcagcatcttgagcagccgttgtaacctctgtagcagcagccgtggcggcagtaacttcccccacttccccctccnccttgtcgcccaccgcctccttggt

SEQ ID NO: 131817 - DNA, 353 bp, Arabidopsis thaliana columbia
  unsure (1)..(353): unsure at all n locations
gaaattgagaaggtgttgccaaaangggcttncctccaaaatgtggntgtctccagggaatcccacnatttggtgctacnataagtattggngctacnataaccnctacttccattatagtcaccaacagnacctgggcttgcanttgaaccctccccataagtgttgccgctagatccaaagccaccgcttgaaccataacctccaccagnacctccgtgaccagtagcatngcctccatagccaccagcaccactgcctccatatccaccagcagnattacctccgtagccaccacnagaattacctccgtagccaccagcaccgcctccatagccaccacttcctccgta

SEQ ID NO: 131818 - DNA, 389 bp, Arabidopsis thaliana columbia
  unsure (1)..(389): unsure at all n locations
aaaaggctcgccgtcatgacngtggtagnttggtacccggtggtcccgacccgatcacnaaagggattggttnttttcaggccntttacagtgacactgagatcaggctccgattcgncggcggaagagatcttaagtccaactctagtcggcggtanaaaactccggcgagaggatggatcgaantcagctgataaggtggttttagaggagagtccanagaagcgantcaaggcgaaactcatggaagccataattagagagatcaatctggaaaattggcagaagtgancaaatcttgagacgtgaaactcaanaattatgagagagagaaaacgaccggangcgtgggtcgacccgggaattccggaccggtntttttctttngt

SEQ ID NO: 131819 - DNA, 364 bp, Arabidopsis thaliana columbia
  unsure (1)..(364): unsure at all n locations
atagggccntaatccncgaactaagaatcgcccaatcttgncgnctttgctaaaacatgccgtgatcatacaccgtcaagaggacggtaagattggagtctgtgacgganagagtcaaatcttcattccantctggattaacatctttgttaatgacacgagtcttnaatttctgtttgcccatcttgacgacgacgtaaggatcgctgctactgatgtnacggacggctaaattgacgccacgtttgatacggattctaaggaggcccaagagntcgtccattagtgagcttgtcctcgccggacacgccgttgtnatttcctttattaatgttcctgattatttcttccttactnactttct

SEQ ID NO: 131820 - DNA, 425 bp, Arabidopsis thaliana columbia
  unsure (1)..(425): unsure at all n locations
cantcaaccaggaggaaagcttnaggcctccctnaagggttttgacatccagccgtnaaaagatttccaangagtttgaggccgtattttgaggaagattgtgatgcttgtttaacaccaccagtgtcgntaatgacaacgacatcaagaggagagtccttacgaccatgccaacacctcaagaagttcctaccaatcctaccgaacccattgatggctacctttatcttggcctcggtcacccctttcctgtatccaccattgcttctcattgcagaagtttggaaactgacgaaggaaacaaactcatcggaagaagatctcttggcaaagggaagagcagaggagtttcgaagtcctgagnactcagnaaaaccctgaagagatggtttggccacagagaaagtagccgaagccatggctac

SEQ ID NO: 131821 - DNA, 204 bp, Arabidopsis thaliana columbia
  unsure (1)..(204): unsure at all n locations
caaccacgactctnactccgaacaanatgatctcatctcnctttcccgtaacgccgtagtctccggtcnccgacgaactactaacggcggccataaataaaacacttttnccgattttgccctttgcgtcgcttttggtttttaccctttcgaaatacggangcgtgggtcgacccgggaantccggaccggttttnttttcgt

SEQ ID NO: 131822 - DNA, 278 bp, Arabidopsis thaliana columbia
  unsure (1)..(278): unsure at all n locations
atcccgggtttccgccccaacaaatagcctntgaananaccttgcctgtaccacattcctatgtagtngtttctatgatcataagtatctggagttggggtgaagagaccgagttcgaatatatcaccgctggaaacaatggtctnaaatcctnaaagaggttgattggtagaaatagtgtcagttgaagnagaaacttgaaaagacaagaacaccaacactccgtagtataatnaaaacacattcttcttgcaaatctgcatgtttgttttnaaaat

SEQ ID NO: 131823 - DNA, 214 bp, Arabidopsis thaliana columbia
  unsure (1)..(214): unsure at all n locations
ccgcttgaaaaagacngctgctgttatggcctttcttcaaaaactgtcagagaaacaaccgaatcagccacaaccgcagcctcagccgcaacaagttcgaccatcaatgcagcttaataacnacaatcagcagcaaccgcctcnanggtctcctccaccgcaacctcctcncccttccgcagccaattcaancggttgtgtcgacgttagacac

SEQ ID NO: 131824 - DNA, 240 bp, Arabidopsis thaliana columbia
  unsure (1)..(240): unsure at all n locations
tgaatntgttgtgcggagagcttaagccaactcaatgagtagcaacctgtnaaaagattccttggcaatttccctgagaagttgttgtaagatnggtccatnaattcaatattttccancctggccatagnggagggcatgttccctagaaactcattgtttgagagantcaaatgtctcaagctcgcaagtatcaaaccgacatccttagggagttgattgttgaaattattcaccgaa

SEQ ID NO: 131825 - DNA, 444 bp, Arabidopsis thaliana columbia
  unsure (1)..(444): unsure at all n locations
aaagggaaagcattgntctcccggtttgccgttagcctccttnacgaaagatgactttaccggctgnatcaacgtnaatanagatacatcaacctctggttctctctgtagnaaacgttggacctgagctagagtacacaattccaggtcgaaccggatcccaagctgtcgaaaacgccattcccttgtacacttcacgctgccctgaaccatccggcttcaccanaaacacaccaggcatcttaacgtatgcgatacgatcacctccaggtgagaacgaaggaaacgaaccatcaattctaaagagagagaggtcccttgtagtggtttgaatattttcaaggaagagcagaggacttctccgtccattagcatcgcctctacaactatgatatccgactcgagacgagtcaggggacaagaacggattcaagtgatgactct

SEQ ID NO: 131826 - DNA, 395 bp, Arabidopsis thaliana columbia
  unsure (1)..(395): unsure at all n locations
ggtaaatcgttgcattggcccnantcttccnaaatcaaanaaacgcnccancaaagnaaaggacaatccccgcatccgttnaaaaacaggcaccggacaaagnagtaacggtcttcggaagtttaaagttgttaacaaggagaatngcttggatcgtataccatccagcatcaccgagagctccaagtccatcaagaccaggctttacacgaatatcatgttttaagnaatcatnactcgcagcaaatgagaaacaactatacacagatttaatctgaccaaaactctctaaatcattcacaaattctttaatcttatccgttctagggctatgcatccactgagttccatccataaattgaacaccattaacctnacaagcttcaacgatctga

SEQ ID NO: 131827 - DNA, 426 bp, Arabidopsis thaliana columbia
  unsure (1)..(426): unsure at all n locations
caatcccaattnttttgcggatnaaagtacacctacccccgcttgcctgttaacctnctgctttgctttgactacagtnactcctattagggccacgaacatccttaacttaagagagcaggaagagtttactatcatagcagcacatacagagtgccggaactacaaatggactaatgctttctctgctttccctcttggtttcgttcatggaagatgcggcatagatagaaagagagcattccagactattctctagcatccgagtctgggcatgaatggaagactcctagctccctcctaccanacttaagtatctcttctttagcgggcgcttnataatcaaaagattgttccataccatatnacccaggctttgtcacgaganggattcgnaccagcacttccggatgagttacatccgac

SEQ ID NO: 131828 - DNA, 407 bp, Arabidopsis thaliana columbia
  unsure (1)..(407): unsure at all n locations
agcttctttacaagctcaaacctttccttgagnctcgagnttatctggagnaagaccaccatcttcaccaacattacatccaaaaccaccattcttttctgaaatgacagcctttaaatgatgatatgtcncagatccccattgcagggcctcctnaaatctacttgctccaattgggagaatcataatttcctgaatggnaaaagtattcgaagcatgcttcccaccactnaaaacagtgaacgcaggtacaggtaacaccatgtttgctctgccactaagatcagaaagatgcttgcacaaagggacctctttctcagcagctccagccttgcatgccgcaattgacacagcaagtatagcattagcaccaagttcactcttcttttcagttttanccaaatcta

SEQ ID NO: 131829 - DNA, 427 bp, Arabidopsis thaliana columbia
  unsure (1)..(427): unsure at all n locations
aaaatcacatcatcttttnagnaatatatcaacggctgagatttactnccgagggtatcaaaaggacgggtggaagatttgatcacaaacatcatgttcaagtaacgaaaaggaatcggagaaaaacgtccggtgaccgtctgggaacgttgagatgatgctctgtacacgtctgtccaaggtagaaggccatgtagcggaacattgttgcctccagagggactcgtcggagcaaaaagagtttaggttggagcacgtgcagcttagggcggcgagagaggaaccatcgaggcgggttaggatgttagaccgtaaaacatcggaggacacggcgttgattcccggacttccgctacgtgatggttgctccaccgttgacgaagacgaagacgaaagcatgagataaagattgagttgnaaatgcaag

SEQ ID NO: 131830 - DNA, 413 bp, Arabidopsis thaliana columbia
  unsure (1)..(413): unsure at all n locations
tggaagaggaccccaaagttgcataatctcaacaggcaagaagatcacctggccctaagttgcaaacaccatccntcatccanaactttgatcggcccactcaggtaatgaacagtagagaggtctatgctcttaatatcgccagcagagccatcttctttgactgcacctcccgtccagtcaaccatttccaccctaaacaactcaccagtcttgacctctgcaactgatggtatctcaggatgccatctattgtgcagtggctgagtctgctgccatggcctcttcttcaaatccaccttcaccaccactcgtggacttgctggagccatcaaaccgaacccaataagtacggtaatttatattctctctctactcacacgttctatgttaatatatttttgttttttgtt

SEQ ID NO: 131831 - DNA, 318 bp, Arabidopsis thaliana columbia
  unsure (1)..(318): unsure at all n locations
agacccttctaaaaaccttcccttcgtanggtttggncatgttacatgcgccgagactgtccaaaggcccgtccttnanaatgtgatggcgaaaatgtcgttaagatcacctnacgaccacttccagaaaccgctctcaacgttgttcttatcgcttttctaaatncatnataaaaccctacctcggtacagttacttgtttcanaagaatgacatcccaaaaccgaaccagactcgtngtaaaccgctggatgcagaaaccaatgtcccacagagactacgaccgtancaaaacgttctaaatcattgcccnatctc

SEQ ID NO: 131832 - DNA, 390 bp, Arabidopsis thaliana columbia
  unsure (1)..(390): unsure at all n locations
aaggaaggaaggaaggaccggttaagggtttncttaaaacaancgncttcgaggatggacgcancggtagcagttgtggcaagtgaagtagctgtgagagacagagacgctgcaaatgtcggacttgctgtgagagatctccggagctggaggtgagagaggaagaggaacttgagcttctgaatctgagactgttggtgcggaaggaacgaggtcggggactgggacagggacggagatgggtatggggacggagacagagactgattgaacaacgacttctttgacggattcttcttcgaggggtggaggaatttgagcggcggcgactggtggagctgtgactnttccggcgctgaagcagcatcccattttcttnctacttttgct

SEQ ID NO: 131833 - DNA, 307 bp, Arabidopsis thaliana columbia
  unsure (1)..(307): unsure at all n locations
aggattaattacatctggcctgtttgtagctccaattacgtatacattacgcctctctccaccgtctagctcaacaaggaactggtttaaaagccgttcaacaanccaggcaccttctttgccacggcttgttgtcaaagcatccacctcattaaagaagatnacacatggcgaacatgtccgggcacgctgaaacaatgtccgaatagcaagctcgctctctccaacgtacttgtttagaagctctgcacccttgatgtgcattaaattagctcctgcctcgttagcaactgcctttgcaatcaat

SEQ ID NO: 131834 - DNA, 364 bp, Arabidopsis thaliana columbia
  unsure (1)..(364): unsure at all n locations
cggaggggtccgttgtcnaattgtggatggaacctcgacgctaganagnctatggttcggagttccnatggctacgtgnccgctttacgcagagcaacaagttaacncgttcgagatggttgaggagctagggctagcggtggaggtccgaaatagtttccgaggagatttcatggcggcggatgatgagttgatgacggcagaggagatagagagagggatccggtgtttgatggagcaggatagtgacgtgaggagtagagtgaaggagatgagcgagaagagtnacttagctttaatggacggtggatcttcgcacgttgctcttctaaagtttattcaagacgtcactaagaatatctct

SEQ ID NO: 131835 - DNA, 365 bp, Arabidopsis thaliana columbia
  unsure (1)..(365): unsure at all n locations
agccccttgcaanaacccggggtcataacgattttcactctatccctgaataatgggctactcgagaagnnccggtccaagagtcctcgagtaacagcaatcganngggactattattaaccgccacttnaagtctcattccgggtttatacatgtgtttctcacttcaagagagggaggtcgtagtgatgaagaatctncagagtcggaactgctaggactattaaaganccgagcgcgagctttatcatactcttcctttctctcctcaacacttctcaaaagattctgctgtactcctgatccgctacccccacaaccagancctctcttgggtctaggcttgatagcgattttgaaaccct

SEQ ID NO: 131836 - DNA, 253 bp, Arabidopsis thaliana columbia
  unsure (1)..(253): unsure at all n locations
ccttttacnccattagccatgccttcaggagatgngtatnctccaggtttatggctgtancctttgtagcacgggatgaatatcatacccatcggagatatcctggccatgaagagagaatcatgataagctcggctgatcatcatcttgtgtgataagttaagttctgtggctgcctctgccattttcttgattactagtttgtctgagagtgctggtggatcttgatttacaatcttgaantctgatagct

SEQ ID NO: 131837 - DNA, 410 bp, Arabidopsis thaliana columbia
  unsure (1)..(410): unsure at all n locations
aaaacaatcgtttcattaatatggtacaaagtttgaggcccaaatattacaagtttcgtaaattatcttgcaaacgaaaaacagtctttttttcttctgtattttatttggaaaaaggtcaagccagattatacataggcttctctcccaatacaacaatgattgttgctacaaggcttcacaacacaaacgttacaatttgaaacgaacagttttgtcttacaccggaaccacttctggtagtctaccattacccgccggagtcaagctctcatagtaatccaccagaactttccatccacctgggcacataaaaccgtctggcggttttcgttgttctttgccaatgtgcggcatcttagtgccggagatgaacaagaaatcttgaggcctcgagggntcgaaggaaa

SEQ ID NO: 131838 - DNA, 397 bp, Arabidopsis thaliana columbia
  unsure (1)..(397): unsure at all n locations
ttaagcatagaaaaagactttttattggattggagacaaagctgataaataagttacaacntatcataaacaatcttaaacacatttctgtgtccgaacttgttaaacggagacagtggcacggaggctcaaagggctttcctgatcttctcaacagctgcttgaagaacgtcgagagatgtggcataagatattcggatacaactatcatctccaaaagcatcaccaggaaccattgcaacctgaaacttgtcaagaaagtatagtgcaagagacgacgaatcattgatcaaaccaaaaccttcagcttctgatccatagtaaggcactgangtcaataaagagataaaaagctccctgaggttcagagntctttaacacccttttgattatcanc

SEQ ID NO: 131839 - DNA, 397 bp, Arabidopsis thaliana columbia
  unsure (1)..(397): unsure at all n locations
tggtaatnattttgtttcgcgggatggggaaaaagaggaagtacctcacaatgcactggagaatgaagaagagatgaatgaggtagttgcatcagagaagcaaatttcagatccagtgggagtcatcaagaaagctagtgaagctgagcatgaagaccctgttgatgatataaagagcaatgatgatagggattttccaacagaacaagcaccaaaggatcagagcgacgaggttagtgctgatgaaactgtccctaaagaagcaataggcgaggaacttaaggttccatcctcaaaagtactagatgatattcaagagaacagtaacacggaagcagttacgaactttgctgaccgagatcttccagtacagaatctaagtgaactcattcagtct

SEQ ID NO: 131840 - DNA, 327 bp, Arabidopsis thaliana columbia
  unsure (1)..(327): unsure at all n locations
ttttttattaatggattggctgatagcctgatatacttcattctgtgacaaccgattcaaacaacacattggtacattaggatacaccgcataatcttttttattcgacacctttagttataaactcacacgtgaacgaccacacttatactatgaaaccgtgtcataggaaccacattttaacatctttagcaactaagatttgctccggngtgatcccaaggcgtcctgcagaactccaagtaatagtttactctgctctgcacggctgcaggacgcctaccgttgcattcaccaccattgantcttcctagtggtggctccaag

SEQ ID NO: 131841 - DNA, 309 bp, Arabidopsis thaliana columbia
  unsure (1)..(309): unsure at all n locations
ctcgtgccgcgaattatagtaatttgttccaacccgaggcataaacaaagacaaggataatcttactaaaggaactaaagtaaaagaaaaggcacttccaaagagttggaaaaaagggtctatgtggacctgaaatggatatatccatatatttcttgtgaaatgaaaaaaaatggcancacctatattaagaattggttcgcgtaaaaatacacgtngtggttcacgtaaaaatgtacgtagaataccanggggagttattcatgttcaagcaagtttcaacantaccattgtcaccgttacagatgt

SEQ ID NO: 131842 - DNA, 353 bp, Arabidopsis thaliana columbia
  unsure (1)..(353): unsure at all n locations
caaagtttcacccgaaaaactgaaattagtttcctcttacaattacgaaacaccaccatgcaaagattgctttgagtgtcgtagaaaacagagaagaaatagaggaagaaagctgtaagcaattccttcatttgttatgagataaagaaatttttcacaatatcagacaaaacacagantacaaagaactgtaagtncntctgcaaactcataattatataacagaacaaaactcttgcgcaaacaatggtttctgttcacactgcctctctcgctgctcccttctccatcatcttctatcggttaacagtgggttcagaagcagggacttcttccatcaacatatccaagtt

SEQ ID NO: 131843 - DNA, 377 bp, Arabidopsis thaliana columbia
  unsure (1)..(377): unsure at all n locations
ggtaaatgacattttatttagagtagtgtccacattgtctgaaataaagaaagacgaatcatgttgtatacaattatcatttattcttatttttgataatgttattggtttcatgaacctagcttctagtagggcataggtgggatactctgctcgtgcctgaagaagttctctggatcaaccttggttttaatcttcaccaatctgtcaaaattgcctttgaagtacttaggtccccagattttagcttcaatgaagttaaccagcccacatacaaatctccaccaccaccatacgtttacagctccccaccaccaccatactactcgccttcccctaagnctacatacaaaatcttncaccacctccctatggta

SEQ ID NO: 131844 - DNA, 343 bp, Arabidopsis thaliana columbia
  unsure (1)..(343): unsure at all n locations
ctccacatcctcttcccaccaagttgccgactgcaacaccatcagtttcggaccagtttaagcttctatgcgcatatacaagaaagagacaaaaacaatctagacaatgtgctaaaccttgtatcccctgcgcaggaactcgagtgagcttcctttctcttcttgtagtcccagaacctgtaacagctcttccttcgtctgtttgcatccacatcaataaaagcttgttacttttttcccagagattggataaaaaagnctatattcaaaaggttaaacgcttttagggcacatacttcacccagcgtgaacgagtagggctttctgcaacacacggaaatgg

SEQ ID NO: 131845 - DNA, 182 bp, Arabidopsis thaliana columbia
  unsure (1)..(182): unsure at all n locations
cagacaacatccaactccaaaaatatcccttttgaagttttttgcttgtagtacgataatncaacgcacaatgtgtaatatcagctgtatttttcactttgacatgtttctgtcatgaaattgaatatctggtttgatagtgactcaaattctttattcaaagtaaaaaaaaaaaaaggcct

SEQ ID NO: 131846 - DNA, 400 bp, Arabidopsis thaliana columbia
  unsure (1)..(400): unsure at all n locations
ccatctgggngctgaagctacttgattgcagagaggctagctcttctctctgatttgaaatctgttcctgctgtgaatgcttttgggaatgttgatgttttagggaaagttgatcgtttgtctgagaatggtgcttctaagattgcttctactcttcacgctgtttctattcttcttaagcttgatcctacttggaattggtttattgagcttagtgctttggattatcctctcataactcaagatgacctatctcatgtgtttgcctcggtnaacagaagtctcaattttattgatcacactagtgaccttgcttgggaaagaatctcagagaatcaagcctattgttgttgatccagcactttacttaggctaggaaggacttcaggctcttcactng

SEQ ID NO: 131847 - DNA, 313 bp, Arabidopsis thaliana columbia
  unsure (1)..(313): unsure at all n locations
ctttcaaatacatcatttacatttcatcttgtgaaaaacattcacttcttgaccaagtaaaaaatacattcaaatgagttctttgatttctctataaaaaaaaagaaaaaacagagcttgttcaaagaccggaaacatgaatcttgacgagtttctacaaaactatcagcaatgtcgatattctgaattggtatagtcgnctagctggcgtggtaccggactgagaagaaggtttgagaatacccatcanatgtttaagcttctgccaaaagcaccttcaagatacattgtcggnctgtcatttggttttggt

SEQ ID NO: 131848 - DNA, 403 bp, Arabidopsis thaliana columbia
  unsure (1)..(403): unsure at all n locations
gaaaaaagaatgattcttatagattaaataatacttggggtgattatataaatcacacacaaacaacacaattctgagtaaaaaaaaagagagtaaaactttctatgaaggagggaagaaacggttgaggttgaaagggagagtgtagaattcctcattcctgctatctcctttgaaagttctgaacttagcccaccaaggcaatcctctgtctctcgcggtctctttatagtccagagtgttgtccaagaacactgccaccatcagtgcgaccattggtgaagataagaagattgtgttcaagaaatcattgaaccaaccagcattngtgtgagctgggccgtttaatgctttcatgctgaaaatctcttaagtttcgggggtcggtaaatccttnggaggg

SEQ ID NO: 131849 - DNA, 267 bp, Arabidopsis thaliana columbia
  unsure (1)..(267): unsure at all n locations
cccccccccttatttttttacttatttacttaaattttatattttagttttggatcccaactaaacaaatcacacaatatccccagttttttctctctttttcttttctacaattcaggagtagtaaccgatttttgaaatcgaaatacagggagcccctccctaaaaaaaaaattgatttatttatcttattattaatcangaattttgtatatagctagancggccctcacaaattgcgaatactaatttgttangattgaatcg

SEQ ID NO: 131850 - DNA, 310 bp, Arabidopsis thaliana columbia
  unsure (1)..(310): unsure at all n locations
cttttcctctcatcactcatctctcttcttaaagattccttctttgcttcacgaaactaaaccgaaccctgatttccctttcttacatgctcaattatcttcaattttcgtttaattcttaggggttttagtcattttcgatcgttcaattccatgtccggcaaaggtctatctccggcgccgttcaacgcgagccgantgattgtccaagatgctgacccgttacgttttcgggtcggcgaacaggatcctaaaacccgtgaattcgctgcctttatcggcgaccaccggtatttcgcggcangcaagc

SEQ ID NO: 131851 - DNA, 422 bp, Arabidopsis thaliana columbia
  unsure (1)..(422): unsure at all n locations
ggaattaagcatcataacaaccaaagaaaaaaaaaacaagaaatcttaaaagagaacaatacatagagancggatagattagttgtacatatttggaccgaccaaattaaagtacgatagtcgatatataaaaccagtctatacgtctctatcttcttaattcgtatcataacttaataacgataaatngaatcactcactcttttaaatctatatcgatctcaactggatatttgtgtngacactgttcccaaggattattagtagaaggcttgacgtttacgangagccacccaaactgaactattacacttaaaacctgaccccaacgcaatctgccaaatcctatctcctttcgtcatccttcctttgggcttctgtgtaaggcaacttngtaccaantgggggctcgaggggtattt

SEQ ID NO: 131852 - DNA, 362 bp, Arabidopsis thaliana columbia
  unsure (1)..(362): unsure at all n locations
gaaaaatccctgttttagtctttgattatcggtttcatacgacaaaaaaaaaaagaattntcggcatcatctaccggattcatcagaggacatacacaacaaatatatcctttgagangcctgacatttatatgtatatttatatttgtgaataatgcagttgtgagctttcattccattgcttgaggtggtgattcaacgtcttaggttctccacgacgtagntgcatagagatccatggaatgctganctgcgtcgtaggctgcagttgccggaangaagtcgttaacggctacttccttgttctcgtttttcttatagtcttcaaagaaacggcggatctcagccatacgatgaggcgg

SEQ ID NO: 131853 - DNA, 262 bp, Arabidopsis thaliana columbia
  unsure (1)..(262): unsure at all n locations
caacngctaatataaatccaaaccatatcccaacaagcacagatctcatgaaacaaaaacagnatgcaaaattctgagatggaagaaggataagaagagagagctcaaaagattctttgtggtggtcccatggtnctcttcaagtacaaacacctttacgttttgccaattcttcttcaagagcgagacgaggaagttaactaactatcttaatctcaattctcatcttatnctccgtacttccaagcttcttgctgatgaa

SEQ ID NO: 131854 - DNA, 396 bp, Arabidopsis thaliana columbia
  unsure (1)..(396): unsure at all n locations
catcggacctggggaagaaaggggcttcttattttcacacccggaagcattacgaaaagttcttaactatattaaagagagatacaataacatgccagtctacatcaaagaaaatggaattaatgacaacgacgacggtacaaaaccaagagaagaaattgtgaaggacacatttaggattgaataccataagacacatttcgaagaacnttcacaaagctatagtggaagatgggtgtgacgtangaggatattacgcatggtcattgatggacaattttgaatgggagcatggatacactncaaggatttgggtctatactatgttgattttgtccaatnggtctcaaaacgttatcccaaaagattcggtcaaatgggtttaagccggttccn

SEQ ID NO: 131855 - DNA, 156 bp, Arabidopsis thaliana columbia
  unsure (1)..(156): unsure at all n locations
agctatagaagctgaggacaggaagcatggagatttctngagactggaccatgttgaagggtacctagagttgtcaggcaagacgaaaacttactttcctacagcattttcgaatgtgggatgcagatttctatgtcanagtagatgatgatgttc

SEQ ID NO: 131856 - DNA, 373 bp, Arabidopsis thaliana columbia
gcgagagagaagaagacgtgtgtagagtgtgggcacaaggttaaatctttgttcatacaatactctcctggaaattttcgtctcatgaaatgcgagaattgcgaagaagtagcagacgaatatgtcgagtgtgagctattgattattttcatcgacttgattcttcacaaaacaaaggcttatagacacttactctacaatgttgttaatcaagaatctgcaaatgttcagcatctattatggaaattggtcttggcttatcttcttctaggatacttataggaagcttgctactgagaagaacccaatgacggatcaaatgtgtctatgagctttctttttgaatctctagagggttctgggcaatgttcta

SEQ ID NO: 131857 - DNA, 396 bp, Arabidopsis thaliana columbia
  unsure (1)..(396): unsure at all n locations
aaaaagacaaattctttttgttgttagaagaatcaactctccaaacattaccagaccatcaaagagtatattaaaatgtacgaagatctaccaatctttattcaaggctggtgatgaaatgattcggaaggcggatcattgcgtggaacgttaggttcaggagacactaccgggatatccaagctgtttcttctgtcccgttcagtctctgcagatatttctcttacatcagaaactcttgcctctgttgcctgaatatcattccattcgttttctcccaccggaggctgagcgtttactacctgctcttcactcatatggactacattctctcccggtatagaggctgttcttgaaatgctcagacatgctttantccacattcttttctgtttc

SEQ ID NO: 131858 - DNA, 410 bp, Arabidopsis thaliana columbia
  unsure (1)..(410): unsure at all n locations
agcctagtggtcccaagttgagcgaagaagtgctccaaagaaaaacaaagtcgcttctcgaggaatatttcaatgtccgactacttggtgaagctctgcagtgtgtagaggagcttggtttgccgtcatatcacccagagtttgtgaaggaagcaatatccctgtctcttgagaaaagcccgcctgtcgttgagccaattgctacactcttggagtatttgttatcaaagaaggtagtcgcacccaaggatcttgaaactgggttcttgctctacggtgctatgttggacgacattgggaattgatcttcctaaggcaccaaacaattttngtgaggattgtggggaaagctgattcttggctggtggtnttggatttcaaaattgggttaggggaaattnttaggggaa

SEQ ID NO: 131859 - DNA, 240 bp, Arabidopsis thaliana columbia
ttttttttttgtttagaaagaaaaacctttaaaaagttaaaaggtgaacagtagtatgtttcctccacaaaaccatcaaacccacattcaccagttcaatgtttcatagaagtagtacaagatatgaaatggctcaaaaatgtaataagaactacgatagaaaataaaacataaatcatactcaaaagcaaacactcaagaccttcctctgcctcatttcctaagcacactctttctctt

SEQ ID NO: 131860 - DNA, 403 bp, Arabidopsis thaliana columbia
  unsure (1)..(403): unsure at all n locations
atacaagtatgcttctcaaacttagctttaagagtttctcacagttacataagaaagcaganaatgcacaaaaaaagatacaaaaaagatagatttacttttgttcttacaaagaaacaaaaaaagaatctgacatttttctcacatacacaatgttcatggtcttcagttgtacttcctcttctttatcttgaaggaagatgatcggataatgtcatcgtcggcagtgagaacggtctcgagtggaactattgattcgggtttgggtgaagtaagtnaagagaaggtagattccatccaagtaagtgttggtttctcccagctttgttcttctttcttatgctgtaagccaacggaatcactcctctgttaaacacttncacatacatttccaccttcttgc

SEQ ID NO: 131861 - DNA, 330 bp, Arabidopsis thaliana columbia
  unsure (1)..(330): unsure at all n locations
ttttttagtatcaagatcaatttttttatatattaaagaatcagcagtaaaacatgagattcttgacattatcacttaatttaggaagaggaatcgtctttggaggaccaacacgagacacagaagaaggattcatggatcctccattagattcagatgatctctcgatgtatagccttcctctgtacgcngcaaggtgagcataataagccggtggcacaatcgatataggtttcgtgcacctcacgaaagttnaacacaaatttntacacaagtctctgcaaattcgtctgaagtgaactcgttctcgtcccatagaatatggtaatg

SEQ ID NO: 131862 - DNA, 410 bp, Arabidopsis thaliana columbia
  unsure (1)..(410): unsure at all n locations
attggaggcagctctgatcagaaatctaccattcccaagttcataaacgagcttactcanaagtgtgagcatttgggagtcttcttaagcaagaacacattaagcagtaccttctttgaaccatcacacatactcaacaacatttcgcttctcgaatcaaaactgaaggagattcaaagagcggcatcgaacaatctccagctgattatttgtgtaatggagaaaaaacataaagggtacggagatctaaagaggatatcagagacaagaattggtgttgtgacacaatgctgcttataccctaacatcactaagctcagttctcagttcgtttcgactttaggctcttcaaggtaaacgccaaggtcggtgggtccatgaccgagctctacaaactcgataccttctca

SEQ ID NO: 131863 - DNA, 350 bp, Arabidopsis thaliana columbia
  unsure (1)..(350): unsure at all n locations
caaattgaaaaaaaaaaatacaataaacaacaaagtgataacattaatacgacgacaaagagattcttaaggggcaaaacatgaacttagaaagaaagangaagaaaaacgagancaaggaggangattctcaatcattcattcagaagctttctctggttttctacagagaatcatatgcatcggagagaagattccagtctcaccacctctggtcaaataatcagcagtcttaaacaacatcttatgaacatcaacagttcctttaggagcaaccccaatagcagaaggantcacaaccacaacatggtttctccaataagcaatcctttcccaatctttaaccggtt

SEQ ID NO: 131864 - DNA, 413 bp, Arabidopsis thaliana columbia
  unsure (1)..(413): unsure at all n locations
ataatagaaaaccaaatccttttactgacattatcttttaacatagaaagtcactgaaacaagaaaaacaaaccctatcaaagggaagacaacaaaaaaaagcaagcaagagatgggattcttgataagagtctctctacttgatcttcttcttaggcctcaactggttgctgtgaccacacttcttcttcctgcagttgacagctcttgggtgaagacgagcatagcacttgcgncaaaatcatcttatcctgattgtacttacgagcaagctntgttatatactacatagtagccattcgtctactttattcaaaatttccaaccgaggaaataacatttcttggttacaaacaaaaacggncgaaaatatttcttacattcacataaacattttnaaaccttcaccanaa

SEQ ID NO: 131865 - DNA, 376 bp, Arabidopsis thaliana columbia
  unsure (1)..(376): unsure at all n locations
tttttttttttttttttttatttaaaacgttgtcgctttgtatgaagctctcaaggttaagtaattgaaatcaaatcagaataatatccagtcatcatctaggtgaaatttccttattcatctaaacgaactggttttaaaatacccagatggttcacagagatcccaataagcaaatagaagtagaaaacgaagaagccatgataccatctttcttcctcttggtccctttgctttaacgcctattaggtaatgtcccttccctaagccgcaagttattgtatgttcgcgtcactaacatcagtctcggatcatcctctggnatttcgcgttctttcaagcccttgtagtaagcttcaacagcagctagtgttgg

SEQ ID NO: 131866 - DNA, 351 bp, Arabidopsis thaliana columbia
tacaatataatttcattggtaatttattacattgttggaacccaaaaaaaatcacaaggctgtctttgtatatttaagactagagagaatgaggagaatgtgtgtggtgcaagaaaatggtcatcatgggcagctaaagccttgtggaatcctgcgaccacaaaccttaaagaagatgccaaaattgggagagagggaaaaacgtcttgctcctaccgacttacaaaaacaagtaactgcatcaagatcagacacattacgtacgatggaacaacatggctctgccctaccagtggttagaaggccgtcactaattgctagaattccggcacatatctttagttcggtatc

SEQ ID NO: 131867 - DNA, 240 bp, Arabidopsis thaliana columbia
ttttttttttactcaaaaatattttagaggaaattgagttaaaaagggcataactcaatagcttctctgcagtttttatgtatcattttttttacaagcaattattctctcttgacaatattgtaaatttgaaaaggatgcgacaaacaaaaaacagttgatctctactaaaaaagtaacaatccttgagagtgtgacaaggcccaaatgtgtcacttattgagcccttggccaaatatt

SEQ ID NO: 131868 - DNA, 297 bp, Arabidopsis thaliana columbia
aagagaggatgataccaacaatgagaccgtacagggcaagtgcttcagcaaagatgagaatcagaatcattcccacaaacaacttaggttgttgtgcattcgctctaacaccggcatcgcgacaattccaatagccataccggcggagagaccagcgagaccacaagcaagaccggaagagagatgagcatagccatcgaatagatagtaagacttggccttagggttgattccggtactgatgataacagcaatgatcaaaccataaatacctaaaactccagccataacaacagg

SEQ ID NO: 131869 - DNA, 367 bp, Arabidopsis thaliana columbia
ttttttttttttttttttcttctatcctttgcatcattcaattattttaataaaacatacaaaatatgaaattgtcagtaataattttttctggtttgcttagttactcttccatgaagacgtacattggaaaaaagaaagttaggttcactgaactaatagtcacgtgttgcattcattgcacgggagttttttttttatcccggcggccatcaccacgtcagcatatccggcgttcttccgacaagagtgagaccaatatgtcggagaaagccctgatgacgaacttgtgtgtgtcggctggatttaaagagagataagtgagtagcagttcatccaagaaatcgtaaccgtcgttcggatcacg

SEQ ID NO: 131870 - DNA, 411 bp, Arabidopsis thaliana columbia
  unsure (1)..(411): unsure at all n locations
gaaccattccctctggatatgagaggagaattagatgacactgctgccttcaagaatttcaacaagtggggagacattgaatttcctctgccatttggaagggtcctcagttctacagagaacttcatccatggtttagatgagaagacaagtgcttctttgaagttcactgttttgaatcctaaaggccgcatttggacgatggtagctggaggtggtgctagcgtcatatatgctgatacagttggggatttaggttatgcatcagagcttgggaaactacgcagagtatagtggagcacctaatgagggaagaggtgttacaatatgcaaggagttgtcattgattgtgccacttactgatncctgacgggcgtaaacgagctcttctaattggaggnggcatttcca

SEQ ID NO: 131871 - DNA, 447 bp, Arabidopsis thaliana columbia
ttttttttttttttttttttggatgtttttaactcttgaaataaataatataagagaagtttcaaaactgagcagagtaccaaaagaaacgaagtgagtctaggaaatatgaaacgtctaaagaagcataacaaagaactgaaaatcacaaaattaagcagcctgttgactagcaagcctcttcctggcctcctcgatgatagtcagcttgatacctttgcccttgggaagagacacccatggctttgttcctttgccaatggtgtacacattacccaaccttgttgcaaactcatgtcctgttgaatcttgctcgtgccgaattcctgcagcccggggggatccactagttcttagagcgggccgccaccgcggtgggagctccagcttttgggttccctttaggtgaggggttaaatttcgagcttgggggtaatcatggccaat

SEQ ID NO: 131872 - DNA, 422 bp, Arabidopsis thaliana columbia
  unsure (1)..(422): unsure at all n locations
ttttaaaagataattgtgagaaatagatgataacccaaaggtttagcaatctcgagagtaaaagaaagaaaccataaaacaatcctctgaaaacgaacaacaaagttgcttactacaaaatatcaaaaagcaggttctagagtctcaacgattatatacaaaagacttataaataaaacacaaaagaccatcgaaagtttttcaagcagaacaaagttaaagactaaagagagtagtcacagggtctgatcagactttcaactgtagagatcatcatccgctgctcctccggatgtggcaaacgggtcgactcccccaactgtgggcagcagctcccagggaaagctccagttgtccctgtcggcgcatcttggaaacctgaactcgcttccaaacccacgtgatttctggngagtcttagc

SEQ ID NO: 131873 - DNA, 351 bp, Arabidopsis thaliana columbia
  unsure (1)..(351): unsure at all n locations
gtcgaatcgtgtcaaagaatctgagcttcgtgctttgtatcttctgagacaacaacagctcgcgcttctatctctttggaatggtacgttggtgaatccttctcttaatcaatctgagaacgctttgggatcgtctgttttgtttgaggatgtgaaatctgctgtttcgaagcagatttcattgaataaggagatccaagaggtgcttctatcaccanaccggagtagcaattactccggncnaaccgaatgttgattcggtgaatttctcatataatagatgtagaaaagtggatcagaagttgtcagatcggaaaactgtagagttggaagcctagatctgataagttt

SEQ ID NO: 131874 - DNA, 339 bp, Arabidopsis thaliana columbia
  unsure (1)..(339): unsure at all n locations
tttttttttttttttttttttttaaccagtgaaacaagtttttattaccagaacatgaaacagagaagacgttttaaaaatacacgtacatatgatagancacaaaagagtcatccttatacaaacacatgagctaaaaaagatggttttgatcctgggtttttaacgaaagggaatttgattcctgtgactgctcaaatgtgcagcagccaagagccatgtgaatcgaaactggttactttctcaagtgaggcggtttcatctacaacaacatgactaaggggaggttcaagatgtgtatgggncaaaaaagtgtgcacgtaccagtattttgaatgg

SEQ ID NO: 131875 - DNA, 172 bp, Arabidopsis thaliana columbia
ttttttttttgcatacmaatattatgagaatgctgaaatatatttgtttttgttattcgggcgcaaggccagaccacaaacgaaaatcaaatgcagggttctattgtccaagtaaatataataaaaataatggttaacagtttaaattaacctaacctagttttcggtaatc

SEQ ID NO: 131876 - DNA, 373 bp, Arabidopsis thaliana columbia
  unsure (1)..(373): unsure at all n locations
ttttcatattaacttgtggatcttctggatccttctacaagtactcgttgtcgagaccatctctggtacttgttcaaaacataaaagaaaacaagagaagtcggtttaagagaatccaaaaaaatccaacttatcctcgccgtgagaaagatggacctgaaagaatcaataaatgatcaatacgacatcctggagaacctgaaaggtcagttgggaacctaaacgacatcattctgaggttaactcagcacgttatcgctagcaccgccgggaaaacctcgaacctcgtcttctcgccggcgttacttcagcgtcatcctnagttttgtcgccgccanttctcccgatgagctttaacgctgtcttctcccgg

SEQ ID NO: 131877 - DNA, 361 bp, Arabidopsis thaliana columbia
  unsure (1)..(361): unsure at all n locations
ttttttgatataagacttatgcatcagttttctctctgttttatcaacaagccgtgtctttaaaagtcttccaagatcatattatggagtgataaagttangtcaaatactgaaaatgagaagagtgttttgaggcacaactagtcataccttaagaagaagcaattgactttagtaatctttacgtctcagaaacagatcacattaaagaatttgtaaactctgcgtaaggggctagatgcttgtgtttccactaccaccacatatcatacaaganctcgtggaagaacatttagtgcaatagctccatttcttgggaagcccggctgtatatcgcgtggccatgtttttagctgcaagt

SEQ ID NO: 131878 - DNA, 305 bp, Arabidopsis thaliana columbia
ggatgtgcagccaacttatgttgcagtagatatggatattgtggcaccacagatgcctactgtggtacccgggtgcccgaagtggaccttgcagctcctcaaccacacctatcccaccaactcctagcggtggtgcaggcggtctaaacgctgatcctccgtgatacaattgaaaatgttgtcacaccaagcattttttgatggtatcatgagcaaagtccggaaatggctgtccagcgaaagggttctacacttgcagggcttcattgcgggtgccaatcgttcgcgctataaaggacccgtcg

SEQ ID NO: 131879 - DNA, 303 bp, Arabidopsis thaliana columbia
aaaagtccaagagggttacccagaaatttgcatccctttggttctgactcactgccaaaggtcacacctccaagaatatacagcggtttggacacttgggatgttgatggtctccttggagctgacttactctcagagaccgaaaagaagatgtgcaatgagaccagaatactgcctgtacactatttgaagatgttggatatcttaacaagagaaataaagaaggataaagaaagttgtgcttatagcttcttcagtagtagagcgagtagtagacagagtatatgatatgctgttcatagg

SEQ ID NO: 131880 - DNA, 407 bp, Arabidopsis thaliana columbia
  unsure (1)..(407): unsure at all n locations
ttttttttttttttttttaacggaaacccaaatgatcatcagatattataatacaaataaagaaaagattccattcctcgaaagtgtttatttgttatgcagtattcaacaatctgagtgaacaagattttatgtactataagctgaggaatagcagtttacgagttctcaccgagatgagatgaccccgaggccgatgcggatgacgaagaggatgaagagaataatccgctgaacggccatggaaaagagaaccttctctcgctcacattactgttccttgcatcatcttccacattctcattacttacgttgatctctagagttcttgttctcggtcttacaggnttaaccttggtctcatcatcaggagggagttcatatcggcacacgggncatgacctgtg

SEQ ID NO: 131881 - DNA, 325 bp, Arabidopsis thaliana columbia
  unsure (1)..(325): unsure at all n locations
ttttttgggaaatgncattgcaatttttttttttctctgtgcaagtatatgttttacaggagtatctacatattacatcgtatgttcatcccactcttttggtctttatatacaatgacctgatttattgaacataacacatctaaaagaatttgactctctttttcttttgtttttcaaaacaaagtgatatatattttcaagaatattataagagctctctacctctacatgggggcaaccagactctcttcttcagtacgcttatttttccgtgaacatgacaaaacttcagggccangaacgtgaggccttggctttaaca

SEQ ID NO: 131882 - DNA, 326 bp, Arabidopsis thaliana columbia
  unsure (1)..(326): unsure at all n locations
ccccaaaggtgaatggaaaacacaacaaagccataaagaactcgagttctgatgagccagagttcctcctacctggagatggaatngccaggatttcacctgctaatatccctgcttataaggaagtgtcgcccggcttagacagttggcgagacagtaaaattgccacatggcatcatctcgaaggtcagtccatcgaatggttatgtgtagtatccatggatcgcaaaggcataatcggagaggttacaacagtcctcgcagntgaaggcattgnattatgttcttgcgtcgccgagattgacagaggaagaggattagcagta

SEQ ID NO: 131883 - DNA, 304 bp, Arabidopsis thaliana columbia
cgctttggcagatatctccggcgaattgttcagggggaagatgactcgaagctggtggacgtaatcgctgacaagtatatcaaaagagctgatgatagttacaagaataagcaatgggaggaacctagttgggattgataaacacatgaacgaacttaaccgattgatggatttgacttccaacaaaggtaagagaatggttgggatttgggcaagaggaggaagttgtagatcggctcttattcaatgtgtttatcaacaatcctggcaacactttggtagccagcttcttcttggactcagt

SEQ ID NO: 131884 - DNA, 251 bp, Arabidopsis thaliana columbia
ttttttttttagtacttaaggaacttcaaatgagataattcatttacatttttaaaaataaattgaaagtactttctccatcttctaacattttaaaatggtcccagctcttcttcatccatcccaccacaatttcccacctctaaaaatactgtattcaataaactaacaattcgaaaaatataaaaatcgggacacaattaattgcatgcacctcggaattcacattaacgcttgcctccatttcgggg

SEQ ID NO: 131885 - DNA, 306 bp, Arabidopsis thaliana columbia
gaattgataatgtatttttgaacgagtaaacaatcaacgacaaattacaaatctgaatctaaaaatgtatcgacgctggtctcttcgaaacacgagatacaatatcaattaacatgtaaagtgagctgaattacacttccaacaggaacttcatctgtgtgtgcatcaacacttgcttgttgtgagctctagagagtcgacagcatttacataatagtaaaaattcctgttgaggaattacttatgtgcttcgaccgccttagagtaaactccatgactcgtgtgtctcgttatgcgttgccgatg

SEQ ID NO: 131886 - DNA, 221 bp, Arabidopsis thaliana columbia
ttttttttttatctcaaaatcttatagaagaataaggatttccatattcacaaaaacgtctttacaaacaaatttgacttatcttccaaacgtttcctactaacagactatcaagtattataaacctaatgtcatacctgagattgtgtgtgtgagcagataatgatgatgatgaagccagagagccttggattatcttcattggtcttcttaagatcaaa

SEQ ID NO: 131887 - DNA, 243 bp, Arabidopsis thaliana columbia
atcgtattcaaaaaattggataaactaccatttattaagaaaatgattgattatcatcaatttgtaacttcgtaacaacgaaaatatgcgggggaaaaagacgggatataaaacaaaagttacataggtaatgattttattgtcaatctgtactgtgttgcttacgacatgtgaccattgtttcaaacaagaattggaagctaaatcaaatttttgtatatgtgtgtttgtagtataacattt

SEQ ID NO: 131888 - DNA, 383 bp, Arabidopsis thaliana columbia
aggacaaacgatctgaaactagagaactgcatttacacattgttttgcacttcacatcagagtcttttaatgataaaaaccgccattctctccactctttatgtacatcaaaacaaaacagtggagactgaatggtttacctaaacgaaccaaatcttctttggttctcaagagtttatgtctgcgtctgagacggagactgagatgatggagactgagcctgagcctgagcctgagcctgatctgagaccgagactgagtctgagtctgggatggagactgagactgagactgagactgagactgagactgagactgagactgagactgagactgagactgagactgagactgagactgagactgagactgagactgagact

SEQ ID NO: 131889 - DNA, 282 bp, Arabidopsis thaliana columbia
ggagctctgctgaagaaaattgtcccgagtttggatgttgcgagtgtgaacaaagatctggagaagaattcttcaagaactggtcttaaaaaggatacttggcttgactctgatctatatacatgattcaaagacagagtaatgaaagcttctcacttgtttcatgtttctatgcttactaggaaaaaacagagaccttatttacgcttgttttgttctcattgcaaaaacagttttgtttcatttctacattgttcttaggtaaaaaaaaaaaaaaaaaaa

SEQ ID NO: 131890 - DNA, 318 bp, Arabidopsis thaliana columbia
  unsure (1)..(318): unsure at all n locations
ctcgtgcgtntttttttggtttgttcttagaggaaatctttatcttggaatctttaatctatctagaattaaaagtttatgctcgtaggattgtctacttttaaaagtcaacatattcgatacagatattttgtatatttatataaagtcgaagccctgaaacttatcttcacggcataataagaccaagaagaaaaagaaaacattaatttcaaccaaagcaaaacagagagaaaaaaatagagagagtgaatcaatttcggtggagaaagagaggaatggagcagccgtacgtgtacgatacccgcaaggtagttg

SEQ ID NO: 131891 - DNA, 269 bp, Arabidopsis thaliana columbia
catcagaaatgcagattcctagtttgatctaaaaaaacacttttacacatatatcataaagtttaaagaaatggataatcataacattaacctcaatgttaactcaatctcacactcacaccgaatctgaaacttgtggtgcagccatgttaaccgccactttcccatccggtccggttctgagatcggtcatgccactaaccggttgacccattccctggtactgctgctgctgctgctgaggctgggctggtggcggttgaacatca

SEQ ID NO: 131892 - DNA, 256 bp, Arabidopsis thaliana columbia
agcacgaaaaccaaaatctaatccattaataacacttagtgaaaatgaatatactaataatatataaagacatcaatgagttatcaagagtaagacataaggtacatcacatataacttttttctttttttggacgacaagacatatatattatctatttcaactgaaaaaagagttcggtcagggaaggactcaccatacagcaatccatttgtctcaagatccttccgtttgaagaattctctcagcagtaagg

SEQ ID NO: 131893 - DNA, 242 bp, Arabidopsis thaliana columbia
cgtaataaaagagtgttttgatccattgatagttacgagccaaccatacgaatcttttgaatataaaagtttttaagtgtcatttctcctagtcctaataagtttttaagtgaagggacctcagtcttgtcagcagaacactaaagaaactttccgacctgactttgttggattaggattgttgtggctgcgagtcaccaaggacgagggttctaagcaatggcatctggctctcgagaatt

SEQ ID NO: 131894 - DNA, 244 bp, Arabidopsis thaliana columbia
cagctaaaaacaagagacacaagcatccaacaaaatgatacgatacacgcaagaaacaaagattcaccacattcacgtcttgtctcatcaaacggtaggggaaagagcatacacgacttcatatgacaagggaactgtaacaactgcgtcatgccactcgaccttaccccaaatctcttcgctgttgtcctttcaagcgcaatcacagcacacaaaatcatcttgttcttacatccaatcatcg

SEQ ID NO: 131895 - DNA, 288 bp, Arabidopsis thaliana columbia
gggaaaatgcaaaagaattatatctttattgaggtcgtatcattttttccaactgaaactcgaaagagttgcatcttatatctagcaaagtacctaaaaacccattaaaaacatgtagcaatattgttaacaagcataacacatgacctcactttcaacgattgctcatggtgatatcaagttcatctaagataaactcaaaagtttaaagcaaaaagaaatctcgctcttattctctgaacaaagttcagtttcacttctcgacaaagacttgagatccttgagcat

SEQ ID NO: 131896 - DNA, 303 bp, Arabidopsis thaliana columbia
  unsure (1)..(303): unsure at all n locations
tttttgacataaacatccataaatcttataaacattctaaagatgtcatttttacaaagaagaaaaagaaaagctaacatttttattcaaaatttgaagaaaaccaaattggtaaatgtatagatcattgcttgaacgngacatganttaaattttctaaaaacatcttacggcaacaatgctccaacttattcagagaaatatgaggtttacaaaaagggtatattcttgggttgtactctttttgggctatacgaagctctagtgaagagtttgcttctattccgaatctccttctgaagg

SEQ ID NO: 131897 - DNA, 390 bp, Arabidopsis thaliana columbia
tttttaaagtaaaaaatgcataaatttaaatgcaaattgccattatgattaggtcaaaaatacacatccactcaaattatagaaaagcgctttcattcagacaaaattgtaaaaggtgactgtgagtgagaaatcaagagagctttctggagaggttaattaagccacttccagtacacttgagtataacagtcccagtcaatggatcaggtttgatggcaaacttaactcccagaaactccttaatgttcctcaacgtctccactgcatatggagataatgttccaactcgaacctttgacacgtcttgttcagataacgcacacagtagaaacaacaatccctgggtgtgttgaatcaacaactccacctttttcaatctcttgagga

SEQ ID NO: 131898 - DNA, 321 bp, Arabidopsis thaliana columbia
ctttgcgcctgaaggggtcaagtcatcctccgtatgacatattgtttcttcttaagagtctggagggcatgaacagatttctctttcacctgatttctcttgaacggattaatgcttttggtgaaggtaggctagagaatttggatgatctgagggtacaagttcgtcctgtgccacattctgaatttgttagcagtaagcttacagagaagttagagcagcagcttcgtgattcttttgctgtgtcaacctgcggtctgccaccatggtttaatgatctaatgggttcatgtccgtgtttatttagttttgaagccaagt

SEQ ID NO: 131899 - DNA, 306 bp, Arabidopsis thaliana columbia
gttatccctatcaaagatggctctgttagaaccgcattggacactggatgtggggttgctagttggggtgcttatatgcttaagaggaatgttttgactatgtcgtttgcgccaagggataaccacgaagcacaagtccagtttgcgcttgagagaggtgttccagcgattatcgctgttcttggatcaatccttcttccttaccctgcaagagcctttgacatggctcaatgctctcgatgcttgataccatggaccgcaaacgagggaacatacttaatggaagtagatagagtcttgagacct

SEQ ID NO: 131900 - DNA, 305 bp, Arabidopsis thaliana columbia
ttagcagcgattcctcatcatacatttagccgtgatcctgtccctttttctctagctccaagattgagcaacaagatgggtttagaagctgcggtggaagcaacattggagtttctgaataaggctgtgaagccagttatggttggtggtcctaagttgcgtgtggctaaagcttgtgatgcctttgttgagctagctgatgcttcaggctatgctttggcgatgatgccttctgcgaaaggctttgtaccagagcaccatcctcatttcattgggaacttattggggagcagtgagcactcctt

SEQ ID NO: 131901 - DNA, 333 bp, Arabidopsis thaliana columbia
  unsure (1)..(333): unsure at all n locations
gagctaaacttcggaaagatttatctacaccgtaatagacagttaaaatatgtacaacacggagttcttttactcgcccagcaagaataaatccgatggcaactgttccgtacaagcaaagaaggaaatgccacaagaggaaagccatgaaatatttggtgttcctttctcctatacagttattcatccacccacaatgatgatcaaaccgagccacacagcggttgcagatgctgcaatgcttggntctagcaggctttgggattttacacgtagaacattctttcttggagtaaatgatatcatcataggggtaagcagaaatgtaccgtg

SEQ ID NO: 131902 - DNA, 336 bp, Arabidopsis thaliana columbia
ttttttttttttttttttaagggtaattacatcaattcgattaccaactttatgcttgcaaattgcaactttataaatctataatgttcaaagaccgttatgttctaaatgcatataaactcacaaaattgaaaaggacaagagttcatatttcatagtgcaaatttattcttaaacttttattttatttgtgttgaaaagtcaaagaactgaagaaggagagagttcaagttacaattcaccccccttataataaacaaagtggctaaaccgggcccattatttcttcaatcatcaattgcaacctttttaaaaactaaatccaccccggcattg

SEQ ID NO: 131903 - DNA, 303 bp, Arabidopsis thaliana columbia
  unsure (1)..(303): unsure at all n locations
tttttgaaacagtgggacttgcatttattatcagactacgagttacattattaagtacacactcacaagcattcggttaaccaaaaacaaagaaaagaaagaacgagcaagaacacttttttccgnccaaacttagagacgtcgttatagagatagaacggtgccatatagcacaaggaagattgtcatcaaactcagaagctgaactctccttccttaaacctcatcattgnggaggcatttgatcaaaatggccacaattccatggccccttttcccaattcttcttaggctgtgcaaacg

SEQ ID NO: 131904 - DNA, 336 bp, Arabidopsis thaliana columbia
  unsure (1)..(336): unsure at all n locations
cgtcaatttaaaagtacaaagggagttagctgctattgagctcttacaaacggtctaaacgattgagtaaagaaagaaagaggctcctttgtcctaatgaaagagtagagagcatatacaatgatactggcttattcccaacaagagaacaacacatacagtcaataactcataaaacgntccgtctgacttatttccaattgctcgaaagtaacaganagttaaatgcttgcaatgcagaatcatagcttccgcgaaaacatttngtgccaaggtaagagtagagagcatatacattaatactgggagcttcttaggcaaggagcttacattgat

SEQ ID NO: 131905 - DNA, 301 bp, Arabidopsis thaliana columbia
aaattaaccctcactaaagggaacaaaagctggagctccaccgcggtggcggccctctctctcctcgccgtcttcatcaaccatctccgatctttcctcctccgtctcacctctaaatcaaatcctaatctccccgtagacgatgtctctatagcatcgggactagccaacataatcgttctcgccgatcagcttagtttgaatcggttattctcgtaccggtgcggtgacggaggtggtggcggctccgattgtgttgtgtgtttgtcgaagttaaaggaaggtgaagaggtgaggaagc

SEQ ID NO: 131906 - DNA, 331 bp, Arabidopsis thaliana columbia
gctcgaaattaaccctcactaaagggaacaaaagctggagctccaccgcggtggcggccgctcttggccatggctcttcgaaggctttcttcttcaattgacaaacccattcgtcctcttattcgatccacttcatgttacatgtcttctttgcccagtgaagctgttgatgagaaggaaagatctcgtgtcacttggccaaaacagcttaacgcacctttagaggaggttgatcctgagattgctgacattattgagcatgagaaagctagacaatggaagggacttgaacttattccatctgagaacttcacatctgtgtcggtgatgc

SEQ ID NO: 131907 - DNA, 345 bp, Arabidopsis thaliana columbia
  unsure (1)..(345): unsure at all n locations
tttaattcccaaacanggaatacaataaaaacagaccaaccaactttagatgctaaacaaacacccaaacacactacgggcttggtagatctaagaaaaacccaaatctcgtctttttctgatccgtggaaaaacgccaactttcgtggcagctagggacacttttgggccggtactaaagatttgatgcttaaaattcaaaggccgtgagtntgattgaagtgaggatggctgattggaggaggtgagaccataaccggtggtgggcattggtaggcatttggtgaagaggccaaaggtgtcaatctggtgtacaaaaattgatcaatactagcccaaccaccg

SEQ ID NO: 131908 - DNA, 383 bp, Arabidopsis thaliana columbia
  unsure (1)..(383): unsure at all n locations
tttgcagaggtaactgatcctcttttattgaagggaaaggagtttcatagatcaaggtaagtcctcctgactttctcaagaatttctacaccagcaactaaaaaacgttttctctgagactagaaacagnttcaaacaattcattcccttggagacagaaacaaacaaaatattgtccacagagatttgctctctccagtttcctnatttgcttcgtttctccttgacggcttgtttctngtnctcaatcggagcagccggttgtccttgtagaggatcttcaggtaaaacagtgtgggaaaaactttttggaggaaccaacttgtgttgcagattaacttgtagcatctttntccctctcatccatttcaacaatagcttca

SEQ ID NO: 131909 - DNA, 330 bp, Arabidopsis thaliana columbia
  unsure (1)..(330): unsure at all n locations
aaataatatagattagcaaactcgttcgattccagattggngagtcagggggatcttattaccaaggatcgatcagggataaagaaaaaaaaagggttccggccgggctaaaggtttcaaatcaaggtgtaggtgggcatatccatgtttgggcatttcacatgatgagtagagcgatgggtcttcctcttgcaatcgagagaggcaaataggcggnaatcggtacacttttagtacggtggtatgcgngcagcaaaacagtatatgcaatacagaantacgtgcaagctcactaatcatagtacggnaaatatgcacatgcagcagcag

SEQ ID NO: 131910 - DNA, 322 bp, Arabidopsis thaliana columbia
  unsure (1)..(322): unsure at all n locations
tttaccgcttatgacacantttntgatttgcatcacacctttgctcgctccatcagtttagaaatatgagttnctggttcgcttggatatccatcacgccttgtttccgacgctggaatcaaacccggcgatgtcgttgctctcaccttccctaacaccgtcgagtttgttataangtttttagcggtgataagagctagagccacggcgtcgcctttgaaacgcagcgttacacgggcgggagganttttgagttttaccntttccgnttcagatttcaaagctattgnttaaccctctaaagaagggaaacggtacccgg

SEQ ID NO: 131911 - DNA, 310 bp, Arabidopsis thaliana columbia
  unsure (1)..(310): unsure at all n locations
tttgtttaaagtacggaatttgatgatcaaattttttgttgttgatcaaaacgtagaaacacaaactatatatcgatcgcccccgtgagtagtacgtattattatttcaaaagtaaatgattttgcagacttgcagttattcatttataagcgaaacgttatcttatgcaatgtttacatttgcaacaccaattagcttcttttttttacagttgagacttgagagncacattaaagcttgtcatcgttcactggngagagtagagtgtgttagagacaaaggnccnaacttcactgcaacagtagtcgg

SEQ ID NO: 131912 - DNA, 316 bp, Arabidopsis thaliana columbia
  unsure (1)..(316): unsure at all n locations
ttgtcactactgtgttttgccaacgccagcttcgtcagcaatactgacgcctccgtacatgctttgtccgtgatctctcctctcttcccgttctttcttgaccccaccaccttctcctcttctnctttcccttcttcttcactcctcctccccggagtctgtgtttctcctcgccgtcttccacgaccactttttctgttgagacacatgcgcaccatcgtacangtgcctcgttcgtcaatacgtcccatagcccgtccgtcggtagaaatcagaaactcatctttcctcagtccgatccgtaaacgtaaatttc

SEQ ID NO: 131913 - DNA, 309 bp, Arabidopsis thaliana columbia
  unsure (1)..(309): unsure at all n locations
tttccttttcacacgattgctttcctnttcctagaggaaatgtcaatttctcatttatatgtgaatataatactacagtatttgagttatgtagacagtctttttatccacttgacttcaaactgatgaaatggaagctgngagtgggtttggtaaacaagtaataatgtttgatgttgctggtatccacaactatgagcaacagattccaagncctcagatgcatcagactttatccattttagttacacaggttttgaagctttaaggtnggaacttttttatacggggttcccaaggggggagttt

SEQ ID NO: 131914 - DNA, 356 bp, Arabidopsis thaliana columbia
  unsure (1)..(356): unsure at all n locations
tttaagattctacttctcattggaagaaaatnattattttttcctgaaatacaaaagactactgaagcaacatgtcaaaatctaaataaagtttctctatgatatgtccttattactatgtttcacagtggggtacttattagacctcaactttttagccgtatggnccttatctaaagtctaaatacttgtnattgactaccaatagaaaaaaaaaactganctagttgccaagagagccggaacgaaggaaggtcatcagaaggctcccaatcgatggaggaggagacggtccattgagagcgtggttagaactgagtgacagatgggcgggggttaagttcattgcggcacag

SEQ ID NO: 131915 - DNA, 346 bp, Arabidopsis thaliana columbia
  unsure (1)..(346): unsure at all n locations
tttaaggaaccgatgattataaattaataacagtctcaattaagaatcgntcacataaatacaactcccctaaagaaggctagcaagagcagtatatatatancaaaanccacaagtgttggcatctctcgagggactaaaaacacaaggaagccacaactaaacaattacaaatcttttaagtttcacattttgtaaatggaagggaagaagaacaggcactttcttcttgggaaaaatggggtaaatgtncagtcccccaaggggttattatcgttttgggtgggnctcacattattgttgttgatgtgaaggggctttgagggggagattgttgcccattggt

SEQ ID NO: 131916 - DNA, 324 bp, Arabidopsis thaliana columbia
  unsure (1)..(324): unsure at all n locations
agttaagtgtctctaaatccgccatatccatatccacatctncttcctcctttccaacatcaccatgattctcgtccaattctgcttcattctcagataactcgtcaaggtcagcaaggaaagaatcttcaagagttgccatatctttctacttggacacaaacgcttcagtnattctcttgacgaatccaaatggaaatcaatcgattagattcggaagataattgaagagcagcgaccgctactatttataacctctctcatgtgtttaggtttcaagttcctttttccacatgtggtttgggattcaatttcctttaacca

SEQ ID NO: 131917 - DNA, 337 bp, Arabidopsis thaliana columbia
cccttctttgttattgcccgaaagtctctggctgcaaaggaaggtcttacgtggaactggaagctgacctgagtgtcaagtggcatattgttttgtttgttccttggataaaggattgtcttgttcttcatgtgtgttttaagcgttcctcaaggtcttcacaatgtggatggtgttagtcctacaggagtgaagaagtttgatcttacatcttagtatcagaggaagaaccagaggaatcggatggagactgtggtagggcataaaagagcgaagaccccaaagggcaagcaacttttgatccagtagatttggggtctttgttagtcttcgggtt

SEQ ID NO: 131918 - DNA, 374 bp, Arabidopsis thaliana columbia
  unsure (1)..(374): unsure at all n locations
ccattcctcacagaatcactggtctcatctcctgatccctgagttaacgacgattcccttgtctgcaacccattcctcacagaatcactggtctcatctcctgatccctgagttaacgacgattcccttgtctgcaacatctaacagagatcaaaaaccacaacaggaagataataacacaaagactcccagtgcaaaccatcattcaacatctaagaaatgcagtcaaaggagcaaacatttgcngangttctaaagctgaaacggcagtctcatatttncaaaatgcttgcaaacagttcacacaaattggtcattatcgacaataatctagtgttgactgaaaccagtgcaaagaaaacgttaaatacctt

SEQ ID NO: 131919 - DNA, 239 bp, Arabidopsis thaliana columbia
  unsure (1)..(239): unsure at all n locations
aatgttggtgaagaagtggtgggagattnacnaagattcgagtttagactacaaganttncgtcgagactnagtccaagctgaatccggtcactgcaaccttggcttccaagaaacttgttggcgatgtcctaacaagccttgccccttccgccgcataaccaatcctttaatgtggaggctgtttgcaactttaatttccgttttgtaattgttttagtgaaaggttaagctatatat

SEQ ID NO: 131920 - DNA, 299 bp, Arabidopsis thaliana columbia
  unsure (1)..(299): unsure at all n locations
gcggactgatgctagtgccaatcttgcgatatcctcttgattttttaagaagtttgantctatttataaaacaaattataaatacgttagtncgttatatgaaancaatagangtctatgtatagtatganatgtagcatgaccgggttattaattaccttggggacaatttcgcaaaacaacaaaccaaaagacgagtttgtgagttataggaggtcgtccgcttacggcgttgtccatctggattctgataaccccttgtgggaatccatgggtcgtccgggtaattggtgaacccc

SEQ ID NO: 131921 - DNA, 337 bp, Arabidopsis thaliana columbia
  unsure (1)..(337): unsure at all n locations
tgaacatcgttcagatcattagtcagattatcatacgtgttcaacatcttacagctaatnattttaaacttaattctcacttttaagaccaatcctgggtttaanattaggaaagtgtgatgttgttgtctctaggttatttnaataaatcatcgtctctgcatganccctataaaccattttgtttttaaatgttattgtagctggagcttttnctggagctgtaactggtgcggtggcaggaagagctgcacagtatggagttctccgtggggctgcacttggcgctgttgctggagctatcccctctgttgaagtgttggaggcttctcgtgcg

SEQ ID NO: 131922 - DNA, 353 bp, Arabidopsis thaliana columbia
  unsure (1)..(353): unsure at all n locations
attnattttttnaaaggacttatggaatttantccagcaaaacgttggtcaccttttnaggcagcaaagcaccctttnattactggagaacctttnacgtgcccatacaaccctccgccagaaacacctcgtgtgcatgtaacccaaaacatcaaagttgaccatcatccaggtgaagggcactggtttgccgctggtctctctcctcatgtatcagggagaaccagaatcccgatgcacaatagtccccattttcagatgatgccttattcacatgcaaatagttatgggagcattggaagctatggtagctacaatgatggtactttacaggacatagcttgggagcttgg

SEQ ID NO: 131923 - DNA, 340 bp, Arabidopsis thaliana columbia
  unsure (1)..(340): unsure at all n locations
tttactctctcctttctgttaccgtcgaaaaaatcgagctaatgtccggtgataaccagatccgaatcggactcttaagctgcacaaacaaagtccgcaaactctctcgagctataaatctctctccaaacgctactatatccgccatagccaccacaagctccatcgaagaagcaaaatcatttgctaaatccaacaatttccctccgaatacaaaactccacagctcctacgagtcacttctagaagatcccgncgtcgacggcgtctatttccctatcccactcggcttcacgtcgagtgggctacactcggccgttattaagggtaaacatatact

SEQ ID NO: 131924 - DNA, 312 bp, Arabidopsis thaliana columbia
  unsure (1)..(312): unsure at all n locations
tttanacttaaatttgtgtttcctttattgaaagcaaaaagggtggcaagaatagggtagttcttacttattattccagatacaaaatcgaacaaaactcactcctatatctgaaagcgaaagaaagtttccataaaccacacaaataatgaaaattctaagacgtgaatctatgaacaaaaaatgttcttccactctttcactgntcaagacttaggtctccccattggaccttgtgttttgcggctagataatgggcaccgactggaccacgactgccgtaaggnttagaattctggggttgtcttcttt

SEQ ID NO: 131925 - DNA, 292 bp, Arabidopsis thaliana columbia
  unsure (1)..(292): unsure at all n locations
cccaaatttttatacaccaaatgtntcataaccatcatttacgtngtatcaatatctcatctaantgcccatttnataacttcatgcaaacaaaccccataccctagcgtctgcgaccaccacatgtntaattcacctctattggtacttctcaaatggntcacaaaatcctactaacacctcccaaatntttatacaccaaatgtatcataaccatcatttacgtngtatcantatctcatctaaatgcccatttnataacttcatgcaaacaaaccccataccctagcgt

SEQ ID NO: 131926 - DNA, 433 bp, Arabidopsis thaliana columbia
tttaatcttccaagagcgagtcaatcggtttgctattatagatactatatagatttaagacaatccatctgttacatgggatttgggaaataaagctatatataacaattatagccaacaaacaaaaaaaacataaaatcaacaaagaccacactaacaaaattaattcttttaagaaaaaaatcaaagtccatcgttgaccggtacttccgtagccgtaatccaatagtttccgtccaagaaattctccaccgtgaatttttccgcctctgtcaccgtctttataacatgataacctggccacttaactctaccggagacacttgctccggcgccggtattaccatactcaccgtaataaagagtgctaagggcaaaactaccacttccaaggcaaccatcccgccgggcttaccacggtccaggttacatt

SEQ ID NO: 131927 - DNA, 342 bp, Arabidopsis thaliana columbia
  unsure (1)..(342): unsure at all n locations
tttgaagaaagatccaagcactcaacttgattggagaagttagcgaaagagtctcgagagcaaggcgttgagcggatcgacttttgctttcccctaataatctgaagggaacgggtgagaatgaagttcaggctaaccacagctcctttcgtttcagtgggggttgcagtctaatgagaaatgagggttgatcatcgatctgtagcgaatcttttctgccaattgactttcttgtccttcgccctctaagccattggttaagttggtgagtctaagtctaaagagtaggggcgtangaatttgactattgtgatctctttagcttgaaataggcgctggagt

SEQ ID NO: 131928 - DNA, 353 bp, Arabidopsis thaliana columbia
  unsure (1)..(353): unsure at all n locations
caaattcaaaaagagttcccantttttttttaatnatgacatccagagggtcgaatacgaaggcttgcatctaatatntttttaantgtggggaatatggccaccggatagagctttgtccgaagcaaaaccagactgatgtagaaaactcaccggcggcgaaggaggttctcccaaacccggttccgcaagtngggtcggaacaaaggcctttnggaccttggatgctaccttccaacagacgtcgcaagaggaccacgtggtcagcctaagantcagggnccacaagatagcaattacccaaaaggtggaaggaaggatgtttaacaaacccagaaaggtcgtatcggtca

SEQ ID NO: 131929 - DNA, 245 bp, Arabidopsis thaliana columbia
  unsure (1)..(245): unsure at all n locations
tttacgttccacaaatgtngcgtactaaataaggtaagagagtttttccagtctttggtaccaaaacataaacatagtctccaagtttacttgtccaaaagagccattggaaaggcccctacttacttacttcatgtcagattccacaacagtngcagaaacttctgcgtcagtgtccaacttaatccgtttctttggttgctcatcatcttcttcttcatggctggtacctgagcattgacctt

SEQ ID NO: 131930 - DNA, 330 bp, Arabidopsis thaliana columbia
  unsure (1)..(330): unsure at all n locations
tttaagataacatcatacaaaggttaaattgttcgcgtaacaaataatatacactaacaatagattattgatcctaacgacaaatgcaaatnacagagntaatccacataccttaaacattattacttccataaaaatgaagttaagnattcaaatatttcattaatttccggcagggaagagcttaagcatcttcatactaccatgaccattattccgnatcttcatacctcagattacggaccacttggttttgctgnggtaatcacatgtttccccatatacggnatgntctaatggggggaatcaagtaatccggggttcaggaaa

SEQ ID NO: 131931 - DNA, 345 bp, Arabidopsis thaliana columbia
  unsure (1)..(345): unsure at all n locations
ttctctttcctttttttttggtttccattatttgaaacaatcaagaaataaatattttctgtttctaataccggcaataaaacttgaattaaaaacaattagttttttttttcttttttaaaggatttagttacgnatcgtagggataaagatataaatgcactctccttaccaaaaaaagnagaagntataaatgcactctttttaacctactgccaccgctaaaatcattagggataattttaactaaattattagtcatagcatagggaaacaccttcacattaggttaataatttgttttggcaaaagcggttttggaccataggaggttttgatttgtcg

SEQ ID NO: 131932 - DNA, 374 bp, Arabidopsis thaliana columbia
  unsure (1)..(374): unsure at all n locations
aagcggctgagagttcgaaatcggagcttcaggtttcgttcaatcggttaaaagctcttgctgtagaggcaatcaagaagcgcgacgagtctaagcgagaacgtgatgaagcattgaaggagaaggagaatctaacaaatnagcttgagaatgttaataaaggtaaggatgagatgtcgaagaaacttgatgaggctttgagatctagagatggtttaaaagcagagattgagaattcctcgcatatgttggtttctgggattgagaagatatctggtaaagttagcagctttaagaatttttcaaatggtggtcttcccaagtctcagaaatatacaggtttgacttctgtagcttatggagttattaagcgt

SEQ ID NO: 131933 - DNA, 343 bp, Arabidopsis thaliana columbia
tcttccaccatttaacaattatcctcttttgtcttcgccaacttcttccgtttcttcatacttctccagtgaagagaaatgcaagagaagccaaaagtttgcagctgaagttggtcttccagcactatcaaacgtacttctaccaaaaacaaggggttttggcgtttgcttagaagttcttcataactctttggatgcagtatatgatttgactatcgcatataaacctcgctgcccatctttcatggacaatgtattcgggacggatccttcagaagtacatatccacgttcggcgagttctactaaaggagattccagcaaacgaggcagaatcttctgct

SEQ ID NO: 131934 - DNA, 448 bp, Arabidopsis thaliana columbia
gagagagagagagagagagagacgaaaaccttcctggttcctatatatgtctacaaggagactttcacgcttctttactttacaagaatattaccattgctacttcacccccaagaagttacaacactcttctgtttcattggcctcaactgctcaaggtttcaggggatgtctctgaagaggatatcaatggcgcgattggaaaaaacattgtgaacgacattaaagagagaagcgaagtgcgcttggggttgcggttgtctcttccggattggagagaaaataaggcagggaccatgaaatttggttgtgatgaggtcaaaatgaaatttgagtcgagttatgaacagaagattacatcaactgtggtgctatcctaattgctctatgatgacactagttctgttacttatatgagatcgacctctttatgtgtatatacttggtt

SEQ ID NO: 131935 - DNA, 268 bp, Arabidopsis thaliana columbia
ctcaaaccaagtcaaaagatggaaagttgctagcagttggtcactcaatgggtggtatcttgttatatgccttgctctcaagatgtggctttaaaggaatggattcaggtttggctggtgtcaccactctcgcatcaacatgtgactattcatcctcaggaacactcctcaagtacctattaccaatgaaagagcctgcacaagctattaaccttcctatcatgccaattgacacaatgctcgctatggctcaccctctaatgtgtcg

SEQ ID NO: 131936 - DNA, 225 bp, Arabidopsis thaliana columbia
taaaggtatcatttgtatttaatttgtatacagtgcttgtgagtttaactgtatgaagatttgtacacataaatgtatatatggaatgttatatgtacagaaacaagaatcaaaattcatttgcattcttgttgatcttaactctcatcttgttgttgaagaaatctagtaatcagaggatatacttcgttccgagccgttcgacccgaaattagatcctggtgg

SEQ ID NO: 131937 - DNA, 237 bp, Arabidopsis thaliana columbia
gataactcaagcacttagtgaacctgttgagtctttgttcgaagctggtggaaaagagacctggtcttccataaggaagcttctcaaacgcgagactgaaacagctgttacagattttctggatgtggttactggctttgagctagatcacgctaaaattgatgctatggttcagaatctaaagaactattctcagagtttagtggagaaaaaagcaagagatgaagctgctaaaat

SEQ ID NO: 131938 - DNA, 331 bp, Arabidopsis thaliana columbia
cttttaaattgcaatggtctcttcggttttatccatccctccacaaacttgtctacttccacgattacccatctctgattctgtcaattgcaaatcgaaaatcgtgtactgtctctccacaagtgtccgaggaagctccgtcaagagacaatccacggccagaactcgcagtttcactgagacaaatcgtcgaacaccttccgtgcaatccaaacatgaattctgggaagatccagatgatggtagcgacagtgaaaacgaatatgaaggagaagaagaagatggtattgggaatgatttagataacgagagtgattgggaagatgactcg

SEQ ID NO: 131939 - DNA, 260 bp, Arabidopsis thaliana columbia
  unsure (1)..(260): unsure at all n locations
aaacacaacagaccttaaaaagaactgtgtggctacaactacaactgaaaaaaaaaatgttacaacattgaaggcaatacaatatatatagtctnctgnacctaaacactgtccacatagagaagaacttaccttacaccgtgacaccattcgtatttacagacgactcctacgacgccgttatgtccccttgtaaaaccaaaccggtttctttggagtaatcaagattggtttatatggatccaccactcttattttca

SEQ ID NO: 131940 - DNA, 271 bp, Arabidopsis thaliana columbia
caagcaccttctgtgcaaaccaaacagtcccaaaattcgtctgtggaagtgtcacacgttgatttagggcgtccaccaacagaaacagctaccttagagactgaagccatccaagccaaaaagaatgtatttgcttcaagtttaaattcagcttctcctccattttatccttcaagatccaacaataacttggcacaaaaggatgtacaaagctggcatgggtaggctgcacattaatgaaaaccctaatccgactggaaagaagtttggg

SEQ ID NO: 131941 - DNA, 209 bp, Arabidopsis thaliana columbia
  unsure (1)..(209): unsure at all n locations
gggataaagaagttgacaaacgaaaacagaataccacatttcaacattacaaaatttcaattggaacccaaacggacaaaagaataaattacagatgaaggacgcccacggttcaagctcaagctctcataacaacgagaacaaaacaatttttcttttcatttgnacaacaacctcctaataaaaataggtaacaataatagcagccc

SEQ ID NO: 131942 - DNA, 209 bp, Arabidopsis thaliana columbia
  unsure (1)..(209): unsure at all n locations
ctaaagtctcaaactaagatgttatccaaatacattggagaactaattacaaaatgatttaacattantaaacaacaaacaaattaaggccgaaaaccaaattaaaaacaagaaaataacgaaaacaataaaaaaaactgcagagaaaaaagccagaggaatagctctcaaatnctctcattatcatctctttacaaattctccctttt

SEQ ID NO: 131943 - DNA, 127 bp, Arabidopsis thaliana columbia
  unsure (1)..(127): unsure at all n locations
ttttttattaaaccattaatacaattgaaatcgcgaattggttttagcaaccatctcaacattacaaatttnctcgtttaatnctcaacatgatccatctcaattccccaattataatatataatta

SEQ ID NO: 131944 - DNA, 258 bp, Arabidopsis thaliana columbia
  unsure (1)..(258): unsure at all n locations
gtttaaagatttatcaaataaaattcactcgttacataatttatccaaatcagtngataacaaatgccaaataatgattccattggctctttattantcacatcaaacataatataataaccactaaaaaacagtttgaaaaaaagaaaacggatcaactaatttaatcaagcagtggaagtgaaattgaagttggcgcagttagtttgacggcccactaacgtggaactaaacccaaatttgttactcgccaaatca

SEQ ID NO: 131945 - DNA, 262 bp, Arabidopsis thaliana columbia
  unsure (1)..(262): unsure at all n locations
atagaactcattaagaaactaaagccacaggtggtggttactggaatggctccatttgaggtcattaccagttcatcgtttttgcaccttttggaagtgacaaaagaaattggatgtcgactttcctcggatatatctgatcactntgagttgtctagcctccctgcatccaatggggtactaaaatatctcgctgaaaatcaactaccttctcatgcagcaattatctgcggtctggtaaagaataaggtctattcggatt

SEQ ID NO: 131946 - DNA, 276 bp, Arabidopsis thaliana columbia
cagcaaagagctcttcaacaactgggaatgattcaacatccttccaataatgcttggagacctcaacgtggtctcccagaacgagccgtctcagttctccgtgcttggctcttcgaacactttcttcatccataccctaaggattcggacaagcacatgctagctaagcaaacaggactcactcgtagccaggtgtcgaactggtttataaacgcgagagttcggttatggaaaccaatggtggaggagatgtacatggaggaaatgaaggagcag

SEQ ID NO: 131947 - DNA, 303 bp, Arabidopsis thaliana columbia
gatcctccatcatcctcttcctcgaggaacttcaattccaatctgatatctctctcattgggatcagacatggcttttgtgtaacatccctgatattcgctgtcgtaggcatcattgcttcgatatgcactagaatctgcttcaacaaaggcccctccaccaatctgttacatcttacattggtcatcaccgcaactgtctgctgttggatgatgtgggcaattgtatacattgcgcagatgaaccctctcattgtccctatcttaagcgaggtggagtagaaaccattctactcaaactagg

SEQ ID NO: 131948 - DNA, 338 bp, Arabidopsis thaliana columbia
acgaattccaattccatcgcgggtcttctggtacccgacccgacttattcgggtcacaccagcgttattacgattctcttcctccgccgcatttcagccgtcttctacttcactctcaccgccttcttccgacaactttctcgccgataaatgggaatcatatcggaagaagaaggtcgtcattcgaattggatacgtgggtactgattacagaggcttacagattcaaagagacgacccttctatcaaaactattgagggtgagttggaagttgctatatacaaggcaggtgggattagagatagtaactatggtggatcttccataagattggttg

SEQ ID NO: 131949 - DNA, 275 bp, Arabidopsis thaliana columbia
  unsure (1)..(275): unsure at all n locations
ctgtaatattatttcttggtttacaaagaaagaattgtttttacaacaaagttaatggtttttaactttanaagantctcctctaaaacagccaggtgagggttggaacttgtaatatgtagcaaaagttaaatatgtgccgcttagacaagcatatacttggaaacagctatgtgantacaaggtcagatatatgaacactactgtcaaagatattacccctgcaaatgttgcaatgcacttgagaacagagagtcctcctcctggtcttggat

SEQ ID NO: 131950 - DNA, 277 bp, Arabidopsis thaliana columbia
  unsure (1)..(277): unsure at all n locations
ttttttttttttttttttgttgttcgattaaaaccttctcaagatatagcctcctcaaagaccagtatcgatttgcagccaaggttgaaaaaagaaaaaaaagaccacaattttcttgttttactgacaagttttcatggtcgaacatccatgactcaagagcagccggaaatgttttagatgaaagatataaaccaagttgaaacaagaattgtcttactggaacgaaacatntttgaaaataacaattggtccctcaaagtttcaaccttgaaag

SEQ ID NO: 131951 - DNA, 386 bp, Arabidopsis thaliana columbia
ttttttttttttttttttgaggacgaggtaaacttttactcagtaaaacaccacaatcaaatttacagttacattaagagaaaaaagaagaaaacaataagagatatactaccaaacaaaatatattgtgttgactagtgcagtaacttgtgtggtattaagctcgaaggagacgcttctcgcatgttagaatcctgtaacttgcgtgaggaccctcggatgtgtcacgcagagaagtatgccaacccatggcctttgtgatttcttgaatttcatccataacatcaattgaatccctaatgtatgctcttccaccgggtcttaatatccggtccatctctaacaatatggttgacatctcacatctttttctctcgatcgagaag

SEQ ID NO: 131952 - DNA, 321 bp, Arabidopsis thaliana columbia
acggacgtggccaaaacatataaagatcggcgtagtcactcatagggacatctctatccggatagaggatagtctagatcgattcatagatggattttttcatctagataggtatcccgtggatagagagaaagatagggatccatctagatcttgattcactatttccatttttttttacttagtcttattaattgggtggggttcggggagcatgcccggcataatcaaggccgtcgcccttcttcgacggggatgggcggataaattcgggttcctagtccgggtgggtggtccagttgaagtcggaaagtccgctag

SEQ ID NO: 131953 - DNA, 361 bp, Arabidopsis thaliana columbia
cactgcagccttcttgccgtacccggcttgagtttaccaacacagaagacttactggaggagaatggatgttgtaacgaggaggatgattcgtctgaagtgattcaaatggcagctgagtcattagtccacatatcggagatatcgtatcaaaaccaagacttgcaatcaaagcttgtgttaagaaccaacagctcatctgaagatcaagattttccagataaaccggagatgggtaaagcgaaaccgggatgttcctacgattcatatgagcgacacacgttaggaataagcgaaaccaacactgaagaagacttctgtgtgtcatcaatggctctagatgaacttaataacatcacaag

SEQ ID NO: 131954 - DNA, 212 bp, Arabidopsis thaliana columbia
  unsure (1)..(212): unsure at all n locations
agagaataataatgatgattgatacttgcgttgagaacatctacagaatttattgataattacaggaggtgatatggttatgattgttttcactctnctaccggnagctcattctctgtccaagcgacgtttcctccagcaatgtctgtgatcgccgtgaagccctgtacatgtggcgacattaaacccgcttgtcctaaaccggataacgg

SEQ ID NO: 131955 - DNA, 346 bp, Arabidopsis thaliana columbia
  unsure (1)..(346): unsure at all n locations
tggttctaagaagcgacggagaaggaatctgccggtgtgtattaaggtttgtgacagcaaaggagccatcttgggaantagaaagtagagagagatagagatagatgcaatctgaaggttgtnctgatgatgactgtcgactgaggaagacgatgctggtgaaacgggtaccaactgagatccgtatttntaactcggactagatccgacccgtagaatgcaaatgcaataaccaaaaaaaccataattatttaaaatagcggttctcgatccgttccgacccgaattaaaactgtaccgattggtcgattattaattgaaaccagtcccgataaaccggggaaat

SEQ ID NO: 131956 - DNA, 287 bp, Arabidopsis thaliana columbia
  unsure (1)..(287): unsure at all n locations
gcctacgttacaggcaatggtaccaagaataactactggaaaaatatataaaaggtcgttgggccatgcgggttccccgtaataattgtgacccatacctttagctaatttagctcgtaatacaggntcattcaaatctggttttttggtnattgggataggtgaattcttatggntccatcccccgagggaaccgtgcatgataatttnttatcatccggctcgagcaagaattaaccaaactaaatggnatacatacanaaaatataatttaatatgtaaaagtt

SEQ ID NO: 131957 - DNA, 418 bp, Arabidopsis thaliana columbia
  unsure (1)..(418): unsure at all n locations
aaccatcaattccccaaagaacaatgagaatcaatgtggtatgatactggtgctaccataccaaagaaaccaaatttgattaagctaagcatagtcacagtgtgtccaaactacacantcaaccatttgaaatcagagagaattttgagaaagatattancccattaacagattagngaatacaggaactaccaaagaccctacattggttaagctataaacatgatcagggtggcaacaactacacatttcaaccatttgaaatcagagagaattttgataatggtttaacccatttacagatttgagaaaacccacaagttttttgctattcatcaactcatataggaccaaaggtgantcctttacatgggtaacncgaattcgaacaagttagcaatttgacatcngggacccg

SEQ ID NO: 131958 - DNA, 102 bp, Arabidopsis thaliana columbia
  unsure (1)..(102): unsure at all n locations
tctatgactctctaccgctactatggttgtctctccggctcaggacactatggncgctcctttcaccggacttaagtcctccgctgtcttcccagtcacccg

SEQ ID NO: 131959 - DNA, 293 bp, Arabidopsis thaliana columbia
  unsure (1)..(293): unsure at all n locations
gagcaccaccaaaagaaacgggtcggacccggatccggatccggntcttgatactaacccaattnctatatctcatgctccaagatcatacgctaggcctcaaactacttctccggggaaggcaaggtatagagaatgccaaaagaatcacgcggcgagctccggtggacacgttgtcgacggttgcggcgagtttatgtcttccggggaagaaggcacggtggagtctctnctttgtgcagcttgtgattnncaccggagctttcataganaagngatcggatggtttgttt

SEQ ID NO: 131960 - DNA, 386 bp, Arabidopsis thaliana columbia
  unsure (1)..(386): unsure at all n locations
gagaccgtttgggaggtatccaaaggaaggaatgaatagagaagaggttttaggagagccattgaagagatgggagaaaggaatgttgattaagcctcatatgcatgataatcgtcaggttaatttgggtagagatggatttacacataatatgttggaattgatacattcgcattggaagagacgacgtgtttgtaaagttcgatgtaaaggagttcctactgtggatatgaataacgtgtgtcgtgttcttgaggaaaaagaccaggaggagagatcattccataggagttggaggtgttggtgtaccttttcaaggggtagggaatttaccaattaccctacaagtnccccagtacccnttgatgttngttgggaaaccagca

SEQ ID NO: 131961 - DNA, 383 bp, Arabidopsis thaliana columbia
ttttatgaaaaaaacaatttaaagaacaactaaaacagtcatctaacaaatacaacagagatgtagaaaatcttcctacaaatgttcccaaactaaacaaacagaccaaacccccgtaccaacaaaaccagacaataacaacaagtagaaaaagacggaaatacccttaaaagccataaaatatttcacatgagggatttcaaagacctttcctttacgggcttccttcctttcttcatcgtcttcttcatcattatcatcttctcattctttttcttcctcccatgatcacttccttgatcttggttccattacggcataatcctcatccacaaaatcaaactgggtgggaactcacatccacctccaaacggcgccgtttt

SEQ ID NO: 131962 - DNA, 322 bp, Arabidopsis thaliana columbia
ctagagagcatcttcttatatcaactaaactttgtattcatttccaagtatcactctaaatcatctttttcgaattcgcctcccaagatatgtcgacagagtcgtacgaagacgccattaaaagactcggagagcttctcagtaagaaatcggatctcgggaacgtggcagccgcaaagatcaagaagttaacggatgagttagaggaacttgattccaacaagttagatgccgtaggacggatcaaatcccgggtttctccatttcaaggctaattaattatgaggagggatcctactttgttccaattcacttgccaagg

SEQ ID NO: 131963 - DNA, 249 bp, Arabidopsis thaliana columbia
  unsure (1)..(249): unsure at all n locations
tttncattgcgaaannataatnttggnggattagtgaaaaaaacagcngatattacacattgtgcggngtattatcgnactacaagcaaaaaacttcaaaaggggtatttttggagttggatgtngtctgtcaattctnggcccgtaatttctttgggggcttatcgagtggcgntgatttaagtaaaaaaagccccgcagctcggtctcgcaangtccccccgcacttcaggccccgtgcttaagcgc

SEQ ID NO: 131964 - DNA, 259 bp, Arabidopsis thaliana columbia
  unsure (1)..(259): unsure at all n locations
tttaaaatgtgcagtagatatcttaaagagggaagctcctaatagcaaatcacacggtgggtttaagactaaccacaaaagacancatacataaacttctagaaaacaacaacatttagngataatgaagcaaagtttcacctatgcttcanatttgatggtagcacttgctttttngcgcantgcggangaagaagcnttactctcaagaagccattcccttgcgcaaatcagagcctccactgtttcgggctcattg

SEQ ID NO: 131965 - DNA, 325 bp, Arabidopsis thaliana columbia
  unsure (1)..(325): unsure at all n locations
atcgattgccagataagaaaagctgcgaacgggtggctcacaaccgtctccggcaccggaggagaaggcataatcgccggcgattgcttttnccccttttgtgattaaggttttattaaattaatttgaaatgagtttcgtgtcagagcttgagcggggccgtgaagtcaagtgactgagccaacgaagacgaagaagaaggtaagcgaaagagagacaggttagggctagtgagccgcgttttgttcacgctatctttaacaaggcttgtgtaagcccattgggccgagaattcattattttgtcatttttagcgttgcaactt

SEQ ID NO: 131966 - DNA, 392 bp, Arabidopsis thaliana columbia
  unsure (1)..(392): unsure at all n locations
tttgcctccttcacaaactgtgttttcaactggacagcagggaattacttcaatggctggttcgggtgcactaatgggatctgcacaaacgggacaaagcccggntcctaataatgcctttngtcctcaaacaacgtcaaatgtcgcttcaaaccttggtgtttcacaaccaatgcaagggatgaaccaaggaagtcattctggagcaatgatgcaaggtggaatttccatganccaaaacatgatgagtggtcttggtcaaggaaatgtctcctctggaacaggtggaatgatgcctactccaggngttggccaacaagcgcaatcaggaatacaacaacttggtggcagtaacagctcagctcctaatatgcggctttcacaggcatcat

SEQ ID NO: 131967 - DNA, 279 bp, Arabidopsis thaliana columbia
  unsure (1)..(279): unsure at all n locations
ttttaaaagaaatcatccacttttttcctatttatcttaagaaaatgacaaaatagtttggngccgtagctaaatggtcagacccatacagaataggacatgccattttnaggctcaaaagaacagaaaggacaactaaacagagtctaaaaccatggcgacgatcgtnttgaccaaagaggaaagaaagaatgttaagttatgataaatctanttaattngcactgaggcngatattttggtttatcccatgaggccagctcccgggcatntttaggc

SEQ ID NO: 131968 - DNA, 428 bp, Arabidopsis thaliana columbia
  unsure (1)..(428): unsure at all n locations
tttanagagggcttcaataaatctnattttgtaaaattacaaagaccaaaaaagtcaagacaaagtggtgagcccccaccaaaaaaacgaaacgtttcgaattatgcttaagcttaagctggtcctactcatacggaccacgtagctctaaccatttggggaccacacccaacctggctgcctcggaagctatgcgtaaggtgggagccgtgtggcccctctcctcctccctccactctctttttggtgcgtgttgacccacttctgcctaaaaatcgaggcccacttcttaacacgtgcacttcttcatggtgcacacgtgctttttttccgatcactaatacggcgccgtttcctttttttttcttcagtggttcggtggaccgtgctgttgtgggggctcatgaactgggggaggtcttgttttc

SEQ ID NO: 131969 - DNA, 271 bp, Arabidopsis thaliana columbia
gtaattccagttttccaacgcgcacaaaaaaccgggcactaggcccggttcttcgttacagactgacgtcttactcagcggatacagcttcaccgccaactggacgatcgatcagctcaacgtacgccatagggcgttgtcaccagcgcggaaaccgcacttgaggatgcgcaggtagccaccctcacgggtagcgtaacgcttgcccaggtcgttgaagagcttaccaacgatagctttcgaacgagtacggtcgaaagccagacggcgg

SEQ ID NO: 131970 - DNA, 265 bp, Arabidopsis thaliana columbia
gaaaacacatacagggcagatggttcttttgtcgatgctaaagccaaataagtagctgaggtctatgggaagagcatagacgagagaatttctttaatggaagaggatggtgtagcaaattcagataattccaatcagtagtcaactcagcgggaactcaacattgacgaaatgattgacatctttctcaagtgtactgaaacagatgataaaggaaactattttggcatcagatctcttgtggtgacccttaacaaaggggaag

SEQ ID NO: 131971 - DNA, 423 bp, Arabidopsis thaliana columbia
  unsure (1)..(423): unsure at all n locations
tttacatttagattagagtttatatatggttaatcatattgagtacaagtataaatatgcatagatacgcaatgtatntatgcatatnacataagtccaatagatgtagtaagaatcaatcaaagcaaatataaatctgtnccatcatcatcatctacacttgattagtgttcgtgtgtacgtatatatatatatntatatatccntttntatgtctccnctttcagctcacttccatagatcaatctgacaactcgaagatgtagaagcagtatattcttctcccatgtctgaagcccttttccggatctttttcttcatcaacttggtactcagcattgcttggtgtccttggcattattctgtatagatgcagaagctgtgggcagcttctcgttggcttagctgagaggaaccaatttt

SEQ ID NO: 131972 - DNA, 369 bp, Arabidopsis thaliana columbia
cggcacgaggagagagtttgcgaagtttctttttcacggggttcgttctttacacagagttgctgcaaatctgttttcgttttctgaatagtcgctacaaagttttctctttcacggggtttgttaatatcctcttagtcgctacaaatctgctctcttttttcctgatttctgcgttatcctctgaacaatccaatggactcttttgttaccgtagagaataaacctctcccaaccgacatggaatttacgatggaagaagcaacgaagattgtagagaggaaactttcggagaaagattacgttggtgcgaaggaatttcattaacaacgcttttaatttgtttccaagtcttgatgctcgttggga

SEQ ID NO: 131973 - DNA, 288 bp, Arabidopsis thaliana columbia
  unsure (1)..(288): unsure at all n locations
tttttgatagagttacacactacattgataatcaacttgaatgatgttacaagacacactcctacacattgataaacataatcctaaagaaacactggaaggtataaaagcaggncaatgcaaatgaaacttctaaatgtcatataagtcttacttcttagctcacatatgtcctcgccttcttaataatcttctctgcaggngcaaccgtttcttgtgactcaaatcctcttttcaacttttgatttgctgcactttccacaattaggccttgcctttgttgatgga

SEQ ID NO: 131974 - DNA, 322 bp, Arabidopsis thaliana columbia
  unsure (1)..(322): unsure at all n locations
cggcacgagacttcaaaaccaagagtaaatgttatagaattgcataaacgaataaaaaaccttcctaaagctttttttacaccaactttactactaagtaaccagaagaaaagatttaaggccgaggtgatttaagcacgggtcctagaccaaaccgatgatggttcctatcagtcagtccaaaggcaaaccaagctcacagattccgcagacggngtttacatcctgaacgtcccattgtaaccagggntccaattagtcgaaccaacaagtctctcattttgaagtctgtttcgagtttgggtctcgttactcatcaacc

SEQ ID NO: 131975 - DNA, 354 bp, Arabidopsis thaliana columbia
ccgtccaaaagttgttttgaataatgtacatagtgccgcgaaaaattctcctccaaatgacagcaacagtcactctgttactcttcctgctggagccatgtggggaatgcattcttcggtacccgatacaacgtcttctagggaacccttaaggggcaaatctgctacaagtttcatctgcggttgcaatcaatcctacacagatctcttctcgtagtgatgaattaaggaagccagcattagaggctgcaggtggaaatgttttgaaaccacaaagcctattgggtggggaaactgattttcctgagctttcctcatctaataagacccagatcagtaatagtagggacgtag

SEQ ID NO: 131976 - DNA, 325 bp, Arabidopsis thaliana columbia
cctcaacaagcatcctcgtcgtgtttgtcattccaaaaagagcaccaatggtgattactggacttcattgggtgtattccataagggcatccgttgtgacggatgtggagttcttccaattactgggcctagatttaagtcgaaagttaaagaagactatgatctgtgcaccatctgctattcggtgatgggtaacgagggggattacacaagaatggataagcctgtatccgttcaacatctgcatccttttagaggaccgtttacccaatttcctaatccttggttgagccaccctgtgccacgagcaaccaatggaggtgca

SEQ ID NO: 131977 - DNA, 329 bp, Arabidopsis thaliana columbia
  unsure (1)..(329): unsure at all n locations
tttttgactttaacgagattaataaaatctaaaactctccctctcgcttcgagaagggatacaaatgacacgagagactactactactactagcgggtggtacttcaactcaataccacctctgcatcagtataacataaaaccttaccaataaaaatgaagaaagataagaaaaggttcccaaaagatgacatcatcaaggcctcgtgcaaaatcaagcactcgaagcaccacttctttttaggttaacctcaattgaaagaaaggnccaaattactatcatgcccctctctctaactgcttctactacaacacgtcaataccacacg

SEQ ID NO: 131978 - DNA, 290 bp, Arabidopsis thaliana columbia
  unsure (1)..(290): unsure at all n locations
tttttgaactctaatataactccagcatagattctctgttatgtgtctatcgtaatacaaaatccgtacatgttctatctcttgaaatgctcttactttcttttcaaaaataaaaaagggtgaaatacattcagcggttcagatcccaaaagtagcaaaatccccttggattcttcacaactcatccttagnaccaacagcatcatcacctcccatgagctcatcaagtgaggaattcatcttcctcaatcaactctcccatctttaccatccccactcctttgtcttca

SEQ ID NO: 131979 - DNA, 312 bp, Arabidopsis thaliana columbia
  unsure (1)..(312): unsure at all n locations
cagcctggaaacaacttaagcaaaaattgctgcaacggcttggtgttttgcaacaaaattatccttctaatttttggagaaacgcaagatttatagttaacacgggaagacaactcgcatcacacaaaaatggtaaagttcgatgtagcaaatcttggagaacttggaattcaccagagctcatctcagtgtcacctgtagctgtggnagctggtgaagaaacaagtttggttgtaagaggtaggagcttgncggaatgatggaatcagtattcgttgcacacatatgggtagctacatggcaatggaggta

SEQ ID NO: 131980 - DNA, 325 bp, Arabidopsis thaliana columbia
cggcacgagtgacaatttgatgatgatagatgtaataaacttgcaaatatttgcattatacattcagaaaacgagaagcagattgggtatgaattcaatggaggccaatgctatggaaatcctccgacgtttttttaatgatatgataaacaatggatagagtcatgttccgttcccaggtttctgaaagtgctttcagtccaaagtcctggcgttgagaactcgatggtgcaaaaaaagagaagcatgtatttatcatttctgaaagcataaaaccaacgtataaagtcaaaaaggtttggactggtgatccttgctctccaag

SEQ ID NO: 131981 - DNA, 300 bp, Arabidopsis thaliana columbia
atgagagccatatttgcaaccatcatcgcagtatccataaactaaactaagttccgatgatgcactgttaaaagaagatcttctttaccgatcacttttgaaattgtttgtaatgctacatgtgaactttatctttcccgaaggcagaagtggtcctgcatacacatgatgcatataacaaccaaggcgacaatgagaatgatttttcgtcatgatggttactagtatccaaagaaccatctaactccgtcactttggaagatgaggggtcatgagattttgtaccagcagcacaacagt

SEQ ID NO: 131982 - DNA, 470 bp, Arabidopsis thaliana columbia
acttaacattaaattttcctaagaacaaagatttgcattacaaaaaagaaaaaaaaaaaaacaagaaacggagaaaggaaaagtttgatattttcaagagtttacacactaatctgcttatcgaagatccaactaaagcaaacctcatgggtcttcttaagcttcttagctctctcgtctgcacgctcttgaaggcgtctaatcctctgagctaacccacacacaaactcctgtgcacgttggccctcacccgtcaatccttctagcttctccaatctccaccgtccaaccaaaaactccaagatgtcagcgtaatcatccgccgtgtaaacctctagccgctgagccacggcggaggaaatgttcggaatagcatcgggtctcgaccgtctgtcattagatgagccggcattgtgatcttcttccgcatcatgtcggccacggctgagactgcaccgttcagggtcgat

SEQ ID NO: 131983 - DNA, 413 bp, Arabidopsis thaliana columbia
  unsure (1)..(413): unsure at all n locations
agccaaatgtgggctatctgttcaagattctttagtcctattggtatggttcctgttattgcattaacaggttttggactcttcaacagaggattcccagtggtgggtaattgtgttgagataggactccccatgcttattctctttgtcatcttctctcagtatctgaagaactttcagttcaggcaattcccagtagtggagagatttgctcttattatagcgcttatcatcgtgtgggctttacgcgcatgtcttgaccgccagtggggcttacaaacaccgaccacaccagacacaattaaactgcagaacggatatgtctaacctcatttcatctgctcccttgggatcaagattcctttatncacttcaatggggagcaccttagcttttgatgctgggtcaatgct

SEQ ID NO: 131984 - DNA, 404 bp, Arabidopsis thaliana columbia
  unsure (1)..(404): unsure at all n locations
ggcatgcttagaaatgtacaactccaatggtggtggtggactcccatgagtcctagaatctccttctctaacgatttcgttgagattaggccagagacgaccaagacgacgagatcaagccctctctctaaacaagagggttcttcttcttctttttcagataatttcgagttctctgtctcaaactacacaatgatgccagctgatgaacttttctctaaaggaaagcttttgcctttcaaggaaaccaattcaagtccagagaactttaagagaagagcttctcgttgaaggaagacgaagaagtaaggtccacgtgaatgcttaccaaccatcttctctctncaagccaccaatcttntcattcatcttcttactttcttcctttcttccttcccaaggga

SEQ ID NO: 131985 - DNA, 342 bp, Arabidopsis thaliana columbia
  unsure (1)..(342): unsure at all n locations
ctctttcatcatcagtagatatgtcacttagcccgcgagttcagtccttaaaaccttccnagactatggttataaccgatcttgcagccactcttgttcaatccggtgttccggttattagactagctgcgggngaacccgatttcgacactcccaaagtcgtagctgaggntgggatcaacgcgattcgagaaggttttactaggtatacgttaaatgcaggtattacagactcagagaagcaatatgtcgaaagctaaaagaggagaatggattgtcttatgcgcctaaatcagatcttggttagtaatggagctaaacaaagtctcttaacaagcagtg

SEQ ID NO: 131986 - DNA, 403 bp, Arabidopsis thaliana columbia
  unsure (1)..(403): unsure at all n locations
caagacaagattggaatcttcattaatgtgaacatgttgtgagactttcaaatatttgacttgacccattggattatgtaataaaaaatatttagttattaatcatttacaggaagatcaaatcaaatctcagacaacaaatcaaatgacgatgggaatgatgatttggtcgggtaagaaggcatcattgctataccacatttcccaaatggatcatcgatgttacgttggagcttaacgtaaccgctatctccccaattcaacccccatgaattgcggaatgatccaataatcttcaccacttgtggntccatatccaaccactactacaccatggtccaaaggtattccacatgttcctgttcattcacaccggggtttgttaaagcttgggaaaggtttg

SEQ ID NO: 131987 - DNA, 267 bp, Arabidopsis thaliana columbia
  unsure (1)..(267): unsure at all n locations
gcctgcttttttacgttanagcaataccgactcgcttccttttgtgtcccttgtaatgcnnggagttcaagctcttggttatagcttgccgttgatcaccggagcagaggctctctttaaaagaaaagcagcttcagcaacaacatatgaaacaccttcttatgatctacagagaagtcaggggttcaatgtgattgattacactgtgaagctcctcgtgatggtctgctttctacttactctaaggctttgtcagaaagtgtggaa

SEQ ID NO: 131988 - DNA, 368 bp, Arabidopsis thaliana columbia
  unsure (1)..(368): unsure at all n locations
gcgtcttcctccaccttctaataagtggctctggctctactccaccgttgactcactccaannaacaagtggcagccactcgttggcttcccgccaccgcaacctggtacggaagtnccgagggagacggcagcagcggaggagcttgtggttacggatcgttggtggacgtgaagccgtttaaggctagagtcggagcggtgagtccgattctgttcaaaggtggtgaaggctgcggtgcatgctacaaggtcaggtgtctcgacaagaccatttgctctaagagagcagtcaccattattgccaccgnccagtcaccgtcaggaccatctgctaaagcaaaacacactcatttggacctcagtggc

SEQ ID NO: 131989 - DNA, 412 bp, Arabidopsis thaliana columbia
  unsure (1)..(412): unsure at all n locations
aaaaaaggaatgagattgcatattacattattacatcttttgtaaattcttatatagtantgtcccacaaaaaacattatagatgatacacacatccctatggagaaggaaaaaaaatgaaaagggacaacatagaatgttagtagtcacacacacaatgaaaagctcttaatcccctaactttggagatggctcactcattgtcttctctgtgttcctctctcccacaacaaaatttttttgaagagaggctaattagagaacaggggagaagttgaggcgagaggtgtaagtagctttnggaacccagttactggggaatgacgtcggtggcggagagtgttcttattgttgggtcaaagttgtgagcttcacggagaaatggtcccttgagtggtccttcgacgatgca

SEQ ID NO: 131990 - DNA, 348 bp, Arabidopsis thaliana columbia
  unsure (1)..(348): unsure at all n locations
gaaaacagaaanttcactcattcatcgcatttttagttttctaacgatacatcagacctctagctgctaattaccatgcgacaactagaacatatgacaaatnccaacaagtgtggacaactgtcaccgaagtaaaggaaataactgtgaccttccttgtatggagattgggacgtaaaataagaattaagaaggatgaaacaagatgcagaggcaaaggagccagcaaggangatgaaccatacctatgtatagatatgttgcactnttccacgcccaaagcgactctaaccatgtccaaaactctcctccaagactcaaaccctacgaggccttctccaangcaac

SEQ ID NO: 131991 - DNA, 411 bp, Arabidopsis thaliana columbia
  unsure (1)..(411): unsure at all n locations
ctttntcttcttgttgcccctcttccaatggtcgcagcctctttatacatcgatggctgtaaatctcttaccaattccactcataacccaaccgaaaacttcaagtcttggaaatggctagatgcagcgaaacaggtctttactttgcacttgttgggtttcattgtcacgctgctaccttatttcatctgtcaagtaccgggccaacattctccaacaaaccgctccatcatgtggggcactacctcttcgtcgcttctccttataacctttgtcacaatgcctggttgctctccgttctcctctcgactccatggaaccaactggggccatcttgaaattcagtgaccatctcagctgccttcatcggncttatgcctcaatggtccataaatcaatttttnccaccgn

SEQ ID NO: 131992 - DNA, 286 bp, Arabidopsis thaliana columbia
  unsure (1)..(286): unsure at all n locations
aaattttcatgtctttattaccaaacaggtagagaaaactgcaaatttaggaattagaaacataaaaccataaaaagggaaatcataaatcttcaataaccaaaagtattggtaataggtttctcaacacgaaatcaatcggatttggagagatgtgtgagcaagaaatctctgtagttcccttttatcttctcttggattctttgagccaangtctcaccataaaaggttatttgtactcttcctttgatctcattcantctcattcacttatgatctgctcttg

SEQ ID NO: 131993 - DNA, 284 bp, Arabidopsis thaliana columbia
  unsure (1)..(284): unsure at all n locations
gcttctcctctcataacaatggcaagacaaatcaacatagagagtagtgtttctcaagtnacctttatctcctccgccatccccgccgtatcttcctcctcctccatcaccgcttccgcctcattgtcctcttcacctactacatcttcctcttcttcgtcatcaacaaattctaacttcattgaggaagacaactctaaaagaaaagcatctcgaagatcattgtcatcgttagtctccgttgaagacgantgatgatcaaaacggtngagggtgggaaacgg

SEQ ID NO: 131994 - DNA, 296 bp, Arabidopsis thaliana columbia
  unsure (1)..(296): unsure at all n locations
gcttctcctcccggcgatgttttctctctccgntccgattcttacttgtccaaaaaaacaanaaactcccgccggtgattacctcctttctcccgccggcatggactggctcaaatcaagtaccaaactcgagaacgcgctcgntcgtcccgataaccgtgtagctcacgcgcttagaaaagctcaatctcgcggtcaatctctcaagagcttcatcttcgccgtggggtctccagattccaggtaaggatcatcacagcgccgtngttctacttcgcgacggaagaaaccgattc

SEQ ID NO: 131995 - DNA, 183 bp, Arabidopsis thaliana columbia
  unsure (1)..(183): unsure at all n locations
ggtaaacttctaagaaacaaaagatattataagccaactttatcccccaccaatcaacaannccaaaanaaaaatgtaagtaacaaaagaaagaaatattgatgtagattttgtatgtatccttgtcaaatgtaaataaaatgtacaccttgctgctgaatcagaaaccaactaaaagncatt

SEQ ID NO: 131996 - DNA, 335 bp, Arabidopsis thaliana columbia
  unsure (1)..(335): unsure at all n locations
tgagttttctacatctgaacataaaagtgtcgagccaccaaagagataaaacaacaagaagaagcagatactnaaccaaaaattcgtagttctaaatctgtagagcttcgttacgaatctacattccatttcaacaacaacaaatcactaaaatcagtacggantaccaaccacaattgacgagatctgaatcaaatccagctcttagactctccctgagacagctgcagcagctgagggtngcaggaacctccaagggaatgaggagtaattccaggcattcgcnggcttcttgcttcggtcccaagaaggaggttcatcccgggaanccacaa

SEQ ID NO: 131997 - DNA, 296 bp, Arabidopsis thaliana columbia
  unsure (1)..(296): unsure at all n locations
gacatggatttgcatgaatcagaatcaagaacacatgttctgtccaccgatggtattgatnnttacatagacatggaagtcaatctctcttcttcttcttcttcttctacttcgtcctcaagcttcttcagcttccccgtcacttcctccccgccgcaaagcaggagagttcgagtttcaaatgtgttcctccgccgtagcttccggtgaatcaaccacatctccggctgatgagcttttctacaaaggtcaacttcttccgnttcatctccctcctcgtctcaaaatggtacaaa

SEQ ID NO: 131998 - DNA, 267 bp, Arabidopsis thaliana columbia
  unsure (1)..(267): unsure at all n locations
cttttggaatggaatcagagagagagagcgtcacagatctgagaatctcaatctttatcnaggtcaccacaagtagaaacagaggttcttgaagaacagagctcagattcagtcacattactcttcctagtagtaaacgactgcttacaatgctcgatcgctccttcaatggagttatcactcgcattgctgcttctcatcagtgtctgcagatccaacgacccgtttgatccaaaactgaacgaagaagacaacgangacgcagag

SEQ ID NO: 131999 - DNA, 315 bp, Arabidopsis thaliana columbia
  unsure (1)..(315): unsure at all n locations
tttttttttcaaatctttactctttatttnattatactcacaaacgaatttnaagtaaaaanaatggcacaaacaaatcttataaaagttttctgtcgtcaggatcactctcaatctcaatctcaggccgacgttgctgccggcaatttctccgcctttcacgcgcctccgtaccaccaaacttcaaccttcccgtttccttaaacctatctttctcagccggaacaatcacacattccggtagaggctcaggatacctaagtgtatcgtaacagtaagaatagtacatgaaacgttgtcgaaatcttcgcatgg

SEQ ID NO: 132000 - DNA, 451 bp, Arabidopsis thaliana columbia
  unsure (1)..(451): unsure at all n locations
aggtntcttattacaatctntcagctagtgcgtaaactctaaaaaanagaagttgacatgagtttagtgcgagtctntggtntanttctgatcgcatgtggttttgtagcaaaattttgaagaacatctatgaagtaaaatttagtcagttggcgccgtcgnctacgggaatcgaacggacgagagttagatttnaggttatggtctccggtgattgttgctggaggtgaatcgatggnncgtggnnnntgttgtggatcgggatttcaccggagatctgccggatgagtgtttagctcatgtgtttcagtttcttggagctggagatcggaagcnatgctctcttgtttgtaaacggtggttgctcgtcgacggtcagagtcgtcatcggttatctctagatgctaaggatgaggatctcctctttccttacctctatgttcaatcgatt

SEQ ID NO: 132001 - DNA, 315 bp, Arabidopsis thaliana columbia
ctcattcaaggatctggagctatactctctcctggtaacgagagagaactgaaacgggagcgaaggaaacagtctaatagagaatctgctagaaggtcaagattaaggaaacaggccgagacagaagaacttgctaggaaagtggaagccttgacagccgaaaacatggcattaagatctgaactaaaccaacttaatgagaaatctgataaactaagaggagcaaatgcaaccttgttggacaaactgaaatgctcggaacccgaaaagagagtccccgcaaatatgttgtctagagttaagaactcaggagct

SEQ ID NO: 132002 - DNA, 407 bp, Arabidopsis thaliana columbia
ggagaggtggatagataggacgactagttgctcgatcaggaccttagctttattgcgagcctagaagtctctcttttttcggaacagcctttaagtaaaatccaacctaatatcattcagagtaaaaggactacggaaccaaagagaaccacacttgcttcgctaggaatgaagcagcacaccaatgggcaaagggtatgggcgacctatctgctgcgctagagaaagaaagaaagtgcttcgggctgctttgctgcgctagaggaaggagactgataaggagaggagtgatccaagctcaactcgatactccactcatctttctcgattctattgacataatttggtttcttctatattagtgaaatcattacatgacagtgggatcttgcttggtacttgtccga

SEQ ID NO: 132003 - DNA, 410 bp, Arabidopsis thaliana columbia
  unsure (1)..(410): unsure at all n locations
aaattatgagtcgagtacagcttggaccttcaacactagtcgacattcaactgncatttaatcttggacgaattcaattccaactaattcggtagaatctagaatagtgagatggaagacccctctccttatcagtttcctatggaccttcgactagatcacacgagctactcccaccttgttcaactgtgtgatttgtcgttttccgagattcggtttcttctttttncttgatccgaggtaaggtgctttttttgatcgatcaacaggtaatatagaaggatgaggctgtgatttacctagtgaatcaacaagatcgaaacacaccaatcgatcaaatcatttttggaaaaacttgtacatcgtctgatgtaggccttttgcttcgcgatattcaagttttggggttt

SEQ ID NO: 132004 - DNA, 259 bp, Arabidopsis thaliana columbia
  unsure (1)..(259): unsure at all n locations
aaaacattttaatgaatatttgtttttcttcttctcaaataaacaaatcccgggaaaaagantaaaacaacagattgaatccaaaaagaaacaaaaaaaaaaagacaagtcagagaaatccaacancccccaaataggaggacctgtggaaacgtaaggaggaggaggattcatcatctctggtttgatatcancaaacccctggaaattncaccaaaccctcagntttaccattttcaatgctgaggcatcatcatca

SEQ ID NO: 132005 - DNA, 406 bp, Arabidopsis thaliana columbia
  unsure (1)..(406): unsure at all n locations
ctttaaacattttaactttccattctattttgcacaaacaaaaacacataacttaatggaatgtatctacttttgaagaaattaagatcccatcggcgtaataacccctctaaaacgtttcctgangtgctactacgtccaaccacagtcactgttgcctttgtacgtgctgacaaatcaatgacatcatttttgttttgactcgttttaggcgangaccaggaacaaaaccatttacaggtcccggcagagaatctgatgttttagatggaacactggctacagaagataatcgtgcatcatggttacatggtgttggaccagaagcagaatctgtatcagnaaagtgccagttctggtttctgtagtaggaaggcagcagcatttaccttcactggtctctgta

SEQ ID NO: 132006 - DNA, 405 bp, Arabidopsis thaliana columbia
  unsure (1)..(405): unsure at all n locations
cattcatttggaaatcaacaagggtgtcgaaattgatcacaatacaatcaatctgcacttangttttagtttgttacaatgtctatggtgagtttcagaacaaggagctttataataagacgttttctgatgaggaaaagaggaaacatttcttgaggactaggattcagttcttggagaggagtataaggaagctagattttagctctggtggggtttctactattttcnaggttaatgatatgaagaattctccggggttagggaagaaagagcttagatcagctactaagcaagctgttgagttgcttcaggacaattaccctgagtttgtcttcnaacaggcttttatccaatgttccttggtggtaccttgtgttttatactgtgaattgggcccgttca

SEQ ID NO: 132007 - DNA, 325 bp, Arabidopsis thaliana columbia
  unsure (1)..(325): unsure at all n locations
tttaaaaaatttcaacattattgggaactttgagatgtctatacaattcacaaaactcacatttttggaagaaactacaaaaagnaagagagacaaagatctcagctttctttcttcccatctctaaacacagacatttgatacaaacataacttacaatcaaacttataggtaaagaaattgatgtgtacctttggaagcataagctaccatggttgtagcaagagaagcagtattcgtttttctccaaaagtatagtattcacaagacctctatcgatgatgcaacctctttacaagggtctgtcggtatagggtctttttcc

SEQ ID NO: 132008 - DNA, 291 bp, Arabidopsis thaliana columbia
  unsure (1)..(291): unsure at all n locations
gaaacttctctctgaatctcagtgagttctcataaaatgagagggatggtgagttttgccgtttgggctctctttgctgctttactctcacagcagctctttgcttctgttgcttccgtaaggtttgaggatgccaaaacatactacttatctcctccctctggtcacatgggactcctccatcacacaggntccttcttctaaccgtgggagtgcaccttangggccctttttctttaaaatccntntcaaccntttaacnncagtcaacaanacttccaaattcttttc

SEQ ID NO: 132009 - DNA, 408 bp, Arabidopsis thaliana columbia
  unsure (1)..(408): unsure at all n locations
cttcactgttaaccattttctgttgcaatatccttgtaaagcttttatttaaacacatggagatttaacatagtattagtttctgtaagaagttcttctgaaaataactaaacccaaaagnaatnaaggttgtttataaactaatcaaagtaatcatcatcatcatcataataacctttacctcaaaaagattgaacctttatacttcatttctnaaccttcctttgctgcagttgctgcttctnaggtccaggaacctctaatctcccaaccgaacacccacatttagcccgaaaaacaagcacggctcgcccattaggtggagccatcttcttcaactccgcctctaaactcacggtgatgatcacggagggcaacttcaaacaaaccctttcttacttaacactc

SEQ ID NO: 132010 - DNA, 405 bp, Arabidopsis thaliana columbia
  unsure (1)..(405): unsure at all n locations
gccaatctcaatcatggctcactcaccagatttcaatcatcattcaaaacaatcaagaaccagcagcagaacagaaagtcatcatcgtcaagctgttctnnaaattnntctgtttgctnngacggatctagatcagctgctatcgatgttgtgatcttaatcgctgtgatcacatcctccgggttttnaatcttcccttacatcaaattcatcactatcaaatctgttgaaatcttctctgagctctcttgtttagtgaaagaagagattttgcgtaaccctgatccaattgtctacggttnaatagctttnagtatctcgtgtactgcgttatctgcttgggatgattgttaatactactgtgtaggtcgtccatcggatgtggggaaaccggaactgtaaagg

SEQ ID NO: 132011 - DNA, 293 bp, Arabidopsis thaliana columbia
  unsure (1)..(293): unsure at all n locations
ttttgaaagaatcaaatttataaaactgttaagagaaaaagagataaacagtaactccaaatcattacataaacagttatgacatcacacaacacaaaccaaatcacttctncttgagtccaaaactcagctgccattgaggaactatcaaaatacttagacaaccaaaagatctttctctctttagagagatgctagctgctgaatatcataaggntgagcatcagaggcagcttctcgcttaaaagatcgtcttccaataacaatattcgcggnttcaccgggttgaaacg

SEQ ID NO: 132012 - DNA, 380 bp, Arabidopsis thaliana columbia
  unsure (1)..(380): unsure at all n locations
tttcctttcatcgtctattcatattgtattcaatattttcctgtgtaagttatattcaatggtctgatttagatactttgttcctaatgatcttgtagggtggagtcggctgttccatgaactgtagatgcgaaggatgcacaaatgtattcggcagaaaagatggttagtattcgtagctccattttccattactgtttataaccccagacccaaagtctttngatttaacgttactttaatctcagggtctttacttgtnatcatgggaaagcaaactagaggagaatcaggggacatatgagaaaaggatagcaaaaatccaacacaacgtcgaggtttcgaagaagtggagcagacccagttctgatcaaccttcg

SEQ ID NO: 132013 - DNA, 293 bp, Arabidopsis thaliana columbia
  unsure (1)..(293): unsure at all n locations
actcacgtgacantctatgtagcttagaaacaaaatacaaagcgcaatgtgatgtaattattcaaatacgccaatctcaataactcatttctaagttaaataatcaaacaaatttagcaaattgaaaattatgcagggcaactctaggcacaacaattatataaatgtcctgatatgtgttctgttcatcaaacaatatttaggacaacccttaccagcctgtagtcatggtcactaggtcccttctctaggacatncaaacaggccttttttagtttaaaaatacttattgg

SEQ ID NO: 132014 - DNA, 211 bp, Arabidopsis thaliana columbia
  unsure (1)..(211): unsure at all n locations
aacacatcgaaactcgtttctaactctcatactccttgagcttctncattnctatatacatcaacaagatggggcagatccgttgtntgattttaacccgaaaggtgaaaacttgttcagtctttaattggatagtccttgtnagtttacatttggagataaacattgagtctgaataatgtagactacatanctccaatagctcagctga

SEQ ID NO: 132015 - DNA, 350 bp, Arabidopsis thaliana columbia
  unsure (1)..(350): unsure at all n locations
ggttttnctgcataacaacatgtaaattagatgcactaaaatctgtctgtnttccgaccacactcaatgagtccacaatattaattaacggtgataatagtagttccatgaccagccattctgaattatcatcaaacgaggaaatgacatctgttacttctagaagatccgaggctgacaaatcatgtgagaaaaatgacagcactgaacagccaaatggaggggataatgttagccaagcttacatcaggaagaataaaggaaggttgaaaaatggtcgtgggaggactcaatgcccaggtnggagggcttggaaatccccaaggtttcccgcccaanaggtttcccaa

SEQ ID NO: 132016 - DNA, 404 bp, Arabidopsis thaliana columbia
  unsure (1)..(404): unsure at all n locations
gctacggtnagcggaagagatcagacaatgcaagaaaacaggttctagcattgggaacacngatcaaggctggtccttttggaactgtcaagagtctgaganctaatccaactattcttcctgatgaatctataaacccaagattggcaaagattctagaggagattgctgttgataaagaggtaattgtagctcttgcaaacgcaaatgtgaaagcaatgttggaggttcagattgctagcattaagagagtgggtataacaaactatctggttgttgctttggacgattacatagagaatttatgtaaagagaacgatgttgcgtattacaaggagagatccagacaaggacgtgggatactgttgggaaaactgggaggtaaccatgctgtctctgggatt

SEQ ID NO: 132017 - DNA, 402 bp, Arabidopsis thaliana columbia
  unsure (1)..(402): unsure at all n locations
caatagttntccttttgattatctctgttccgatttcgattctttggatgttcatgaaccanatcttgctgttgcttcatcaagatcctcaaatagcagagttagctggtgtgtactgtctctggctggtaccagctttattcggttactctgttctcgagtcgttggttcgatattttcagtcacaaagcttgatttatccaatggtcttgagctctctagctgctctgtctttccatgttcctctctgttggctaatggttcataaatttgattttggagccaaaggagcggctgcgtctatcggtatctcttactggctcaacgcggttttnctttgggtttatatgaaacgctctagtcgttgtgtcgaaacgcgggatttatatgtccaaggatgtt

SEQ ID NO: 132018 - DNA, 354 bp, Arabidopsis thaliana columbia
  unsure (1)..(354): unsure at all n locations
ccgaagaagccggagaactagtcgtggttcgagtgaccaaatgcttgaattatgggaagaggctgctgaaccagaatccagcataaagtttctgatcaacaataaaaactcaaagaagcctttgattccccgtcttcatcgcagaagcaggaatccctctgttgaatcacagtctgaggaaaatggttggagttgttgacaaactagggttatctagaagcactttgggacaatgcaaagatttctgggggagactttttgtctgattctcggaggattgggcaagcccttagaaatcagccctaagggtctttnaaaggcaagcctggggggttaaaccggggaagcccgggg

SEQ ID NO: 132019 - DNA, 417 bp, Arabidopsis thaliana columbia
  unsure (1)..(417): unsure at all n locations
cgaaacaatctttgtactgaaagaaaccatgtcatctatacaaagcagaaacagaattnnagaagaaaaaatttaaagttggcagttttcatgtctccaaagacatttgcaggtgtcagtttntttacagcttcttataaccggccgttctgttgttgtagacatggagaagactatcacaagcttgcctagaagatggtctctcttggggagaagtttttgtgcactgaagtcaattctcaagcacctgacaagctgcgtcttcctcaaatggcagaagtggcttaagctttggatctatgagtttatctctcgcagaacccgctacttcaagatgtgtttcaacccatctcaccatgtccatctctgcaccaaacactgagtcggttggcattttcccagtcacaatctccattc

SEQ ID NO: 132020 - DNA, 256 bp, Arabidopsis thaliana columbia
  unsure (1)..(256): unsure at all n locations
atcaaatttggttttnctgcactccctgaacttaaatcttcctctgaatcactcgcaccagaaggggtttccacctgatcaacttctatcttcccattcatgtctatgctttcagtggagctatgattctaatttgtctgcttttcttcctctgnttctttttccctttcagtatcaatgtttttcccggacccntncccattgtggttgactaagtcggcatcgatcatcggtcaaatnctnatgataggaaacc

SEQ ID NO: 132021 - DNA, 411 bp, Arabidopsis thaliana columbia
  unsure (1)..(411): unsure at all n locations
aaatacgtcaaagttttaaaccaataggaggaaaggntttacagaaccagagagaatnnntcgaaaatcaaaatcaaaccataaaccctaatggttnnnaaatgacacttttatccaaaccnntccttgacggtaacaccaaatttnccggcnacgatcaacgtagtcgccattcccagaaacatcccatgctccactactccaggggaagcccagtgaccagtgtnaggctctcttcggtggtgcctgcttctgtggtaggtgagaacaagccacgacagctcacacccatggacttagccatgaagctccactacgtccgagccgtctacttcttcaagggtgcacgtgacttcactgtcgccgacgtgaagaaacaccatgtttactcttacagtctctactccaatc

SEQ ID NO: 132022 - DNA, 418 bp, Arabidopsis thaliana columbia
  unsure (1)..(418): unsure at all n locations
gccttctcgcaccgaaatctcaagtgatttcagaccacaatggcctcattcgatgggcangggtttatgatggttgataattcttgggtccagaccaaagccattgatgttgaatcaacaaccgatatctctccttacctttccaagatccttgaagattccgtctggaatggaaaccggtccattgtctttgatgtgtattgggatgtcaaatcagttagcacaaagtccgaatggcgtctatgctcagtgaagtttagcactaaaaacttctgtctcttcctccgcctgccgaacccgttctgtgataatctcaaggatctttatcgcttctttgcttccaaatttgtcacatttgtcggtgtccagattcaaggaaggacctcgctttgcttaaaaggaaaaccacgggtattgt

SEQ ID NO: 132023 - DNA, 420 bp, Arabidopsis thaliana columbia
  unsure (1)..(420): unsure at all n locations
tatatttccaaactttcttacactctaatatcatatgaaagactataatgtactttcaanataaattacaatcaactgaaggttattgcacaaacacacacaaaaaaagaagcaatcaaaatcccccaaaagtttgtatttnttttttncttcaattaagcaatgagtcatgtctccaaactttctcatcaccaattctctccctagccttaattgcctctttgctccaattggtaaatccaataacaagaaataggattagagtttgtaatgttgatcctgtgactaaaccagcccaaagtcctttcccattgangtgaagatgaaaacacaatagaagtccaacaggaataccaatgacatnaataggaggttatgttcacataagctccaatttttngccaccctgttcctctcaca

SEQ ID NO: 132024 - DNA, 231 bp, Arabidopsis thaliana columbia
  unsure (1)..(231): unsure at all n locations
gaagaagacagagaactacggcactaaaggttataacaatgaggagttcaacaacgacaacaaagaagagttcaacaacaacaacaagaacgatgaaaaantcaacagcaagactttctccactccaagcctgagcgaggaccgaagagtcttttcaacaactacgagganattttcccgtggangacagtgaactacggnacttaaagggttattaacaatgnggggttt

SEQ ID NO: 132025 - DNA, 283 bp, Arabidopsis thaliana columbia
  unsure (1)..(283): unsure at all n locations
tttanataaactatctttctttcaccgaataatatatgcaaacgcaaacatcaaagttcaaaaacccatagaaaagcaaacccaccgattaactaaaaaaaaaaaaaaactcctttctctttttngtttttgttttcacttttaagtttttgcaatgntaacaacgatttagtttgactaaacaacgttaagtaatatanctnagtttgaaataaaagaaagtnacttttaagagtgtagtagtcttgagaggaaatcaaataacaatcttcatcaaggcttg

SEQ ID NO: 132026 - DNA, 210 bp, Arabidopsis thaliana columbia
  unsure (1)..(210): unsure at all n locations
caggggaaaaaccnctggnttctctttttttcccggcnaggaaggtggtggtaattggcggcaatggagatactaagancgaaatgggtggctataacancnagtatatggntacaatncncaacgggcgcttcctacaccttcggaatctattcccctgtcctaaaatcgantcantcgtacgancaatccaccctngataccgtctca

SEQ ID NO: 132027 - DNA, 331 bp, Arabidopsis thaliana columbia
  unsure (1)..(331): unsure at all n locations
gaaataactcccgagaatntcaagttcttnttgttttnttccatagctttntccttctcaatctgaccatatgcatacttaaaaatctggctttgggtatgtagttgtttaccctttggagcttgtggttcttcccaggtttactaccggttcctacattgaatccttcgttgttactcgggttctcctccattgatttcatcatcttggttaaattactcggttcttttttcttgtctttngactttcccgatgctttaactggtgtggcatcctttctagcagatttcaagcgagaaaatgtttgagatagtgtgcagacaatcccatc

SEQ ID NO: 132028 - DNA, 214 bp, Arabidopsis thaliana columbia
  unsure (1)..(214): unsure at all n locations
tttgaccataactgatgaatttattcatgtaagaaacaaacagatcagattaagtgaacccatgtncttcacacatgtncccacattgtttaacccgaggttcgcnctgtttgtaagcttctttgcaatatatatagaaaccctcaagaaccctaatagagcatctcaatccaattaagagttctgaaaaaaatggaaggtctcgattcagtct

SEQ ID NO: 132029 - DNA, 317 bp, Arabidopsis thaliana columbia
  unsure (1)..(317): unsure at all n locations
agtatccggtgaatggttacagtcatatgccgttcacngcgatgcttttagagccgatgaccacgacggcggaatctgaggttgagatcgcggaggaggaggaacgtagacgccgtcaccattagtaaaattaggcttttgatttagagtgttaaaattaggattttaaaagtttaggaggtaacagataaggataatttagtcaaatcatgttgtttagtttggtaatgttattttgccactaaacaactaataatattgtttgataatctnattatttggttttgggaacaaattgattaaaaaataatgccata

SEQ ID NO: 132030 - DNA, 234 bp, Arabidopsis thaliana columbia
  unsure (1)..(234): unsure at all n locations
aatcaatatngttttgctaaaactcaaaatgagagtgtttgtacgtattatacgctatatcttctacaataagatagttatgtacgtcagatatgaataaatatgcgatttttaatgaatacgcaaattaaatctctcgtgatatgctgatgtaaacaacaaaccacggaaaagtaaaaggaacaaaccatcttataatgtgcatttaatatggttngaaagggttttccgggt

SEQ ID NO: 132031 - DNA, 268 bp, Arabidopsis thaliana columbia
  unsure (1)..(268): unsure at all n locations
atccaaaacttattgaaagtaaagtagctttgaactacaactaattgcgagtctgttgagattgattttggatcaggtaacgtaatttcagggaaaatcacaaaaggctcaggcttgccataatcgccgccatatncttttggttttcctcggcctcctttccaagacatggacccaaattcacggcttgagtggtgctgcgatatctcacaaacaagatctaagttagatatgagccaaaccaaaacccaaaaactttttttttccc

SEQ ID NO: 132032 - DNA, 306 bp, Arabidopsis thaliana columbia
cggaaacaaagagttcatctttaatctgaaatcgtattgatatcttctccagaaacttatcttggaatgttacaagagttgctctactttgctacaaaacaaaccacaaatatctagactctgatagttggaccagtatatgatccgggacgcatgtgaagatcatcgggcgtgtcaatctgtacaagccatgcgtattcgtcttcctttccttcatccaccttcttcattccgttctccaatgtgaaagtggcaaacggatagtccatgtagtaactgcaactccctgccaacacttcctttgtt

SEQ ID NO: 132033 - DNA, 334 bp, Arabidopsis thaliana columbia
atactaatgcatctcacactgtcacatacatgtgatcaaacgtagttttaaaacagagaataaacaggaaacagagcaatacataaaaagcaataacacttcagaacgcatatgtatctttcctcatcagttaaatgttatgaaatcgtcctcttttgggtctttctctgcttttttcttcctgtgatcttccacgcctttattcatatcagctcgtgccttctccgcatcctcttcaggccctaccacagtttcagtgacggtttgggcagcgtttttagtactctcccaagctcctttcaccgtctccttggtcttctctccaagttcctca

SEQ ID NO: 132034 - DNA, 219 bp, Arabidopsis thaliana columbia
agacgacgtttctccgactaaatgccgtgaacgtcgtcgtcggagaattgagatgcggagacaagcggcggttttcggcgaacctagttcgtctaggaatcgtgatcggacggacatggaagtttactcaagttttgacgttccattgaggaaacaagctcggaggtcagagatcggtggtcttccggcggatatcgggggcttcttctggcacctccg

SEQ ID NO: 132035 - DNA, 319 bp, Arabidopsis thaliana columbia
ctctcaagttaacttttattttattgtttaaaccactaaatacccttaatagcccatggccaaaccactaaataaccttgttgcccatatccaaacaactctcttttcctttcacattcgccggtgttaatgtgttttggtaaccccaattcataacaaaacaaagacgggcgctaaaccctaaaactaattaaggctcatcgctatatcaacatcttattctttggtttaaccacttaattgcacaaccaccaaaaaaaggatccaaaacttgttttactgagagctattcttgagatcaatgtacgcaccacactta

SEQ ID NO: 132036 - DNA, 293 bp, Arabidopsis thaliana columbia
aatcacaaaccgacaagtattcttcctcctcatccaaaactataccaagaggttccaaagtatcactctctcttcttccactatcaattatgggacgatacactcaagtggagtgactcaacgtgggggaatccatcatcatcatcatcgtcatcgtcaaaaggatggaacaacatggcggttctagctcacagaaacctcacgcaatgtgcataccttatccagcacaaggccacatcaacccaatgctgaaactagccaagctcctccacgctagaggctttccacgtcac

SEQ ID NO: 132037 - DNA, 270 bp, Arabidopsis thaliana columbia
ttcgaaattgttaattgagaatttttcagttgatgatcttcaatcgattcgtacctttgaggggaattatctctttctcgatgagtttttggtaatggagatacaagattaaagcagtagcactgttggtccagaggagaactaccggaattttaagctcctccgctgcgtcaattgtgaagctcattgaagcgtcggagatgatacagctaaccggtggtatatcagaaccggagtttaaccggaggatgaggtctttgaatggagcta

SEQ ID NO: 132038 - DNA, 316 bp, Arabidopsis thaliana columbia
  unsure (1)..(316): unsure at all n locations
aaaacaatgttatacaacatctcatttaaaaacgagatcaatcaaaaaatacaatcttaaatncaaaaccaacgtataaaccaccattttntgtaggaatgtataggatacggaaccagcattttgagatcctaatccttggggccgacgctgaactttgctataaagaacccgatggtatcgagctcagatgacgggtcgaatttntgaaccagttcttcttcaccgggttttaaccactcctcgatatatccgtctgggaattcacatcgaccaactagaccaggtcctccgatcctagggtgctgtggtgcta

SEQ ID NO: 132039 - DNA, 405 bp, Arabidopsis thaliana columbia
acatcgtcaagctcttcttcacaagctacacacaagcctctctttcgaaacggagcttcaaatgtccgatatcaggtgggaggacatcatggaagctacacataatctaagcgaggagttcatgattggatcaggaggctctgggaaggtttacaaggcggcttgaaaatggtgagactgttgcagtgaaaaagattctctggaaggatgatctcatgtcaaacaagagcttcagcagagaagttaagacgcttggaagaatcaggcataggcatctggttaagctaatgggttactgcagcagcaagtcagaaggattgaatctgttgatatatgagtacatgaaggaacggaagcatctgggattggcttcatgaggacaaacccgtgcttcgaaaaaaagaa

SEQ ID NO: 132040 - DNA, 404 bp, Arabidopsis thaliana columbia
  unsure (1)..(404): unsure at all n locations
gacaaggccgggcatgttttattcagacagtattgttcactcatcacaatacacaacatgantcaatcaagcgcaatcaagcgaantctcacaaatccatttgatcaagaaggttaacataagagttacatgaagaacattgccacgaaaaatcactgctgcaattgatcgtagacattgaaaataagccaaccttcaatggcagcagcttcaagacgatcattagagctggcttcatcccacttggactgaatagaatcaagcctactcatgtcataccaaagaatcttgtgagctaattctctggttccaaggaacttcaacaattggagtacctcgggctttcgcagctagtttcccaatctccaacgagcttcgggntcacaataccgtgggttttnttt

SEQ ID NO: 132041 - DNA, 319 bp, Arabidopsis thaliana columbia
  unsure (1)..(319): unsure at all n locations
aaaacaacctgantaacagaaggccntaaccaactcaaagnnatgacgatcatattatncgaggtcctgaggcttaatccacctatagtgccgctgacccgagccattcacaaagagatgaagctcggagatctgactttaccaggcggtgttcagatcagtctacctgttcnngcttgtccatcgcgncacggagctgtggggaaacgatgcaggggagttcaagcctgagagattcaaagacggcctctcaaaagcaacaaagaaccaagtctccttctttccctttgcgtggggaccaaggatctgcattggccag

SEQ ID NO: 132042 - DNA, 359 bp, Arabidopsis thaliana columbia
  unsure (1)..(359): unsure at all n locations
cagccgtgtgtaagcaggacgcaatgaagcagaccaagaagccggtttgtccacctacanaaaatgcctaaagatatacaatgtgtgtgggagggatttgtgcagttcattgtgaaacagatactgaggcagagggattaacagatggagagggatacaaagagagggagagagacagagacagagaaagagaaagagagatcattcctattgaaaacaagaataagtcagacaggaaacattaaaatgcaaatcttcctcatgttcttggtctctggtcttaaaaacatatctttgcttatggtttgttcaagcatacttgggaaccattcagcttgtgtatatatttaaatgactgt

SEQ ID NO: 132043 - DNA, 320 bp, Arabidopsis thaliana columbia
  unsure (1)..(320): unsure at all n locations
tttttttttttctcctaaattctctctgtataaagcaggtaaaaaatacatatatgactnanaaattgagaaatgaccagagactcttaaaaacatcttctctaaacaagggttggttagagggttttgggnctattataagagattagaaggagaagaagtgttgacaacaatgtgtctaagaggatgatctacatgaggaccaccggcatgtttaacgaaatccgccggagacaagaaatcgccatggcaaacacacatgatcctaacttcttctccactgccgtatctataaggattcccatcaactctcttcccat

SEQ ID NO: 132044 - DNA, 338 bp, Arabidopsis thaliana columbia
  unsure (1)..(338): unsure at all n locations
cttccnttgttgtaacgatgcctctntttcgtgaagatcatcatcatcatcaagcggcngnctgataacanntgaggtttcgncggagacggtggcggacgactcggggtacggntttaatgagaacgacgtcgttgccggcagagtcgaggaagagtggaggaagaggaaagagatgcagactttaagaagaatggcagccaagagacggagaagcgagaagcttgtaaactggcntcggcggaggaaacagtaatantccggaagaagctgctactgccaccgcttcgagacggcgaggtagaccatcgtcaggacttccacggtggtcagcgact

SEQ ID NO: 132045 - DNA, 351 bp, Arabidopsis thaliana columbia
  unsure (1)..(351): unsure at all n locations
catcaaagtagtatattggtaatttggtagtacatcaattctgaaaatgttaaanagagngaaaatattatgtggaatgatgaaaaantggaaagacatgttcaaagantctaaatcttgatgttgaagtaattggagtcaaaatgatgcagtctcacgtagccgtcttcacctccactagagaaactcttcccatcaggactgaatgccaaagcattaataggtccaaaatgacctttcacgccaccaatttcctcttgcagaatcgtgtcgtaaaacttagcttcaaacttcccagcacggatgatcagtggtagtcacagctgatgcatcttgaccacctccaagcac

SEQ ID NO: 132046 - DNA, 417 bp, Arabidopsis thaliana columbia
gctcgttatcgttggcgatggaggcacagggaagaccacatttgtaaagagacatcttactggagagtttgagaagaagtatgaacccactattggtgttgaggttcatcctcttgatttcttcactaactgtggcaagatccgtttctactgttgggatactgctggccaagagaaatttggtggtcttagggatggttactacatccatggacaatgtgctatcatcatgtttgatgtcacagcacgactgacatacaagaatgttccaacatggcaccgtgatctttgcagggtttgtgaaaacatcccaattgtcctttgtgggaataaagttgatgtgaagaacaggcaagtcaagggccaagcaggtaacatttccacaggaaggaaggaacctcccagtatttacgggga

SEQ ID NO: 132047 - DNA, 374 bp, Arabidopsis thaliana columbia
  unsure (1)..(374): unsure at all n locations
caggagaatnactatatattaagaacacaaacaacatgtaacaatgtaagtttgcaatcaannaggcaagttcaactagagagatatactagtagttgaatgaancatacctgacatagagaggcnnaccactgatggccctagcagaggcatgatactctgcagcagggtgcacggaatggaacatatcccagtcaggctgcataaactctcccaagaacacactgttataaggaacgggaggctatatgggatgggtatgagacaccggatncccgtggataggaaatcatctgatgctctaantcacagctgcttgcttcgagcagtaaaagagcatccgtattatggctcatacaagcaatgcagccatt

SEQ ID NO: 132048 - DNA, 405 bp, Arabidopsis thaliana columbia
  unsure (1)..(405): unsure at all n locations
ttgaactttatttattccaccaagtcaaaccgaaagaaatgaaatacatttatcagcaacccncttttgggtttctctcatatcctttctattctattgggtttaaatttaaatcaaactataaaaaaaatgcccttgaacaagagttagccataaacacttttttttagccataaaaacttaatcactgattaattaaccgcagagcaaaccctacgaatttctccatttgtccccgtcttcacaccaatattactcattttaaccattgaccttgcgaactggacattgaagttgcctctaggtgccataaactcttgcactatgggatcttgtggccggactagtccaaaggaacgtgatcggnttgaaggaattcctctgttacggctgaggttggatgga

SEQ ID NO: 132049 - DNA, 364 bp, Arabidopsis thaliana columbia
  unsure (1)..(364): unsure at all n locations
gctcaaagtgtcaaactatggatccttataagattcttaatccaaaaggttaccagagacanagaccgtttagctcagccggcgagagtggcggcacggcgnctccggtacgcccatgaaacagatgacaataagaagaagaagaagcttctccaccgcgacatcgaacgccaaagaagacaagaaatggctacactctttgctactcttcgtactcacttacctcttaaatacatcaagggaaaaagagctgtntcggatcatgtaaatggagcggtaaatttcattaaggacacggaagcacggattaaagaacttagtgcaagaagagacgagttaagtagagaaaccggccaaggatatt

SEQ ID NO: 132050 - DNA, 223 bp, Arabidopsis thaliana columbia
  unsure (1)..(223): unsure at all n locations
tttttttaacacttctcataaccgtgaaanctgtaataaataaatcagaacattaaaattanagattatactcctactaaagaaaaaaaaaattcgaagaaaaaaatgttgagtctctttcctcntatatcaaagctaaaatcccatgttataaaaanggaaataaaagatttgaaaaaaaaaaccgtttttttttgtttttgggnttcgaggaaggaggggc

SEQ ID NO: 132051 - DNA, 350 bp, Arabidopsis thaliana columbia
  unsure (1)..(350): unsure at all n locations
acccaggaccagtccagtatgatggtccaggtgcagatgcaaaggcggtaagtctgtgtntagaagaccaggattacatggggaaaatcaagaagctgcaggagtatcttgatcaggtgagnncgnttgtgaaaccgggttgctctcaagatgttttgaaagcggcattgagtgttatggcctcggtgactgatgttctcactacgatctcatcttcttccaccagcggtcagcaaatttgcttaaagatttttttattgttttggttttccctttaaccataaacttcattagctctctctctctctctctctttccattttgaagtcgtcttctgatttacgcaaact

SEQ ID NO: 132052 - DNA, 409 bp, Arabidopsis thaliana columbia
  unsure (1)..(409): unsure at all n locations
tgtctatgacgctcagccgacgaatcctggaactcaggttaccagaacccgttcaagcagatatctcantttgaaacaagtgagcccgagatttccatctggcaactatcctgtagcacatatctcatatgagcttaacgtcttgggttccagaggaccgaggaggatgcaatgtgtcatggatgccatccctgcatcagctgtagaacctggaggaacagctccaactcagacggaacttgtccatagcaatcttgatagtttcccctcattctccttcttcaggtcgaaatcaattcgtgcagagagtctcccttctggtccatcatctgctgctcagaagggaaggactgcttgtcctgaaaaacaangcgcccagatgggcacgaacagctccagtgctggtgcc

SEQ ID NO: 132053 - DNA, 405 bp, Arabidopsis thaliana columbia
  unsure (1)..(405): unsure at all n locations
cggcaataaccctcctccgtacggatcatccggcagcaatcctcctcctccgtacggatcancagcctcctcaccgtacgcagttccctacggagctcagcccgctccttacggtgcaccacctncagcaccgtacgcgtctcttccaggagaccataataagccgcacaaagagaaacctcacggcgcctcctacggatctccatctcccggtggctacggtgctcatccatcgtctggaccttccgactacggtggttacggaggagcgccgcagcagtctggacatggaggaggttacggaggagcgccgcagcagtctggacatgggaggaggttacggagcttcctccttccgcaagctttcttnatgggaagtccgtttgcgtctctggttccgtcggc

SEQ ID NO: 132054 - DNA, 237 bp, Arabidopsis thaliana columbia
  unsure (1)..(237): unsure at all n locations
ttactaaggttttgctcatatgaaaagaagacccacgtctgaatcttaccggagaaaganaaaaagacaacaaataaaatatccaaaagctcacaaagaaaatagagttagaaaacaatctctttggtcaacaaaaaaaaaaaaaaaccattccctcaggcgccggggattggtaaaccagtgggcttgaggttctcgtatttgaaaatggctgggcctgataccgccgtttccttc

SEQ ID NO: 132055 - DNA, 396 bp, Arabidopsis thaliana columbia
  unsure (1)..(396): unsure at all n locations
gaaaaacattgactaacgaactctaaatcgagttaatcgttgtcatatcaaattaagaaagaanaataacaggaaaataaataacaattttnttaccccatttgcttattgactctcttaaacaaacaaatcttaaaaagcaagagaagaggatatttattacaaacacatctctgcaacgagctcatccaagttcttgtaagagctcccaccttctttaatggcctccatagctttctccctcagcttcatcaacgtaactctctccggcaagtcctctctcgccgactcagccaaaatcctaggcgagcttgtccgagtcaggaaccgagtctctgttctctccaactcgcactgggcctcttnaggtttattcaaacgatggaggcgtcgtgt

SEQ ID NO: 132056 - DNA, 311 bp, Arabidopsis thaliana columbia
  unsure (1)..(311): unsure at all n locations
gcaatacccgaaccatcacaaaaacggantcatcacaaantgaggttcgttcttgactcaatctcctccatcgactgatctcgatgatcaggtgctatcacanatnaagagcagctttaatcttctgaacggtgcacgatatcaaattattaaccgtctccacagattccaccgttagcttagccgtagaaacctattcaccagtatctgaaacgccaccgttagtaacgaccctccttcctccatgcacccaccgttaccagtactgttacgttcctctgcggcggacgttgcgtacccagcctgaccgt

SEQ ID NO: 132057 - DNA, 404 bp, Arabidopsis thaliana columbia
  unsure (1)..(404): unsure at all n locations
ataaactcttacgtcaaagccaaaaatttcaagtccaagaacatttggaaacaatataaccncaaacaaaaggtagaagaaacttaaaccaagatcaaatccatagaaagaaaacagagtaccaacaacattcatataaaagaggaagtaattcagagggtttcataaacctgaaaagctaataataccatatggtttttcatcatctctagaacagagtcttcacttgtcttccttaacagatgttgtttcttctgccgctggtgccttctctgtcgcaagaccttcctccttaacggcatcatccctcttgtctcctgattttgcctgaattgcactttcataccatataggaaattagtcttaattgatacaaaaacatcattaaaaangcaagtgcaaaa

SEQ ID NO: 132058 - DNA, 369 bp, Arabidopsis thaliana columbia
  unsure (1)..(369): unsure at all n locations
catgaagccaagaaacttattaatacctgcccttacacaaaccaagaaaataaggcctttcatantgtggcagtttacaaagtgaaacaattacgaaattgaanaagtagtttaaacttaagtaaaaccttgcttgtgagccagnnttgttttatttgtgtgtttattaaaactgattgccaagttcttgttccatgttctccagatcccatatggcaactttgccatccaatcctgaagtgctgaatcgcattactttaggactccctgctttgctcagagacacaatggaatttatgcagttatcatgaacacctccacgtgattcagaagcatcgttggctgttgtggactttgattgactgccgt

SEQ ID NO: 132059 - DNA, 279 bp, Arabidopsis thaliana columbia
aagtgaaactcaactgaactttgatttctcaacttaagattgaaaactcaacgaaccagcccttcttagcattagcgacacaaggatgatactagttaaagcagatagctgtgaccagcatcgatcatcttcggtttcataaacagcatcgatcatcttcagtttcataaacagccatcaacagctacaatctcaacatgttaagtgcagcttcccagtcaattctttttctcgaaccagaggtaagcaagttattctacagagcgttgacgcttcagt

SEQ ID NO: 132060 - DNA, 304 bp, Arabidopsis thaliana columbia
gtcgaacaattgtacggcctcgactccggcctcaatctgtttcgacagataatcgatggtgctggtcgcgatcgccgcgatgatctcttcgaatgccgcagggtcgccataagcgaagcgccgcgtttcgccctggtcgcggctcccgtgtccggcaaccatataggtggcaacggtccacgggcttcccgcaaagcccaggaaggtggtcttgggcggtagcacagccgcgacctgacgcacggtctcgtaaaccggttcaagccgctcaggggccgcctgcaggcctttgcattgcattgtt

SEQ ID NO: 132061 - DNA, 354 bp, Arabidopsis thaliana columbia
cgtctcgcccgtcgaatccgacagcaaatggagatgcaggcgcatcaaaaaggccgggtgggcgatgctgtggacaacatggggagaagcgctagcgcaacttcgcggtccagcaaagcgtcatccctttggtggataaccggccgcttatccacatgcgtgcgcacaaccgacgattcggctaacaggctgtggattatggggacagatcgaacgactcacgccagagtcgcccttacacaaaggccagtctgtgtcttttcggagatgaacgcattagccccgtttatcgacgtgcctacaaacacttcatccctttcaagattcttgaatcttattgaagagggtaagacg

SEQ ID NO: 132062 - DNA, 320 bp, Arabidopsis thaliana columbia
cacaaccacattgtttcgtttgccctactaataaaatttcattacaatcttcataataaacaactcttagttcgttacattacaccttcagaacaaaaaagatgatcaatcagatttgtggttagaaggtttgggtctaggaacttgaactggcttgtcttcttggcttttcgccaagatctcgtctctctctctgaagtattgctcgaaagcacgaggcaggaacctagggatcaagaaacagagtggattcactccgaagtagcctaagtttgctagtgctaaatacctcccaaaccagaaccatgtaaccacattgg

SEQ ID NO: 132063 - DNA, 327 bp, Arabidopsis thaliana columbia
ataaccaaaacctttcccggaaattttcgaatactctgaaaggaaaataggaaaatggcaagtgggtttccgccgcagaagcaagagacacaaccagggatacaacatgtcatggaaccaactcccgagttctctagttctaactataaaccttccaacaaacttcatggaaaagtggcactcgtgacaggaggagactcagggataggtaaagcagtgtgtcactgctatgcacttgaaggagcgagcgtggctttcacgtacgttaaaggtagagaggacaaagacgcagaagaaacgctgcgtttgcttcacgaagttaagaca

SEQ ID NO: 132064 - DNA, 262 bp, Arabidopsis thaliana columbia
tctcttttgttttcttcatattattcttcttttaaaaaaacgacaaaacaacatatcaccttattacatcacacgactatactactggatatactctctttgtaagaacttcctaaacagagtcatgtacataagcacttattgcaagctcaagcgttcacgataagaccaccgtttgtatggaggatttgtccggtgtagtaagatgagcaatggttacaagccaagaaaacgttgtaaggagccactcccacagtttgag

SEQ ID NO: 132065 - DNA, 326 bp, Arabidopsis thaliana columbia
  unsure (1)..(326): unsure at all n locations
gcacgaggaggaataaaccaaaccggtcgagagttcacgagccacggagagatcttggcgatgagttgtcggagattcttctcgatcccggtccttntggtgattctggtgatgggtttcgtgtattacgtcacactgtttgttttcatcgatgattgggttggtttacaaagctcagtcctgtggaggagacacattgcttaagcaactctgggaccatagtgatgccatattgtgctgctccctgaaaactaatgcctcaccggtattcacatttgcaaaccaagctggtttagacatgcttggaaactacacttggtgggcac

SEQ ID NO: 132066 - DNA, 243 bp, Arabidopsis thaliana columbia
  unsure (1)..(243): unsure at all n locations
acgagagatgcgcgagagctcatcctacgatcatgcttcaagcctgtggccttaccaggtggagaaatccctaagtatttcacgtatcgagcttatggagattccctaactgtcactttacctcggagctctctttctcaatccttcttgtgatttaaggcttgtctcgtggtggaccctctctccgagggcaagggttttnatcgatatttggaggtaaactttggcttcaatggcaaacag

SEQ ID NO: 132067 - DNA, 251 bp, Arabidopsis thaliana columbia
  unsure (1)..(251): unsure at all n locations
ctgatcaaaacgagcaaaatntggaagcagatcancaacatccagctcgatttcanaggactgatcaatggttaccagtgtattcgtggttagagtcattggataatggagagttggtgaaatctaaggatatncctaantggcttgatgcgaatcctgaggttaaacaagaccttcctcctaggcattctcgttatcattgactcattatgtcaagaaatgtcatctcaagattcttaaaaggacggaga

SEQ ID NO: 132068 - DNA, 230 bp, Arabidopsis thaliana columbia
  unsure (1)..(230): unsure at all n locations
tttaaagattctggctttcttcctttggcgggtntccaaaatcctttcnacgacctatntngttttgaagggatatctagatganccgttcaattgcttaaagccgcagtagcaacggaancggggaaagtatacataagtatacagaaaagacagtcctttcttttccnatnatataaggatttctaatcctatnagattagtnagtgatcttggcgcagtgagtcctt

SEQ ID NO: 132069 - DNA, 350 bp, Arabidopsis thaliana columbia
  unsure (1)..(350): unsure at all n locations
ggcctacatacttcccggaatnaaacgggggtcgagtcataggagctgcttctctctgctattggacttgcaacaccggtctctctataggaaagagatagctcgttcactccgtctctctctgctttgccgaccagaaactttccgtatcgtacttaagagcccgaaagcacactcctctgctttnattccaggttagggataagaactcttcactgttgaatagagagattcaattgctagtaagttattcaatcgatacttctgggcctgcctacgctgatgaatccctcctttctttcaaggtagcatgagaagatggaatctcagacttgcaaagcagacctacg

SEQ ID NO: 132070 - DNA, 325 bp, Arabidopsis thaliana columbia
  unsure (1)..(325): unsure at all n locations
gagcttatntctagagaagagatgaaagcattctgcaatgtctatccactagttcctaaattggctaatatgcttnaaagcggaggaaaaattccaattctaaacccgctggagctagaagagattggatataagcnagtggcgtatccaatttnattgattggagtatctattcaagcaatgcaggacgctctattggcaatcaagggtgggcgaattcctccaccaggaagcatggcgtctttagaaggaattggagagattcttggttttaacactttcgaggaagnagagnagcggtacgtaaccctcgtcattcagatag

SEQ ID NO: 132071 - DNA, 330 bp, Arabidopsis thaliana columbia
  unsure (1)..(330): unsure at all n locations
gagcggcacgagccgaaacgatgttttaaaacgaacgaatctaccaaatcggtcagagtggcttgcagatctttaaggagtccttccgtgagacggttaagcgaacttccggtagagaagcagaccaaatacatgatggaccagaaggttctcatgaacaagatgatccaagacgcagagaagaagttggagaaggngangatgcatactcgtgcgatgaaacttgggttaatgggctgggtctaatgatctaatcaccgatactgatttgttcggaggaactggccagagcagctgatgtggtttgataagaagctcaaagnccttcag

SEQ ID NO: 132072 - DNA, 344 bp, Arabidopsis thaliana columbia
aaggtctcccagttcctcggcagcacctcggggtgcatttagttgtcttacatgagactcgggatattcctcagcccatggcaccttttgctcatccattccgcccgcccgtacagacgcggcgccctttttcattatcatctaccgccctttctttcctcccggctattcacgcatgaagatcgtcctatgtatgctttacttcggttgccggtgctataggtaggagtacattatggcaggatcagtcacccgggcaaaccaacccccctccaagaggaattgtgctatgcccccccgatccctatagagcgaaagagctgcctggtgatccctaggttgca

SEQ ID NO: 132073 - DNA, 377 bp, Arabidopsis thaliana columbia
  unsure (1)..(377): unsure at all n locations
ctttctctatctctctttcgaacccaccggtggttcgggtatctctctattcactcttcaagtcacctaattgagaaacgtgcaaatggcaccagttaggaagtcgaggagtgtgaacaagcgtttcaccaatgaaacttccccaagaaaagatgctgggaaatcgaaaaaaaataagctacgtaagangaaattgtctgacaagctgggacctcagtggaccagattagaacttgagcgtttctatgatgcttaccgcaagcacggacaagagtggagaagggtggctgctgcaattcggaatagcaggtctgttgacatggtggaagctctatttaatatgaatcgggcgtatttatctctccccgagggaactg

SEQ ID NO: 132074 - DNA, 369 bp, Arabidopsis thaliana columbia
  unsure (1)..(369): unsure at all n locations
tttttttttttttttttttgctaataaacaaacacttgttgggacacagagttcccactttcgatttcttcttaatcaacacaaacgaaaaaaagaaaaataaaactagaantcagtaagtctaaaatggtggtggtggggttacttacttctcctatcttgagaaaacaaaatacatttcatatttttatagatacacaaacacacacagagacacataactgacacacaaacttatatctaaagccctttttcttatatcttcttcttcttctttctttctttgttattttcttgagggggggattatttagtcaatcgtcatcggctggctcaagcaacatctgaaacgggcttttctcgctgtcg

SEQ ID NO: 132075 - DNA, 441 bp, Arabidopsis thaliana columbia
  unsure (1)..(441): unsure at all n locations
ttttttttttttttttttggatttaatgtgtatgttggattatcaaaaattcaaaattataatgtcaacaagagtctacaactactgtaacaattctcttctcttacattggaaactaattttaaatagcagaagcaaaaagtcaaaatgtagatatggccggaaattcgcactacattttaactgacaacggttcctattgagacgaaccagtagtaacagcagcatcagcagattgctgagaggatcctgaaggtgctgcagacacagagtcaggtggtggagcagagactgaacttggatgtggaggattaggccttgaaccgggacctggttgttgtgggtaatcatgntcagcttgttgtgaatggccatggtggtaaggaggatactgctggtaaggtggttgcatatatcctccatatgatggtggcgggtatg

SEQ ID NO: 132076 - DNA, 307 bp, Arabidopsis thaliana columbia
  unsure (1)..(307): unsure at all n locations
gctatggaaggagagaagatggttcatgtgattgatctcgatgcttctgagccagctcaatggcttgctttgcttcaagcttttaactctaggcctgaaggtccacctcatttgagaatcactggtgttcatcaccagaaggaagtgcttgaacaaatggctcatagactcattgaggaagcagagaaactcgatatcccgtttcagtttaatcccgttgtgagtaggttagactgtttaaatgtagnacagtttagggtttaaacaggagaggcnttagccgttagctcggttcttcaattgcata

SEQ ID NO: 132077 - DNA, 286 bp, Arabidopsis thaliana columbia
tttttcttttcttcttcttagtttttttttttccctctccattgagttctctaagttcactcactaacctgagcagttacattattattatagtctttggtcttaaaaacagttttgacagcaatatgttttgtttttataatgaaatttatttcatttctgtattatatatactcttatgaaactatgaccaatgatagatgctagttactaaacgttcaatgtaatcacttcaacatgttcacgtggttatttgttgaaccatccatatatataacatataaag

SEQ ID NO: 132078 - DNA, 189 bp, Arabidopsis thaliana columbia
ccgtacgaggccaaaacctcttatacgtttctagggggggtattattcatatacatctatcccaacgagccgtttatcgaatccttgcaattgatgttcgataccgaagagaaggaagagatcttagtaaggtgggtttttatgatcccataactaattaaacttttttaaacctgtctgctattctcg

SEQ ID NO: 132079 - DNA, 407 bp, Arabidopsis thaliana columbia
agttttttcaatcctcaaggtgtcaggattcacataatgatccatcactatacaaaggcaaaaaccaagaccattcactaatctgagtctctctgccacaagatttatctgtttttgtcatcatcatcatcttcattttaaactaatttcacaaaatcaccaaaaaatcctaatttcatactattttaaaaaaattaaacctaatcgctaatcttctccctctgttccttaattgaagtcaagctatccattgatttctccgaaattgaatcacttgaaatccttgaaaacaaataaggatcttcagacgacgaagtactaagtttctcttgtgaagaagattcactcgtagatcgtgttaacagagaagattctctcgagccatgaaacggattcttgcaatgaag

SEQ ID NO: 132080 - DNA, 280 bp, Arabidopsis thaliana columbia
atcacaacaaacagacgacacgatgttcgacgactctgtttcaaagagattcttcagtctcattaaacctttgtacactaaatcaacgaagaagcagtcatcgtcgacgattacatctccgacgtcttcaccggcgacgagagagaaacagaggagtaatattccgtcggggatgagaagtgtgaggagacaacttgggaagagtcggtcagcttctgcggcgatcggaggaatgtctccggcgaacagaatcgatgagtctttacaagttcaacaagat

SEQ ID NO: 132081 - DNA, 313 bp, Arabidopsis thaliana columbia
  unsure (1)..(313): unsure at all n locations
agagaactagtctcgagttttttttttttttttttgatacaatatctcagcttgccgcaaaagcagtaattttcgaatctcaccattcccatttatgtgtgtataacataggtagatagagaagaacccaataacataaactgatcaatggaaaaattcctctttaagagtgcaaatacaatttaatctgactgaccgataatttcctttgttttccngattcctctgtatatgtacaaaatccaacgaaacaaatttgttgcagaggccaaacccagtctcttgttggtcagatctcgtagtctatatctgt

SEQ ID NO: 132082 - DNA, 259 bp, Arabidopsis thaliana columbia
aacataaactacactgggatatacggtcagggagtgcgtgtaccagtgcgtatccaaggaagcaaagagattcctgttaaaaatgtaaccttcagggacatgtcagtggggataacatacaagaaaaagcacatattccagtgtgcgtacgtggaggggcgtgtgataggcaccatcttcccagctccgtgtgataaccttgatcggtatgatgagcaggaacggtttgtgaagcaatctgattcccagaatgcaacag

SEQ ID NO: 132083 - DNA, 381 bp, Arabidopsis thaliana columbia
tttttcccgacaaagttttcatccatgtacaaccagttcacataaacatacaataaacaaccatgactcaccataagtttggactataagttattacttttattaagaaaacataaacataaatcttagaaactgaccttgaaattacgatctagagatccatgcatagataagagataaccgatccagctctccttgtcgtcctctcagtcactttccatttctctatcaacacctttttgatgtgtggacagctcgagacgactgtagccactccagcggaagtgatccctgggcagtaaaccatgtgacaagtctccagaagtttgcacttctgtacaagatggttcagaccattgtctgttatatggtggcaatgtg

SEQ ID NO: 132084 - DNA, 365 bp, Arabidopsis thaliana columbia
  unsure (1)..(365): unsure at all n locations
agctgtcagcaaagactaaaacttactttaccacggnttttgcaatgtgggatgcagacttctacgtcaaagtcgatgatgatgtgcatgtaaatatagccacgcttggagcagaattagcaagataccggatgaagccccgagtgtacattggttgcatgaaatctggacctgttcttgctcagaagtcagctctatgcaatatccagggagttggcgtcttacatatcgataaaccaaaacgtacttcacaaatatgtgaatgaagatgtctctttaggatcatggtttcttggattagatgtggagcatgtagatgaccgtagctatgttgtggtacaacagattgtgagttgaaggcgcag

SEQ ID NO: 132085 - DNA, 261 bp, Arabidopsis thaliana columbia
gtcgacggtatcgataagcttgatttcgaattccgcacgagagaagtagccaagacagcgcagaaagagttaactctcactaagtcgtcaaatgatgataaagagacaaggctcaggaatttgttgacagaagtagaaggtctaagcctacagtacagtgaattacaaaacagcttcgttcatgaaaaaatggagaatgatgaactgaggaaaacaagtatcaaacctgaaagtcgatattcggggaaaagaagaagaatg

SEQ ID NO: 132086 - DNA, 271 bp, Arabidopsis thaliana columbia
ccttaaagatggcgctctggtttaaacgcagtcaatttttacagagtcaataatagagaaaagcaaccacaagattccagaagagaaaacagtgaaatatccttttcataacataaaataaggtttgggataacaatcataaaagtcatgtcccacgtttttttatttatagagacattagtagacgagagcaaactctaagcgtccctcttatcatcaggacaacaatccacttcaagatgatctttaaccaggaggccagttcatttgg

SEQ ID NO: 132087 - DNA, 222 bp, Arabidopsis thaliana columbia
  unsure (1)..(222): unsure at all n locations
ggatagcaatacattttttcataaacaagaatgttacataatantcatacaacagtcatcatcatatacataaatgccaaacttggtttggtttagtgactctattaggccaaagaccgataaccttgagccgctgcttcgctgttcttcttgcttgtatgtataccgaaagaaccttcttttctaggcttagagagcaaccttcggctgacattggtgctt

SEQ ID NO: 132088 - DNA, 215 bp, Arabidopsis thaliana columbia
  unsure (1)..(215): unsure at all n locations
ggtgtaaatgaatgattatttttttgggagtttaacgtttgncggtaagaatatctattcccacatccaaatcctagacttcgtttaatgaaatgccaataaaatggaaagtttagaatacatagatgaaatggtgtaattagctttctncagacaaatgtcattggttctccttnctctataagcaccaaagagccaagagcctcacacttggg

SEQ ID NO: 132089 - DNA, 261 bp, Arabidopsis thaliana columbia
aaaatcaccaaaccaaaagacagagatttcctaaatcatctcgaaacatatctctccaaaagagatggtgtagacaaactcctgaaaatctctcgttacgcaacaaaaatcatcctcgcatcatcactaatcccagaaaccagatccataatcccccgactcaaaagcttcgaatcaagcgtcggagtcagtcgcaaagccttccgtctcggaaaattcgtacaagacatcaacgcattaagatcctcacgatgggattca

SEQ ID NO: 132090 - DNA, 305 bp, Arabidopsis thaliana columbia
  unsure (1)..(305): unsure at all n locations
aatcaagacgaaacctttattcgataagcaaatactataattcaatcgaaaaacgaacgatgaacatcatcatcatgatcatcaacaagagatccagttcttatgagtactaacaatagcagaaaacaaacctgcagaagatatcacattaggagccgataacactcccttaccatcacgaatatcagcaatcgtcatcaaaccatcagnaagatcctgcaaaatagataaaaccttcaatgtcttcttctccttaatcatcttcatcttctcatcttcaccatcacaagctaatcctctcgaaa

SEQ ID NO: 132091 - DNA, 228 bp, Arabidopsis thaliana columbia
tcgacttgtgagcgttgctttggacggatacatgaaagtctccgattacgggagagcaaaggtgacttactctatgaggtttcctgctcctctcatgtctcttggcctttcccccgatggttccactcgggtaatcggagggtctaatggtatggtgtttgccggtaagaagaaggtgagagatgttgttggaggacagaagaaaagtttgaatctctggagtctgat

SEQ ID NO: 132092 - DNA, 361 bp, Arabidopsis thaliana columbia
  unsure (1)..(361): unsure at all n locations
ttttggataatgagttgtttgttagttgttactgtcatttcttagctgtactgagaaagatattaacaatttttaataatgatgacatccacctctcaaaaaaatggctggctaattcctaacgctatcttaaaaagaaaaaaatagaaaattcanaccaaaaaaatgtgagtggaagacaactcatgaattggtaaaacgacaaagcgaaacaagtcaaacgacaccaagctggctttgctgtctcagctctttccttagcttgtgtgagaaaagcctgcaagcatccaaactcagatccaccgccgcagctaatgccacgtgcgctgctgcatcctccgtacatgtcacgtgcgtcaca

SEQ ID NO: 132093 - DNA, 291 bp, Arabidopsis thaliana columbia
cttcctaaaaagaaggcattcataattagagcctaacgaaatttccataaattttatacaaacttcaaacattgccctccatacaaatccaaaattttttacaaaacaaaacccatcgactacattatttttcatttcacaatcgaataggttggtggctcactggatccttggcataacatacatttagctcattttattaggcgatggagcttttttcggtagaaaaggagttctttagagggtatgaagctcgcattgaaatgccacatacagcctcttggtttggca

SEQ ID NO: 132094 - DNA, 354 bp, Arabidopsis thaliana columbia
aggatcggtatcatcaacgatgtcgggagcacaaggagcagagccgatggattcaagaacggcgacaacgtacgagtcagtggaaggaggacagaacaagacgaagcttgatataaggtcaaaggaagacgaaggtgggattcaagttgacaagcttcaagacaaggtctctgatgctgctggtcttggcggacctgtctttggtgctggtaaagacgacaagaagcaggatcttggtgttaccggtaccggctaggtctctgtaaaatatgttcagatacggtcctgtcatagtcatgtaatattaaaaacatgttttgagtagaaaactaatcaataaaagtcttttatgag

SEQ ID NO: 132095 - DNA, 460 bp, Arabidopsis thaliana columbia
agcgagtagagctgcggataaagctgaagagacaaaagataaagcaaaggactatgcagaggactcaaaggagaaagcagaggacatggctcatgggtttaaggaaaaggctcaagatattggggagaagactatggatactgtgaaagatgtgtgggagacgccgaagagcacgcctcagaaggtgactgagcctgtggttggctccggtgaggaggcggataagcctagggttgatgttaataaggccttggaaaattttccgaaaaaggcgaaggaaaaccgaaataaggttgttgatttcaagaggttctaaatttactgatcatcttgtaaccttttctccttttgttgtaatttaacaaaaggtggtgtttcatctttctatgttaaaaaagctctttttgagaaacttttatagtagggtattaaaggttttaccaaacattcctttggcttt

SEQ ID NO: 132096 - DNA, 334 bp, Arabidopsis thaliana columbia
aaaaaaaaattgctacgttgtttacaaacaaacaaaattgtttcgttaaatctacgtagtttagtaatcgtacaccagctgctaaacagaaacaaagaaaagagaaatcagaaaatgattagcgtttgagcagaggggattccatgaacagtggaggaatctgatcaaaggcctctgcggacgaggtttgggcgggaacatccggaggaggcaaccatgttattggtggcataggtggaaactcatccaacggcggtggaagagagaacactggcggcgtttcgtctccaaatggtggcggagggtagccatacgcggagttttgtgttcgtct

SEQ ID NO: 132097 - DNA, 346 bp, Arabidopsis thaliana columbia
gtgagatctctcaaagaggaccaaaccaacatcagaagcttgacttcgcttccctctagtaaactcggagacgatgtcgtgttagccacgctagttctctctcgggctgatattgagagacttagggaacaagtcaagaacgtgtcaccgagcctccacttgtcgacttttgtcattgcttacgcttacgcgtggacttgtttcgtgaaggcacgtggaggtaataaagacagatcagtgagtctcttgttcgcaggagatttcagagaccggttagatccgaagctcccggggacttacttcggaaactgtatgattccggtgggcttgttataacccgtaaggc

SEQ ID NO: 132098 - DNA, 346 bp, Arabidopsis thaliana columbia
aaccaagcattaccttattattaaaatcttacaaaacaagagtttagctatgtaaaccattgttgaaaaaagacacgaccgaatccatttcagtctttttcaaacacattccaatctcaacgccacctgactcatcacgtctctcagccattgcgatcgcttctccttggtcaatggagacaatatcaactttaacgggtcttccccacccgaaatccgcctcgtttactcccaaccgggtcgacccggttatcgtcccaaactgtgtactccaactctgaaaactaaatccttccacgaaagtgtccgcaatggtctctatctttcttgaactcaacccctttca

SEQ ID NO: 132099 - DNA, 330 bp, Arabidopsis thaliana columbia
ctatatacattcgatttctatatcaacttcatcactcatacaagtgagccatgagaggacattgttcacgggaattgcgcgtgacggttcatttcgacagtcgcaatatcgagtacaaaacacttaccatgttgcttccagtagtcagccatcggattgatccactccggttcagcaatctccgctctcgtgtgtttcaaatcatctgtcgaaatgttgtacttctcatctcttctcttcaccaactctggccttagtaccccttgccccaccccctgaggtgacatcattagttcgggtgcaaccattggtaacttgtcacctcggtct

SEQ ID NO: 132100 - DNA, 461 bp, Arabidopsis thaliana columbia
catggaagaaacgtccaagctacagttaccggagagtttccttagctttctagaggcgaatggccttgatccttcaatctatactcacggagattcaattccacgttatgtaaggttgaaacctggattcgaggatgctttcgaagagattgaatccgaaattaactgtaaactggagaaggtgaattggttaccaggattttactccacccctccagatgttcatatagccagaaccaaggcctatcagcaaggcatgatgtacggaatcgatgcagcttccggcgccgctgtctcagctcttggcatctccccaggagaccatttcttggatctttgtgctgctcctggtgctaaactatgtatgatgcttgacctactggatcagaagggtactgccaccggtgtcgatgtagcaaagcatcgtctcgctgcctgcagaactatgcttctaaagtatg

SEQ ID NO: 132101 - DNA, 250 bp, Arabidopsis thaliana columbia
  unsure (1)..(250): unsure at all n locations
gagagagagagagagagagagagagagagagagagagagagagagagagagagagcaacagctacccgcaatcaatgtgattatgtttcacgctccgggtgcgnncaacaccattggtttcacgaccgatgnttctctcatgtccgctgtngtcactggctcggttaacgtggccgctacgcttgtctctatctacggtgtagacagatggggacgtcgctctctctctcttgaaggtgacacacaaatg

SEQ ID NO: 132102 - DNA, 204 bp, Arabidopsis thaliana columbia
  unsure (1)..(204): unsure at all n locations
gaagtctccaaatattgctgcattaatgttaccactgcttctnatacttttcacgctgtcctctcagcttaaagtcgtggaatctacaggccgcaaacttgcgtgggggttttcgggaacacctatcgtgtacacaccaccatcaaggtcatgtggaacttctccagcagtattcacttcgaagtggnggagaccccgaccatg

SEQ ID NO: 132103 - DNA, 185 bp, Arabidopsis thaliana columbia
  unsure (1)..(185): unsure at all n locations
aattaaacacaatacttttngtttacatcatttgaaaggagcacatgtttttagatgtgtaaaccaaatctgaaacccacatacactttattattgcatagaacttcaaaactctgacacaaagacacagaagtacgtngttatggagattggtcagaagcaggaatataactgcctggaggaag

SEQ ID NO: 132104 - DNA, 276 bp, Arabidopsis thaliana columbia
aaaaatcgcacgtttcttcttcttcttctctctcgcaacaaatctgtattagggtttttgagaaatcttcatttcgtgattttgaaatttatttgtatttgattttgttgttgctttggaatcatctgcaaccaccatgatttctgattcgatcaccaacgcttctgctacttcagctccaaccgccagtgatttcgcaaaaaagaaaaggacgaacaggtcggccaaattgacacagagcaagctaggtcttcgtcgcgaacaatggctttctca

SEQ ID NO: 132105 - DNA, 308 bp, Arabidopsis thaliana columbia
aaccaaacttgactgtctatatgctgtatttagtcgctcaacatagaatcaagtagaatgatataacatctatggccaccttaaaataacagacgacataaaatgatacctttagagtattacagataagcaaggttctcgcaggctatgagaaagagacttattgcaacttttatgtatttgaaattcgtgtaccaccttatgtactcacacaccactctacataaccaccaccaccaccaccacatgtttcagatgaagaagagtcattgacatcgaagaacatagaacattgttctcagttgcca

SEQ ID NO: 132106 - DNA, 711 bp, Arabidopsis thaliana columbia
aaaaaaatggcgactaaaatggccggggcagcaatgaatttagcaaagagagagtcgtcaagtttgtgtgggaagctagagacagatattgaaatcaaagcttcagctgggaagttccatcacatgtttgctgggagaccacaccatgtctccaaagcaactccagggaaaattcagggttgtgagctgcatgaaggtgactggggcaaagtcgcctctatcgtcttctggaattatgttcatgatggagaggcaaaggtggcaaaagaaaggatcgaggcagtggagccggagaaaaacctgatcacttttagggtgatagagggagacttattaaaagagtataaaagctttgtgatcacaatccaagtgacccctaagagaggaggacgctgggagtgtggtgcactggcacgtcgagtatgagaaaattgacgacaaagtggcgcacgctgagacctttcttgatttctgtgtggaagtctccaaagagatcgatgaacatctcctgaacgaggaatagagattactctttaattgagtatctatcatatgtgtatatgtatgttatgaagcacgcatgttcttgtgtatgaaacaataaacaaggagagttgcccaatatatgtgagtgatacataaaagctttgtactctaaatgtgagtatgtcatgtttggttttaataaaagcttgtgagatatgtttgtgg

SEQ ID NO: 132107 - DNA, 398 bp, Arabidopsis thaliana columbia
tggcaacgaagtcagtttctaccttcgccatctttttcatcctcgttttggctatctttgaaactcctgagatagaagcgtatgataggaagtgcctgaaagaatacggcggcgatgtgggtttcagctactgtgcacctcgaatattcccgacgttctgtgatcagaactgccgtaagaacaagggcgcgaaaggtggagtatgccgttgggaagagaacaacgctattggtgttaaatgcttatgcaacttctgcagcgaggaaccctctgatcaaactctaagtcgtatttgaatcttgcatgtgtcatggtttgtgtaacaaatcaaggtaaatggtccaagtaacaatataataatgaataagcgaaataaagaaaataatatgaaatacaag

SEQ ID NO: 132108 - DNA, 340 bp, Arabidopsis thaliana columbia
aacaaaaaacaaaaatctaaatcaatttacaatatcagcgtggaaactatacatataaaacccaaagctacagagactatacctctttcaaatcctccttgaaaaatggccaaaaagatcccaacttcagtaacattttctatctttaccatttcagttctagacaacggttgtgtccacctccctcgattcggcttccttaatggcttctgcaatcctgagagccctcattgctttgctaaacagcaagatctgcgttttctgcaagaatttgtgctcgtcttctttttggctatggcagtttccatggttttatcagccaaaactttggcttctccat

SEQ ID NO: 132109 - DNA, 332 bp, Arabidopsis thaliana columbia
gccttgatgaagaacgttcttgctttgttgttattattatattgtactctacaaatttcttctctacaccacagtacaagtctctggttcattagtttggctctatgttcttgtcgttgaccacaaatcgtgtagtgtcggtgtcctgtcctgatgtctgaagctgttctctcttctttattagttgttttgcacttttaagatcgtctttagcctctctggaatccgcattgatcaataatgcactttcaaaactcctgatagcactgtccggctcaccaaaatttagtttgtgctcttccaagagtagtcccatgccctcagcccacgat

SEQ ID NO: 132110 - DNA, 500 bp, Arabidopsis thaliana columbia
atggcggctatgtttttagcaaagagaggagccataaacatacatagagcttcttcattacacatagattacaacaacagttctcgatctgttgttgatggagtcattactaccactaactctcgttacttcgcatcccacgggaacaacggagagaagtcagaggaagaggcgatggggacaactacagatggtaaagctccgaatgtgacattgggtcatgcggcggatacagccaaagaaggattgaaacgagccaccgatgcagccatcaagaagagtggagatgtggccaagccgaagagtgtagagaatgatgaaggagatgatcaggaggatgtgcagtgggtgatgatggaactgtcaaaggcccaaatcagtcagcaggatgagaatatatatagagacttcgttaaaagattatcagctcctaatgaaatggatgctggtttaaaccgtgtagtatgtttttttatttatgtagaaaaccatctgttacc

SEQ ID NO: 132111 - DNA, 391 bp, Arabidopsis thaliana columbia
tacttcatcaaattctggaatctgtttttttcttagttttcttctatatacctttgaatcgcatctttgatccaaattcattttagatatcaccttgaagtcgaatttgtgattttttcttttcctctcgaattctcaaagtctcacgcaactatgaaagaagacatggaagtactatcgctcgcttcactaccggttgggttcagatttagtccaacggacgaagagttagtccggtactatctccggctcaagatcaacggtcacgataacgacgttagagtaattcgtgagatcgatatctgcaaatggcagccttgccatttgcctgatttttcttgtgcgtgaagacaacagactcagagtggctcttcttttgtcctttgcaccg

SEQ ID NO: 132112 - DNA, 205 bp, Arabidopsis thaliana columbia
caaagtttaacagcactcatataagtacgtatgttctacagttgaccaaacatggaattcctaaaaccacataaacatgacaaagggaaagtcacaataacaacgacttttagtccctccaacagtcactacagccataatctcacacatgcatattgctccttaatcggccttctagccgcattggagtcagaatcagaatatg

SEQ ID NO: 132113 - DNA, 494 bp, Arabidopsis thaliana columbia
caaagttgagaaagatctatcggtaggaagtcttctatcagaggcggccaaactaattagtgatgacgcttttgcactgctctgcatctccaattacttcacttgactcatttggcttcatttctcttccaacacacctcttttaaccccagcagctccacaaatccaaaaacactaaaagatatcgaaaactatatgttctcgatatcaaagactcgataatatacatttaaaagacctatgaaatgtgttaaaactaatcgcttaacattcgtctgtgtatgcttatggttctgcgtttatggtcttcttttcgagttcttttcctttttccactgtcgataatctctgtattcattttaaaaaaatccggttaacttggttatttttggctaaattcgatttttttccaattaatgaaggtaatttggttcggttctgtttgatttgattattggtgaaaatcggtctaaatttggtataatccgtttaat

SEQ ID NO: 132114 - DNA, 389 bp, Arabidopsis thaliana columbia
gattcgagtcccggcgaaggattgtttcgcgctcgagaatcgtctccgtggtcatcttcttaattggcctaggattcggaacattgctagggttcctggagatgagattgaagaagatgttgtgaagctgttgggccgtgagactgatgaagaagaagaagatgaagatagtgttgtggattcggttaaccggagaataagagggaaagcagaaggggatggggagagattgagttcagtgttgcatagagataaactcgccaggacatttaattcaactgggtatctcaaattcagaaacttggccaagatttctcggccaaagaggaagaggaagacagagagaacaagggaggggaaggaaaaggaaatagcaagcagacgcaacg

SEQ ID NO: 132115 - DNA, 338 bp, Arabidopsis thaliana columbia
gagaaatgttttttcaatattaaataatgtaacaaaagctattgtcacttccacttgttagttgtcttgttctccaacaaagacactgcaagtattactggctgcagtacaataaaatatttcgtatttgcaaatatgcccctatattcagccatgtattgcattctattaatctacataacttaagttttttcttgagaaggctacattcttggcaagtatgaatgaagcacatagcatccatttccctggagccacaaggcgtacctttcgcatcttcacatccacggctacctcagataaagcaatccgcatccgctcgtggaagtcgaattctg

SEQ ID NO: 132116 - DNA, 395 bp, Arabidopsis thaliana columbia
  unsure (1)..(395): unsure at all n locations
cggaaacgaagagcttatcaagagcaaaggctagatcatcatagccttggntcgaaccaagatccatcttcctcaaataagggacaccatccatgctcactttcacataccctaaccccactttcgtggtcgaagcttccttacagctgtttttcttccggtaagaacaaaccggtggccaccccaccacctggtttttcgccgccggngaatcattaaccttctcagcgtcaccaccagatgaaangacgccgctttcacattgatcactattactacccgacgacgtcatattcatctccgggaaaggtctcttctacatcatcttctctgacacatctctccccgggaagccccaatctcagctccgtttatctcaagcccgagtccttcct

SEQ ID NO: 132117 - DNA, 355 bp, Arabidopsis thaliana columbia
ggtgacacccatcttggtggggaagattttgacaacagaatggttaaccactttgtccaagagttcaagaggaagagtaagaaggatatcaccggtaacccaagagctcttaggaggttgagaacttcctgtgagagagcgaagaggactctttcttccactgctcagaccaccatcgagattgactctctatacgagggtatcgacttctactccaccatcacccgtgctagatttgaggagctcaacatggatctcttcaggaagtgtatggagccagttgagaagtgtcttcgtgatgctaaagatggacaagagcactgttcatgatgttgtccttgttggtggttctacc

SEQ ID NO: 132118 - DNA, 360 bp, Arabidopsis thaliana columbia
ctattctgtgtagtcagatggatatttctggcaaccgcaaagctgttgtgatctacgttccattcaggctgaggaaagctttccgcaagattcatcttcgtctggtcagagagcttgagaagaagttcagtggaaaagatgtgatctttgttgctaccagaagaatcatgcgcccaccaaagaaaggctcagctgttcagagaccacgcaacagaactcttacttctgtccatgaagccatgctcgagggggggcccggtacccaattcgccctatagtgagtcgtattacaattcactggccgtcgttttacaacgtcgtgactgggaaaacctggcgttacccaacttaatcgccttg

SEQ ID NO: 132119 - DNA, 294 bp, Arabidopsis thaliana columbia
gcaagagtggccgaggatctacatttctttgtctaggaaagagaaggaagaagatttcttggttatgaaaggaactaagcttcctcatagacccaggaaacgagctaagaacattgataaagcccttcagttttgttttccagggatgtggttatctgatttgaccaagaaccgttatgaagttagggagaagaaaaatgtgaagaagcagcagaaacggagaggattgaaaggcatggagaatatggacaccgactccgagtaaattttttgttccttgtttcattttctttt

SEQ ID NO: 132120 - DNA, 642 bp, Arabidopsis thaliana columbia
cctaaggtcccaactccttcggtcccaagtccatatgttccaactccttcggtcccaagtccttccgtaccaactccttcggtcccaagtccttccgtaccaagtcctaaccctacgccagtcattcctccgagaacccctggttcatccggaaactgtcctatcgatgctctcagactcggtgtatgtgcgaatgtgctaagcggtctacttaacgtgcagttgggacagccatcacctaaccatgctgctcactcattcaaggtttggttgaccttgacgctgcggtttgcctatgcactgctcttagggctaacgttcttggcatcaaccttaacgttcctatatctctcagtgttcttctcaacgtttgcaacagaaggcttccgtctaatttccaatgtgcttgagggatatcaattacacatacgacgcacacagtttactctttaaaataatcacagtttgaataattgcatgcatgtatgcaagttaagggttcaatgtttcaatcttttgtttaagtgtgaggcgttatctttttccgcgcatatatgtttttgttgtaacttttattgtttaaatgaaagacgtttcatagtccattttatttgttgtcaaaaaaaaaaaaaaaaaaaaaaa

SEQ ID NO: 132121 - DNA, 306 bp, Arabidopsis thaliana columbia
  unsure (1)..(306): unsure at all n locations
atcaaccagtaaatcgaagaaaagacatgctcgattgcttgttcatatcgctatcgatatcggtccaagattttaatttatttgttggacaacacaaaaagggaaaaggaaaagcaaagttgcgagagagactcatataatcaaaagagacttggaaacatcttttcatcagccaacttgactaaatagagacaaatgcaggagctggggcaggtactttgaagtcgacacacactcgtgccgaattcggcnggaccaaaatatttttgttacaaattcacatgaatataataatacaccattaag

SEQ ID NO: 132122 - DNA, 299 bp, Arabidopsis thaliana columbia
agaaagtgtatggagcctgttgagaagtgtcttcgtgatgctaagatggacaagaactcaatcgatgatgttgtccttgttggtggctcaacccgtatccccaaggtccagcaattgctcgttgacttcttcaacggcaaggagctttgcaaatctatcaaccccgatgaggctgttgcatatggtgctgctgtccaggcagctattctcagtggtgagggtaatgagaaggttcaagatctcctcttgccttgatgtcacaccactatctctggcttgaaaccgctggaggagtcatg

SEQ ID NO: 132123 - DNA, 498 bp, Arabidopsis thaliana columbia
tttttttttttttttttttttaagatttggaagtaattcaaatacagagcataaaaatatccataagaaaaacctagatatgaaattcaaacaagttcaacataagatccacaacatccaaaaacaacttccaccttccaaaaaaaacgcagtgattcacttcaaaatgatagagatcgagatgaaaatcattcctgagctccttctttctggtaaacgtaggtgagaccacacttaccacagtagtgacgatcgaaatgactcgccatgaaagtcccagcaccacaggttgcgttagggcactcccttcctcaaacggtgaaccttacctgaaaccatcaaccttgtggaactgaagaacagggagcttggaccttcttgtgcttggtgcttggatctttcttaggcttggggtaggtcttcttcttcccccttcttaggaactccacggagaaggaaggacaaggtgaaggttgggttccctctggttgtggtaat

SEQ ID NO: 132124 - DNA, 300 bp, Arabidopsis thaliana columbia
ctcgaagacgccatgcggagaatcaaggttcatgagttgagagataaatcaaaatcggatctttctactcaattgaaagaattgaaggcagagcttgcttccctacgtgtcgctaaggtcactggtggtgctcctaacaagctctctaagatcaaagtggtgaggaagtcgattgcggaagtgttgactgtgagctcacagaaacaaaagtctgctcttagagaagcatacaaaaacaagaagttgttgccactcgatctccgtcccaagaagactagagccatcagaaggagactcact

SEQ ID NO: 132125 - DNA, 299 bp, Arabidopsis thaliana columbia
ctgggctaaatttatgtcggcttatgtggtttcaaaggcaagtttgaatggttacacgagggtcctggcgaagaaacatcccgagtttcgcgtaaacgctgtgtgtcctggatttgttaagacagatatgaacttcaagactggagtcttgtctgtggaagaaggagcttcaagtcctgtgaggttggctttacttccgcatcaagaaactccttctggttgtttctttagtcgcaagcaagtttcgaattctgaatcttcttttgtgtgagaataataagccaaaaatgtagtaattt

SEQ ID NO: 132126 - DNA, 592 bp, Arabidopsis thaliana columbia
  unsure (1)..(592): unsure at all n locations
ggtaccaaagcactggaagctgttctacctaagccgtcaacagctcagttgagtgacatggagatagatgaatgcgaggagaccacgctccacgatgtcaacattgaggatgagatgaggaggaaggcacaagctcaaagagaggcttatgatgatgacgatgaagatgatgaccatccgggtggtgctcaaagggtgcaatgtgcccagcagtaagtaactccttagagagactttgacccacatgggtttgggctccaaccaatttgtcttttgctttttcattctaagtgtattggagtctttatgggagtttggtacggtttaagaatttgcccacttcggtggaacaatcggaacttgttttctcttttttccctctgacctttaaaaattaaaggnccttnatttaccaaatntttgggggttttttncctctattgnnttaaanttttgtaggtaanttttaatggccttngggccatttttnaaaaaaaaaaaanaangggggggccccnttnagggggncccnccgtttcgnncggggtgcatttcnngccggcannggnctttctttnagngccnccnnaat

SEQ ID NO: 132127 - DNA, 461 bp, Arabidopsis thaliana columbia
  unsure (1)..(461): unsure at all n locations
ggtgggcaatcgttttttttctcatcttgatcagtggactttgctgtatggcgggtatcgatacaccgactagattcgagactcctcaagattcttaagctgttgaccttaagagccatccccaccttttgctttgcttttnacgagtcttttcttgtgcatagtgcgcattgtggaaggtacttcaatgtcgatttgttacattattacttcaaaacaaaatctgcatatgccataaaatccccttgtatcatttattcatcttgtttgtgagtctttcttaaacgtcataaattaataatggggaaccgagtaaaaaacccagnggtaccatacactnggnggaccggngttaccanttcnttttttcagggaaaaaaaattttntntgtaaaaaaaaaaangggggnggggccnctncntngggggtncccaaggttttcgggncngngtntattnag

SEQ ID NO: 132128 - DNA, 244 bp, Arabidopsis thaliana columbia
  unsure (1)..(244): unsure at all n locations
ttacatatttttttgataaatgtttaggcatgtncacggaaagagagtncttgtggtcaccaatgatcgatttgctccnctctaccnggacaagactatagatgctttaaccagaggaaatccaaacgtgacagtggaaagtntaatttnccccganggagagaaatacaaagacatggataccctcatgaaagtnttcgncaaggccattgagtctcgcccagatagacgatgnacanntgtg

SEQ ID NO: 132129 - DNA, 472 bp, Arabidopsis thaliana columbia
  unsure (1)..(472): unsure at all n locations
cagttncagaatcctatcgttgaaatggatggcgatgaaatgacgagggtgatatggagtatgataaaggagaaacttattcttccttatctggatttggacattaagtacttcgacttggggattctgaatcgcgatgctactgatgacaaggttacagttgaaagtgcagaagcagctcttaagtacaatgttgctatcaaatgtgccactataactcctgatgagggtagagtgaaggagtttggactgaaatcaatgtggaggagtcctaatgggacgatcagaaacattctagatggaacccgtattccgtgaacctatttatgtgcagcaatatccccggcttgttcctggttnggnaaaagcctatatgcatttgtagacatgcctttggtggncnntatnggtgccactnntncagtattaaagggncnggnaagttaaaanngtttttntcccaaagntggaa

SEQ ID NO: 132130 - DNA, 474 bp, Arabidopsis thaliana columbia
  unsure (1)..(474): unsure at all n locations
aggacattagtggaaacccgagagctctaaggaggttgagaaccgcctgtnagagagcgaagaggactttgtcatctacggctcagaccaccatcgaaatcgactctctgttcgatggtattgacttctacgctcctatcacccgtgccagattcgaggagcttaacatagatctcttcagaaagtgtatggagcctgttgagaagtgtcttcgtgatgctaagatggacaagaactcaatcgatgatgttgtccttgttggtggctcaacccgtatccccaaggtccagcaattgctcgttgacttcttcaacggcaaggagcttttncaaatctatcaaccccgatgaggctgttgcatatggtgctgctgtnccaggnagctattctcaagtggtgagggtaatnagaaggttcaaaatctccncttgcttgatgtanaacactatntttttggtnttgaaacccctngng

SEQ ID NO: 132131 - DNA, 476 bp, Arabidopsis thaliana columbia
  unsure (1)..(476): unsure at all n locations
caaaacaaatcccaaagcttcagaggaagaagaagaagagagtgagaaacaatggcgtcgacgactctntcaatcgcaacaacaatccgttcctcttctcctctcacttccgcttccactcatcacttcctttccaaacccaccgcaatcgaattcccatttcgtctcagctcttcttctagccaccgtgcaatcaacctccgtcctatctccgccgtcgaagctccggagaaaatcgagaagatcggatccgaaatctcatccctaaccctcgaagaagctcgtatcctcgtcgactatctccaagacaaattcggtgtcttcccactttntttaggccccgcagcagcgcggttncttgnttcagccgacggtggcgcggcggctntagtggaggncaaacagagttcgatgtggtatcaatgaagttccagnagtnccgtattnaagggttaaagcttttagggtttnanana

SEQ ID NO: 132132 - DNA, 476 bp, Arabidopsis thaliana columbia
  unsure (1)..(476): unsure at all n locations
ctctctcttatttgatcataaagatattattgcttcttcaagtaaacaaaaaatgggaagctttctcttcctcatcgtagtcatcttcctcttctcttcatccgttaacgcttgtnatcgatgtcttcaccgttctaaagcagcttatttctcctctgcctctgctctctcttctggagcttgtgcttatggctctatggctacgagtttcttcgccggacatatcgctgcagctatcccttctatctacaaagacggtgctggctgtggagcttgctttcaagtcagatgcaagaaccctaagctgtgtagcactaaaggaaccattgtgatgatcacagnactttaaacaaagagtaaccaaaccgnntcttttccnttagtaggcagagcttttagnggtatgggtaaacccactnnttggngntggcaaanaccctnttaaaaaggattnttgccatcggttnccaaanggt

SEQ ID NO: 132133 - DNA, 474 bp, Arabidopsis thaliana columbia
  unsure (1)..(474): unsure at all n locations
gataattatcaagtggaggtgtgtccgagaagatagtatctgcattcaatttggttcgtgcagagaactcaaatgaagagacagagatgaacaaatgcaagtntgccgttagacgtatcagaaagatggagaaagatgttgaagatgcttgctccactgcaaaagacccgaggaaagantcattggcaaaagaattggaagaggaagaaaacattctgagacaatctgttgagaaacttaaatctgttgaagaaagtaggacatctctcgtaaatcatcttagggaagcgctacgggaacaggaatctgaattggagaatcttcaatctcagatacaggtagcacaagnncaancccgtagaagnccaanacatgcagaacggctcaataacggacacccggttaacaataacaacgggacatcttgtcaatcagcggaaatnactcctgcctcaatncgtncaattncggaat

SEQ ID NO: 132134 - DNA, 474 bp, Arabidopsis thaliana columbia
  unsure (1)..(474): unsure at all n locations
aggcgattcaggccttgtcctcaccaccgaccctaaaccgcgtttgcnttggaccgtcgaactccacgagcgttttgtggacgccgtcgctcagctcggcggccccgacaaagcgaccccaaagacgattatgagagttatgggtgtgaagggtcttactctttaccacctaaagagccatcttcagaaattcaggcttggaaagcagccgcacaaggagtacggagatcactccacaaaggaaggttcaagagcttctgccatggatattcagcgcaacgtagctttcttcttctngcatgatgagtcgcaacatgaaatgagatgcaaatgggaagttcagagaaggttgcatgaaccagctaggaggtgcaaaagnccatctgcaactgaaggattgaagcacaaggnnaaagtaccattgcaatctatctttgagaggggttttccaaaccccttagccggtgagaacat

SEQ ID NO: 132135 - DNA, 471 bp, Arabidopsis thaliana columbia
  unsure (1)..(471): unsure at all n locations
aattcacaatttctcttcttctaaatccatggagtgatgatgatgatagatagattgaatccaaacacaaaccggatccgagattaaaaacaatccggattgtttatatttactttagatcggagaaagatgccgccggcgaccggagatatcgatcgtnagatcgagcagcttatggagtgtaaagcgttatctgaaacggaggtgaagatgttgtgtgagcacgcaaagacgnttcttgtggaagagtataatgttcaaccggttaaatgtccggttaccgtctgcggtgatatccacgggccaattttacgntctaatcgagcctttttcgtatccggtgggtcctctncctgatactaattaatcttttcaatgggggggattaattttttatncgggggggattaattcttttngggnncaggntttcctttttgggangccttnaangttccgttnacaaggggt

SEQ ID NO: 132136 - DNA, 474 bp, Arabidopsis thaliana columbia
  unsure (1)..(474): unsure at all n locations
caaatcgagccaacggtcaggntctactcgaagaagccgtgcagctgaagttcataatctctcagaaaggaggaggagagatcggntcaatgaaagantgaaagctcttcaagaactcatacctcactgcagcagaacagataaagcttcgatattggatgaagcaattgattacttaaaatcacttcaaatgcaactccaagtgatgtggatgggaagtggaatggcggcggcggcagcagcagcagcaagtccgatgatgtttcccggggtacaatcatctncatacattaatcagatggctatgcaaagtcagatgcaattntcaattcccggttatgaccggtccgttncgcagnaccatcccggttagtatgtcaaaacccggtacagttncagtccaagnacagnccaaattttttnggnagttgntaggtcatggngggttccccaatccncggngggaattangtt

SEQ ID NO: 132137 - DNA, 488 bp, Arabidopsis thaliana columbia
  unsure (1)..(488): unsure at all n locations
agnagcagagagagaaagtgggggaaaaaaggcgaagaatacgcagattccatccaatttagggttaggacttcccctaatttggaaacctagtcctgtttcctgatctgttttccggatcggacgagagacgaattaacgaaaatgggcgcgaattctattccgacggacgcaaccattgatcttgatgagcagatctcgcagctcatgcagtgcaagcctctctctgagcaacaggttagagcattatgcgagaaagccaaggagatcttaatgggtgaaagcaatnttcagcctgtgaaaagncctgtgacaatctgcggtgatattcattggccagttccatgatntttcaagggtttttccgtattagggggaatttnccctntacccattaccccttttttggggnnntttntgggccccgggtntnttnttttnaaaactttnncggtttttancgccttaaaggngggatttcctngggg

SEQ ID NO: 132138 - DNA, 475 bp, Arabidopsis thaliana columbia
  unsure (1)..(475): unsure at all n locations
ctttcattggcacaaagagagaaaatctgaaattgagagagacagagaaaaatggcgtcgcttctgaaagcattcatcgatccaaagaagaacttcctcgctcgtatgcatatgaaagccatatctactcgccttcgcagatacggtctgaggtacgatgatctgtacgatcagtattacagtatggacatcaaagaggctatgaacagattgcccagggaggtcgttgatgctcgtaaccagcgtctcaagcgtgccatggacctctccatgaagcacgagtacctccccaaggntcttnaggcggtgcagaccccattncgtggctatcttcaggacatgctttgctctttgttganaggggaagcaaggaaccgnnaggccttggggggttttaccctttttancaggggaaaatttcccataaagaattcctttccccttttttttttgggnaancgtggntttttttnaa

SEQ ID NO: 132139 - DNA, 476 bp, Arabidopsis thaliana columbia
  unsure (1)..(476): unsure at all n locations
agaacgctgctgaaccaggaaccgcttttaatgaaaccgagtcacttggtagggagaaaagcaaacccgagagatgcttgtgggttcccaagacgctgaggatcgatgatccanaggaagctgctaaaagttccatctgggaaacattagggatcaaaaaagacgaaaatncggatactttcggagctttcagatcatcaaccaaagaaaaaagcagtctttctgaaggaagacttccgggaagaagaccggagttncaagcnaatcctgctgctctttctaggtcagcaaacttccatgagagctcataggaagaagaaggnatctaagcagctgatttgaattgtttttggggttncagtcttgttttccaagnaagcagncaaattcaaacaagtttaaaggancgtttatagttntccnccatnatgtatgnttctnaagaatctttagngtgtcttaccttatttggcctc

SEQ ID NO: 132140 - DNA, 474 bp, Arabidopsis thaliana columbia
  unsure (1)..(474): unsure at all n locations
gacaagattgaccatcatggcaaccggatgtccaagcatcagcagcatacctgcggtgcttgctctagacccttgtcggagaaatccttgtggagcagccaaaagatctttatgaccaacgagctctctgtatctgcaattctagcttgtgggcatgtctatcatggggagtgtttagagcagatgacgccggaaattgataaattcgacccttcatgcccaatatgtacaatgggtgagaaggaaacagcgaacttccaagagaaagcgttgnaagtagagatggatttnnaagcgnggcacaacaaaagnctcaggaaccgagttttttggccagtgacttttgattgcaaatgnttttntaatgtttnaccncagncacaggccagcagcagcagcaagcaagngccctagcttggttttaagttcgggggttaaagttttnagnaaagnctttttttggtcgannttttt

SEQ ID NO: 132141 - DNA, 473 bp, Arabidopsis thaliana columbia
  unsure (1)..(473): unsure at all n locations
gagcagttgagagagagagagagatagatggcggcgaagacgatgaggaaggcggaggagctggtggagaaggcgatgaaaggaaacgatgcttctcatgacgcctggcacgtntggagggtccgagaccttgctctctccattgctcgcgaggaaggtctctcttccaattctgactccatggaaattntggagcttncagctcttctccatgatataggtgattacaagtacataagagacccttcggaagagaaacttnttgagaatttcctagatgatgagggtatagaagagacccaagaagacgnagatactaacgntcatcaatggaatngggtttaaagacggnttagcaggagtngcactcttgtgagtcctcttccanaattttggggnggtccaaaatgctgatccccttgatncaatttggngccataggaattccccngttntttaaaantttggnggna

SEQ ID NO: 132142 - DNA, 479 bp, Arabidopsis thaliana columbia
  unsure (1)..(479): unsure at all n locations
aaagtcaaggattggggagctgtaagaagaatgtcactaatgatgaatgaaattgaagagataacatgcgagtccaattgtnctgagcttacaactctgtttctacagtataatcaattgaagaatctatcaggtgaattcattcggtatatgcaaaagctagttgttttggntctttcagataatcctgacttcaatgaacttccagagcagatatcggggctggtctcgttgcagtttcttgacttgtcgtttacaagaatagagcaactgcctgttngtctgaaagagttgaaaaagctaacttttcctgggnttttgacttatactgatncggcttttntagtatcagtgggggtatcaaaggttgtttgaggtttaaaggatttntttgagncctgctaatngggcctaattgttccattggnggatgctaagcgtatttnaagggngcctncagccaanttccagnntcttca

SEQ ID NO: 132143 - DNA, 474 bp, Arabidopsis thaliana columbia
  unsure (1)..(474): unsure at all n locations
gctgnatgctgttgtgatccaaaaattatcagtctttcctgtcgctcagtcgttcatcacaacgcaaaccaatgttgtggagaagctgcagaagtctcagctcccagtttatgtggaactgtttcagaatgagtttttatctcaaccatatgacttctttgctgatgcaaccgttgagataaactcttatatcactggagccggtataaatggaaccatcaccgagttcccttttacagctgcaagatacaaaaggaatctatgtttgggcagaaaaggaactataccttacatggnccctgnccaacccgggtgnccttcttaacccttgtnagtcctactgcctttcctcccagncggaggttccaaanccggtttttcacagatgctgatgtcaatngggcaccactacctccggttaccgcaaaaggcccaacctnatccctggnaccccattaaccattgaanaagacc

SEQ ID NO: 132144 - DNA, 458 bp, Arabidopsis thaliana columbia
  unsure (1)..(458): unsure at all n locations
agctgattgatcagaatcttggatatgcaacgaatgaaggagttagaaaaatgactacaatggtggcagagttggcttttcagtgcttgcagcaagacaatacaatgagacccacaatggaacaagttgtgcacgagctaaaaggaatccagaatgaggagcaaaaatgtccaacctacgactacagagaggagacaataattccacacccttcgccaccagattggggtgaggctgcactattaaaaaatatgaaattcccacgttcancagtctctgtgactgaccaatgggcaagtaaaatcaaaccacancggantaccagcggcttcggattttttaggntccnccagggtattggtttcttcctcattttgtttcaaatngaccggtttttngnttgtnggnncaggggttttttaagncagtaggntnccnggngnattttccataggggc

SEQ ID NO: 132145 - DNA, 483 bp, Arabidopsis thaliana columbia
  unsure (1)..(483): unsure at all n locations
aaagatttcaattgttaaagaaagcaaacgccagantactgtttctttgactggagggttgttggagaaggttcctagtgatactgctgtaaaattggctttgaaggatctgcagcttaagtttcttgagtcctcgtttactagtacctaggacatgccactcgttcagtttcttggcaaagatctttctgtgaaggtaacacatagaacccttggcggcgctattgcagtatcatccaacatatactgggaaaatattgaggtagattgtgtagatacccncgtaggacatgaacatgaggatagctggaacggtcacttagttagctgtaatgggtctaccccactgaggcgggtctttttgggtttnaacgggaggcatgatnagcatagtgcagannttttcaccttttntggcataagnntacncatgtnattcccccantgaaaaggtnttgngtnccnatgttagnatcgtgggct

SEQ ID NO: 132146 - DNA, 479 bp, Arabidopsis thaliana columbia
  unsure (1)..(479): unsure at all n locations
ggggattcagctgcggattatgggttttnatgcattcactttccgtgaggattgaggatggagaaagtcagtttgcattcacggccatttgtgatttcatcaacaacttcttcatgtgtgatgattgccgtcggattttcacgacatgtgcttaagcgtcaaaactccatttaaaaaggcacgtgatattgcgctgtggctgtggagcacacacaataaggtcaatgagagactcaagaaggacgaagattctctggggacaggagaccccaagttcccaaagatgatatggccaccaaagcagcttttcccgtcgtgttatctttcgagcaccgngaaaaacaattgactggggtcatgatcaagtctacnaagttctttnaagnangtactnttgggcagaaaacttggtggcttntttncanggaaaaantngntggnnttttngcaaaagagggggntatttcaanctcngaagg

SEQ ID NO: 132147 - DNA, 475 bp, Arabidopsis thaliana columbia
  unsure (1)..(475): unsure at all n locations
tgagcatttgggacaaagctgagatcatcaaggtgagcgatgttgagcttgagtttctaactggaagcaacaagattgatgatgagaccgcgttgaccttgtggcatcccaacttgaagctgttgttagtcactcttggtgaaaagggctgtcggtattacaccaagactttcaaaggagccgttgaccctttccatgtgaacgctgtggacacaaccggagctggagattcctttgtcggtgctcttctaaacccagattgtcgatgatcgatccgttctcgaggacggagagagattnaggaaagtcctgagattcgcaaatncttntgggngcaaatcacaacgggcccaaaaaagggngccattccaantttttcccttaaaaatnctnaaagtccgggngcntttttcggaaaaagaaatttggacccaaaacaacntaaggttttnnttanggnaannttntttcccgg

SEQ ID NO: 132148 - DNA, 473 bp, Arabidopsis thaliana columbia
  unsure (1)..(473): unsure at all n locations
tttaanctcaatnctgttaaacaccgccgaagatcctaccttgattcacttactaggtgtaagagttgccatgatttgtattggagagatgagaagcactgtaagatttnccatgccacgtttgaggttgatatagatcttgaagaaagatatncgattcatgcggccacatgtatgaggaaagaagagtgtgatacatttccggatcataaagttctatcttcccagttgcaatcactaaaagctgcagtatatnccattgagtctgctatgcctgaagatgccttgattggtgcatggagaaagtcagctcataggttatgggcgnaaagaccttnggcgaagtcatctnnggtctgaaattacgcaggtnattggcgactttttttgggcaatcaatgaagnattggctatgganctttagtnancaggggcangctttattggggggaatcataaaatngcttcccntt

SEQ ID NO: 132149 - DNA, 474 bp, Arabidopsis thaliana columbia
  unsure (1)..(474): unsure at all n locations
aaaaagcctgcttgatagtatgactgacattgatccatcagtttatgccaacttcttttgggtctcttctcagtaccataaagtccgtcaagagttctctgagttctataaaaatgctcttctttacctcgcttatacgtctgtggactcactctcggaatcatttaagctggatttggcttttnatttgtcgctttcagctctacttggggagaatatctataactttggggaactgttagcccatccaattttgaaaagtctgcttggaacaaatgtggaatggctttaccacattctacaagcattcaaccacgggggattttaggttcagtaccaaggactctgtcgtgtgcacaatgcatcgttgangngctcaanccaggactgggttnggaatnaggagggaacctttttnggggnggtcaaaattttttgccntatttnnnggncaatttnaagcnggccntctta

SEQ ID NO: 132150 - DNA, 475 bp, Arabidopsis thaliana columbia
  unsure (1)..(475): unsure at all n locations
ggagctgagaaattttcgaggtttgattccatcaacagtagcaaagactttggtggtccctcgctatcaagattcgactctatgaatagtacaaaggatttcagtggtagccatggatactcgtttgatgatgcagacccgtttggttccacaggtccctttaaagtctcttcggatgaaagccctacggaaaggtcagataactggaactccttctagcctcggttactatcgttcccttttataatcctttttcctcgcttgatgaaccttgtgctttgtttcataattataattttttttcanccaaattcctgggttttnggatgggnncactaagcggttnagcctaattttggnaaatttggaaaaggtttggcccccggaaattgggnttccccccctggnatcccccgggnaatggtaatngnaatnccaatttccttttttttggaaggaaaanttttgggggnaa

SEQ ID NO: 132151 - DNA, 475 bp, Arabidopsis thaliana columbia
  unsure (1)..(475): unsure at all n locations
gttatgttcctgttatctgtggactctctagatgcaataagaaggatattgagagagcttgggatgctgtgaaatacgctaaacggcctaggattcatacttttatagctactagtgatatacatttggagtataaactaaagaaaaccaaagcagaggtcatcgaaatcgctaggagtatggttagattcgcgaggagcttggggtgcgaagatgttgagttcagtccagaagatgcaggaagatcggagagagagtacttatacgggattctttggtgaagtgataaaagcaaggngcaaccaactctcaaacatacctgatacctgtttggtataaactttgnccntagtgagttttggncaactgnttanctggntttaaaggccaatactnccgggggnttaaaatttttgncatntcaananattntccagattntccttggnccttttnngggccaccattttntttg

SEQ ID NO: 132152 - DNA, 499 bp, Arabidopsis thaliana columbia
  unsure (1)..(499): unsure at all n locations
natcgcggaaagtaaacctagccgagcagatctacctctntctctnagtactcagagatggccaagtcgaagaatcacacggcgcataaccagtcggcgaaagccacaagaacggaatcaagaagccaaggagacaccgtcacaccccaaccagaggaatggaccctaagttcctgaggaaccagaggtacgcaaggaagcacaacgtcaaggccggcgagaatgctagcgctgaagaataagtgttttnattatctgtgagacattttgaagtttttttttaatgaatttaagactttcttagacaaaggnaccaatttactttgcgcttttaatcatgtttacgcaattntggtttgtgtactctcttatnctgggcctnaatttaatatcagcagttttcttatgnaaaaaaaaaaaatanntnnntntnaaaaaaaaaaagggnggcccctcttngggtnccagnnttcggncggntgcnttcagcggcattngc

SEQ ID NO: 132153 - DNA, 328 bp, Arabidopsis thaliana columbia
  unsure (1)..(328): unsure at all n locations
ttccggacctgttgaaataaacctcattgagcactcggccnttgttcactgcggaggaggttaagaccggtgttcctagtggtcgacgacgtcaggtaacacaatcgactcgacctcttacgtatggtgacttgttacacaagttacgacttcacanactacgtagtcatcgaggtacctacttagattcgagtttgggatgttacgtatcacatttgtctcggtggtggcgggttaagagggagtagaagaaggagagagatcttgctattcgatttcagatcagaacactttttcgaantctttctttcnctttagatctttgaaa

SEQ ID NO: 132154 - DNA, 293 bp, Arabidopsis thaliana columbia
  unsure (1)..(293): unsure at all n locations
ggtttcttggtggagaatgagaaggagaaggagaaggaggaggaagggagagagttttgggttatgggtggctatggcggatcgaggacggtttcggggattcttcctgttgatgagtactataaagacgcggtagtgatggatttgagagtagatggtggtgagaaatggagggtagttggagatatgtggggagaagaagagagacctaagctagggaagattgttgctgttgattgtgggaagcctntgtttttcatgttggataaggattggattcttaggtatgagat

SEQ ID NO: 132155 - DNA, 336 bp, Arabidopsis thaliana columbia
  unsure (1)..(336): unsure at all n locations
tttttttgaacaccaaattttattctagatgatgtgtgatgagagttttttacacctactacaatcggatggtgcacataaccgtggtcctgaaatcaagttgatgattgaacggtggctttgagacaaccgatctccaagtcttcttctttggatcatacatatgaatcatcaaagatccagctttcctctgttgtctagtatgccttgtatccatcagattataaccatccaaaagantcataacatgtaattccccattcagtgcaacgggaaccaaccggtttgtcgtaatgagctttnttaggcacgcttgactcctttctccaacggttc

SEQ ID NO: 132156 - DNA, 314 bp, Arabidopsis thaliana columbia
  unsure (1)..(314): unsure at all n locations
ggaaatagctgaaaagtgaaaaaatcaacaaaagaacaaaagcttgaagctttactcatcaatcatatctgttaaaactagggggaaaaaaactgaatgcgaataaataaccctggcaataaaaaataaaaagtaattctcattacctacaaacaaagacacgaacttgatcaacaaatatcaaggaaacgagaattagatgaagantaagactagtggaaagaccngagagagatacaggcctttcaatgggaagctattacatgagtnagaactcctcagtcatagctcttgaaggacggtgatcaccttca

SEQ ID NO: 132157 - DNA, 325 bp, Arabidopsis thaliana columbia
tgagtaatatcgggagagaagagttttacgatcatatgaagaagatcggacgattgtctcaccctaatctccttccgttgattgcattctattacagaaaagaagagaagcttctcgttaccaattacatttccaatggaagcctcgctaatctcctccatggtaatattatggaactctctaagtgtctgtttatcttcatccaatgaaatgaggaatctgatgagttttgttggattgattttgcagctaaccgaacaccaggtcaagtggttttggattggccgattcgattgaagattgtaagaggagttacgagaggatt

SEQ ID NO: 132158 - DNA, 295 bp, Arabidopsis thaliana columbia
  unsure (1)..(295): unsure at all n locations
tttttaaggtttgcttaataatcttncagtaacccaaaaaaaaaatacacggggttttatcttgtaaaggtcacaggcgattaatgtatagatttaagcaacataaacagtaaaacaatcgtctacgtgtcagggtagttatgtcttcacagaggcatgagtcttctacgtttgtagtaccagaggaatgccaaaaatacaacaaggccacacactccagtaatggctaaaacccatttgaaagcaccaggcttttcaaagaagtctatctcaaaattcatcccaaagatcccgg

SEQ ID NO: 132159 - DNA, 376 bp, Arabidopsis thaliana columbia
tgaactcaaagagcgtttgcttcctccaagacctgcttcggctattaaccttagaggtgatgcaggctctcgtccttctccttcagggagacaaccactccttggagttgatgttttgggtctcaagaagcgtggacaaggccttaagtcgtggattcgtgttgatacttctgccaattctcaggtcattgaggttgataagttcactatgatgcgtagatgtgaatttaccagcacgggatttaaggctgctcgatcctttgtttgtgtatccgtcaactattcttggtagagagaaggctattgttgttaacttagagcagatccgttgtatcattactgcggatgaggttttgctcttgaaatcccttgacaa

SEQ ID NO: 132160 - DNA, 207 bp, Arabidopsis thaliana columbia
  unsure (1)..(207): unsure at all n locations
tttttaaatagcatattatnaggtatcanatgaacaggcttgagaaaaaccttgtatagcttcctcgatttcccgataaaaagaaatatgaccaactgtggttcgaatatatatacaaaaatttctttttttaacacttcttactattagatagtgtgcatatatctcatgatagtnaccaaagattcatagtgaacttcggttagg

SEQ ID NO: 132161 - DNA, 221 bp, Arabidopsis thaliana columbia
  unsure (1)..(221): unsure at all n locations
aagagtattccggcattcgaagggaagtagactactcaagaatttgacattttttcctgtcgtaattttnaattcactaaagaatttaaatagaaatcaaagaagaattaattgantcaatgaaatgtgtggttggtttgcactgagaacttgagtaaggcgtagatccttttggggtttccactttatttgataaaatgtaattggaaagngagacccct

SEQ ID NO: 132162 - DNA, 347 bp, Arabidopsis thaliana columbia
  unsure (1)..(347): unsure at all n locations
tttttaacaaaattaatccaaggtggctgctatataagaaaggtgcagagattgtgaattcaacaaaacagtagctagtattgtcgatgaacttatattgtcttatgagcagagattttngtttggacacctgaagatgtcacatcggagaaagaagtcacataatgccaaagtttaccagccatagtcactacctctgctattaaagctgggggtatagatttacaagcaaaccccggtgccacattaaacacagcaaaactcgtgagtgacactgcaccaagtctttgaaggctctatgcagtatatatccctagaattcttggtgatgggtgaatgttttgttg

SEQ ID NO: 132163 - DNA, 248 bp, Arabidopsis thaliana columbia
ctctttttcgcagaaaaactgcatggcgttcaaggttcccctctgtagttcgaagaagaaataagcgaatggggaaaattgcgagatcgacagcttatcgccgatagcgcgtttctacttgtttaattgggccttaattcaaaatttatcagaacgagcccaattctcagtgatacaatataaacttataacaatttttgtatggttcccggccgggtaaaccatttccagtcccgtataagaaagtt

SEQ ID NO: 132164 - DNA, 443 bp, Arabidopsis thaliana columbia
  unsure (1)..(443): unsure at all n locations
aaagccatttacaaatattccaagcttactcagtctcacatttaagcaacctctctctctctgattctctctttntctgagaaaaatctcagtttctcagagctctcaggttctttcattctcctccttcttcgatttcatcccccaaatctgcatgccctggatcttacgaatgttgctttgtagttttatgatctgagatcaaattttaacaaatccgtcaccggagacgaaaatgcgggttaaagagttacatccactttgttgtattactttggagagtcctcacgggattaatagccagtcaccggaagaaccggtgcaaacgggcttaactaggtcaagggggtttaccggcggaaatcgttgaccggtggatcggaatgggggactgtagctgggtcttatataaaggctaattttgggtaaggatgggggtcttg

SEQ ID NO: 132165 - DNA, 231 bp, Arabidopsis thaliana columbia
  unsure (1)..(231): unsure at all n locations
ttcttggtgaacatgatctgccataatctcttcgattccttcatttatgtgccagcaataaagatagatttggtaggaagtggaagagactttattgtatatgataatcaaagggagtgggaaagctgcagtaattctttggaaaagcccggttctctttgtcttcgagctttcatnttgtaatccactctttcgttccttcatatacctccccaccactagatagagaca

SEQ ID NO: 132166 - DNA, 279 bp, Arabidopsis thaliana columbia
  unsure (1)..(279): unsure at all n locations
ataattatggagatgaaattaatttattattttaacacagattattttaatacatgcaaattcaccatcggataacagagaagtaggttgaatctccattttcaaatttaatggnttataaataattttntagaggaaaacaaaatatttcctgttattacataggtgaaaaatctcatatagacatatagtatttaggacctcttttcctcaaaagcctgacgtatcactcacacattcaacctcaaatggtttgacaaaaaacatcatttcatcttt

SEQ ID NO: 132167 - DNA, 366 bp, Arabidopsis thaliana columbia
  unsure (1)..(366): unsure at all n locations
taactgtaaaaccctaatatagcggattttagacgtgagaaatggtgattataaattgagttaggtttcaacaagaaattagatgcttagttttgacttatatattcaattattttgntggtgtataggcagaagaagaaatgagaaagcaccttgtctgggccaaacctttttcgttggaagatgaaaaagattctgaacacactgcttcgaatgtcatccgcaagatcctcagcctctttaagaccgtacgcccaggatctgatctcaccaattttcaggtgacttttgttgaaataaatctactgttgtgttagaacgactatttgcgtgtttngtttttcctaccaaacatattgatttgag

SEQ ID NO: 132168 - DNA, 220 bp, Arabidopsis thaliana columbia
  unsure (1)..(220): unsure at all n locations
tttttttaanttaaagtttataattccaaaatatttcctcgtacaagttttataaattcnaaacttatgtcttaacacaacgcaaataacacgaaataaaacttccaaatgacaganttgaaaaaaacaaacaaaacacactccaaagtaaaagtaaatgtntcacattngtcccacaagatataagaggagtttcctggtttcantcaagagttaatct

SEQ ID NO: 132169 - DNA, 289 bp, Arabidopsis thaliana columbia
ccgctttctcgtttctaatccgttcaagctttcgtgaattcgtctcataaacctctccactctctctggatctccacgcatagatcttcctctgttttcctccataattcttctctctttctctggatcacaacaaagcagtaatgagaaaaacagcatgagttggttcacaaggtctgttgatgtgtaccgtaaagttgtgagcttgaatctgtattgccgagttattctgtaaactttttctctgccttgaaaaaccccatcttcaattttcattctaaatcctcag

SEQ ID NO: 132170 - DNA, 314 bp, Arabidopsis thaliana columbia
taatcgcttagcacaagcgctaaccctgacaagccctacatcgcatatgcagttggagtggttagtcgattcatgcaaaatccaaagaaacctcactttcgacgaatattggggtacatgaaaggaagacttgactatggtcttctgtataagaaaggagaacagtgtaagatagttggctattgtgaacgccgactatgctggtgatcacgacacgcgtcgatccaacaactggaaacgtgttcaggcttggtttaggagcagtttgtctttgaaaagtaagcggtgttttagccgtaaccctttgttggaag

SEQ ID NO: 132171 - DNA, 414 bp, Arabidopsis thaliana columbia
actaggcttaacgccctcttcaccgaatcaccatagtgagaacacttcatcctcatccacttctccactgccataaaaagagccttaatctccttctcgggcaggccataacaccttctttccctcagctaaacaccatataaagagtcactcctcgaggtaggtcagcgactggaagagtcgtttgaaggcgatcagcagtcggtctgataaagaagtctgtatgaccatctctgtctgttctcctcatccccctatcataactcggcaaagcgttagtgccctttccagctagtcgttccaacaggaatgcttaagataacgaaccttgaccaacttgttcaaaaacagaggtcggcctcttcatccttcaagctttgagtggaccgggtagcgtcaatcagagtgtgaatg

SEQ ID NO: 132172 - DNA, 248 bp, Arabidopsis thaliana columbia
  unsure (1)..(248): unsure at all n locations
tgccagtagttgttggttccaaactcagattcttcaaggttgcctacttttgatctgatttacttaccagtgaatcataggaagaagtctgtgcttgccagtatcagctttctgacaagtacttgttcgctttcacctgataagaaaaagtaatttcagattactattaaataatacattaagctatatagaacttcccaagagttacaactnggtttccattatattcagattctaagtcccacagg

SEQ ID NO: 132173 - DNA, 273 bp, Arabidopsis thaliana columbia
  unsure (1)..(273): unsure at all n locations
tttcatgaaaaaggtttggttttcccattgattacgaaacanattatgttacaaagagaatagtcacatcctcatacatgtatttnaccagantcaactataacanatatgtnctccaacgttccanttcaagattttggattcagttccttccaagcggagacccttggtctctggggactactagtattacaaacagcagtgataccagtgctatgcccccaaagagaaggaaaagattctgggtccaagaaattccttttaaaggtgaaa

SEQ ID NO: 132174 - DNA, 426 bp, Arabidopsis thaliana columbia
agtgggagaaattccaacaaaattcagtgggagaaattacaacaaaattcagtggtagaaattctccagaaaacgaaaacggcgattccaactctacaatcaaggcagaacgcagggaggagaagagaatagattatagacggcggaccggacccaagctaggctgaaggcaggactctattaagtacggctaaaggcagactctattaagtacgactgaaggcaaaccaagtaagtgccggtttcaaacaaaggtgaaggaaggtacgatcggttggacaagggatcggttgagatcgaaccatattcgtaggacgggttacccatagcgttttccaggggcttattcccggggcaagccgggcttcattcgggttggccttcattggggcccgggttttattctacctttttttagggcgggat

SEQ ID NO: 132175 - DNA, 256 bp, Arabidopsis thaliana columbia
  unsure (1)..(256): unsure at all n locations
taaaaagtcgatttttccttgaaagtcttaaaatcttgtccctgcaaaanaatctctagctgaaaaatattatcattggctttgatttaaaagacatatctttgtggtngattgcnttacacatctttttttncccctaaattctcgaatgtcctaaaatctcctttatttaaattggtagttttggtaagacaaatctttttgtgggacatctctttttaagtctctgtcttgatctcagtttcatttcggcaat

SEQ ID NO: 132176 - DNA, 229 bp, Arabidopsis thaliana columbia
  unsure (1)..(229): unsure at all n locations
aaaaaaggatctccgatttaaatattgtaaagtaattaaaacttttccagaaattaagaatgatttagcataacaaaaaataaatngggattccctttttcgncttttnttccttcataaaacctncctctttccattccaatagatacctcaattccnngaatagggttttggtgccgaataatcatcaggtacgagatttcggtttcccctttgtggtgttattctt

SEQ ID NO: 132177 - DNA, 304 bp, Arabidopsis thaliana columbia
  unsure (1)..(304): unsure at all n locations
ttttttggagtaattaagctattgaggtttattatatcaaattttccaaagagcactagttacaacttacacaaagataatatattcaaataaacacaaaactttatgcaagtagtacatcatcantaagatacgaaacaaaaatggaaatttaacaaaccaccccgccgataatacaatttcttcctttggccggccctgacgagccgagagaaagagagtgaaagagagagagagagagagcaatattttgagcttcacatattgacacttcaaacggtttcaggacgagtagcctccacgt

SEQ ID NO: 132178 - DNA, 299 bp, Arabidopsis thaliana columbia
  unsure (1)..(299): unsure at all n locations
agtaattgaaaaatgacacatacctcttttnctacaatcaaagtttataactaagaagaacaaatgcaatagtaataataaagatttgaggacatactgtgacaaagaccatatctgagccataaagagcttctncaataactgctttgctctctctagcagcattcataccgatttcnggatttcctccagcacctaaacccctagtcaactccttaccaatttgtaacctattatcaggcaaaacaggagacattctcatagcctggatatcagtgttgacaatccagaactccaca

SEQ ID NO: 132179 - DNA, 363 bp, Arabidopsis thaliana columbia
  unsure (1)..(363): unsure at all n locations
tccggcatttccttggcggataactagaagtgaaatctcattttccatgtnatcttataagtcctttcttgtcgcagttgcttactttcttcgactattctgtacctctctcgattaaagacattcgggagctggcttggcttgatggcataatgtttttggctagagaaaaggagcctttcgctgtaagagcgctggcccttgtcatggtgagtttggttgcttccataaaaagtggaagtggagtggtgaggcgggccccttcattaatgattattaatgattaggcagagaataatttcattttagtttggtgctaagatacaaatgtaaatgaggttgtttaataggttttatgacagt

SEQ ID NO: 132180 - DNA, 379 bp, Arabidopsis thaliana columbia
  unsure (1)..(379): unsure at all n locations
tttttttagtctaaacttgaatatattaatcacataaataacgtcattttttttcttctaattattgtatctttaagattgtattgtagttagaacttagaacccacacaattattgcataaatagtcactcactcccacgcttaacacataatattcatcacttagttattgattttactaacatcaaccccaatccttttattgacattaccacacatctttttatcatcatatacttttngctttcgtagaagatcccacatccatttagaatgtctcaaccacagccaccggattcaaatccgcagctgcttcagatttttcatcgcctcgaaccgtggctccttggcctgaacttgagtccggcatagagttca

SEQ ID NO: 132181 - DNA, 335 bp, Arabidopsis thaliana columbia
  unsure (1)..(335): unsure at all n locations
tttgcaagtngtaaccaatggctctttctttcaacaaatctacaatacacaataagttatatgtnacaagagatttaacagaagctgtttctgtgagagatgtatagngaaaatgtgcacaaaatagcggtagtctcgtcatatccagtgaccttctgcagcccataccgagacggttgagacatcaaaatcaaccaaccaagtgtcaattgttcagcctcaggccctgtttatacttacttggcttttcatccgaggtttcttcagttttttcgtcactccccgggttcagcgatgatagcttttccgaatgactctttttggcatccccaaag

SEQ ID NO: 132182 - DNA, 356 bp, Arabidopsis thaliana columbia
  unsure (1)..(356): unsure at all n locations
tttaagggagaaaatcttcctaaaatataaaacaaatntggtcataaactgaaaagatcatattacaccatacaaaggccaaagagattcatatcattctcctaatccttcctagagtgcaaaagcaaatcattgaacagaactttaaacaccatcaatcgaaaccatcttaatctgaaaataattaaaaaccatgaaataaaaatgataagaagttatttgaaaacatcatcctagtctctcttgatgattggtgctcctgcttcaacagccttgattctctctctgatggctttgagcttctaatcaaccacatcagctgctctggccagttcctccgaccaatcaggtatcgg

SEQ ID NO: 132183 - DNA, 338 bp, Arabidopsis thaliana columbia
  unsure (1)..(338): unsure at all n locations
tttgcgaaactttacttgttttaaaacgataacataacacttcatcacttcacgtttacacttatnatttgccgtttgatttctcatggcgcgatcaaaccaaacttcttaaattccaattttaccctctccatctcttcctccggcaacgtaaccgtcacaaccctctcctccgatttcgccgccgcgtaaacaaccaccaatccctcctcccctatcccctccacattacaataaaccgactccggcgacttccccatcactttcgcctcatacaaatcctcaccagtcagatccagaaacgtcaatttcgntccataaacaacanaatccaaatt

SEQ ID NO: 132184 - DNA, 306 bp, Arabidopsis thaliana columbia
  unsure (1)..(306): unsure at all n locations
tttntatacattcacttctatttctttattttgaagntgtgtaatacatttctcattcacggaacaaataaaatctttacatttttgtattcnctttttaaangtttcccggctgtatttacttttncttcactaggggtgtgtcantctagaaagacttggnttctgtcaccngcagngtctttaaaatctaacaaaattttccctccgacctcatctgctgcatcggncatcaattgcttcaagntcacggctcctaaaggtgggacaatntttgngacaccttccaagnatccggccgggatt

SEQ ID NO: 132185 - DNA, 386 bp, Arabidopsis thaliana columbia
  unsure (1)..(386): unsure at all n locations
ggcacgagctgagacataaacatcaattcaaatcgacgcaagcaaagaaagcaaaatggaaaatggaagcgggaaggtgttgaagccgatggactcagagcaattgagagaatacggacatctgaatggttgatttcattgctgattactacaaaaccatcgaagatttccctgtccttagccaagtncagcctggttatcttcataagcttttgcctgattctgcaccagaccaccctgaaactctggaccaagttcttgatgatgttcgagcgaagatattgcctggggtaactcattggcaaagcccgagtttctttgcttattaatccttctaacagcagttttgctggggttcttgggtgagatgttgagtgctgggtctt

SEQ ID NO: 132186 - DNA, 341 bp, Arabidopsis thaliana columbia
gcaatacagaaatacgagcaagctcactaatcatagtacggtaaataagcacaagcagcagcaaggaaagaaagccagctagcccttatagtgctgcaaatcaaatctgaacaacacctaagtcaaacacacacaaaaatcccaggaggatgcataggaggttaactaagacagttcccgctggattcacctatcaaatccaattcttattctcaaagccaagaaaagtaacatactttccacactgttgacagtatctcttattctctccatcaagcacaacaaagctggcggtaggcaacggagacaaaccctatgcctcttatggtacctttggggtc

SEQ ID NO: 132187 - DNA, 259 bp, Arabidopsis thaliana columbia
  unsure (1)..(259): unsure at all n locations
cagcaaaccctctactcctctttgaactaaacaaagaaagactcggctgtaagactgcttgaagggtcaatttgaaaaaagtccaattcaacaggcgtgtaactggttgagcaaaggactgcaactcaatcgatggctggaaactaggaatgatcatatgagagtcttacccttactggcactactcctcccaaaagggggactaggcgggctataaggtacataactagangatagaggcaggaactcaacttcactt

SEQ ID NO: 132188 - DNA, 392 bp, Arabidopsis thaliana columbia
  unsure (1)..(392): unsure at all n locations
actatatcgaagattttctctcctaaagtgttttccctttgtcagaaacaacctcaagcttggaatggntcttacactattggtttaccggcctacgcggatcgtacgcaatgtacctgacctagattgcgaggcactacttgggccctagcttctcgatgccaattccgtaatgaggctcttcttcgattagattgagatctgattttctcctcttacggtattatcgatttctagattgaataggaatgggtcagcacggtgcagcggcaacttaaatatatctaaacggattgcgtggtacccccggaccgaaggaaggggcttcaaaaatgaatttgaatcaatgaaatgttgcttggtcttcactgagaacttgaggtaaggggtag

SEQ ID NO: 132189 - DNA, 290 bp, Arabidopsis thaliana columbia
gctggaaactttgttctccaagtccgagcggctcgctgaaccaacatctcagctgcaactgaccggtccttgcaggaacctacaactttcaccacttcttcgtttgacaaaacatcccaaatctgttcatccaaagaacacgcagaaaccatttagtagggaatccatttgtcagaagactgaaagctgtacaagttgtttaccccatcagtagctagaaccacaaactcgtcttctctgctgacttttctgcagaagacgtcaggaatgcagacaagtccctagtcttt

SEQ ID NO: 132190 - DNA, 363 bp, Arabidopsis thaliana columbia
  unsure (1)..(363): unsure at all n locations
gggcaagtatgtggcttatgactacaactccatggttacggcttccttacggtgaccactggcgaaacctccgtcgtatcaccgntttagaagtcttctccacaatcgactcaacgcttcacggaaaatccgacatgacgagttaaagatgcttctccaaaagcttcacgatttatctgtcgaacgcccggctaaagtggagttacgacagttactaacgggtcttaccctaaatgtgataatgagaatgatgaccggaaagagattcttcgaggaagatgatggcggaaaggcggggataagtttggagttccgggaactagtggcggagttctagagctctctgcgggcggacatccagtg

SEQ ID NO: 132191 - DNA, 285 bp, Arabidopsis thaliana columbia
  unsure (1)..(285): unsure at all n locations
aatctccggtgctaacgtcgttggttgggttctctccgatgggtgtggagagttgaaacatttagcgattaggnaaacaaaatcagtggagacgtcgatgtttctcgctgcgtgaatctcgagtttctcgatgtttcctccaacaatttctccactgggattcctttcctcggagattgctctgctctgcaacatcttgacatctccgggaacaaattatccggcgatttctcccgtgctatctctacttgcacagagctcaagttgtttgaacatctctagtat

SEQ ID NO: 132192 - DNA, 305 bp, Arabidopsis thaliana columbia
  unsure (1)..(305): unsure at all n locations
ggcacgagaaatttctctagtcaggaattgantaggatagatttcaaanttaggagctttttggatttaggaaatgaatgatgatgatacatcctctagaggttttgctctgccatctaaaaagtctcgagcttcaaacttgtgctctcagaatcccttgtgttcaagtttatgggtgtagtaaggttctgagctcttcgaaagattaccacaaaaggcatagagtttncgaggctcattcgaaaacttctgtggtcatagttaatggtcttgaacagaggttttgtccaacagtgcagcaggtt

SEQ ID NO: 132193 - DNA, 441 bp, Arabidopsis thaliana columbia
  unsure (1)..(441): unsure at all n locations
gaatttaatcagaaattgaagactctcagatgtcttctctgtcgcaatcgccaccaccgccggagatggatatccaacccccggcattggttaacgatgatccttccacttattcctccgctttatgggattggggagatctccttgacttcgccgcagacgaacgccttctcgtcgatcaaattcatttccctcccgttctctctcctcctctaccgcctctaattccgacgcaaactccggcggaatctgaattagatccttctccggaagaatcgggttctggttcggttcgggttaggaagcgagacccgaggttgatttgttccaatttcattgaaggtatgcttccttgttcgtntcctgagcttgatcagaaattggaagacgccgagcttccgaagaagaacgggttcgcggcgggtcgggcgtggtcgatgt

SEQ ID NO: 132194 - DNA, 205 bp, Arabidopsis thaliana columbia
  unsure (1)..(205): unsure at all n locations
ggacgagttcctcctgactctgtgaactattattctctatgcttttaatcgccggtagatttggaagatctaatttttgaatggaccctcgaaggtaaattttaacatacgtgaacgagaaatnttgtgacccatgggaccgcgaccgtaaactacaccgcaaaagntcgtatcttcttccccaccaaagtttgcagcaaaggtt

SEQ ID NO: 132195 - DNA, 300 bp, Arabidopsis thaliana columbia
  unsure (1)..(300): unsure at all n locations
tttgtctaatatcatagaaaccgaacaagagtaataaataaaagggtcatatacccaaaccaaacatccaacataggggcataaagaaaatacgaaaaaagacttacataaggnttagtttcacaagctaaaatgcacaatacaaaaaaagactcaaagatgcatactaaaaaagtaaaaagncaaaccgctcaagattcataggctttgaatatcatctttgcagtttcattcacgngtccagacctctgcaaacatagctcaaactgcttagccttangcttcttccatttctcctnc

SEQ ID NO: 132196 - DNA, 300 bp, Arabidopsis thaliana columbia
  unsure (1)..(300): unsure at all n locations
tttgttttataatctctttcatatgtnatatttttnaagagtcggaataaaatatttaacacacacatagatatatcgttgttattacaaacaagaaaggtagtacttatagacaagcatgcattcttctccataagagaatttncagcaacggattcggttgaacgttattgtaacattcaatacaatcaaccgattcgatccgtcgcttattttattatttngtataaacatgcatgtttgtatcattcactgatatctaaacacacatcacaatatggcagaatatataactggtag

SEQ ID NO: 132197 - DNA, 201 bp, Arabidopsis thaliana columbia
  unsure (1)..(201): unsure at all n locations
ttttttttaattatttgtagattctatcaagtgtatacagtactgtacatttagttacatatacttgcatctgtgatatatttcggtaaacaccaattgtaattctactttatgangtattgtgttatttatatacacatacaagggtgagtgatcattagagaacggataaagatagtaaatcacatcttggacatggcg

SEQ ID NO: 132198 - DNA, 266 bp, Arabidopsis thaliana columbia
  unsure (1)..(266): unsure at all n locations
agaagccattgagtgttgtttcagagaagaaggaaccaaatgagtttaggttgctgagtagtgttggtgagatcaagagaggtgaacgtaagacattagacaatgatgagaaaattgagagagaggaacagaagaatgtggaatctgagaggaagcatgatgaggttacagaacatatgtatgcagatggaacaaaatggggatattatcctggtataganccgagtttttcggtttcggatttattggatccgtttttaggaagg

SEQ ID NO: 132199 - DNA, 393 bp, Arabidopsis thaliana columbia
  unsure (1)..(393): unsure at all n locations
agagaattgggtatctcaaaagttctaagaaggaatcgattcgacttaggaagaagaagagataacattggagctttaatggctcgtcctcttgagtgtgagacagagttgcaaaaatgtaatctttatatataaatnattttatcaaaaaaatagttttataatacatcggagcatctgatacaactatgatcaaggaacttagccacaaggctctcaggttcagggatcagtgaggaagttacgctgttccagaaaatggaacgttaaggactcattgagtatcttcttgaccgattcgtcttgctgcgatctctcatcttctattgcagggtatgcaaaatagctgcttcaccaaaatcaaaacaggatcaaagttaaagctttgcaaaa

SEQ ID NO: 132200 - DNA, 304 bp, Arabidopsis thaliana columbia
  unsure (1)..(304): unsure at all n locations
tttaggaaaaatttccactaatatttgataattttttaataagattacaacaaagtttaatttccaaatggngcaataataagaaacttaagtaaaaattacgnaatggtccaccaagtttcttcaaattacacatgcgtaccatgggaatgggaggtagcattagcataccccctcaacactaacaatcttctcgtattgcactaaaaacaaacatatcttaacccaatatcaaaaatttggtaagagccaaagcaaaacctcaaatttnngcaagtcagatcagatgattcagggnttaact

SEQ ID NO: 132201 - DNA, 321 bp, Arabidopsis thaliana columbia
  unsure (1)..(321): unsure at all n locations
ctaccacgagtcctggtccttnaccaacagttggtttaggcccgnttcccactgctaattcaggccctgcaactggtatcgcttcaggtacaggttcagcctcagggggttnaggttccttgggtaccaatactggccccgggctctatcgaccactggttctagtctttaaccagttgctagttcgggtaccttgcctgtaactggccccggtcctctaccaaccagttctggtctctnaccgggtgctagttcgggtaaacttgcctggttcaggttcagggcctttgctactgttggttcaggtgctgcagctacggg

SEQ ID NO: 132202 - DNA, 380 bp, Arabidopsis thaliana columbia
  unsure (1)..(380): unsure at all n locations
aaagggagtcccttcactgccgcattgtggtttggcttagaaggttttnatatgacgataaatangcggcacgagacttcatttgctnantanggagaagctcgagccatggttagtcagtgcagtcaaagtctcaggtggtttgaaaattttatctgtcttagccacaagactgcccattcccgatgaccatgcatctttaatcatagaagagaaacttaaagctccatctctttccgggacaagaatagaactattggtgggtgtttnctccactggaaataattttaagcggcgtatggcattgagaagatcttggatgcaatacgaggcagtaagatctggcaaagtagctgttncgatttctcattggccttcac

SEQ ID NO: 132203 - DNA, 286 bp, Arabidopsis thaliana columbia
  unsure (1)..(286): unsure at all n locations
cttggataatgagctcagtagtacaaaactttgaagcactaagacaaagctgagattggagaatgcaaaaacaagacaaaaagcaaagttctatactgcagattcttgggttactttaggcaagaaggtatcccaccatccaggttcatacttggggtatggcgccacccaatttttaggcttatcgaactcaagagtggtaggattggatcaagangcagangatggcccaaaaggtggaagcacaaggagggaaaggagccaacctatgggacgttggatcgac

SEQ ID NO: 132204 - DNA, 409 bp, Arabidopsis thaliana columbia
  unsure (1)..(409): unsure at all n locations
caaaaatttatatatttgtgtgaacttaaatttaaaaatccatcgcactgagcaaaataanntcagaaactaaaaatttgtcatttaagataaattgaattaaggaaaatatttttttaataattgaaactccggtggaaatcaggaggagcgacatctccatgctgaaactccgacgagttctgtcctttgccaacataggagaagtgagttatgtttctcctcgacgtgaaagcctctcactggcgtccgttggntnaaacactcggcttgagactccgtgaagttactgtgcgtcaccggtgagaaacccatctgtagaaacatcgcttgccacgtcatcatcggcctttctatcggacggctacgatccaacaccagcttctctatctccggctgtataaggaaa

SEQ ID NO: 132205 - DNA, 405 bp, Arabidopsis thaliana columbia
  unsure (1)..(405): unsure at all n locations
ctcattataaggctttaatctcaaccaagactatgttgcacactctatattgtgttggaaaagtgcaaagaaaatcatctacatattctcaaactacttaaatgttgcagcattcaagttttnagctcttgtacaggcgatgactgagaccctttccatcaatacataaatccaaatgcaggtcaaagcaaaacaaaaccaatagatgaattactactactaatactacttcattagtactttccatatcttcctcatataaacggctaaagaccaaacagatagtcctgctgatacataangcaagccagcacctgaagctacgagccatccaacattgctatctcggcttgcaaggaggtatggttagtgctgtnatctgcgtggcggtttttccacttggcc

SEQ ID NO: 132206 - DNA, 418 bp, Arabidopsis thaliana columbia
  unsure (1)..(418): unsure at all n locations
ccatcgcatgctgatnaacttatgacatgaagtatggtgtcagatcantgcagggtggaggaagatcttcagctagagagaccattggaagagttgctcctggactttggccaagaaaattttgaagcaatttgcaggaactgagattcttgcctatgtctcgcaagttcaccatgttgtacttccagaagaattggtagaccacgagaatttaacactcgaacagatagaaaataacattgtcagatgccctaatcccgagtatgcggaaaagatgatagctgcgattgatgctgtcaggacaaaagggaactctgttggtggtgttgtgacctgcattgttcggaatgctccacgtgggcttggtacaccggttttcgataaaacttgaagcaggaactggcaaaagcttgtatgt

SEQ ID NO: 132207 - DNA, 416 bp, Arabidopsis thaliana columbia
  unsure (1)..(416): unsure at all n locations
aaaagatcaacaacaaaaaaatgtcagacaacaatccagaaatcgaatcatcaaccttcancaatctaaacatcgacgtcacagaatcaatcctctatcatctcccaatcccttccttagtccgtttcactctcgtctccaaacaatggcgttcactcatcacctctcttcctccttctccttctccttctccatcatcaccaccatggctcttcctcttcggtatccacaacacttcctctttccacaaccaatccttngctttngatcctctctccaacacctggctccgtctccctccttcctcctcttcctccgatcatctngtnggatctaatcgcttcctcttcaccaccggtcctggcttatccttctnaccaatccttaaacctaattggcgattcacttcccctgtt

SEQ ID NO: 132208 - DNA, 415 bp, Arabidopsis thaliana columbia
  unsure (1)..(415): unsure at all n locations
caaaggccaattacgtcctcgatcaatctacacatagacatgttcacacacccaatacatagagctatgcccattatcatcatgtacataaacatacacatatccatatacatgcaaatgctgatcaacagacctacttatcacatgcagcgaactgatcagcaggtgcacttatctcaccctgatcaacatcaccactagtaccaccactagtgctggtttgtccaagcaaactacttattgaacgtgcctttaccatgccaagctttactctcttcttcttcacttccaccaccaccgcctttttctngccgccacgaccaccaccactcttgttcatgctccttacccttcctttaccgaggatgatgctcacaaaggggantaaccaacaagcgtttgctggacaacatct

SEQ ID NO: 132209 - DNA, 415 bp, Arabidopsis thaliana columbia
  unsure (1)..(415): unsure at all n locations
atcaataagtcagtgagctttttcctcgtttctgacgatggcggttnccggcaagagctcgttcagactatgattacctcatcaagcttcttctcatcggcgataggtngtggggaagagttgtttgttacttcgattctcagatgatactttcactacaagtttcattactaccattggtattgacttcaagataagaactgttgaacttgatgggaagcgtatcaaattgcagatttgggncactgctggtcaagaacgtttcagaactatcactacagcgtattacaggggagcgatgggtatattgcttgtctacgatgtaacggatgagtcatcttttaacaatattagggaactgggatgaaggaacattgagcaacatgcctcaggataaatgtcaacaaaatattgg

SEQ ID NO: 132210 - DNA, 402 bp, Arabidopsis thaliana columbia
  unsure (1)..(402): unsure at all n locations
attataacattttgatcatttagttttcattgancttgtaacgtttcctcacgtgtgtaatgggacaaataaagtattgtggcggttcacggtggttagaggtagaagcttcctcttcctcgcgcttacccttcagctttnatacttctctaagctttatcttcaactctncttgttcttctctgattcctctaaacgtttccattgataagttgttctttncttgaagctttctaatcacagtataagattcggttatttgggtctcggattctgatctcatctttncaagttcgtcatttcttttcctcagtgccttctctgtttctttcctctgcttcaactcctcaaaatacacatttncccattgtttagcctttttgagtgcatcaactgcagttt

SEQ ID NO: 132211 - DNA, 414 bp, Arabidopsis thaliana columbia
aaactttatactttattaaccgaaagatgacgagttcaatacaactttttttgaagagagaaatcaaatagatgcaggaaaataaaacgacatctatatctttttttttctttatattgagtggtgaaacaaaacaaaatcaatcaaggcttcttctggaaaccccatggattcttatttgcccagttccattgatctctgcacatctcatcaactccatattttgccttccagccaagttccttctcagctttctgagttgaagcataaacagctgttgcatctccagctcttcttggacatagcttgataggtattttcttgccagaagctttttcaaaaggaggaaaccatttctaaggacaggaagttccttgaccagtgccaaggattataaggcagtacagccaatct

SEQ ID NO: 132212 - DNA, 343 bp, Arabidopsis thaliana columbia
  unsure (1)..(343): unsure at all n locations
aaaaagaggaattgatactttttgtgctaatgaagatcctgaaaaaaagatcatcaacagaaacgagattacagatttattttaacggtaaaaanttacaaatatgattggctggnatttatgagacataaacatgaaacatctacgtagtaattcaacaaagcaacaaaggaacattcttttgtggcatcactcgatcactttncttaaattaagaaagacagaggattttncatctttatcaaggatgagaagggaaaggaggcgtatcgaggcagatccagcagatggtgagatttatccgccaagaagcgaaggaggaaagcaaacggaggatctcggt

SEQ ID NO: 132213 - DNA, 255 bp, Arabidopsis thaliana columbia
  unsure (1)..(255): unsure at all n locations
attaattaacatccacaggtccaacaacagagaaacaaaataattatcacaagtaaaatataaaattagtaatatacttgtacttataattttgggcttatgcttttaatttattttaacactagactcgacgaaactcatcactaacatgaccacaaaaaaaaangattacaattctaaaacacaaggattaaaaaggaaaacatancggggtaaatttaggactggccatcacctttacaggttgagggagcg

SEQ ID NO: 132214 - DNA, 214 bp, Arabidopsis thaliana columbia
  unsure (1)..(214): unsure at all n locations
aacagttctgtttttaaaatatacctagtcctaaggagccgtgaaagcaatcgaacgacaactgtcgacctnnttctgcatctccgacctacttactgcacattcgcacaattacgcggattctctatctgatgtatngttcccttggctagaggccagttntgtatatgcgagtggtccttagattccgggatgcagaggtacttcgttcacc

SEQ ID NO: 132215 - DNA, 362 bp, Arabidopsis thaliana columbia
tgtgattgtaagttttgatgatctacatgtgggatgtgaaggaactgtacccttccgatctagtgaacgcattgcattccgttatctcatcagtcaaaaatttgcaggtgatatcgctgagattggtatcattagagcaggagaacataagaaagttcaagtagttctaaggccacgagtgcacctggtaccgtaccatattgatggaggtcagccatcatacattatagttgctggtttggtgtttactccgctctcagaacccctgatagaggaggagtgtgaggataccataggcttgaaattgttaacaaaggcacgctactctgtggcaaggtttcagaggagaacaaatcgttcat

SEQ ID NO: 132216 - DNA, 287 bp, Arabidopsis thaliana columbia
  unsure (1)..(287): unsure at all n locations
ctacggctgatcattagcggataagaggaagatgcactataaagcgcttcttagngccgtnntgngagtcgttggttcgtaagctgagggagaaagaggtagagatagagagagccacgcgcgtcacaatgagctggtggcacgtgactcgcagctgagagcgtaggtgcaagtatggcaagagagagctaaagcgcacgaagaacgccgccggnttatgncagtctcagctccagcaagccgttaaccaatgcgccgtttgatgtgtatcggccaggaatagtaga

SEQ ID NO: 132217 - DNA, 297 bp, Arabidopsis thaliana columbia
  unsure (1)..(297): unsure at all n locations
acaaaccaacgtaggaacttgananntatacctaatatacaatcaacaatgctgcagaatatttcaaactgcaatctctacaacataactgcagaagaggaaaatgcatatggaagaataaatagatcaagaacgtgtacactcaatgccatgacaaatagccaaccanacaccaagcagcgttaggcaaatagctatatcantggcaagagcaatcttcacttgacgccgccacttcctctcaatgctctgagagccaccagatcgtccccttcttggaacatacgttgctgattc

SEQ ID NO: 132218 - DNA, 416 bp, Arabidopsis thaliana columbia
  unsure (1)..(416): unsure at all n locations
aatgaacaacagcccaataagatccatgacaaagacacccacaaagatttagatttcaannagtaaagttagcgatcgtagcgccgggctgagtcgcctgagcttcanccgccggtttcacttccttcgacggctcaacatgttttccggtaagctccacaggtaaatcagcagcaacacctttcaagtagaaagtgtaaaacagcttcgtaggatacacaagctgacgaagcttgacctgtccataagctccttcaaacacgccggagccaccggtgatagcaagaaacgtgtcctcgtaagtgagataaggtccttgaactgatatgtgaccataatctccgaagtaggaaactgtaagaagcttcaaagcggttcacctttcttctctgggaacatgttgggtcaaaacgcag

SEQ ID NO: 132219 - DNA, 376 bp, Arabidopsis thaliana columbia
  unsure (1)..(376): unsure at all n locations
cttttttgtaactgacagaaagaatggatgttggaatattcataaatggattgagagtaccnangaggttgtttctgtatatcctctcgacggtgagtttgcgaaaccactatggatnttcggtactaactcctacgagataatcgagtgttctgaagagaagaacctaattgcatgcagctataggcagaaagggaagtcatatctaggcattgtagatgattcacagggatcatgttctctgctcgatattcctttaacggattttgacagcattacattgggaaatcagtgcctttaatgttgagggagcatcagcagttcttccaccatncagttgccagggtaacactgggatcagccataangacgaaag

SEQ ID NO: 132220 - DNA, 266 bp, Arabidopsis thaliana columbia
acatgtgaaactttagtatctgttgtatcgatgaagaagttttggtctacagttggccttgttcaggtcacatcactcacatgatcatgattctagatcaaagattcatagagtaacaagctcttcttcaccagtcctcttccctctccagagtatgatctgctcatctttgaacaatatgggaacacatggaaccatctcctttagtttcacaccaattcgtttgcagtcactcatcccaacatgagtgcaatctagtctcacaa

SEQ ID NO: 132221 - DNA, 253 bp, Arabidopsis thaliana columbia
  unsure (1)..(253): unsure at all n locations
gttccctcttggttcgttcaaatggaacaaagggtcattgttcatgagcaacaacagtaacaacaagggtccaggttcttcttcttctggtgctgtggtgcttgagaagccaataaccctcaaatccgttggaaatttgagtattgattctactgngnncgatgcctgcaacaattgggaggagggcttttaacagatttgcgtgatttgttttncttctttttttctgtgaaaaaatctgacctttttttcc

SEQ ID NO: 132222 - DNA, 340 bp, Arabidopsis thaliana columbia
  unsure (1)..(340): unsure at all n locations
ggactttctctgaacactcaaatcgaacagagagtttaataaataaatggcgatgtctcatctctttctttcttcttcgcctcaatcttcactggctctgcgacttcactcgacgacccagttcacgttgagctactctaagaacaataaagattgttcctttcagagtgcaaatgaagctaaagtatcaaagagatcgttgctctgtcgtgcaattcatatggaatctggacattcaggggaacaaccaaagaagcttaatttcgataatctgttgaggagaaccaaacatgtttggggataattctccacagccggtttaagggaatttnccttggga

SEQ ID NO: 132223 - DNA, 323 bp, Arabidopsis thaliana columbia
  unsure (1)..(323): unsure at all n locations
gaccaaaaacaaaaactcaagatacaaatacatatccaaagaatagcggttttcacaaganctgagacaattttccaaagangagaacacaaaacanaacaattctatggcctaaaagatgttgttaactcattaacctcaacttctctgagnttgaagagagaaaagaagaagaagaaagctcctatctatgctcgaacactactccacgaggttccagataatccccgaaactaatcaaagtgaccacttggcactttaaaacaccagccttttgatgangatgctcattctgtttccaaactgtgattctgcagaggatt

SEQ ID NO: 132224 - DNA, 381 bp, Arabidopsis thaliana columbia
  unsure (1)..(381): unsure at all n locations
tcttctacatctnccaattcatccgtgttgttcttctcttcaccgtcattcanatcngatcggcactggctggtcgtctttgaaacctttcttgcaggagatggagaagaatgtgttgatcattgtgatcccacttcaggtattagccaacattgcttccattgtcattggtgaaactggaccttttatcaaagattgggttacatggaaccaagtgtttttgcttgtggatatcatctgttgctgtgctattatcttcccgattgtttggtcgattcgatctttgagagaaacctcgaaaaccgatggtaaagctgcgaggaacttgtcgaagctcacgttgtttaggacagttctacattgttgtcatcggatatcttt

SEQ ID NO: 132225 - DNA, 378 bp, Arabidopsis thaliana columbia
  unsure (1)..(378): unsure at all n locations
ggatttgacatccaatattcgtgattaagcatacagtaatgctacatgtctactacgaaatctccggccttctgacgatggaggccttcactgttctcagaagtccgaccaactaactcttacccacccataaacacaaacattttcgggaggattggccaaaaagttaattatatggatctatcaatagttagaaagagagacattgtaccctatctggaatatgccgaggcactggagctacggtaacatatctctgtgggtttaacctaagtgaactcacggnaccggtccatagatgaggacgattggtggaaacttgcaaaacgattgatcactgcaaacctctcttaggatccctgggactttcgaattctc

SEQ ID NO: 132226 - DNA, 396 bp, Arabidopsis thaliana columbia
aaggcgattgatgaaacaattgaatggatcgaaggaaaccagctggcggaagttgatgagtttgagtacaagttgaaagagttagaaggtatttgcaacccaatcatctcaaagatgtatcagggtggtgctgctgctggaggtatgccgacagatggtgatttcagtagctcaggtgctgctggaggtcccaagatcgaagaggtggattagagcgtgtttagtgtgttaagacgaaagagtggctttggaccattagcgagtcttttctttgtattgtgtcaaatagtgttgtgtactcaaaggtgttttgctagtgaacgaaagttgtatgccttacaaatttcaactgtttcagttgtttccgagtaaaaaagtgaaaaacttttttccccc

SEQ ID NO: 132227 - DNA, 314 bp, Arabidopsis thaliana columbia
agcaaattacaaaatatgtatacattactaaatattacattcaacaaccagaagaaccctgataccgtgactggtaagtcagtaaacaacaacaacaagaacaacaacaaaaaagctaagttagggtttgggaccaaaagagacgtaaaagacaacaaaagcattgatcaacaagcggcgccgagtctctgaccgagataaacaaagtgccaggttagagacataagcgtcaatatattcaaccaagaggagtacgtgttgagcttgctcagactctcactcagctgctccaattttcccgcctttagttcctg

SEQ ID NO: 132228 - DNA, 229 bp, Arabidopsis thaliana columbia
  unsure (1)..(229): unsure at all n locations
aatgaaaaaagaccaacgaatggtggattgcaatgattagtagatcaattattatgttttacagacaatagtgaaaaagttattcatatacttataatcattaaatcgagatgaaaaatccactcccacatttcttcctctctcttatattcgtcccaacattctccttccncctctatcaaagtctcaacgaccgaccaagcgaagatcaacctcaaccctagcaaca

SEQ ID NO: 132229 - DNA, 361 bp, Arabidopsis thaliana columbia
caatgagatagaagaggatactggaagcacccagtctatctttccctcagcaaggacagcagcaagagcaagagcacacctatggttttggcttgcatccgtggcagcaagcgcaaaactgtatgattccgcagcttcctcaagtcagtactactcccactcccatcacttggttccgatgatacggcttaaccacgggaaaactgaatagggaatgcacgaagcaggatagtagaaggcagatttgttgttagtttttgtttctgccttttgcgcagattagagatatggcatagttttgttgttgtatgtttaccaaactaatagcttcagccatatctcccctaggatggttttgact

SEQ ID NO: 132230 - DNA, 271 bp, Arabidopsis thaliana columbia
acatggagaaacagagcatcagaaacacttgttcttcttctttaatgttatcctcaccatcttctttttggggttcgtggtgcgtgtatcggcagaggttgtttcggtgcagttagtacggcgatcagcaaaaccaacggtgaggttttcgccgtgaaatccgtggatctcgccacgagtctccccactcaatcagagtctctcgagaacgaaatatctttcttccgctcgctaaagcctcacccttacatcgtgaagtttctcggcgacg

SEQ ID NO: 132231 - DNA, 225 bp, Arabidopsis thaliana columbia
  unsure (1)..(225): unsure at all n locations
aaaagacaacgtttcgagtttattgcttnggattatactgatacaacaaatacatagtgagaacaatttccctaaagatacatgtngtataaaccataatttccattaataaatgtaaaaccaccacaaattcatattgcagcgccgccgccgatcccccgtttccaggcggtaaattctgagacatagaaacgtcaactatcgccgggtcaccagccacgtcaa

SEQ ID NO: 132232 - DNA, 403 bp, Arabidopsis thaliana columbia
ccaaagttcaagactgtccaagaggtggttgcagccggtcaaggactaccggagagatatctccatgcaccaaccggcgaaggcgaaagtcaaccacttaacggtgcggtgccggagatggatattccggccatcgatctcagtcttctcttctcttcctctgtagacggtcaagaagagatgaagaaacttcactcagcactctctacatggggcgttgttcaggtgatgaatcatggaattactgaagcttttcttgacaagatttacaagctaaccaagcagttctttgcgcttccgaccgaagagaaacacaagtgtgctagagagacagctaatatccaaggatatggtaacgatatgattcttgtcttgataatcaagttcttgattggatcgaccg

SEQ ID NO: 132233 - DNA, 337 bp, Arabidopsis thaliana columbia
agtaccaccaaattcgtaattactccatggaagatggaacaaattcttcctttcatacatacacacaacatagggtacatagccaaagttactcatcatttattcttttttacagtccaacacttcatccaacgctgaaccgggtcagtcatcggcggttgaaggaacagttttcaccaagtcgcggaatttgagaatgtagaacatttcaagatatcgccgagtctcacgacgctccaatttcgatacgtatttccagaaaccatacacaccagctagtgtcatcaatctctccgagtatatcttccatgtgtacctttcgtatatcctttgaaga

SEQ ID NO: 132234 - DNA, 316 bp, Arabidopsis thaliana columbia
tgttttttttactattcgttaaaaacaaagggtaaaagatacaaaagagtcttcacacaaaaacacaacaatcactagctcagaagagcacaaggcaactaaacaacaaccccattagccctaaaccagccattactctcacagacgtcgccttgccagcagcaacaccagctgtaaagcttccacctggagtacttgtcgtcaatacaaccaccatccactctttctccgacccaacaccagccccgacatacctcgaatcattaagataccgagcataaccagtgttgtgtgtaattagttaaagccaaagtcg

SEQ ID NO: 132235 - DNA, 546 bp, Arabidopsis thaliana columbia
ctccatcagaacctattctcttggaggtggagcacttataatcgattacgggatgaatgcaatcatttcagacagtcttcaggctattagaaaacacaagtttgtcaacatactagatgatcccgggtctgccgatctaagtgcttatgtcgactttccttcaataaaacactccgctgaggaagcttcagaaaatgtctcagtccatggacctatgactcagtcccagttcttgggttccgcttggaataaacttcagagttgatgcattgctacagaattgttacgacgagcaagctgagtctttaagggcaggatactggcagcttgttggcgatggtgaagcgcctttctgggaaggacccaatgaacagacaccgattggaatggggacgaggtatcttgcaatgagtattgtcaacaaaaaccaaggcattccagctccattccaataaagaaagttgaaactttcagagaaggaaaccttctttttaacttggtttatctctcagtaaaagtaataaaaagtttttgagttctgaagtt

SEQ ID NO: 132236 - DNA, 429 bp, Arabidopsis thaliana columbia
tggccggagaagaagactggagaaaaacagcagatacgacgaagatgagctcggagggagtaaaagctgccggcgttgagtcatcaaagaggccgccaggaagtaatccaggtggtgttcttcatcaacgccgttacttgccatacagttacacgacgatggctctagccggattagctatctcgggggccatcatgtacactgttatgtatgctaagaagaagccggaagccactgccactgatgtagctaaggctgccacagggacggctaaacctgaagatacacatccaagaaagtaaaatttcaagggaagaattaaagggtttatcttcttcttctttttttgcttttgtaattttgttcttgcttcatgctcttgttggaacttcttatttacttgtaataaaataacataacgtgtccaag

SEQ ID NO: 132237 - DNA, 338 bp, Arabidopsis thaliana columbia
  unsure (1)..(338): unsure at all n locations
cacaaacaatatggctttttgtttacatttgtcccttaacaagtctttatgaacactgcaggaaacaaacaaacataactgacatataatttaccaatgaagcctaaagcatgacatattatttaccaatgaagcctaaagcttgcaccttgcattagcggctgagcaaaatatgccccanccgtctaacgcagtgattgaaagatatggcaacctgacaaattctttgtagtaatcctcaggtaaaacttgccgtccttcgaaaatggcaggaaatggaatcacacttgttctcttcttgatgctttcaaaatcctctccatatcttttttgcaatc

SEQ ID NO: 132238 - DNA, 352 bp, Arabidopsis thaliana columbia
tggaaaacggaaactcctccagcgacaacaaatcttcacataaaccgatccgatgcaaagcggcggttagtaggaaggctggagagccgttggtgatggaagaaatcatggtggcgccgccgcagcctttcgaggttcggattcgaatcatctgcaccgcgttatgtcacagtgacgtcactttctggaaactccaagttcctccagcctgctttccgaggatactaggccacgaggcaatagggttaatctcatcctctaaattttatttttttatttttattaattatattgaatattaagacaagaagatatttttaacgttaggctgtaaaatatcttttacaattta

SEQ ID NO: 132239 - DNA, 278 bp, Arabidopsis thaliana columbia
atcataaaatctgctttcctttttatactcataccaaatataaaaacacttacctcaagaggcgaactgaatcctttaaagctaggtttagcattaagtttcacgtacccatcctagttattcaacatattccagatccctttttatatacctcaaatttttctgattttaggtatgatcttggtatagttattagagtctttttgttatttctagtctttcctagtatttttcagatttttacaggtttcgaatgtatttggaaattatggagcatt

SEQ ID NO: 132240 - DNA, 414 bp, Arabidopsis thaliana columbia
  unsure (1)..(414): unsure at all n locations
ttttgaaatcaaacccaatccgttttactttaattgtggttctaattcaatttaaaagaagcctgagaaaatgacaatgaaggtttgaaaagagtataatggatgatactatgaccagtctcataaagtttgcatactacagaagtacaaaatgtgtcaaagtttctctttgaaagaaagaagatattttgggtgccggaatctgagacttgagtccggtagggaggtcgacatatgtctggagaagtccgctaaattacgaaaatagccttagattcctccttttttttttaccatagcttgttcttgacccagaaaaggaggaagactacaccgancacaattgcgactggtgcccattttcggatcaaagcctgacggttcaaatctttagccttatcagcatatatacga

SEQ ID NO: 132241 - DNA, 413 bp, Arabidopsis thaliana columbia
  unsure (1)..(413): unsure at all n locations
aaattattaaatcaattcatgtgtaatttcattcttttgggcgtcgatattngcttataaagagaagaaaaaaatccaataaacatgtaaaaaaaccttgcttttttgtaggcacaatgaaaatacaaccattgaagcaataattcgtaaataagagaaaaaaaggctaagctaattaagcgggtgcttacgagccacctcagcaatatgcagccacgtcagcacccaaaacagagagatgtggatgatggtttggatcagaactgaccaccttggtaggtttgtccgaactgccaattagaaggagccacgtcgttgctaacgagtgtgcgaccatcgctggtnttacctgggaaggaaaaggctttggtcgttcatgtatgaaattgctctgccagttttgtccccagttt

SEQ ID NO: 132242 - DNA, 291 bp, Arabidopsis thaliana columbia
  unsure (1)..(291): unsure at all n locations
agccatcgactccatctagtgggactcagccatcgtcantggatctgtcgtcaccgaggagcatagggaaggtacactgccgttcgatggaacaagtcagggaggagactgagcggaaaggaactttgctagagagacttaataatgtagaggagcaagtgcttaagctgtgttcacagtttgaggaagaagttgaagaagagaggaagagagaagataagacggataaggaaaagaagacccccgaagaagaagaagggattgaggaagctggttgataaagttgttgga

SEQ ID NO: 132243 - DNA, 226 bp, Arabidopsis thaliana columbia
  unsure (1)..(226): unsure at all n locations
caataacaacaacattaacaaacatgtaaaatttatacaaacattaaaaaagccatcaaatttnggcaaaacaaataatatcangcttcancttggtttataaagagagccaagcatcgtaccatctccatagcttcatcacaatctggctcgaaantatganaancatgttcttcctctttngtctccataatctcaacctttcctttccactcactcttcacca

SEQ ID NO: 132244 - DNA, 310 bp, Arabidopsis thaliana columbia
  unsure (1)..(310): unsure at all n locations
ttttttttancatgatgaaatnatgaatacccaaataaaaacaaaaacaaaaaagttgagacctaaagacattataactcacaagtcacaacatagcagaggtagaaagccatttttaacaaaaaagcaaaaaccttaggtnccccattacaggaagaaagggaccaggtttcaagatttgtctacatttaggcaaattccacaactgcataaaaaggaaagnttcancatatcatatcagtccagnnctcccatttttggagccccatgccatccggaggaggtactctcgattgttttaggcccaacc

SEQ ID NO: 132245 - DNA, 331 bp, Arabidopsis thaliana columbia
  unsure (1)..(331): unsure at all n locations
caaatctgaatatgatcaggaaaacaaaaacctatttcaacaaggatttatatgttatgaacttttccctatttnataattagtacaaccttgacagattaagagaattttaaatttatttattgacatatacatagaaatgaaaaatctttttccttcggtgcttcattatcatcaacttggtcttctctgcatctctctnatttctccctacttcaatctccatattggttgcataaatctagcacaaactgatattcagttcataagctaagcaagcttttgattacggacaatttcggatttggcaggtttgtgatgggagagaatc

SEQ ID NO: 132246 - DNA, 401 bp, Arabidopsis thaliana columbia
  unsure (1)..(401): unsure at all n locations
cacgagttacctggagctgttggctgatctnccttgggataaggcaagcgaagaacatgagttggatctaaaagcagcaaaagaacgtcttgacagtgatcactatggtttagccaaggtcaagcaacggatcattgaatatctggctgttcgaaagcttaaaccagatgcgagaggcccagtattgtgctttnttggtccaccaggtgtgggcaagacgtctttggcatcatctattgcagctgcattaggtagaaaatttgtncgcttatctttgggtggtgtgaaagatgaagctgacattagaggacacanaagaacttatataggaagcatgccagggcgcctcattgatggcctaaagagggttggtgtttgcaatccagttatgctgttggatg

SEQ ID NO: 132247 - DNA, 276 bp, Arabidopsis thaliana columbia
  unsure (1)..(276): unsure at all n locations
gaactggtgcggctcctgctgctgggtcccggagaacccgtnnnaagtcttgacaattgcgagctctcgcattcacatacttaccagtaccgcccattnccccaagatgagattccgatgcagctgttctatgcacaccgaagaaactgatgctatcttcatatccaccgctctcaaacatagccgtgaaagccatagtctggctggtcccatcaagggcacttgccacgtagaagccttgggtttacccagcagaccagacccgagttcgtgtcc

SEQ ID NO: 132248 - DNA, 256 bp, Arabidopsis thaliana columbia
  unsure (1)..(256): unsure at all n locations
ggtaatgancaggantgtaatttgttttacaatnactgtnatgaaatcttttgtcattgatgtacttcactcttttnatcgtctggttgaattgttgaatccatatccccatcgccacatcttccagcttgaaaagtccaagatctctttgacggtgacccttcaccacaaatttcgctatatcatgagagatgatgtagccagggccatgtgccatgggaggtatgaatctaaaggccattcctctttagggata

SEQ ID NO: 132249 - DNA, 330 bp, Arabidopsis thaliana columbia
  unsure (1)..(330): unsure at all n locations
gcgagtnatttacaagaaacccatcagactgttccaaggtaaagagagaaacttttccggatcattctcaactagtttctcgttttcgatgtctgatgannttggtagtgtcttggcttttataatggttccaagaggtttggatcttaggttgtttggtagaaagggtaataatagttcctctggtttagggttcttattgaaacacaaagttgttgctgttgagtttggtatctccaagagagggaatcatgtagggatcttagttggtcgtcctgaatctggtaaagttagaaagttatcatcttttggtcaccatttcaatgaaga

SEQ ID NO: 132250 - DNA, 411 bp, Arabidopsis thaliana columbia
  unsure (1)..(411): unsure at all n locations
caaagttatgttttctaccaacaacgtacagagatctcaattattcttaaacacaaaggtttgatcaacgacttgcttatttccatggggcagcgagaattgcctgaaattcgtgatctacattctgaacctcttggtcaagaacagctgcttgagactgcatccgagctatctcattgtctagtgtgacttttgcttccttcatcaacacttcttgcctctgcaattcaacaatatcttcttcatacttccttctttnatctgtcattctctgtgatcttttcccgcaacagcttttaattcctccaatgcgcatgtctgcctttctttaatgggacagtatcttgggtatcctggatcgagggtgttgtaacattggaacccgtgtttctcaagcttgagggaaacact

SEQ ID NO: 132251 - DNA, 410 bp, Arabidopsis thaliana columbia
  unsure (1)..(410): unsure at all n locations
gattatttcgttttattcggtctgagagacttttaaaaggcaaaacccctttgtcacatctnataatgatgcaaaaacaactatgaatctatgtgatatcataagctaacgatggtgtttcatttagcttctgcgnctttctcactgatacggagactttcagctttacgcacaacctcctctgccacaagcttcacgtggccgcttagattgctctcctcaggatggtttaccgaacccaccacccatattctgaccgttccgtcttctgagcctgaggtgtangactcccctcctggcgcatacctcacgcagncaactggcccgtgatgacccttgttacacccaatctcttctccagtctgggaaatcaaacctgtggcacccacatatcttntcctccaggcaat

SEQ ID NO: 132252 - DNA, 300 bp, Arabidopsis thaliana columbia
  unsure (1)..(300): unsure at all n locations
ccgcaaanttctaaagagaaaccttctttgtctttacttcgtgaggaagaggaaagtaatgaaccaactgagatggaagatgtggattcagactcaactgctgtaaatctattaggagaagctncatctgagataacagttgtggatttaagtgatggtgagagaggagaagaagaagtagaagaagaagaagaagaagtagtagtagaagaagaagaagaaggaattgtaacancagaagaagatcaagaaaaaancaaaccacaaaagcttacttgtccgttacggtcgtggacatat

SEQ ID NO: 132253 - DNA, 274 bp, Arabidopsis thaliana columbia
  unsure (1)..(274): unsure at all n locations
gttttcctgggaatcgtacaacgaaggaagcccttcttcaaatgaagctggtacattttttaaagatggtctagtggaacaaataagcatgaccagagataaaacagattatttctggtattttacggacattacaattggttctgatgagagcttcttgaagactggtgataatcctcttcttaccatttttccggctgggcatgctcttcatgtattcgttaatggcctgcttgganancttcctatggagcactgagcaactcaaagctca

SEQ ID NO: 132254 - DNA, 370 bp, Arabidopsis thaliana columbia
  unsure (1)..(370): unsure at all n locations
ttttnnattactcagagattctggtttatttgataacaacagtgtaacaaacagacaacatcaaacaagaaacacatacaagaaataaaagaggcataagcaaggttgataataagcaatcttgagccaagaggtgaagtcaagttatccacttctcaggagctggcctggtttgcaggttggcggttcgatgagtcggtttgtccatgggtagaaccaacagggccaacttcatcgtcaacaaagacgggatcacgctcagccaacagtctggcagccagaggaagaccacgagacttattcatcagctcatctatacattttttgtcgttccttggtgactctttctgtttatctttaacccactgca

SEQ ID NO: 132255 - DNA, 421 bp, Arabidopsis thaliana columbia
  unsure (1)..(421): unsure at all n locations
ctgaagtcaacaaaagagatcatgcctctgcagtatttgttgacgagtttctaccctaanccttataaagactcttacacgtttctnagtgtttataaggagacctgtgtcaactgtagaagatttagcataccttcaggttcttttgcgtttcagaattttnatgtcgttcgaaatgaaggtaatcacttccttcagagtggctttccttccttctttgaagttccacagttctggagttgtgtaccgaccacttgcattatactcattcatctccacaagagctgttttnactgcgttatgcacctctttaccccactctcttttaagcttcttcagctgctcatcatcctngtctaccacttcctctgctccatccccggttccttcatgcttgaaagggttgccaggagggnttcta

SEQ ID NO: 132256 - DNA, 352 bp, Arabidopsis thaliana columbia
caacggactcctcatcttgatgggctttcccaaatggaactttgagcaaattcctaacaaatcaaacatgagaaagaggcaaataattggcaaatactctcttccacattgggaaatctccggccacgtagagctagtctctggcggtccacagcccggtggttttaacttcgcagtgccacgtggagtccacgcagctaggctagggaacttagcatcaatatctcagtatgtgaaagtgaaaagcggcttggtctattctctaacgtttggtgtcacgaggacttgtgctcaagacgagaacatcagaatctctgtgcctggtcagaccaatgagctaccaatccaaaca

SEQ ID NO: 132257 - DNA, 410 bp, Arabidopsis thaliana columbia
  unsure (1)..(410): unsure at all n locations
cgaatccatagagaagaaacatgaagcaatgtgatcgtagtagtctatctcctttncctataagtccttcttccttatctncttctttcgttgcttctgaatctgatcctgaagattctttatggagtgatttcactttcgatttctcattcttaacatccgaagaccacaagattagtcccaatgatgataatgatgcgaccactgttcctaaagggaaagaattgaatcctttggcacctcantttctaccattcaatgctaagaagaacctaaacaagaatgggagagaaattgaagtaaacagttccaaccaaaacactagaataggcgtcctgatccatgatgcagatgagagtttgggtttagtatctcaagatagtgtttccaacactatgagtatgttagat

SEQ ID NO: 132258 - DNA, 412 bp, Arabidopsis thaliana columbia
  unsure (1)..(412): unsure at all n locations
aattgatattcacaaaagactattgaagtgaacgatcatcatccatcatcacaatatatcacatatatacacaaaacaagaaaatccagactcattgtgaatgatgatcattatacaatttgaactgcagtaattgatatagtatactgaaagaaagaaatttaatcaaatggtttgaagatgaagtggttttggtggatccatggttctcctcttccacaagttaacttctttctttggttttaaccctaaaggagctgaaaaagggattattatgtcatcttcatcctcgtcatcatcgtatctcaagtaagctcctctggtgtcgtcgtcagaatagtaaccacggtgatgatcagcgggtgattctncttcatgtttcatctcaaccgcccaatcaaaatcacctaaa

SEQ ID NO: 132259 - DNA, 317 bp, Arabidopsis thaliana columbia
  unsure (1)..(317): unsure at all n locations
tgagaattaaacttataactctttccagaatgcaataagcatttggctaaaattncacactntcaagttttaagtggttgagagaccaaagaggatccagcagcttgaataacattgaaactgtcccaagaaattgcaaaacatccataataaagggttcaactaaaaaagaggtacttcaagaaccagctaaacaaaaagctctattangttttncgaatccgagcaaaccacaaacaaaagaggctagcctcttatttcatcctttgggcagcctcctttgcaatanctctttcctttgccttggtctttgcctg

SEQ ID NO: 132260 - DNA, 331 bp, Arabidopsis thaliana columbia
  unsure (1)..(331): unsure at all n locations
acatgagttgagaacctaccattgttgaatgaagttnngtcttatgtttattacaanatcagttgaaacgttggctatactcgaatgaataatatccatttccttacatgttgtttacctacttactactcactcctacttccatattaggtacacgttacttgtgtctctccaaggaaaaaaaagagagccagaagaataatacgaattctcagaataaagagatcaatcactgggtggaagagagcagactgatttctatctcttgtaggctctttcctttagtctcaaccacgttcttctgcacaaagatgactgccaccacacagtt

SEQ ID NO: 132261 - DNA, 407 bp, Arabidopsis thaliana columbia
  unsure (1)..(407): unsure at all n locations
cagancccaaccaccacccctggacctcaatcaacaggtgaaaagtctcccaacggacaaacccgagtcgctctatctcttcttctctctgcattcgctacggttttcgcctctnttctacttctgtgatcacattgatccgatcacccgcgcctgtaggatttcattgtgagattgatcgagtcctcagggaattttttttccttctaacagttcttgggattctttgcagtgatgagtttcttgtctgttcatattattcgttgtcttttgtaggaatttctgggccaaagaggtaaaattcttgggacgtaaatttgtatcattgttgtaacattattcactgtaaatgttctatttaaactcttgtcttgtgtgtacgtacttgtaacattatggattgttcc

SEQ ID NO: 132262 - DNA, 351 bp, Arabidopsis thaliana columbia
  unsure (1)..(351): unsure at all n locations
aaccttggcgcttctttttgtttgtggaaacgttgccttcttctccataggaatgggacctgtttcctgggtcttnacatcagagatctttccattacgattaagagcccaggcatctgcncttggggcgnttgggaacagggtgtgcagcggtctggtggccatgtccttcctctctgtgtcacgtgccatcactgttggaggaaccttcttcgttttctccctcgtgtctgcactctcagttatcttcgtgtatgtgctagtccccgagacaagcgggaaagtcactggagcagatagagttgatgtttcagggtgggctggaaagaaaagacggtgaagttgagcttg

SEQ ID NO: 132263 - DNA, 415 bp, Arabidopsis thaliana columbia
  unsure (1)..(415): unsure at all n locations
gcaaggaaggttgattgattttngatattggttgattcaatggaaatacaaattgaaatcaccagaagaagttggagagaggagggtgcaggtnagaggtggagagagagtcgtcgtcgagatgattagaaggagagtgaaggtgtcttccttcgtaagtagtgattaccattcttgggtcatctgctaatctctccactctcttcttcactctacacttgtcttgtgtgcatctgtaatagctcctgggatgttgggtgtttttaacaactttntggccatactttctccatctatatccatcatctaagacatcaacctcgctaagtgtcttaaagcaaaaccgaggttccctcacttttcctccttgtcttaagcttcttcatcttcagagaagaaactacgcctaatgacg

SEQ ID NO: 132264 - DNA, 351 bp, Arabidopsis thaliana columbia
  unsure (1)..(351): unsure at all n locations
tctgcctgacccccctcctccagtgaacaccacaaaggaacaagacatgattgacctattgagtatcacactgtgtacaccgtcaactccaccggctccatcctctcagccttctcctcctcctcccgctggctcagatcaaaacacccatatctntccacagcctcagccacggtttgatagctatgtcgctccatgggcacagcaacagcaaccgcaacagcctcaagcacagcagggctattctcaacatcaacagcatcaacaacaacagggctattctcaaccttcaacattctcaacaacagcagggctactctcaactgcaacagcctcaaccacagcagggta

SEQ ID NO: 132265 - DNA, 423 bp, Arabidopsis thaliana columbia
  unsure (1)..(423): unsure at all n locations
aaacccactctgcttctccttcttcaaacatctctcagcagantaaccatctctttnnngtaatggcttcacttatttcccttgttcttcttcttttgctcactttatcttcagcagagtccaagactttntggggtgacgtggcagctctcaaagacttcaagaactcagtggatgccaaatccatgagtccaggctcttgctganttcttgggatttntccgtcgatccctgcgacaatatattcagcgacacattcacttgtgggttccgctgcgactccgtnttaccggatcgggtcgggtcacggagctcagtctggaccaagccggttactcaggctccctctcctccgttctctttcaaccttccttatctccagaccctcgatctctccggcaactacttctccggtccacttcc

SEQ ID NO: 132266 - DNA, 261 bp, Arabidopsis thaliana columbia
  unsure (1)..(261): unsure at all n locations
gggccaaaaaaatactaacattatcaagcacaggcccacaaagatgtccaaaatcatgaagcttggtatgataaaccccactatagaaggttatccttgtgcgattcgaatcggcacgaaacgcgaaacgccccactttgaacgctcctttntcattagattcgaatgtaaccttaancgccgatattcccgcaaacgcctccaccatcatcgatccgtgacaaccattgtgtgcgtctcccacaacaaacgagagattgt

SEQ ID NO: 132267 - DNA, 274 bp, Arabidopsis thaliana columbia
  unsure (1)..(274): unsure at all n locations
atgaaatgaatgtgatttgtgtatctactacatatttaacctgttcttgattgttttnacactacataagagctaagccagagaaacacaaaaacaaatgattttcctggtttatttctggaagacattagttaaatggtcgccgccgcatcaagcttctctctgtattgtgccaatctctttgtataagcatagacaccagcttcagtagaaccgacggggcttcctcgtttcatgaacttgccttctttgaagatgtagagcaatggtacac

SEQ ID NO: 132268 - DNA, 347 bp, Arabidopsis thaliana columbia
  unsure (1)..(347): unsure at all n locations
gaacattgcagtactttcaaaggcacacgaaccagggcagctgttgtctttatcattggcantgcgntttcnttntctagcaaacaatacagtacagggacctgctcgtgctantctagctgatntatcaggtcctgatcagcggaatactgcaaatgctgtgttctgcttgtggatggctattgggaacatccttgggtttcctgccggtgctagcggaaaatggcaagaatggttcccttttttaactagtagagcatgttgtgctgcatgtgggaaatctcaaagcagcgtttctncttgcagtggtctttctcactatatgtcctcttgtcacaattctattt

SEQ ID NO: 132269 - DNA, 378 bp, Arabidopsis thaliana columbia
  unsure (1)..(378): unsure at all n locations
gggtagaagcattgaaactctatggcaganttggagacgaatcgaagaacatgttggaacaaaaactgcagttcanattcgaagccatgcgagaagtnctttactaaggttnctcgcgattttggtgttagctctgagtccattgagatcccgcctccaaggccaaagagaaagccgatgcatccttaccctagaaagcttgtgattcctgatgcaaaagagatggtatacgctgaactaaccggatccaagctgattcaggatgaagataaccgatctccaacatcggttttatcagctcatggctcagatggattaggttccattggttcaaattcacctaactcttcttccagctgagttatcatctcacacaga

SEQ ID NO: 132270 - DNA, 350 bp, Arabidopsis thaliana columbia
  unsure (1)..(350): unsure at all n locations
aaaactgcaaccgtcgccgctatgggggaagggttcatagcgcgggacatgacattcgtgancaacgccggacccaaatcggagcaagcggtggcgtcctgtcgnngnactaaatccgtcgtgcatcgatgctcagtggaaggataccaagattcactctacacacactccaaacgacaattctatagagagacggatatcaccggcaccgtcgatttcatattcggaaactccgccgtcgtatttcaatcctgcaacatcgccgcacggaaacctttaccgggtcagagaaacttcgtgacggcgcaaggacggagcaatccggtcaaaacaccggattcgcgattcaa

SEQ ID NO: 132271 - DNA, 301 bp, Arabidopsis thaliana columbia
  unsure (1)..(301): unsure at all n locations
aattcttttggaggtgaagatngcaagaatgggaatgagaatgtggagganatggagagtagtagaggtagtggtacaaagaagacgagtggtggaagtagtagtgattctaaaggagatagcagtgcgngtgggaatgtgaaggttgcgttgagttcttcttcttcaggcgtgangagaagagcaggtggagatattcctcctactggtagacattacaggantttttctatggacanttgtttcatggggaagttgaatttcggcgacgaatcatcgctaaagcttccgccttcttcat

SEQ ID NO: 132272 - DNA, 344 bp, Arabidopsis thaliana columbia
  unsure (1)..(344): unsure at all n locations
gcaatggttctcctcttctcccaacttcgactaccnctgataacttcccggcggcgatccacagttgctgagtctctacgcgtcctcttgtcccgcgttctagccaccgtccgtcacgcttctgcagatgccagaccctgggcagagtcgttgaccggtcagcgttttcccggccaccatcgctctcggaggcaacgtcacgagtaaggaagaacttttcctatttccgagccaattacataaccttagtgggcaatcttactcgccgcgttctctgctcacgcaccctttcgctctcttcctcctcgcatcgctggccgcttcttggcttttcctctactttt

SEQ ID NO: 132273 - DNA, 344 bp, Arabidopsis thaliana columbia
  unsure (1)..(344): unsure at all n locations
gccggttactcatcaaaaactaatcatccggttttggattggttaaacaaacagccggacgagtcggtactttacatttcatttggaagcggtggtctctctcggctaaacaactaaccgaattggcttggggacttgagatgagtcagcaacggttcgtttgggtggttcgacccccggtggacggttcagcttgcagtgcatatttatccgctaacagtggtaaaatacgagacggtacacctgattatctcccggaagttttgttagccggnctcatgagagaggctttatggtctcttcttgggctccccaagcggagatcttggcccaccaagccgtag

SEQ ID NO: 132274 - DNA, 396 bp, Arabidopsis thaliana columbia
  unsure (1)..(396): unsure at all n locations
gtcagtttctgtgaagtttcagaatttaggccctgtggttgtagtttacggaactgtaggtngatctagtgggcgagtgcatatgaatcttgataagcgtaggtttgttcctgttatcgacttggttatggatacttctacatctgacgaagaaggctcttcgagtatctaccgtgaagtgttcatgttctggagaatggtaaaagatcgccttgttatcccgttgttgattggtatttgcgataaagctggcttggaacctccaccgtgtttgatgcgcttaccaacagagctaaagctgaagatactagagttgcttcctggtgtgagtattggaaatatggcttgtgtttgtacagaaatgcggtatctggcatcagacaatgacttgtggaa

SEQ ID NO: 132275 - DNA, 345 bp, Arabidopsis thaliana columbia
  unsure (1)..(345): unsure at all n locations
gaaactgaaaacgtggggaaaaaaaaggagatttacaagtagaaaacacnaatctacctttatgttcttcatcttagaatcaaaatcaatcatgtcatgtttgtattggattcaatcgaatactgcgaataaagggagtgattagcgtaactattatggtttgtaatctctatgtaaccaataagaggatattatgaaagcaaaaaaatcaaaaagattactctctctttaatatctgggtttatactacagtccttctttggtgcaaagatcccaaaaaatcaaaatcgaaagagagaataaatcaaaaggaagaatctttatnctgctttctctcgatgaggt

SEQ ID NO: 132276 - DNA, 301 bp, Arabidopsis thaliana columbia
attttgggaactcgatggcgaccatgatttccttattgataaggaaaatctcatcaaatatggtaatcatgcccttacctacaggattgtcgacagaatattttcacaggttcctaggaaatttacaagcaaagttgaggggaagatgagttatgaagattttgcatactttattctcgctgaggaggataagtcatctgagcctagtcttgagtattggttcaagtgcatagacctagatggagatggggtgatcactcccaacgagatgcagtttttctacgaagagcagctgcatacg

SEQ ID NO: 132277 - DNA, 219 bp, Arabidopsis thaliana columbia
  unsure (1)..(219): unsure at all n locations
aatttatttcctcaaggccgataataacacaaaatgcatggaccgaatcactttagatgcaataatatattaatccttttttcataagactttggtacgtaaaacccattgccatgcattccattccatggtttttttttttnagacatatgcgttgcttcanttttaaaaaacaactggaacttaaatttcctganctactcacactctgtnctnctt

SEQ ID NO: 132278 - DNA, 271 bp, Arabidopsis thaliana columbia
  unsure (1)..(271): unsure at all n locations
ttttttnagaagcaaagaaagttttnnactgttaaaantttattcccagaaagaaacagacttagagataatcacagagttgaaaaggaaaaaaagaaaagagtaacatagaggtgataattgcntcttacagaggaaacgcccatacttntgattcttnctttagctggtccaatctcaaagactctttacttgtttangtgaccagtaagacttgcgatgaaagggatctgcagtctgcgaggtctctcctccgaaagctaatgtcact

SEQ ID NO: 132279 - DNA, 291 bp, Arabidopsis thaliana columbia
  unsure (1)..(291): unsure at all n locations
tctacaacacaaaatacagattcaggtctttttctagaattgacatgagtgtccctntttncgacctacacatacatttgctagcaaaacttctctagctagtaacaccgcctcgtttcagccgcttgattttgtacacgctaaccttatataanttttcactaattgctcaagatcttgcttttgaaagaaatgtttcatgttccatcaacgatctctctgccttagccttgagccataagcttttataaagncacacctctgggttgatttgctcttctgtttgatgat

SEQ ID NO: 132280 - DNA, 213 bp, Arabidopsis thaliana columbia
  unsure (1)..(213): unsure at all n locations
tttttttanacgaatatnctnctcagtcctctcattcatgccaaacataaaacttgactacaataattacaaaaaaaaagtaatgtgttagattttcccttgttaaccattttcnnctnctcaaattttaaggctgttaataaatgagattaaaagaggcaaggncaaaaaaaccagagctctttcacatctgggaacagacctgagacctgt

SEQ ID NO: 132281 - DNA, 249 bp, Arabidopsis thaliana columbia
  unsure (1)..(249): unsure at all n locations
tttagaaaatgttacgtncatagttcctaaaatnaggtagaatcacaaataatgaaactaaaatggggtagtaactatttcctcccattattacatgacacatcanccaacttgaaaaccaccacacaaanaaaaccattacggaacttacttggtttagacttccactacatgcatagcatcttacctaaattaaggggttctctatagacaaggcaacatacttggtccttttgcctaatatctttc

SEQ ID NO: 132282 - DNA, 267 bp, Arabidopsis thaliana columbia
gaggacaagctagatgggaagtttcctttgccagacaaatgggtggatgtttgggaggttttgaaaccaggtgatttgggttttacatatgacacaaaagcaaacccaatgttgtccggtaaccgggcattgcagaaacggttagaccggattttgtgtcgtctggatgattacaagcttggtggaatcgagatggttgggaaagaggccattcctgggtttatcatatgtaaaagagaagaaagtggggggtgacattaagaagtt

SEQ ID NO: 132283 - DNA, 291 bp, Arabidopsis thaliana columbia
ttttttttttgtgggaaattctctgtggttcccgaacagtcattatccaggaaacaaagagattagagtacaaaatacgaatcataagagactcaatagtcaattcaataacacttaaaagaaaatcactagaaaaccccttgtttccttctacaatattggaataggatcttccatagcttcttcagcagcaaaaccacaacacgtccagtggtaccactcaacacaaccacacttccttcggcatcaacatcaacaatcacagaatctccttctttaatgtcccttgaa

SEQ ID NO: 132284 - DNA, 284 bp, Arabidopsis thaliana columbia
  unsure (1)..(284): unsure at all n locations
cgatgacgaccacttccatcgtcacgagatcctttccactgancgataccgttttaaggctcatggacaccattttccaactaagaaacgccgccggtttgccattgtggaacatcaccgttttgcaactgaagagaacgccgccgttttgccattgtggaacatcgctgttttgcaactgagaaacgctgccgttttgccaccaatgaggaacgccgncgttttgcaactgaggaacgtcatcgtttttgccactgaggaacggcgncgtgttcccaaatagt

SEQ ID NO: 132285 - DNA, 295 bp, Arabidopsis thaliana columbia
  unsure (1)..(295): unsure at all n locations
tttttttaaaangtaagnttatccggaatataaaccataataaacaaggaatcacaaatataangnngtatgttttaaaattatttnccttacaacaacacaattnctaaattaccatcgtccacattaatgcttatgccaaaccggngaccaatttaacttccatatagttaccatcattngtcccaataatctcacttttccctcatctcattaaccactttctccaccggcaacgtcaaatccctttaatgcacatccattttagggccaaacttcatgnacaacggcaatg

SEQ ID NO: 132286 - DNA, 258 bp, Arabidopsis thaliana columbia
  unsure (1)..(258): unsure at all n locations
gttaccctctatcatcgagatactaaacaagtacctctatttctatgagaaaggggttccacagataacagttgaatcagtagaaagcctgataaaactgntcangancgtagaatcgatgccctctgatccatctgctgaatcgttctttgcaactacgcttgagttcatggagttccaaaagcagaaagagggtgccattggtgagagataccaggagatcaaagtatagaatctcatgttggtcaaaagaagtcg

SEQ ID NO: 132287 - DNA, 310 bp, Arabidopsis thaliana columbia
  unsure (1)..(310): unsure at all n locations
tttttttacataaaatgaatacttttncaatgaaggacattatctaatatgtaatanccaatgtaaaactcagaatactaaagattcgtataaccacacatcaaactccacaagtnacagaccatgacccgncttgaaaatccgaggaataaaactagacctaaacccgggtttacatttcgagcagcaagcaacacaatatcagtccctttccgattctcaaacgactcaaagcaaagctttttttttttaataaaaacaaaccgacttcttttgaccaacatgaggttctatacttggatctcctggg

SEQ ID NO: 132288 - DNA, 244 bp, Arabidopsis thaliana columbia
  unsure (1)..(244): unsure at all n locations
acaaaattcaaggatggctagaaagatatcctgatcaagcagccgtattaagagctgctggtgaagggaattggcttcaccnatttntatttgtaaccttaatccgggtttctccattcccttacattctttataactactgtnctgtagcaactcgtgttaagtatggtccttacatcacgggttctctcttaggcatggtgtctgaggtttttgtcgcaatcttcacagggatacttgtaag

SEQ ID NO: 132289 - DNA, 344 bp, Arabidopsis thaliana columbia
ggactttcgatgaaattgaccagttggtctacttaaaagcggcattgtccgaaacattgaggctatatccatcggtaccagaagattcaaaatttgttgttgccaacgatgttttacctgacgggacatttgttccatcgggatcaaacgttacatattcgatatattcggttgggcgtatgaaattcatttggggtgaagattgtctcgagtttaaaccggaaagatggttagaggaaagccgggacgaaaaatgtaaccaatacaaatttgtagcgttcaatgccggtccacggatttgtctaggcaaagacttggcttatttgcagatgaaatcaattact

SEQ ID NO: 132290 - DNA, 300 bp, Arabidopsis thaliana columbia
  unsure (1)..(300): unsure at all n locations
gaggattccttactaaggctttctcgatttacgttaatctgagtatagattgggtttagtgaatcttgatttccgtggttgtgtttttcgattttgcttctactccacgttcttgttgttgttcccttttagctccagattatgcttttctttttgttttcttctcttcgacgatatctgccaccaactcgagtctcagtttaatgaaatgtttgtggatttttggtaaatagtactaatggnncaataatggctacaagaattgangtttanggggtnattccttnagcaagggtttaa

SEQ ID NO: 132291 - DNA, 300 bp, Arabidopsis thaliana columbia
  unsure (1)..(300): unsure at all n locations
tttagcaattttaaattaccttattcaattttgacaagactttatggtcaatgtgtaaactgttatacaaaatcatacaacacaggaggagcctgaagattttcttaaggacaaacaacaaaatggaaatggaatatagaaacaccaaagaataaatatcaaaccctatttcaaaacattttgatgcttataaaaaataatctaacactctcacaaaccccaattcttcttcaagttcatggctcgtaccttncctcgttcctatttaaccccngttttgtattcggtttaatacctcct

SEQ ID NO: 132292 - DNA, 219 bp, Arabidopsis thaliana columbia
ttttttttttgaaccaataagacctgatcctttccacgttccgaatccacggaaataaggcccgttcccaaaccaaaaaacaaaaaaaacttaaaccaacgactgtttatcatcagttccgaaacagagaaaccctaccgccaattgctcgttcatacgttttacctagtacaacgtcactaacggacagtcaactcagcgttgaatacgttcgatatt

SEQ ID NO: 132293 - DNA, 206 bp, Arabidopsis thaliana columbia
tcttgaggaatgtatatagattagccttcagaccattataaacaagtgtaagtatgaggaacaatctttaatacaataaataaatcctctttacatgcgcgcgacgcgtataaacttacgtctgcgcaatagccttctaaaaagccagcgctacaaacaaaacagcacgaaactaatgctggcacgatgcagcaatcaatctgcat

SEQ ID NO: 132294 - DNA, 212 bp, Arabidopsis thaliana columbia
tttccgagcatacacatcacttgctctgcacgcgtgtgatccctgaaaactcccacatgtgtgtgaagcaacagcaactgacctgctgcatttagccacatctcgatcccacatttttcaagccgccaatcggtacaaacaccagtcgaacacttaccaaaccaaaactagcagtctcttctcttggcactcagcttcttgcaggcaatgct

SEQ ID NO: 132295 - DNA, 288 bp, Arabidopsis thaliana columbia
cgcgtgctcctggtcacaccggtagaagcagacgcttgtgtaacagaacaacagttaacaacagatatatcaagcaaatatgaggactggattggtacaacaagaagatccagtttctattgttggtacatagcaattactttctcattactcttccttagttctcctgtcttttgttgttttctttctttgatttgagaagacaagccttcattcgtgatcaggatttgatttgctcaattctcccacattagtttctctgttttggtttgtacctgactttaagga

SEQ ID NO: 132296 - DNA, 223 bp, Arabidopsis thaliana columbia
ttttttcttaaacaatggataagaattggatctattgtcacactctctctctctctctctacaaacatttggcataaacttctacattactactactttccaatcaataccagcgcgcaaaacgaacacaaaaccaagcctactctttacaggaggccacaagcagcaatggctttaggcttaacggaaaattgcagcaacatacaattgcttgacccggatt

SEQ ID NO: 132297 - DNA, 238 bp, Arabidopsis thaliana columbia
tttctcaatcgtggatgctactggatttatgttttcttttacttcttctcttgctttgcattgccatttcccgcgccttatgccttgctacttgcaaactcagcttttcatctcttattattaatgcattaaaccagcgctgcaatggcccaaatcctgcagcacgcaattcctgccagcccggggcatccactagcttctagcagcagcgaccacacgatgcagatcctccagcttt

SEQ ID NO: 132298 - DNA, 208 bp, Arabidopsis thaliana columbia
ttttttttttagctttttcatgaaatatatattaaactcaagacaccacttaaaccatgctgccaaaacaagctgagttgaaatctcaccgtctgaattacatttgtatgactctccgtaagggtaatttttatgtaatggttttttttcgaaaaatcatttgctctgagacttattaagtgactagtgaggttttggaacaacccca

SEQ ID NO: 132299 - DNA, 301 bp, Arabidopsis thaliana columbia
  unsure (1)..(301): unsure at all n locations
gcaagaagctcatggtgtttggcatgagaatagctctagacaatccgatgggaactggcctgggacacggtcagaagccctaaggagtcgccgtgtagtacagttgagaagattaaataggttccatccacctgaggatgacaatgtttacagcatggaactcagggagctcctaagcaggagaagtgtttctaatctactacatagtggtttccgtgaaagtcttgatcaacttgatacagtcatatgctgaaaggagaggnccaacactcacgtagactngggtctncacggtaacctg

SEQ ID NO: 132300 - DNA, 300 bp, Arabidopsis thaliana columbia
  unsure (1)..(300): unsure at all n locations
gagattgttgttgtctctgtaagcttctccttcaatcacttggtcggtgccctgcttcctacttgttcaaagtttgaaagatctaaagaagaatgaagattgatttttctgagccagagtgcagcaactgttaccagtttagcaatccagacctacttaatacttcagaatncgaacagagcaatgtgatttgctcatccatcacttcagtgccggntaatgatggaccagttccacctcttgaaacttgattctgctgctgttggtttcaacttcaacatcatcnccagttcaagntct

SEQ ID NO: 132301 - DNA, 234 bp, Arabidopsis thaliana columbia
ttttttttttcacatgtaattccagaatctttgaatatcaaaagtcaccctataacatcataccacttaaatgatgcaaactaggctatacgcagactaatacctgctataatagaatccagagaaggcaaagagtagatgagtacaaagttgaagagaagatcagacccacgattactggctttagacaagtctttagacggtaggcagacatagacccttataatctagtaa

SEQ ID NO: 132302 - DNA, 211 bp, Arabidopsis thaliana columbia
ctgatgagaaactccttagtggagaggtgtgatgtttcttggagatcttgtaccctgatttcttacatctttcttgttggaagtttgggactcacatcctaacccttgctatcctgttgtgaaatatgcagagattcaggatggaacgtccctgttcagtacaattgcctttgacagaaaaggccatgagaatttattaatgtacgatata

SEQ ID NO: 132303 - DNA, 238 bp, Arabidopsis thaliana columbia
ttttttttttcaatatttcactcatccgaataataagcaaaatatttgtacaagccacgtgaattggaaaagtttgatatattttagaccagagtactatggaccctgcatgagccgtcgcagtaatgtagttagtcctacaaaagcagtcagcaattattatcaggtaacattaataaaagttcctcaactcacctgtccataccaaactcaagtgcgctcaacatggcaatgcttt

SEQ ID NO: 132304 - DNA, 135 bp, Arabidopsis thaliana columbia
ttttttttttggtactaaaaccatcaattggccctctttatgtaaaggtaaaaactaggatagcaaaatgtagtatgtagcattttggagtctcaaccaaaaacatcctacttatagcaaactacaatgatgtag

SEQ ID NO: 132305 - DNA, 226 bp, Arabidopsis thaliana columbia
  unsure (1)..(226): unsure at all n locations
tttttttaaaaactttnctttgtgacattaatgttttcatcatatatacaacacgtatcaagatgttagtttaatataaaagcttcattaccattcttattagtatttttggtatgattctttttttttgtttcctttacttnctttgtccttnatttaatcctttggcctttaaattcacactaaaacactcctaatcagaaatgttatagcgcaaaanattctt

SEQ ID NO: 132306 - DNA, 395 bp, Arabidopsis thaliana columbia
attttcccacgtccctccgggttttagatttcacccgacagatgaagtacttgtagactactacctgaggaaaaaagtcgcatcgaagagaatagaaattgatttcataaaggacattgatctttacaagattgagccatgggaccttcaagagttgtgcaaaattgggcatgaagagcagagtgattggtacttctttagccataaagacaagaagtatcccacagggactcgaaccaatagagcaacaaaagcagggttttggaaagccaccggaagagataaggctatctatttgagggcatagtctaattgggcatgaggaaaacacttgtgttttacaagggaagagccccaaatgggcaaaagtctgattggttcatgcacggattacc

SEQ ID NO: 132307 - DNA, 324 bp, Arabidopsis thaliana columbia
  unsure (1)..(324): unsure at all n locations
taaagcttttnaagtagctctactgttgatcatttacattgcctatgggtatacggacgggggtgcctctncgttcgttttgctaactatcagcagttggttccttgtaatatcctggttgtttgcaccctatatcttcantccctctggatttgaatggcaaaagactgtcgaggattttgaagactnggtcagttggcttatgtacaaaggtggagtgggagtaaagggagagctcagttgggagtcgtggtgggaggacgaacaggcgcatatccaancattaagaggangggtattggagactattttgagcctgagatt

SEQ ID NO: 132308 - DNA, 350 bp, Arabidopsis thaliana columbia
ttttttttagtctcttaaagattaaagtatctcagacaatcaacaaatctcattttaaaaaaaatcaagttaccaaaatatagtcaacctatgacaataaacagtaagcttagagtaaacaaaactaagattacaaccatataaaattcgagtctatgagcttccaatgatgttctacaaactctacaaacaaaatgtctaatacttctcctacttccacactaacttctctctctctctcgttcatcaggtctcaacattagctctgtttccggcaaggataatggagatttcaagtccgcgactgaaagcttggttgtagaggagccgagactggaacgtggagatga

SEQ ID NO: 132309 - DNA, 212 bp, Arabidopsis thaliana columbia
  unsure (1)..(212): unsure at all n locations
ttttttcnaaatcaaatatcaaataaaatcggaaaaaaacattaattatnacagataaatctatgtataaaaaatgagaaggaagtaaaaataatcaggtacgggagagagcacggacagcttcgtaagagtaaggatgaataaaagcactgtacatttgccaaactgtaaaaacgtcgtaaccgtcgcatcaagagcattattgaataaga

SEQ ID NO: 132310 - DNA, 329 bp, Arabidopsis thaliana columbia
  unsure (1)..(329): unsure at all n locations
ttttttgttgtacaaattgtttttattttcaaacttaaactctacataatgacatacatattacacatggtaaacaaaaataatatgttcgtttgggcatacatataggctggtatacaccgtacacctacatgcgtcaaacgggtacatatacataaagaagtgacgacagaaacgtcaactatgagagacatttctttatagcgttcgtcggaaaagntaaaaaaaaaggaaaaggaantaaaaaganaaaaaaagttcaatttagtccgaatttcgggtttttgatcaaaagaaaatttggacaaaaaccggtcatcaaaacggtg

SEQ ID NO: 132311 - DNA, 232 bp, Arabidopsis thaliana columbia
  unsure (1)..(232): unsure at all n locations
ttgagatgcgtcaagaaccgttgtcgtcgtaatcttttgtatctntcacgggaaaagacgtcaagtaaatcggaaaacatcccactggaaagtttcccgggacgaccacgttaaccgcaccancacggntcacctctctagctgcggctgtgatggctccaaccacgtgagggatgtagcttctgatttctnccattggtttgccttggaagaaaccgtagttgtagtcgtt

SEQ ID NO: 132312 - DNA, 431 bp, Arabidopsis thaliana columbia
aacacatcaaggaactcgatttgcaagcaacgaaaggttatacataattaaacaactcaaaatcacaaatttaagaaagaaaaaaaacagagaggagagaacagagatcataccaagaggtggctttaatgatgattgcgtcatcgtcgtccctcgttgacgactataattattgctgttgttgtttctgggtttttgtcttctccaattactcataatgaaccgacaaagattgaatttttttcaagcagacaatgaaaataccttccaaatcaggaaggtttaatgaacaaaatccctaatttcgacggggaatggcggagataatcagagagaaaggttgttgtttcttttagggctctttgcacggaacagtggtttttaggagtgggtgaggaaatccaggacccgggttcttctggatttccttt

SEQ ID NO: 132313 - DNA, 537 bp, Arabidopsis thaliana columbia
  unsure (1)..(537): unsure at all n locations
gaaatggctctaccgtatggagccgcgctcttatttctaggagcggaaataagacagcaaacaaacccatggctcgtcgaatactaaaaaaagctcgaaatcggatgaagaaccgttgtaacattcttagacgaaatggcaatttcacggcgaaaaccggggtgagaaaacgtacggacttgcttaagagtcttgtaccgggaggtgagttaatagacgacaaagattatttgataagagagacacttgactacattgtctatctccgagcacaagtggacgtcatgcgaaccgtcgcagccgtcgatttattcacccgaaacttaaccaacggtcgtagggaccaattaatgtacatggcatcactcttgtgatatgaagtgctaatggttttaatgtaagtcctgtacattttaggataggataacactatcttancatattacaattttcgaatgnattatcgatttactgctggtcatgnnaattatgggttaatttcttattattaatttgaagaccacttgattgttaaaa

SEQ ID NO: 132314 - DNA, 350 bp, Arabidopsis thaliana columbia
  unsure (1)..(350): unsure at all n locations
tttttgaatcattttatctccttngtttttntngtataaccaagctttccagttttcccattcagaacaaaccatcgcctactccacccatttgtctttgcactttcctccattaagtatcctgctgtnatctctccctcaggtccagcagtcttcagaccagacacctccggagtctctttatctttatctttatctngtggcattaattngtctctcaaagattttaagctaccaccagttgatgatggcccatctggctgaggactagttgccctgtttaagagagactgctctgcatctggtccctttttagaggaacgacctttcagctcctcctcacgacgctg

SEQ ID NO: 132315 - DNA, 290 bp, Arabidopsis thaliana columbia
  unsure (1)..(290): unsure at all n locations
ttttttcggaataacgatggtattaccaattcgaagaaagaatatgtaagacttatattgttttcatccatgatagctatatctttaccaagacaaaatcataaagttgacacaatttggtttttgtgtttcttaatcaaaacagagacttagtcctnaaacttngnagaaggngtttnatgctgagaaagtaaagtgattactncagagtcatngcggcgaacgcgagaagantttaacctttaacanggtaggctttaagagctngacttttgccntgaacagcaaga

SEQ ID NO: 132316 - DNA, 375 bp, Arabidopsis thaliana columbia
  unsure (1)..(375): unsure at all n locations
gagcagcaatacaagttcagttcctgcggctgttccatcacactctaccggtgagaacgtttctgctggggttcaacctggtttgggtgatgatgtttcagttgctcaaatcaatgcaaggataagagatatggtaaacattatgcaaggaagagaccagattccatcgggtaggtttcctgctgactaaagttttacattgtggacgaaatgttttcaagctcttcttcacgtgtcaatcaggaatagaatctctcgagcgggatatgtctacgggccatggtgttgccactgctatgcctgagcagcctaccaacattgcaactacttgcgcanctgagtcgtctagtggctcactgcatgncttaccatctt

SEQ ID NO: 132317 - DNA, 293 bp, Arabidopsis thaliana columbia
  unsure (1)..(293): unsure at all n locations
gggttccaaaaaaacacagctttctagttctatgcaataatactctggagcaagtttcgagttcttaaatcgacattgctacattacttaatagtggcttaaactgaactagagtatcctncttttaaagaccaaaacccagaattagaccaatcacaagagctaaaatattacacctaaagtgagctacaagatttcagacaaaacatcagcatttccactcaacataaaactacggacaagagagtatgaggaatntcaactattttgcgactaaccgtggtggaaaacgg

SEQ ID NO: 132318 - DNA, 340 bp, Arabidopsis thaliana columbia
  unsure (1)..(340): unsure at all n locations
ttgttgttggacttggcgataaagtttctcccactgatattgaggaaggcatgcgtgttgggtatgtcctgttcctcactgtatctttctatgttttgtttgcttcagttcaattccttttgtcgttgtaaatttttcatatggatacaaatttatgagaactttctgtctctgatttatacttgcagagttgatcggaataaatatcagattcanagtcctctacctcccaaaatcgatcctagcgtgaccatgatgactgtgcgaagagaaacctgatgtaacttacaatgatgttggtggatgcaaggagcagattgagaagatgcgagaggtatgt

SEQ ID NO: 132319 - DNA, 406 bp, Arabidopsis thaliana columbia
  unsure (1)..(406): unsure at all n locations
acgagtcaagatcgctcttgggactgcacgcgcattggagtaaattccntaaacaattcattgcttagctcactattaaaaaagaaacgagtattttggttaactgaagtattgtccttgcaggtatctcatgaagtttgctcaccgtctatagtggacaagaatatcaaatcagctaatattttactcgattcagagctgaatcctcacttatcagattctggtctcgcaagcttccttcccacagctaatgaggttggatatacaaacgtttctcaaaactctttaccatttctcaacttatttgggttgcttagatcattctgatatggggcagttattaaaccaaaccggtggagggtatagcggacctgaaggtatcatggtcagggccatattctttgga

SEQ ID NO: 132320 - DNA, 226 bp, Arabidopsis thaliana columbia
  unsure (1)..(226): unsure at all n locations
acacaagaactcaacctcgacggatcttaccaatacagctaccagaccggaaacggaatctaagccggcgaatccggatacctgaagaacccaggaaccgaagccgagggacaagtagcccaaggatactatctgtacaccggcccatgagggagnaggctaccaagtagaatacttngcagacgctgtaaatagtttcgttcgtcaatggtngcccattttggcc

SEQ ID NO: 132321 - DNA, 223 bp, Arabidopsis thaliana columbia
  unsure (1)..(223): unsure at all n locations
gagagtaatagtgggacaacacagggaagctccagctatcttcaagcatcagaatatttataanatggtcacttcctggtgcactngttgggcaccaaatgaagcctttgctcatgcggctgaatctataatnggtccatgggagaaattgggggacccctgtatcggtggtaacaaagttttccggntaacaacattctttctgcagagagcttatgtgatt

SEQ ID NO: 132322 - DNA, 344 bp, Arabidopsis thaliana columbia
ggagatatcaagcacatgcttgcagatcttggaactgataaagctaaagagattgctttacatggtggaggtggaaacaaggcacgtaatgaaagagccgctgctattgctgcgattctggagtcaagatcgaaaatcaaagaggtttctaaagcagaacaaccgaaacagacctacagtgttgttgatgctgcatctccttcggtttttggaagaagtgctgatgcagctaaagctggttctagtgataaaccagctgcaagaatagctatgcatatggctggagatagaacacctgttaattctaaaatggttagcttcttcttcggaataaactcggttaa

SEQ ID NO: 132323 - DNA, 362 bp, Arabidopsis thaliana columbia
ttttttgcaatgaagtttttaagtatataatgaattatgtaaggtcttcattcttttgagcaatattttaaattactaggatttagaggactcagagacataactgagtaagatgttacgatgtttttttactaccacataccactgctgcatcattggattttaaaaacaaacaaagtaaatgttggtgcggtttaagtctcccaatctttcatcttcttgctcccttttggttttgcgattggagcatccatgcctgccattttcttgttgtatttttcacgtagaggatcattggaagtccacgggttactccaatctgttgtgtcttcattgacaaggtgaggccccttaggtcttcc

SEQ ID NO: 132324 - DNA, 325 bp, Arabidopsis thaliana columbia
  unsure (1)..(325): unsure at all n locations
gagattttaatgaagagcaggttgaagatcttgctatgaataatgagttcatcgaagatgctcaagctcctcaaactcctggattagttgaggtgccaaactcgtctagtgtgagagagcagatggcatgcgatgatcacatggaggtagaggatctgaatgcagaagaaggtataaagtcctctggggagctgaatgctaatgagatgcctaaacgtggggaagacctgtcttctgaatataatgncccagaatcagcagttactcctgtggaggtagataagtcacaggttaggtgaaaatggtcaacacacaaaatgagccc

SEQ ID NO: 132325 - DNA, 334 bp, Arabidopsis thaliana columbia
  unsure (1)..(334): unsure at all n locations
ttttttaagaatcaaagactagtcaaaccaattatggtctggctctatgatttttagttacaaataaaataaaagctgcaagaattcccaatttggtttcgatttttgagaaaaagttttcaaaaagntaaaagacaaagagtgattgcttttaaagngtaatggcacaagtaccaaatttatccacatgaatcacaaaatacacaaaccaagcccttagtagntttcctctagatgtcaatcttctctgtataaaagactgaaaactttatattcaaaaggcatctcaaaaacagngngagtgtaggacattttgcacagggggtttaaaaaa

SEQ ID NO: 132326 - DNA, 321 bp, Arabidopsis thaliana columbia
  unsure (1)..(321): unsure at all n locations
tagagtcaactgtgttgatctaaggtcttggactatctgagatatctgcaagcaagattcacatcagtgattcaaattattatgaaaacatcgagaagaaacataatatttggtacaaaccttgatctncaaaatagttggtactatacttctaatgtcgtttaagcattgctctaatgatttttgagctctagaacctctttcgagtatagcatctcctgttactgcctgcagattggaggcatagtattaatcacattagaccacatagagataaaccaagggattagtaccaaaaccaactatggaaaatgtattgaa

SEQ ID NO: 132327 - DNA, 465 bp, Arabidopsis thaliana columbia
  unsure (1)..(465): unsure at all n locations
attcagattagatttctgtaggtaattttgattaaaatcttttggtgataacgcagtcttttcgtctggactggacccacgcgaggaggccaaaatttgaccaatatgngatccaataaacaaaaaaatggtaatttaaaatgaaataatccacatgtatgatgtcaaatgtattattttacattcncaattaaatacaggtcagcgaagtaattgttttgacaataaaaatggtaagaattacttggaacgtcatctaacatcattttaattaatactaacatcatcattttaagtaaacaatttttttagaataatagacagaaattaaggtggagttcatctttttgataattagcattaatccctactctaccatgtttataattgaaatcattatttcatatttngataattaggaattaatccctactctaccatgtggtataatttaaaatcaccaat

SEQ ID NO: 132328 - DNA, 385 bp, Arabidopsis thaliana columbia
  unsure (1)..(385): unsure at all n locations
ttttttttttttggcagagacctttaactttctatgaagtatcaatcttcttcagttcaacaaaacgattcacaccggctcaatctagaaaccaaaaccaaataaactactactactagaaaaatcatagagnctcaatgttagctatgctcatgcatacccaatgcaaataccagagttagcaggaggtttaagattcttgaagagaaataacggtttcgaaagcaccaaccaaagccttaactttgctttttcgagcttcgacgagtttactcgctgtttcttcaatgacattgttgaacagtccctgtgcatctttctcctgaacatcttggatgcctcaacacaactttttcaccatcctcattggcttcttcttctctgg

SEQ ID NO: 132329 - DNA, 194 bp, Arabidopsis thaliana columbia
acgagccagaatgagcaataccgtgcaaaagtagagaaatcaaacgagaggtcattggctctgatcaaagcaagaattgatgtagttgttgctttcggattgcttcaattggctccaaagaaagtcactccccgagtcacaggtgctttcggattcgcctcatcacttatctcttgttatcagctatttgccgt

SEQ ID NO: 132330 - DNA, 243 bp, Arabidopsis thaliana columbia
tatcattatcttatataccatagaatctatcacaaacattaaagtagtccaagcaagcacaaatttaacaccaatgtcacaatatgaaaacagacacaaactatatatggaacatgtggacaatgaaactagttccgcctttccttgtttcccttttatcagaccatcttggacttgggatgtgacggcaatgcctgtaacaggataagtgtagaggcgatcgaagcacctgtgactcggatg

SEQ ID NO: 132331 - DNA, 206 bp, Arabidopsis thaliana columbia
gtgacgttgatcagtcagcacaattagaagccatgaccaaggaaaataagtggtttggtcctggaagttggattatcatcaccacgcaagatcgaagacttttgaaagcacatggaatcaaagatgtgtacaaggtggatttaccaccacctgatgatgcttttcaaatcttctgcatgtatgcttttggtaaaacctctccaaaa

SEQ ID NO: 132332 - DNA, 201 bp, Arabidopsis thaliana columbia
gagatgaatcgttcattaatcagcttcttgttgaacttgatggctttgagaaacaggatggcgtagttttgatggcgacgacacgaaatcataagcaaattgatgaggcgctaagaaggccaggtcgtatggatagagtattccatcttcaaagtccacctgaaatggaaagggggaggatttctcaccgcctagaaggac

SEQ ID NO: 132333 - DNA, 240 bp, Arabidopsis thaliana columbia
gaattgagattgtgttgtttacaataggaataccacaagcaaataatggagaggttggttctacatgatataggttgaccgattctctccttgttacaactgaagcaaattgcagagtaaattaaaagattaacatacatataacataatcactcattgcacatactttgctttggtggtttgatcaggatgtttgatcaggtagttcatgttcttggacgggtcttcactctatcagtt

SEQ ID NO: 132334 - DNA, 212 bp, Arabidopsis thaliana columbia
gagaatcttcattggtataattgttaataatgactaaaggattacataaacataaataacacaaactaaacatttgtaacaacatcaaatatcctaacctccgtactatgcacgaatttaacgtgtgaaaaatcggctgctccggaggaacaaactgttttaaaataaacccaaaattgaatatgaacgttttcttaattgtgttgtctccg

SEQ ID NO: 132335 - DNA, 200 bp, Arabidopsis thaliana columbia
gcggcctccgcccaacctcaccgcctacacctgctccaaccatggccaagaaaaattcctccggaactccaagcccttccccatcttccccatctccaaagtcatcatcagccaaaactccggcttcaagcctgactcaagctccggtgattcttccgaagtcctaccagctcctctgacgcacctaccgcctcctcttc

SEQ ID NO: 132336 - DNA, 165 bp, Arabidopsis thaliana columbia
ttattaatgaaaatttttacaaacataaacaacaaatgtacagttgcaggaaggaaccagtgtcagaaatgaataggagacaaatgttctttaagcctgcgtgctttgtttgaaggcggtttccaagtctccgtccaatttcacttactgttgttcgggtacggc

SEQ ID NO: 132337 - DNA, 220 bp, Arabidopsis thaliana columbia
ggaaataagcctgcagagaaatttcctggcaacaatgctgttattgtgtgcggctccagtacatccacagcaaaagctgatgtttccactggtggagggagtcagactgtccctgactttggcacctcttcaaaaagctaagcatcaaggacagactagttctaaagcaaagagtggaatgtaagatatgtacagcctatagtaaaggaatatgctgacc

SEQ ID NO: 132338 - DNA, 238 bp, Arabidopsis thaliana columbia
aaggtcaagtactgtgatacttgcatgctctatagaccgcctcgctgctcacattgttcgatttggcaacaactgtgtagaaaggtttgaccatcactgtccttgggttggtcaatgtattgctcaaagaaactatcgattcttcttcatgtttgtcttctccacgactcttctctgtgtatatgtgttcgccttttgttgtgtctacataaagagatcaaagagtccgaagatataa

SEQ ID NO: 132339 - DNA, 416 bp, Arabidopsis thaliana columbia
  unsure (1)..(416): unsure at all n locations
accaagtaggctgaacagaacantctaggcagaagcagcagaccgggagtagatccttagctctttgcccgggggccccatagaactttttgagcggaaactcggaacggggcggttctacagaccctntttcacggtgacagtccaagtaccatcagacgggggtgcaagtactcacattatcacgcggggcagagggacatctcatccagtcaatacgggtccaccacttcatcctccccagccatcgggtcagccatgccaaacagctaggacatctcaggaccggtcaaccagaggagatccatcgcaacaggggctccagtacaaacagtagggaggcggatagaccatttttnagttccaatagccaatcagtcaggctatttagcagtcgggacatccggaacattcta

SEQ ID NO: 132340 - DNA, 315 bp, Arabidopsis thaliana columbia
actggttgatcctctttaaaaaagtaattgcttcaagtttatttatacaaaagaaaagctctcggaatttttttgtagtactttcttagtcgatctccacaatttgaggcctcctctctgcagctttcttgcgtataaagataccccatctcaatgcagctttgagcttaagccatcccactacagctttccctgcgcctctacctccttctctcatattaacccttgtctatctgagcttccgtactgatcacttgaaacccgtaaatggactcatcccttgttaccaaacccgcctgatatcccaaattgtct

SEQ ID NO: 132341 - DNA, 369 bp, Arabidopsis thaliana columbia
atactcatgaaggatccgcagaaactaagaagcttacttgggagtggaatgtcaaatagaatgtgggataacacggtagagcacgcaaagacttgtgtcttaggtgggaaactttacgcctattacacagatcaaacacaccagacagctgttgtctttaatcatatatatgaatttcaaggcctaattgccaatggccacttcttgtcttcggaatctcttaaccatgaccaaaagatttctgcagacactttggtgaagactgcttacgagaactggcataaagtggttgagtatggcggcaagctcttgaattgcttaccagttgctaagaagggaataaaaagcttgccagagccaaaaatggtc

SEQ ID NO: 132342 - DNA, 309 bp, Arabidopsis thaliana columbia
aagctcaatcaaaatgtttaaatcttacacaatatcaataaaaagggctccacacatgtcctatgaaaacctaatttagtgtaaaatatttgatatacaaaagtaaaagtttttttaatatattaattatatagaaagaaaaaagaaaaacaaatctaatctttcaccatcttcccaagatactctttatcagcatcagccaatcggttctgaaacattgcccattccattttgcatctatctctcactccttgccatggagctttcccattctctgactttccttgacttccaagtgaaggtatcact

SEQ ID NO: 132343 - DNA, 343 bp, Arabidopsis thaliana columbia
tggacatattagcggaggaggattcggtacaataatgaggaaatacggtttagcgtctgataacgttgtggacgcacgtttgatggatgtaaatgggaaaactcttgaccggaaaacgatgggagaggatttgttttgggcgcttagaggcggtggagctgcgagttttggcgttgtcttgtcgtggaaggttaagcttgctagggttcctgaaaaggtaacttgtttcataagtcaacatccgatgggacctagcatgaacaagcttgttcatagatggcaatccataggatcaagagctagacgaagatttattcatcagagtcaatattgacaacagtct

SEQ ID NO: 132344 - DNA, 321 bp, Arabidopsis thaliana columbia
  unsure (1)..(321): unsure at all n locations
ggcaataaacataattaaaaggggtacgtttacaataaacaaattatataggagacataaatcaataaacaaatctaaaaataacaaaaaagatatctctaatttctgaatattagcgaaagaggtttgtgttcactgaaaataggaaagttgaaacactaaagaactcataaactctctcaaatttagaaatccaaaagattagaagaagaggaagaagaagaaggagaagaagaagccaactnctgagtttgaggtaaaggaggaagagaagaaagggtttctggagaagtttgaaagagaagcttcctggacacaaga

SEQ ID NO: 132345 - DNA, 318 bp, Arabidopsis thaliana columbia
aatcaaatgaaaatattcataccattaaaataccttgagatctttggtttttaaaaaccatatacaagagaaaataagaaattgtaatcaacaaaaaagccaacaaacttacacatcacaaaagcaaaagatgatcaatcatcacaataaaaaaaaaaaaaacaaggcaattcaaccatcattatccttaatatctttaatgataatctcctaatccttaatctttctcctcctcctctacggtggtcttaggttggtatcctggaagcttctccttaatcttctcaaggattcccttcttcttccactggatgcgct

SEQ ID NO: 132346 - DNA, 363 bp, Arabidopsis thaliana columbia
ttgagtaatcgtgctctttcctccagtgctggcactaaaagtgatcaagaggaagacgacctcgaagacggtttctcagaactggaaggttcaaagtctggccaaggttcaactagtagtgatgaagatgagggaaagctctccgctgatgaagaagaagaagaagaactagacctcattgaaaccgacgttagtagaaaaacagttgaaaagaaacaatctgagctatttaagaccattgtctccgcacccggtcttgtctataggtagtgctcttgataaatgggtggaagaaggaaatgagatcactcgagtttgagattgctaaggcaatgctccagctgcgcaggcgtcgcatttttg

SEQ ID NO: 132347 - DNA, 345 bp, Arabidopsis thaliana columbia
ttttttttttaaacttaacgttactctctcaaactaaacgttaggacgacaaatgagatacttcttgcaagcagatagaagaaaagtgtagggagagagactactcaatccagaatatcagagatagctgtcttcttaaatggatcaccttgagccaactgtgcagccatggatttgtttggaaagatattatccgccttcaatctatctcgcattccatatgcaggagatttggcgtttatgtaagcctgcatgagggcttggaactgcctaagccgagatgtatacccagcttccctcatttttaggaatatcttctctgtgttatgaacatctccccgtttg

SEQ ID NO: 132348 - DNA, 330 bp, Arabidopsis thaliana columbia
aagctgctggttacaaatggaggttggttatgtacatgaatggtaataaaaacgacggtggaaatggctatatatcagcatacgtgaggatggaagagaccgaatcgcttccatatggttgggaagtcaacgttgatctcaaactatttgtccacaacccaaagcaacacaagtacttggctgtcacagatggaacagtaaagcgattcgacgcagcgaaaaaagagtggggatttggacagttgattgctcttccaacgttccaatacacaaaccaaggatacattgtgcaggacacatgttcttttggtgctgagatcctcatcgtta

SEQ ID NO: 132349 - DNA, 337 bp, Arabidopsis thaliana columbia
ttttttttttaaaagcaaagagttttatttcattgataacaaagcagaaaacaaactcaaagaacggaaatgacgattacatcacaaggatcaacaacttcatcttattacaacacacatcacacatcttattattcataaggttgtttgatccatgacaaagaagcagagatcactagacggggacgatgttggtcacagagaccttaaccatctcagcttcaaagacaattgcatcattcaccaaatatcctttggatttatcctttaaatctttctgcaatatgatattgttcactcccacaccatagtcgttcggatcggctaccaagctgca

SEQ ID NO: 132350 - DNA, 439 bp, Arabidopsis thaliana columbia
tttgcaaggaagcttcactcagatgctctttacaaactggtcagactctttccaaattacacaagcacagtggtctaagccagagacaaattcttgaaactaaaccatacgattcttgaaaccggaactaaacacttccagatatgccgagattggatcgcaatttactgtaaatttttgctttctcttgctgagatttagtgtctctttacatggtactctacttttattaaggtttagtataagaagaaagttagaagcagaaattttttggtcaaggagagatttggttatcgtgattttagccattgttcggttagtgttaagcggtatatgttgttgtaaaagctataagtagtttagcacaacgggttaagaattttggctgtgttcagttctttgacatctaaacataatgataccaatatgaaaaaaaaaa

SEQ ID NO: 132351 - DNA, 271 bp, Arabidopsis thaliana columbia
ttttttttttaagaaaatctttaaatcttcttctttttcttttatttagtcttatattatataaaaatgattaaaatccaatgttaattaacttttgcagtgaattgttggaaccaaagtatcaagaaagtatcgaatggtcaaagtggcacattttttgggtcgatgagagggttgttccattagaccatgaggacagcaactacaaactcgcctttgatggttttctctccaaggtatttctcttgctcctcatttatcaaactatttc

SEQ ID NO: 132352 - DNA, 335 bp, Arabidopsis thaliana columbia
ctttgaaacttgaaggctctcacaagaaaatctacacaacctgtagagtgttcggattacctttcagcaacaatgagttattctcatcaaagcatggcttctggtagtcgaaatgcaaggggatatgaatttggaaggacttatgttgtgaggcctaaaggaaagcatcaagccactctagtatggcttcatggtcttggtgacaatggttctagctcatctcagctcatggaaagcttgcatcttccaaatataaaatggatttggccgactgctcctacgcgtcctgtttcaagtcttggtggatatacctgcacttgggggtttgatgttgg

SEQ ID NO: 132353 - DNA, 371 bp, Arabidopsis thaliana columbia
ttttttttttggtgacaaaattactttattcatgatcaatattccaacatggacaaacaaaagaacaagcgacaaaataaatcccaaaaacaacgaactatataaccccccgccaaagaaacccacccattatacattatactatctcaagttatttgtggtcgaccatagggcctatattgctagatgcatggcagtctgtactgtttagcgtgagccctctagcccgagccttgttgtgagccactgaacgacttcatccagttcttttggaacagtgtagtgaccaagtccttcgtatggcttaaagacagtttgtcgaaatccagccatgccaagagaatgcgcagatttctctccaaacctattag

SEQ ID NO: 132354 - DNA, 625 bp, Arabidopsis thaliana columbia
agttatgctggtgagcatcatctgccattgattatgtctcttgttgaccaagaacttagtgaaccttactccatctttacttaccggtacttcgtctacctctggccgcagctatgcttcctggcctttcacaaaggtaaatgcgtaggaaccatagtctgtaagatgggggatcatcgacagactttcagagggtacatcgctatgttggttgtgattaaaccatatcgtggccgaggcatagcctcagagcttgtcacaagagcgataaaagcgatgatggaatcaggctgtgaagaggtaactctggaggcagaagtgagtaacaaaggagcattagcactatatgggcgactcgggtttataagagccaaacggctataccactattacttgaatgggatggatgcttttcgcctgaagctcttgttccctaagcctcgtgtacctcaaataccttctcaagttcaaacccaacaagagtatgagacctttcctaggcctcgtgtaccttaaggccatgaacgaagatgtgtgtttcttcaatgtattctaaatcctgaacatgctaagactatgttctctttcgtatgaagaaatattatgtgttggtacaaaaaaaaaa

SEQ ID NO: 132355 - DNA, 386 bp, Arabidopsis thaliana columbia
tgatagaccaaacatgtgaagaagccaaaggtttcaaggcaatgatcttcttcatggcactctacttggtggctttaggaagtggctgcgtgaaaccaaacatgatagctcacggtgcggaccagttctctcagtcgcatcctaaacaatctaaaagactgtcatcttacttcaatgctgcctattttgcattctcaatgggcgagcttatcgctctaactctccttgtttgggttcaaactcattcgggcatggacattggatttggagtctctgctgcagcgaatgactatgggcatcaattagcttagtctccggtactatgtattttcgtaacaaacgtccacgtcgaagcatcttcactcccattgcccatgttattgtgg

SEQ ID NO: 132356 - DNA, 355 bp, Arabidopsis thaliana columbia
aaaagaacacaagattaattcatactactgcattagcagaatatcaactagaccaacaaattgaaaactcaataaaaccaaactaagaaccaacatagagacataaaagtcccaccttacgatttaaagtcttgtaccaaagttcaaggcagagctaattaagagttgaggttaccttcaatcacctccaaacgcaaaaacagtgctctagatctctcatctctcatagtttctccaaattcttgcccagtccgatcgtaaacaattaattcgcctcgtgctccaactatgaatgagcagcctctttctctcatcttgaggcacactcaacaagtttcttattgagctcaggaac

SEQ ID NO: 132357 - DNA, 316 bp, Arabidopsis thaliana columbia
ctccgacggttacggctatggcggcggcgaataaacaacacgacgctttctccgatgactttgactacgaaatctggtcgtccgtcacgaaagctacactaacggagaaagaactctgggatgttgtcgagaacggagtcccgccggatccatcgaagattccagagttagcaacgaagattcaacccgaagaactttcaagatggagagcatctcgctgtaaaagacatgaaagctctccagcatcttgcaatcttcttctctcacagattctgctttcaggaagactctctcggcttcttcggctaaggacctt

SEQ ID NO: 132358 - DNA, 295 bp, Arabidopsis thaliana columbia
aaacgtatcatatatcgtagtaaatcaattagagagtaaggcaatttcctcaaatctttacagttaataagaaaaagaatccaaaaaaaacctgcaatttctccactcttatggtttaaagagagggtccactataaccttgaccggttttcttaatctttcccatctccatttctcgtgtggcttgaccttcactgcttgaaccagacgggtacagtccgttagtcactggttggattactgtactcgccggtttgtgccgtattcttgagttccaagagccattttcctaaac

SEQ ID NO: 132359 - DNA, 275 bp, Arabidopsis thaliana columbia
agtcttcaaatttctcatggttcatcgattatattcttgtctaataagctaaatcaagcaaatccatatcggtaagtgatgttgttatacatccctaaactgtacatggcttctatacactagcaagcaacctgactattcatttaccatcgttattatcatgaagctccacaatctgtgctctcctctcagcagctttcctccttatgaagaatccccatctcatagcagcttttaccttcagccatccaacaaccgcttttcctgatcgccca

SEQ ID NO: 132360 - DNA, 270 bp, Arabidopsis thaliana columbia
aacataaggatacatatggagtattgggattacaaatgagcagatcacggattattaacctacaattttgtgtctaaactcaaacgtgttggtacaaaatcgatccgcgttcatatttatcatatttgtgaagactgtgatagtaaagtaaagaaatgtaacaaaaatgtctatgagaggaagatactgaacttgggaggtccaacggtatgagaaaaacctctaatggacaattcaggaacagaagctttctccaccacaagaagctca

SEQ ID NO: 132361 - DNA, 408 bp, Arabidopsis thaliana columbia
ttttttttttctaaatccgagcttgtactaaataacaatacattacaacacggtttgcggaactactccacagtctatcttctgttaaaaaactcaaacaagctattgcaaaaagcccttacgagactcacaagtcctaaatatcaacaaaacaaagcttctttggatccttttcacttgccatcatcttttccttgtccatctgctccatcttgctttcctcctctaagccccacgtttcctccaagaccggtttctggttgttgcatcgcatgctgcatcccgtctgttggtcatacccattggtctaatccccatgtgtccttgcatagcttgctgatgtatctgctgctgctgttgcggatcctgaaactggagtggcctaccaaactgtaaaggaccccttgg

SEQ ID NO: 132362 - DNA, 300 bp, Arabidopsis thaliana columbia
gaagaccgtgcgtgaaagaaaagctgctggtggtctcttcaattgggaggaagaaatctttgttgccagagcacctggaaggttagatgtgatgggtggaattgctgactattcaggaagccttgtcttgcagatgccaataagggaagcttgccatgtagctgttcaaagaaaccttcctggaaaacatagactgtggaaacatgcccaagcccgacagcaagctaagggacaagtaccaacaccagttctgcaaattgtctcatatggttcagagatcagcaatcgtgcccccacttt

SEQ ID NO: 132363 - DNA, 300 bp, Arabidopsis thaliana columbia
ttttttaaaagaagagtagttgttttcttttgcataagatgtttaacataacattgcagtatatacatatcatttttatctaaataaaagatgattattatcatcattattattttgaaagtggagaacaacggacctacttattttgtgagatgatactcctatatgaatatgatttaagaaacgtggcataaaaataaataaaagtttaccaaattagggagaagttgaatgggaagggaatcaagagagatacgacgtcggatccggaggtaaccaaacttgccagctccaggtgac

SEQ ID NO: 132364 - DNA, 594 bp, Arabidopsis thaliana columbia
taaatggcagatcaaaatccaagaatcatcgtcgagcaaaacccatctcaagctcgtcttgacgaactaaagttcaagtcatggcccaagtaagatcgactcttgtttttaatccttacttgtggctgagagatccatttggtaaagttgcatgagatagatttagaaaattgagttttggttttctttgttgttcaaggtggtgatgttcaccagcgaagtaccatttgaaatatgaagcagaagagatatgttacattttgaggggcaaagttaaggtttaccctaaaccaccaccatcatcatcgtcggatgcagaagttgaatggtgtgtagagtttgcggcagctgatattgtcacttttccaaagggactttcttgaacttgggatgtatctctctctgttgacaagcacaacaatttcctctcttcttaaattttgtaaaagttttttttattattctttaatttttgtatttctaacattgtgtttcttaatagttgttgtaattggtgttctgtttttttttttttagtaagaaatatagatgtgtttgcatttataatcgcataatgaaacaatgttcttcacc

SEQ ID NO: 132365 - DNA, 348 bp, Arabidopsis thaliana columbia
gcggaaacatccaacctaagccacttatcttgcagagtttcaagaggactaaaacaccaaacagaactataagaaggaatctgaatactgaagccattaaacaatatcatcgaaggagaaaggagctctggccacagacacatctgctttctccttctccagctgagcttccaggtttgagcacttcagctttaattccttcaactcttcttcaatttcatgcacccgagtctcaccagcttcctcgttctccttcttttctgacacttcttccagtttctcctccaaccaatttagattcaaccccgcatccgtcaagtatgcaagagcagcatctgcgtctgacag

SEQ ID NO: 132366 - DNA, 373 bp, Arabidopsis thaliana columbia
atcaaagaagtttcctttagagctttttctctcattctgtcttcgtctaaaaagcttgattgcagataacaatggtgaaagaagttgataacaagttcacttgggtgattaagaatttctcctctcagcagtccaggaaaaattattctgatgaattcttcgtcgatggctgcaaatggcgtcttctggcctttcctaaaggaaatggtgttgagaagttgtcactgtatctggccgttgctggtagtgaatttttacctgatggatggagaagacacgcatatttccacttcagtgtagtgaatcaactctctgatgaactctctcaagctagagaaacaaaaaattggtttgatgcgagtactagtgactg

SEQ ID NO: 132367 - DNA, 361 bp, Arabidopsis thaliana columbia
ccgtattctattgaagtcttaccaaacggagagttacttattcttgattctgagaacagtaacatctacaagatctcatcttctctttcattatatagcaggccaagactggttactggctcccctgaaggatatccaggtcatgttgacggcagattacgtgatgcgaagctgaaccatcctaaggggcttacggttgatgacagaggaaatatatatgtggctgatactgtgaataatgctatccggaagataagtgaaggaggagttacaactattgccggcggcaaaacggctcgaaatggagggcatgtggatggaccaagtgaagatgcaaagttttcaaatgattttgatgttg

SEQ ID NO: 132368 - DNA, 384 bp, Arabidopsis thaliana columbia
aatagtatgcttgaagctatcgaacgcgagtttgaagctgctactaagggtcttgaggagctaaagactagtgaatcaacagaagtcaaggatgacgatgaacacgctgcaaggagaaagagtatgcttgatgctattgaacgcgagtttgaagctgcaacaagaggacttgtagagatcaataatcacgaagaacaagctgaaactcatagaaacagtatgctagaagcaatcgaacgtgaatatgaagctgcaaatgcaaaggctaatgaaaaagactttgcaaagaatccaccaaccataagtacagtgcagaaaacttatggtgcgattcagtggtggctttgacagtcttctaaagcctgcagatggtgtttgtggttg

SEQ ID NO: 132369 - DNA, 352 bp, Arabidopsis thaliana columbia
aatgaagtaaaaaaaaaggttttattagaggaataatacattatttgtgttcaacctctttctcccggtataacccaacaaaacaacaccaataaaaacaagaaaaagaaccacaactaagcttcaagcacaagcgagaatctcatccgttcagttaagcgagctaagaaactcaacccaaatgtgttcagctctcttggtcgtctcaagagcgaactcctcagcagcttgctcgtccttcgccttacgcacagccacatgatactcttcataagcctgagaagcctccttaagaagccttgctacaattactctccgtcgactttaaacttcagaccaacactcactttct

SEQ ID NO: 132370 - DNA, 289 bp, Arabidopsis thaliana columbia
atgaatttgttttttaaattttcgtcaatgttgtgttaaatatgaatatagttttatattgtagtcgaaagaaagtgattaaacatacaaaggcacatgttaattatttttgaatgcaaacaatataaaaaactcatcactacttcattagaaaggaggaggaggaacatcgatggtggttccagccataatctgacccttaccaattagacgccaatgcctatcgacacgtcgtgcttaaagcaaccttctctcctatggttgcgtacacaccggagaacgtccagtt

SEQ ID NO: 132371 - DNA, 314 bp, Arabidopsis thaliana columbia
gacatattttttgtatctattagtgagaaaaattaaagaaagaaacattatatatacaaaagatgcaaactattatataattcatcacaaaaactaaaattccatgaaacaaaaatattaacccataatcaaagaaacaaacactacaacgtgtaaagtttctgcttggtagagactagagagagtcagagaagagacaagttcttaagaaaaggcagtggagatagagagcattgttggccgagcttgtggatcaagaatgtaaacacaaaagtgcaactttcaaaatctctaagacctcctctttaatctcc

SEQ ID NO: 132372 - DNA, 300 bp, Arabidopsis thaliana columbia
  unsure (1)..(300): unsure at all n locations
ttttttaaccaattaatgaagcgatgacacaggctccccttatgaaagagattgttgatcactacagtggtcctgatcgtgtaactgctaagaaacagaacgaggaactcgatagaattgctacaacgnttcccgcaagtgcacctgattccgtgaaacgatttgcagatcgtgcagctcttactcttaagngtaatccaggttggggatttgataagaaataccagttcatggacaagctcgttttagaggtgtcacaaagctacaaattaggngnactcaggtttcaaacttcttaaa

SEQ ID NO: 132373 - DNA, 300 bp, Arabidopsis thaliana columbia
  unsure (1)..(300): unsure at all n locations
ttttttgcgttaagtacaaaaaagattagaacagcaatttacaacgtagacgcagttgaatacaattcaatctaaaactattttactactaatcaaagatctgtcgatttaatcttgcagctttgagtgaagagatcatcgattccgcttcttgagaaagactcttcctttcgacaagtacaagccctaacttctcacgnaagtattcatttctcaactcatctccatcgatttcaccaagctcactagcttgcttccttgtcactaaaccgtaaagccaaagacttcgattcgggtttc

SEQ ID NO: 132374 - DNA, 300 bp, Arabidopsis thaliana columbia
  unsure (1)..(300): unsure at all n locations
gagtttctttttgtatttttgattttnacatttgctttgtgttcgatctctgttttgatgcgatttctctgtttttaaagccatttgatagattgtttccggtaaagctcagcgngagaagaagaagaacaacaatggagtttacagatttctcaaagacgagtttttactacccgtcgtcacaaagcgtttgggatttcggagatttagcggcggcggagaggcattctttagggttcatgggagttattaagttctcagcagcatcaagactttgctactgntttctnccncattcct

SEQ ID NO: 132375 - DNA, 300 bp, Arabidopsis thaliana columbia
  unsure (1)..(300): unsure at all n locations
ttttttgccggcaaaatattatattaaaaagtccataagacaagtacagtaaggaaaagcccaataacaagtacatgcgagaagaacggcccataaaaactataattntagcttctgacacgtgttggagacgtgtaccctacctntccacgcgtcaggaatcgagcgatgccgtnttcacgttgctaaacancgccgtntccgatcaaccgacgccgatcagtgcgatgggtagactgttccttcctgccgatctncacttcaatcaaaagggagcatcganatcatttaccggnttta

SEQ ID NO: 132376 - DNA, 300 bp, Arabidopsis thaliana columbia
  unsure (1)..(300): unsure at all n locations
gagggaggaatcaactccaaaatatcaggtaccaattgccaattttgagagtttgatgagtattgaacctagggaagtagatttcgggttggaaaatattgattctgtagtgctgaacgagaatggggagcaagattgggttaaacagaacattaaacggagcaggtggtgatgatgatgatgaggatgatgaagagtaaatcaccaatcaagccttctttgtctcatgcctctagtagctttttacttatttattttcagactaaaacactcagtttttgttttcacantttagttgcg

SEQ ID NO: 132377 - DNA, 433 bp, Arabidopsis thaliana columbia
  unsure (1)..(433): unsure at all n locations
ctagcatttagagctattgctgataaggttggagctcttttgctttgtgacatggctcacatcagtggtctcgttgctgctcaggaagctgcaaacccatttgagtactgtgacgttgtgacaaccacaacccacaagagtttgaggggtccaagggctggtatgattttntacaggaagggtccaaaaccaccaaagaagggtcaacccgagggtgcagtctatgatttttaaggncaaaatcaactttgctgtatttccctgcgcttcaaggtggtcctcacaatcaccagnnttggtgcttctagctgtttcgtttgaagcaaggctaatanctccctgggtttcaaggtttncgnaaaaacaaagtnaaaagccnaatnnttgtttgnccctttgggaaantancctnatttggggaagggnttnccca

SEQ ID NO: 132378 - DNA, 527 bp, Arabidopsis thaliana columbia
  unsure (1)..(527): unsure at all n locations
ctccctatgacgataaatcatattcaaacatccctactacgtcgtacgagcttcctgatggccagacgctcganattggtgctgataggttcaaagttcctgatgtnatgttcaacccgtccatagtccagacgattcctggaatggagaagtatgctgatatgattccttccgttcgtgggttaccacacatggtcatggagagcatcaacaaatgtaatgtagacatccggagagagttgtatagtagcatactgcttgctggtggcacatcgtcaatgcaacagctgaaagaacgtctcgaaaaggacttgatcgaagagtctccttcactcagctaggngttaaaagtttttgcaagcgggtaaccncaccnggaaggagggttcagtntattggttaggnggggggttttttgnntcccttgggttnttttnacaanttgggtttncccagctttggttttgggnccntgggggttccncctttnggggaatcccctnaaggggggnttnanttttttgggg

SEQ ID NO: 132379 - DNA, 351 bp, Arabidopsis thaliana columbia
  unsure (1)..(351): unsure at all n locations
ggtattccaagttgggttggaccaaacactagacggctcatggcaacgaaaggaggtgtgaaagctaacgtggtggttgcacacgacggaagtggtcagtacaagactatcaatgaagccttgaatgcagtgcctaaagccaaccaaaagccatttgttatctacattaagcaaggtgtctatancgngaaagttgacgtcaccaagnaaatgactcatgtcactttcatcggtgatggncccaccaaaactaagntcactngtagtntcaactattacaattggcaaggtnaaggnatacccttacttgccactttttgcgntcaatnggtgntaacttcangggnggag

SEQ ID NO: 132380 - DNA, 421 bp, Arabidopsis thaliana columbia
  unsure (1)..(421): unsure at all n locations
aactattctgccacggtccatggttccagagaagtctaaatcggtttttcaaatagaagtttacaaaatgcctcctgatctcaacatctcctctataacacctccccagagctggcagattaaaggtaaccttaacccggattacaaatgtggccctcctcttcgtgtcagctcaagccagttccctgatacaagcggtttgccttcaaacaagagtgcatttgctagctggcaagtcgtctgcaacatcactcaaccaactcctcctaaatgctgcgtctcattctcttcttatttcaatgactcagtaatcccgtgtaagacctgcgcttgtggnggttgctcttngngncanagttggcggngtactttgcagnacaaatttcttcaggtnctttcctcttncatantanggntcttg

SEQ ID NO: 132381 - DNA, 458 bp, Arabidopsis thaliana columbia
  unsure (1)..(458): unsure at all n locations
aaaaacccaaaaagctgagccgttggngaaggaagaaggggaaatgtctnatgatggggaagtttacgagcagttcaaggagcagaaatggatggaatggtgtgaagatgtcttggccgatgaaatcaaaactnttggacgtctacaaagactgcaaaccacaagtnccgatctgccaaaggagaaggtacttttcaaaatccggagatatttggaaatccttgggcgaagaatagatgcaattgtnttagaacatgaagaagatctatacaagcaagatagaatgacaatgagattntggactatgtttcaactttntcaaaatttttcgggggatcgcctcaatcaaatntnctccaaattnaagccaggggaaagagggagaggaaggggttcgggccatngaccncaaatggttctaggnacttccccgggnaaaaattcaaancancagggnc

SEQ ID NO: 132382 - DNA, 566 bp, Arabidopsis thaliana columbia
  unsure (1)..(566): unsure at all n locations
ggaatacgatgagaaggacccaaaaacacacgatggaatggatttgaccngagttacaacaaaggaactgattgcnaaatatggtcttgatggcaacactattgactttattggtcacgcagngcacttcacacgaatgaccaacatctcgatcaacccgcctttgatactgtaatgagaatgaagctctatgcggaatctnttgcacgtttccaaggaacatctccatatatttatcctctctatgggttgggagaactaccccaggcatttgcacgncttagtgctgtctatggtggcacatatatgttgaacaaacctgagtgcaaggtagagtttgacgggggaggtaaggttattggtgtaacatctgaggggngagactgctaaatgcaaaaagattttgtgtnacccttnatacctgccggacaaggttaggaaggttncaagggttctcggccatggcattnttgggcncccgttccaaaaccattgtttnnctcagnnaggtnttatcccngaanattgcccaaatgggattnttcttttttgcnaccccaangtgg

SEQ ID NO: 132383 - DNA, 507 bp, Arabidopsis thaliana columbia
  unsure (1)..(507): unsure at all n locations
gaagaaggcaggggatcggaaagtttgcgactttcaaggaggaggttgatcggcttcccccggaaagcatcaccgccgtcaaggatagatcaccgccagctcgatcctcccctgcttttgaccaacccagatctaagaattttacgaccgagccaaagggcttgtggggagtcatagcccagaaagcaaaatctgttattgaagatgataaatctagtgatcgctctacaacagcttctcagtcccggttttcatacctatcagatgaagggttcaagaaaatggncaatcccaagcttcggagggggctggataagcttacatctttctcttaatcagatcgggtgacaactttttgaaaaaagccctttgagggatgggccgacantcntttggnaccaaaacaagctggttttcatccaggggancacggaaacttnaaaaccagccggagngggaccttgntggtgnaggttgggatnaagntnaannntttttggggtttnt

SEQ ID NO: 132384 - DNA, 434 bp, Arabidopsis thaliana columbia
  unsure (1)..(434): unsure at all n locations
aaagcttgtaacatggccaaacaggcttttnaggaggccatagctgagcttgacactctgggagaggaatcctacaaagacagcactctcataatgcagttgctgagggacaatttaaccctttggacctccgatatgcaggagcagatggacgaggcctgaggntctagatgaagggggggagggttgttacgcgatgtttctgccaccaaatcgatctcaaaatccccataacctttgctcaaaaactgtgaaaaaagattgangtgtttatgatgattatgattgtncacagcttgatgatttatctactctactaaacctctgtgctcttaatatttattgtctcgactctgctcaagccttaaaaacatctttctccttaaggctcctctggttaaatatggtcctnctactgnatcggcaaatcaagt

SEQ ID NO: 132385 - DNA, 419 bp, Arabidopsis thaliana columbia
  unsure (1)..(419): unsure at all n locations
gaaagtncgtagccgatggtgtgttttacgctgaactcaatgaggttctaaccagagagcttgctgaggatggttactctggtgttgaggttcgcgtcactcctatgcgtactgagatcatcattagagccactcgtactcaaaacgttctcggtgagaagggaaggaggattagggaattgacatctcttgtacaaaagagattcaaatttcctcaggacagtnttgagctttatnctgagaaggttgctaacagaggtctttgtgctattgcncaggctgagtctcttcgttacaagcttcttgggtggtcttgctgttcgtagggcgtcctaatggggntttnaaaggtttttnanttggggangtgggggcntaaaaggttnccgnggccntttttngggngggaaaaccnccgc

SEQ ID NO: 132386 - DNA, 509 bp, Arabidopsis thaliana columbia
  unsure (1)..(509): unsure at all n locations
ggatgatagtcgatttcgtgatcgcnattcgggaaatttggattgtnctgctcccatgacgacgaagacggtgattgttgattccnatgattatcgtcgtgttcttaagaacaagcttgagactgagtgcgctactgtngtttctcttcgggttgggtctgtgaagcctgaagattcgactagttctccagaaactcaacttcaaccagttcaatccagtcctcttactcaaggagaacttggtgttacttcttccttaccagctgaggtgaaaaaaactggtgtatcaatgaagcaggttactagtggatcgtcgagagaatattctgatgacgaggaccttnatgaagngaatgaaaccacccggtttccttgnagccagagggcgttaaaaaatctngaaggnatctttnaaaatcgtgagtcanctaggcggtctnnaagggngaaagcaaggnnaaacaagttgcctcgnacacagggtantgacctaaaaggtgggantcatt

SEQ ID NO: 132387 - DNA, 454 bp, Arabidopsis thaliana columbia
  unsure (1)..(454): unsure at all n locations
atctccctctagggtttctttgatcaaaccagagagccgtcagggagagcaaaacaaagatcggagaagatgaagacgattctttcttccgaaacgatggacatccccgacagtnttaccatcaaggttcacgctaaagtnatcgaagtcgaaggacctcgcgggaagcttgttcgcnatttcaagcatctcaacctcgattttcagctgatcaaggntccagagactggaaagaagaagcttaagatcgattcgtggtttggaacacgnaaaaccagcgnctccatcagaaccgctcttagccacgncggtaaacttgatctccggtgttaccagaggtttccggttacaagattnnggttcgtntacgcccattttccccataaacggcttcnttgggnggtttcnggaaagtttttggggtnccgaaatttttttgggnaaanaatttnng

SEQ ID NO: 132388 - DNA, 490 bp, Arabidopsis thaliana columbia
  unsure (1)..(490): unsure at all n locations
agcaaaagcaagagaaatccaagttatactgagagggatcgttaacaaaaggttaagggccagagaagctggtgaagcaccaaacgacgatttactgggaatacttcttgagtcgaatttggggcaaacgaaaggaaacggaatgagtaccgaggatctgatggaggagtgcaagttgttctatttcgtcgggcaagagacaacatcagtacttctggtttggacaatggttctnttaagtcaacaccaagattngcaggctcgtgcacgagaagaagtgaagcaagtttttngcgataaagaacctgatgcagaaggactcaaccagctcaaaagttattgaccgntgntattatattgaggtcccttaaggctaatatncctccaatacctcaggctgngcaagagccnttcacaaaagnnntttggngctttggngntntttccactncccnggggggcgttntgatccaattcttccctnttcctt

SEQ ID NO: 132389 - DNA, 491 bp, Arabidopsis thaliana columbia
  unsure (1)..(491): unsure at all n locations
gtagctctctactttgcagcaacccatcctcacctggttaagggtgttaccttgcttaatgcaacacctttntggggtttcttccctaatccagtaagatccccaaagctagcacgtctctttccatggcccggagcattccctctgccggaaagagtgaaaaaaatcacagaattggtgtggcaaaagataagtgatcctgaaagcatagctgagatacttaaacaggtctacacagaccattctaccaatgtggataaagtatttctcacggattttngaggtcacacagcattccggctgcttgcaagcanccgttttgcnttcaatttatggctttgnctcctgggtggnngagcctatnctttttttcccgnagngttttattnttagggnttaagggaaaacaaattgttccagngtnatgtcncaagggaattggaaggggaaaggnnccctgggctaagacccgttnttggggaaagaangtt

SEQ ID NO: 132390 - DNA, 507 bp, Arabidopsis thaliana columbia
  unsure (1)..(507): unsure at all n locations
agagtacttaaacggtgaagttnctggagattatggttatnacccatttggtcttggaaagaagcctgagaactttgctaaataccaagcttttgaattgatccatgcgagatgggctatgttaggagcagctggtttcatcattcctgaagctttaaacaaatatggcgctaactgtggccctgaagctgtctggtttaagactggtgctttgcttcttgatggaaacacattgaactactttggcaagaacatccctatcaaccttgttctcgccgtagttgctgaggttgttctcctcggtggagccgagtactacaggatcaccaacggatttgatttcgagggccaagcttcaacccanggnggtccatttgatccnctaggccttgctaagggccctnngcaaaggggctttnttaaaagtaanggggtnaaggaccgggggnttngcccatttttcanatgttcggtttntttntccaanggnttttncccggnaaggnc

SEQ ID NO: 132391 - DNA, 402 bp, Arabidopsis thaliana columbia
  unsure (1)..(402): unsure at all n locations
gtaagctattgatttgatcaatcgactttgctcatgggatccattgaaacgaccaactgctgatgaggcactaaatcatccatttttcagtatggctacgcaggcttcatatcctatccatgaccttnagctgaggcttgataatatggcggcgttgcctaatcttgagctaaatctctgggactttaacagagaacctgaagaatgttttcttggcttgacactagctgtgaaaccaagtgctcccaaaactggaaatgctccgaaatgtatctcagggcatgagcggggaatttnttntttttgcccccgggggcaataattgatcgggnncccattnagntttttcttgggntntnggnttttnccctnanngaaaangggcctccaaggggccgggtt

SEQ ID NO: 132392 - DNA, 502 bp, Arabidopsis thaliana columbia
  unsure (1)..(502): unsure at all n locations
ttggttatgttcaatgtgttttagctgtgaactggttttcgtttgttttgttttgtttagggtgttgaggcttcaggctggtcacaagtactgcttgttgggacgtttgtcttctgaagttggctggaaccattacgataccatcaaggtatgtcccttttgtccttttcgtctgccttattattggaacaaaaggtgcttcatttactaaaattgtatttgtaaggttcctatgagttgatttgaatagcatctacctgacacatctttgtcattgtnctggggccttttgctgattggtttaaattataaccttaaggtcatatcattggaccttagggttagncaaggggnaaatttatcncaccttaaanctgttgggaaggaaaccgggganttaacctnttgggttnaaaggnttttncaaggggctttngggtaagnggaaaggggngggcncaaagncttttttnttggcngnaagaggnaacccccccaaggg

SEQ ID NO: 132393 - DNA, 587 bp, Arabidopsis thaliana columbia
  unsure (1)..(587): unsure at all n locations
aacagttcctctaaggggattcagccgagcaatggtcaagacaatgactatggctacaagtgtaccgcattttcattttgttgaagagataaactgcgactcacttgtggagctcaagcagttcttcaaagagaacaatacagattccaccatcaaacacacttttnttcctactttaatcaagtctctgtcaatggctctaaccaaatatcccttcgtgaatagttgcttcaacgcggaatctctcgagatcattctcaaaggttcacataatattggagttgcaatggccactgaacatggccttgtcgttcctaatataaagantgttcagtcattatctctgctagagntaaccaaagggctgtcccggttacaacatttggnaagcaaaccaacaaaacttnacccccgaggatgtgacttgggnggncnctaactntggggtaacatttgggnaatttggtgggaaatncgggtccccccttttaaacnttcccggaggtgnaattatcgntntttggagntcggggaaggtccaaatttttaaagggggccttttcncnatcgnaagnnggtaanatttc

SEQ ID NO: 132394 - DNA, 565 bp, Arabidopsis thaliana columbia
  unsure (1)..(565): unsure at all n locations
atcaaacatcacatttnttcctcttttctctcttttttctcagtcttcaaagagtttcttagtaacccaaatcaatggcaggtatcaaagttttcggacacccagcttccattgccaccaggngagtcctcatcgccctccacgagaaaaacctcgactttgagctcgttcatgtcgaactcaaagacggtgagcacaagaaggagcctttcctctcccgcaacccttttggtcaggttccagcctttgaagatggagacctcaagctcttcgaatcaagagcgattactcagtacatagctcaccgatatgaaaaccaaggnaccaaccttctccaaaccgacttcaagnacatatctcagtacggaatcatggncatttggaatgcaaagtngnaggtnaccagttcgncccagtggnttcaaagntttcttttgacaaatttttaagnccatctacgggttgccacagacggagccgttnttcagaagaggggttaagtngcaagtcctnatgntcggggnnggtaagggtaagattgntggantttnttngtgctttactt

SEQ ID NO: 132395 - DNA, 510 bp, Arabidopsis thaliana columbia
  unsure (1)..(510): unsure at all n locations
tattatcgctctagcttctcgcgatgctgtcgttttcaccggaggaccgaattggagtgtaccgaccggaagaagagacgggaggatatcaaacgcagcggaggcattagccaacattcctcctccaaccagtaatatcaccaatcttcagacactctttgcaaaccaaggacttgatcttaaggacctcgttttactatccggggctcacactattggtgtatctcactgctcgtntttcacaaaccgtctctacaatttcacgggtcgtggaggccaagatccggctttggacagcgagtacgnaagcccaatctcaagtctaggaaatgtctaggctcaacggttaacaagnccatcgtagagnatggatccaggggagcccgnaaaacattttgatctaaggtattaccacctngnanttaanncntaggggggcttnttttaatnnagnactnttggttttaaccacttaacccccnaaaannttttaaaacataaanccgggtt

SEQ ID NO: 132396 - DNA, 571 bp, Arabidopsis thaliana columbia
  unsure (1)..(571): unsure at all n locations
ataagcttgaagataaggcgcttgattaccgtcctaagattctnatttgtggtgggagttcttatcctagggattggnattttncaagggttagacagattgcagataagtgtggagctgttttaatgtgtgatatggctcatattagcggtcttgttgcaactaaggaatgttcaaatccatttnatcactgtnacatagtaacctccactactcacaaaggtctacgtggtcctagaggaggtatcatcttctacaggagaggcccaaagataagaaagcagggccatcactctagccattgtgacacttccacgnattacgntctagaggaaaagatcaactttgctgtttttccatctctacaaggnggtccacacaacaaccatatcgntgctcttgccattgcattgaacaagtggccctccagngtnaaaggtttcattcaacaggtgnggaaaacngccangtttnngaggaagctttttttgggaaattccagcctggttctgggggacanaaacccttttttctgggggccnccntggggtnncggatttcgnaatttttt

SEQ ID NO: 132397 - DNA, 568 bp, Arabidopsis thaliana columbia
  unsure (1)..(568): unsure at all n locations
agcatgttgtggattcctttgcggtcaaggttgtaatggtggatacccaattgctgcgtggcggtactttaagcaccacggtgtagtcactgaagagtgtgatccatacttcgacaatactggttgctcgcacccgggatgtgaacccgcttaccctacaccaaaatgtgcaaggaaatgtgttagcggaaaccagctttggcgtgaatcaaaacattatggtgttagtgcgtacaaggtcagatctcaccctgatgacattatggcagaagtttacaaaaatggacctgttgaggttgccttcactgtttacgnggnctttgcgcattacaaatctgggngtgtacaagcacataacaggtactaacattngaggtcatgctgttnaaacttatttggctngggacttctnattgacggtgaagnttattnggtgcttgnaaacaatggaccnagctggggntattntgggnnctnaaggccaggggggnccaacgattgggattaacagggttttacntggttnccttngcaggccggtaaaggtttctctcaggncctttgtncc

SEQ ID NO: 132398 - DNA, 379 bp, Arabidopsis thaliana columbia
  unsure (1)..(379): unsure at all n locations
gggctgatatgttgcttaggatgtatatnanatggggagagaagcagcggtacaagacgaaagttgttgaaatntctaatggagaagaggcagggattaagtcagcnactcttgaaattnaagggcgttatgcatatggttacatttnaggggagaaaggaactcataggattntccgacaatcgcctttcaattcgaaaggtcttcgccagacaagcttttntggtgtggaagtnatnccgcttttccctgaggaagcggtgggaatcgaaataccagaagaggaccttgacattagtttcacggagggcaggtnggaaaggnaggncagaatttttaacaaggttgaaacnttcttgtacggggttactcatatccc

SEQ ID NO: 132399 - DNA, 470 bp, Arabidopsis thaliana columbia
  unsure (1)..(470): unsure at all n locations
gaggaggaagtagaaatcgataaaggcgaagaaggaatcgcaaggaaggaagaaacttgagaggaagatcatgatcctagctgtgttgttcgccaattccgttgggaatgttttaatcgaaaggttcaatggagtaccagctgaggaacggctccactggcgatctttcttggttaagttgggagcagataatctcaaaggcgttaaaaatgaggagcttctcgttgcttgccacaagtcggtttatatcgtgtacacaatgctaggggatgttagcatcttccttgttggcaaagacgngtatgatgaaccttgcttttggcaggaaaccntctttatccatnaccagcgggcttttnaaancccgttttttggaaaacccccncttacagngccgggtttttttnggnaaaatttggggnggtttttncttgncccccttaaaaaannttttngnncgntctttttgg

SEQ ID NO: 132400 - DNA, 570 bp, Arabidopsis thaliana columbia
  unsure (1)..(570): unsure at all n locations
gaagtactagctagtatatcagtcccatgcaccctcttaccaaaccacctcaccaaattttcaactctttttacgtccaaccaaagaatcttcccaaacctctctttattcgattctccaggcatataacaactctcaccatgccggagaaaactcgccgtacaaaggctctcgccgccacgctcttgacgacagtggtgtttctcacgtttccaatgatcatcaacgcttcagattcatcaaccaatagaaaactcgaagaggatcctataaaatgtacaccatgtcttcaaaacattcctcctccgtcaacttcaccggcatcaccttcaccggcgtctcaagnttgtcctccaacaacactacctncttnaacggcgnagaagtcttattgtccaccggcttcgtcacttncatatcatgaggggcaccagggngttgtttccattgaccagagtttggggggtntttaaaaggttnaccgngggaggttttangccttatcgggttnggggnaaaggttttnnggcaaaaatnnggagtttgtgncccttttttggttaaggngtc

SEQ ID NO: 132401 - DNA, 558 bp, Arabidopsis thaliana columbia
  unsure (1)..(558): unsure at all n locations
cacttctagtgatcaagtctcttatctggagactgtttatcctgttttcagcgtttttncgttgctgagtctacacatgttcatgtatggatgcaatctatacatgtggaagaacacgaggataaactacacctttatttttgagtttgcaccaaacacagcgttgcgttaccgagacgcgtttctgatgggaaccacgttcatgacctcagttgtggcagctatggncatccacctcatcctccgagcctccggtttctcagctagtcaagtagacaccattccaggcatcctcctcctgatcttcatatgcgtcttgatatgcccatttaacacattctaccgtccaacaaggtctgcttcatccgcatcttgcgggaaaatgtttgctcancttttctacaaggttttgatgggtgntttcttcatgggngtnaactttactggcagntccatttnttggncacctnngcaactggtggnactntttggntaaaggttnaaacnagggtanatcctnaaaacgggggtcttcanggatttnttactnnatttttt

SEQ ID NO: 132402 - DNA, 381 bp, Arabidopsis thaliana columbia
  unsure (1)..(381): unsure at all n locations
aaatgaaaaacgaaactggaaaccaggtaagtccattgcccgagctcgttgctgagcccacaagtgctcgctcaatgtnatttgttggcacacatgagtatttagctcctgagatcatcaaaggtgaagggcatgggagtncggttnattggtggacttttgggatctttttgtatgagctattgttttggtaaaacccccgtttaaaggggtcanggaacccgaggcaaccacttcttcaacggttgtggggtcanccctctgcgttttcccagaaatcttccagttgtcaanttttgcttgctaggggttttgattnggnggcttctttttaaagnggcctnagccatnggtttngcgnttaaancggtggtncaactt

SEQ ID NO: 132403 - DNA, 534 bp, Arabidopsis thaliana columbia
  unsure (1)..(534): unsure at all n locations
agggtttcgttttttttaaagatttagagaaaaaagtgagttattaagagattccaatcaaaatgagcggagacaacggcggtggtgagaggcgcaaaggctccgtcaagtggtttgatacccagaagggtttcggcttcatcactcctgacgacggtggcgacgatctcttcgttcaccagtcctccatcagatctnagggtttccgtagcctcgctgccgaagaagccgtagagttcgaggttgagatcgacaacaacaaccgtcccaaggccatcgatgtttctggacccgacggcgctcccgtccaaggaaacagcggtggtggttcatctngcggacgcggcgggttttcggtggaggaagaggaggttgacgcggatcttgaggttgntacgccggttgcggtngttgntacggaggaagaggaggttntnntcagaaggcagcncttcttnaagtttgtagcccgtanatgncngaactttttaagcggtgagtncgagancgcgttntcgagtnanngancgcntc

SEQ ID NO: 132404 - DNA, 421 bp, Arabidopsis thaliana columbia
  unsure (1)..(421): unsure at all n locations
gcagacgaagaaggtgacaatggcgtacgttagttgggtgaagctcaccggagaatcactgaatacctaaaccgattctncgacgccgtttcgtaccaagactcttctacactttgccgtctcctctctttctcttccaattctccacctcttctctcactcgccgacgnactcaacgtcttccagggattctagcagtttnattagacagtctgaatagattctntgaatatggcgagattctggctcatgtggtttccgttctctacaaaagttacccgagttgggaatcnagtcggnagcatacctttcctttcggttaaagttttgccaaattgcattttttttcaagnagttttccgnnaaattnggggatnntnctttggggcaatttggaaaggctctttgtantntaagnttt

SEQ ID NO: 132405 - DNA, 552 bp, Arabidopsis thaliana columbia
  unsure (1)..(552): unsure at all n locations
agcaaatatggcttgggatttgtttttatggatagtctccttcttcgttagcttggctctcgtcgcttccgtcttctaccaggttatctgcttaacggatttagaagctgattacttgaacccttttgaaacaagtacccgtatcaaccgattagtaatacctgagtttatcctccaagggtcactctgccttctcttcctcctcacatggcattgggtcttctttctggtcgccgtccctgtaacagtctatcacgcaatgttatacaaagagcgacgttatctcatcgatgtcactgaagtgttccgtggtatcagctttgaaaaggaagctccggtataccaagctcgggttctacggcctttctcttcaanaatgggttgtctttaggntcaatctctctgcgggctatagcttcaagggagnttgatganctacttcaattggttttnatttntgcggttncgtcttnggtnatnaaccaatntctctttaattccntaaggggnnttnagaaaatnnngccaaggtttttntaaggcccccctggc

SEQ ID NO: 132406 - DNA, 377 bp, Arabidopsis thaliana columbia
  unsure (1)..(377): unsure at all n locations
aaagattgaaaacatgacatctgcttatcgtccaagagttattgtgaatggaacaagaagaacaagaacgttccattacttctattgtcgccattgtagccgtaccattaggctaagaaggtttggtctatatggtnccatatgtcctttctgttctagagagatcaatcttcacgatgagcttgacattatgaggccaagccgaccttattgggatagtgataccgnttggttcactctccatcttatcaacgnaccaaagaagtanccggttcaatcatgaatganctagnttataaatactgacgnggnaattcnctgntggcatnncctaagtggacaaaatccgggtccnccaccangncttgggaaatccc

SEQ ID NO: 132407 - DNA, 547 bp, Arabidopsis thaliana columbia
  unsure (1)..(547): unsure at all n locations
catgtntcaagatctccaccgatgcttccatcaaggaaatgatacctcctggttgccttgtcatgctcacacctctcattgttggtttcttctttggagttgagaccctctctggtgtcctcgccggatctnttgtatccggtgttcagatcgccatatcagcatctaacactggtggtgcctgggacaacgccaagaaatacatcgaggctggtgtatcagagcacgcaaagagccttggaccaaagggttcagagccacacaaggcagctgtgattggagacacaattggagacccnttgaaggntacttcaggaccttcattgaacatcctcatcaagctcatggctgttgagtctcttgtctttntcccttcttngcnatcacggtggtatccttttaaagacttctaaactaatccngggaggaggttncgttnttaagagagnagatatnatggngtcgttcaaactttctttttacatnctattttggttccgaggggtnaaaccttttnttntgggnttttaggcnccaatatttttnc

SEQ ID NO: 132408 - DNA, 515 bp, Arabidopsis thaliana columbia
  unsure (1)..(515): unsure at all n locations
agaaaaaatggcaggaaccggagttgtggcggtgtacggcgaaggagccatgacggagacgaaacagaaatctcccttctccgtgaaagttggtctcgctcagatgcttcgtggcggtgtaatcatggatgtcgtcaacgcagagcaagctcgaatcgctgaagaagctggcgcatgcnccgtgatggctcttgaacgtnttcccgccgatattcgagctcaaggcggtgttgctcgaatnagcgatccagagatgatcaaagaaatcaaaaacgccgtgacgattccggtgatggcgaaantagaattngtcatttcgttgaagctcagatcctgggaagcaatcggagtttattangtcgccgngagtnaagttttaaatttggccgccgngggtaatcncattaccaaacataatttcaaaatcccctttttttttggntttnggatcncggnnaagtttaaggnggtncctaaagggnccccttttaanacccaaggtgggnttgactgaa

SEQ ID NO: 132409 - DNA, 521 bp, Arabidopsis thaliana columbia
  unsure (1)..(521): unsure at all n locations
aataaagcgatgattganagatatatggttgcggatttnttcgatatgattgatattgattcgtttggaagtnattctncgtttttaagagatgcgtttaatgcattgagattgggtggtttgctttacttgacgtcgactgatggttacncttctggtggtcacagaccttataattctttagcagcttatggagcatttattcgaccaatgccgtttgggaatnagattgggctgcggatgcttataggtggagcagtgagagaagctgctctgcttggttatcatgttacggctcttttctcgtactattcttatcacggacctntgtttagagtcaatgctgaggggtcaccgtgggaagctacatgaggacaggaactatgggtttttcacgnactgtaatctatgtggcatttcatacattnnatccgtgaacttggtttatgggntncccccagtgntcaaaggntcttttcactggttttcagnccanttgggnggcccnttatntgaaccat

SEQ ID NO: 132410 - DNA, 365 bp, Arabidopsis thaliana columbia
  unsure (1)..(365): unsure at all n locations
aactaaccaaacataacnncagtctcttcttgtttcgatggaactcaataaggatcagacagtcatgtcggaggataaaaagcctcaagatccaaatcccagatttncttgcnaaggttgcagcgttctgctcgacatcaacgatggtgaccgtntcgtcttcgctcgtttatctagtggcgctatattaaaaattgggaataagaattattctttaaagccattgatcggagctccgtttggttctntgttccaagtcgaaaccggtgaagatggttctttcctctntngnattcttcccattaaacaaggaangtaacagtaataatgttntgggccggttcgnggngntaatcgggaaatcg

SEQ ID NO: 132411 - DNA, 531 bp, Arabidopsis thaliana columbia
  unsure (1)..(531): unsure at all n locations
gccatccatagatttattccaccatcttcatctctggaaatccttcgccgccgcgagaattgacattgttttgattgcatataaatctccgcaacagtatggtacgttttgtttagatctacggttttgttatcatccgttaattcggcgacatcagcaacgatttgcttcatccacaaaccgaatagatgtcaaagtgaagcgnggagacccgncgattcgacatgtacgggagaaaagggtatcagcttatcaaagattttgccaccggagagaagggtcagctcaaacctttcaacagcaaactctttgatgaaacaatcggagagtgtgaccagaatcaccatcttatccagtccttgntaaggnaatgcancaagaaggttttggatgttcagnccancagaacggtgcccctttggggnnctntttaccccttgntttatccggacaagggtcctatggttntttttcaaccggcgnattntcnggntttgnatggggtnggttactttggctncttnancaggt

SEQ ID NO: 132412 - DNA, 532 bp, Arabidopsis thaliana columbia
  unsure (1)..(532): unsure at all n locations
acgtgtcaaaacattacatttccactctcacattcagacgcaccaatcctctgttttggattttaaagagaaaatggcaagcagcgacgtgaagctgatcggtgcttggncgagtccctttgtnatgaggccgaggattgctctaaacctcaagtctgtcccctacgagttcctccaagagacgtttgggtctaagagcgagttgcttcttaaatcaaacccggttcacaagaagatcccggttctgcttcatgctgataaaccggtgagtgagtccaacatcatcgttgagtatatcgatgacacttggagctcatctggaccgtccattctcccttccgatccttacgatcgggccatggttcggttctgggttgcttacatcgacgnaaagtggttttgtcgtctaagaggttcctaaaagccgnggnnaggagngagnaagctntatagtaacttgagagggatcgttttgggagggtcattnttcagaaggaaccgtttaanggnaatngncntgntnttggggttt

SEQ ID NO: 132413 - DNA, 453 bp, Arabidopsis thaliana columbia
  unsure (1)..(453): unsure at all n locations
taccaaggtgcaggagaaggtcttgttgcgttaggtttactgaggaagctattttcagaacgagaggntccaaacaggacttcgggtttnctgatggcttccaaaatatncggtgagaggtctggtcttgctgaggaagggttagattatncccggaaagctatcggaaacttggggaaggaatgcagtcaattagatggagcagcgcgnttcgttttagggatcacgctcacggaaagctctagaatngctgttacagagactgagaggatagctaggcaatccgaggggattcaggccctggaatctncagatatgacaaacccgagggttgtgcaccgtcttncgttngagantncagacagagggnaacttgnattctgcattagatatcctaaanagggcgttgaaactttgagcanagtntgatctttaagtatggtancttttgnc

SEQ ID NO: 132414 - DNA, 516 bp, Arabidopsis thaliana columbia
  unsure (1)..(516): unsure at all n locations
gagagactttgtggccatggcagcctctctccaatccaccgctacatncctccagtcggcgaagatcgccaccgctccttctcgcggaagttctcacctccgatcgactcaagccgtcggcaaatcttttgggctcgaaacttcctcggctcgcctcacttgctccttccagtctgactttaaggacttcaccggtaaatgctccgacgctgtcaaaatcgccggattcgctcttgccacctctgctctcgtcgtctcgggagcaagtncggagggagctccaaagagattgacctatgatgagattcagagcaagacatacatggaagtgaaaaggaacctggaacggctaaccagtgcctactattgacggtggctctgagantttntcgtnaaacccggaaagtatgaggaagaagttttcttggggctacttccttancgtaaggagcagttaagaagacgtctcaggtcagacaaagtatgccgntacnaactnngntcaggcctnggttc

SEQ ID NO: 132415 - DNA, 539 bp, Arabidopsis thaliana columbia
  unsure (1)..(539): unsure at all n locations
agatgaggcgggtcgtcgtgctctgcaattcaatccacttgctggtaaggtagctacaataagcctatcagcttttggtcctggaggcccttttggttttggtcctttctcagagaaatggaagaaacaacagaagaaacctaaaccttccaaaaaccaacagtctggggactcttcgaaacatgaggcagttggagacgaatggttaaaaaccgggaattgtcctatcgccaagtcttttagagctgcaagaaagtcatgcctcttatttctaaagcattaacgntaccacctggtatgaaatatagatgtccagctccctatagtagcttctagagctgcactttcgnaagacttgctttnggcaaaaaagtctttcggccctaagccttttancctgaaaaanattgcttgnaatcggctcttnatngggaattggctcnaaatntgccncttngggttttttgggggggcccaccaaaagnagntttncncctccatgggtttttgggtnccatnttctttncctttttngnaat

SEQ ID NO: 132416 - DNA, 435 bp, Arabidopsis thaliana columbia
  unsure (1)..(435): unsure at all n locations
aaatcacagattcatcttcttcaaatttccntcgatcaaaaaaccattacccttcaatggaatcaatcaacaccttgaaaggctacgacaaagtatccgaccaagaaaaccaaatccatcatcatcatcattctccacttccaaaaccatcatcattttcccgtaaaaccctaatcgccaccggctccgtcgtatctttcctcttaatcctctccgtcgtcgntttaaccgccggagctttcactcactctcctncacaccatccanctatctcctccggctctttnaagtcactatggtccgtgactcgttanccagagncctgtttcaactnntctatcaatcttntntnaacggatntgatttaaaaggttaaccgngnattaaatccttggggttttttttttggggtggttgntaaagggggttnaaacg

SEQ ID NO: 132417 - DNA, 441 bp, Arabidopsis thaliana columbia
  unsure (1)..(441): unsure at all n locations
tctggaaaaagaatcatttggttcggtacttgtgtcccgggcaattagggctgcacattgcttaacctctatccagttctcaccaacctccgagcacattctgcttgcatatggtcgtcgtcatggttctcttttgaagagcattgtgngtgatggagaaacaacatcacattttttcacagttttggagatttacagagtttcagatatggaactggtgagagtacttccaagctcagaggatgaagttaatgttgcttgctttcatccttctcctgggggaggtcttgtctatggnacaaaaggnggggaaactaaggatcttccggttacaacacagntgctgcgtccaatntcactgnaccaaatagnttttcccgatggagaacttggncnnggtagnattnttacaanggtcagacctntgcntnagattctnag

SEQ ID NO: 132418 - DNA, 571 bp, Arabidopsis thaliana columbia
  unsure (1)..(571): unsure at all n locations
ggctaatgttgatacaacaattctcaggaagtgctgctgtaatctcttatgcaagtaccatttttagaaaagctggtttttcggtggccattggaacgacgatgctaggtatcttcgtgattccaaaagccatgattggcctcattcttgtcgataaatggggcagacgtcctctcctgatgacttcagcgtttgggatgagcatgacttgcatgctacttggggtcgccttcacattacagaaaatgcaattgctttcggaactaactccaatattatcgtttatatgcgtaatgatgtatattgcaacttatgcaataggcttgggaggtctacccttgggtaattatgtcgggagatatttccaataaatataaaagtaactgcaggaagtatagtacggtaggctcattttcaagtaggtcaatcgcacttacggtttcaccttctgtcgattggnnctcaaggancggtttcaaatccnggggatcggtgngcancgttctttaaatgggtnccgtcngaccgagggttcccngggatcaagttcccttttananccntnanattc

SEQ ID NO: 132419 - DNA, 436 bp, Arabidopsis thaliana columbia
  unsure (1)..(436): unsure at all n locations
ggttataacggcattgatcatatctcagttgcttctgatgggtttgttaggtacaaaacatgccgcttcagctgctccgtttctcattgctcttcctgtgattactatcggtttccaccgcttctgtaaaggccgtttngaacctgcctttgtccgttaccccttacaggaagctatgatgaaagatacattggaaagagcaagagagccaaatctgaacctgaaaggttacttgcaagacgnttatattcatccgggttttaaaggcggtgataatgatgccggcggttacaatgatccgggaaaaatttggnggattgaanggcatccataggtgnccaccaaaaanngcccaattgnggggggggaccaatttcctngaancngggcaangattcancnggnggaatcggnttcccaattttttgggnccgtt

SEQ ID NO: 132420 - DNA, 366 bp, Arabidopsis thaliana columbia
  unsure (1)..(366): unsure at all n locations
ggcgaatatcccgcacacacaccttgctcaagagaagtctgatcagaattggatggttgttaatggtgataagatcaattttcctggtggaggaacacatttccacaacggagctgacaaatacattgtttccctggctcagatgctgaaattccctggtgacaaactcaacaatgggggaagcattcggaatgttcttgacggttggttctggggtagctagncttcggnggcntattcttctttcacaatggcaatcataggccatgtctttttngcccccttaatgaattntccaccagaacccatgnttccnngtttttgcctctngaaccgggggggtttnccattnaaacantttngggg

SEQ ID NO: 132421 - DNA, 594 bp, Arabidopsis thaliana columbia
  unsure (1)..(594): unsure at all n locations
gctgatgtgactactagacagaattggcagatccgtggtgttgtgttgcctgatgtgcctgagatcttgaaaggtcttgcttctgttggtttaacgagtcttcaaagtggtatggataacgtgaggaacccggttgggaatcctatagctgggattgatccggaggagattgttgacacgaggccttacacgaatctcctttcgcagtttatcaccgctaattcacaaggaaaccccgatttcaccaacttgccaagaaagtggaatgtgtgtgtggtggggactcatgatctctatgagcatccacatatcaatgatttggcctacatgcctgctaataaagatggaccggttttggattcaattttgcttgtggggagggattctttaagtcccaaaaggttgtgaagaagcgnttcccccttgatggtttgggtccctgcttatgaccggttcttccactttgaaaagctgttctagagggtacaanggttttngacctcgggnanccgcagaggcaagattatttggtttcgcgnacttgggttaaggtttaacttaggnggnnggatccaatggaactgngggctnaag

SEQ ID NO: 132422 - DNA, 606 bp, Arabidopsis thaliana columbia
  unsure (1)..(606): unsure at all n locations
agggaaacaaaagttccaagagataaggatatgacgcttggggaattgctcaaatacaaatcccaggaaggtgttcgagttttgctacttgtatgggatgataagacttctcatgataagtttgggataaaaacgcctggagttatggggacacatgatgaggagactaggaagttcttcaagcattcttctgtgatatgcgttttgtcaccccggtatgccagcagtaagcttgggttgttcaaacaacaggttgttggaactctcttcacgnaccatcaaaagtgtgttcttgtagacactcaggctgttggtaataatcgcaaggtcaccgcttttattggaggtctagatcctttgtgatggccgttatgacacaccttgagcataggntacccccacgntcttgacactgtatttaagggatgatttccacaaatcctnccattttccagcttggncccaaggncccaagncaaccnttggaccggttttnacctttngggttanatgggccttcggganattatgtcnnaaaaactttggcaccgttggggaaggcanccggtggnggggtttnttcgttaaggggaacccttgnnnttc

SEQ ID NO: 132423 - DNA, 583 bp, Arabidopsis thaliana columbia
  unsure (1)..(583): unsure at all n locations
caaaatctctgttgccggaaattttcttcaccgaaactgaaagaagtcgaaagagagaagagaagaaattgaagcaatggagggagcagaggaagctggggctgagatagcggttgattcaaaggacttgcagcaacaaagcaaagctttcgacaagctcaccgatcgtntcgaggatcgccagctcgattcctctcgtgttcaatcggctatggcttcgattgctgcttctagggaggctgatctgaatnctaagaggttgagggagaaagaactggcctctgtgaagatcaatcctgcagatgttgagtttattgtaaacgaacttgagatagaaaagaatgttggcggaaagacctctaagggngcaccaaaggtgatgcggttncttncgactaggcaattcctttcaccgntatcccctttgatggggcaggnccattctttacttccaagggtttttgatgtttaanggttaangcaagctcctaatnttaacccngtaaattnncttttctgacccgccttttnagagncctnatnagtncatcgtctgggnggtttttggtnccnaagttaattc

SEQ ID NO: 132424 - DNA, 583 bp, Arabidopsis thaliana columbia
  unsure (1)..(583): unsure at all n locations
ttttaaaaaaaataagaagacatatttatcaacttgatcaacttgagcaagttgcagcagatattttcctcggccaagatctagagttttgagaatggcgatggtatcaggaagacgatctactctaaaccccgacgcacctctttttattccggcagctgtacgacaagtggaagatttctcaccggagtggtggcaattggtgacaacttcgacttggtaccctgattactggatcagtcagcagcagcaaggcgcggatggtttctatgacaacggagagaatgagaatggtggaggtcatatcgatgtagctgatcttcttccagaatcatttgattttgatgatatggaagatttctttgacactgatgctgctgagtttgatcaagggattccgatgggagaatgtattaccaagcaccttccgaatttggctttngaaagaattggtganatggtaagnaatcaagtgggacagnngccccagncccnttntggaccncntaagattcgggaanccaccaaatggggaccaagggttctctttnccggaaatcncagcncctaaggnntttttnnt

SEQ ID NO: 132425 - DNA, 585 bp, Arabidopsis thaliana columbia
  unsure (1)..(585): unsure at all n locations
gttcgttccggttttatcccatgtgaccacaacactgtctactggttcctaacccacacctccactgatatagatgaggagacaaattcggaaatcctcaaagagtttgtgctgaacaagatcaaagacttgcctgaaaacattaagaatgtggtggagaccactgatcttgatagcatggtgatgtctcaactgaagtaccgacctccatgggaactgctatggtcaaacatcacaaaagacaacgtgtgcgttgcaggagatgcacttcacccaatgactcctgatatcggacaaggaggttgctcagccatggaggatggagttatccttgcctcgttgtctagggtgaaggggttaaaggcaaagnggcctnnaaaggtggaacaggagggaaatttaggagnggggtttaagnggggttnaagaagggtttangnaggnttccaggggaaaggaattggggagncttnncntttttacaacgggcttttcaagttgggnttttnngnnagccaangggaagtggttacnttttcaggganaggtccttnggttttcccttttnggcctcttaaagccctt

SEQ ID NO: 132426 - DNA, 462 bp, Arabidopsis thaliana columbia
  unsure (1)..(462): unsure at all n locations
tnaaaatntttaattcctatcctaacctttnagtcttggctattgctcttgcactatcttttcntgtncctctgaaagcccaagaccagccgcaagactacttcaatgcccacaaccgtgctcgagtttctgtaggcgtgagtcccttgatgtggagccagacgctggctgcctatgctcaagcctacgccgagaagagacgcgactncggttnatttctctaaggtgggccctacggggagaccataaaagcggatatnattgacttctcagctgaggagtttgtnagcagctttcttataccagaagtctgattacgattatacttcaaacacatgtcggtgctgggnaatnatgtnacgggttataaggcaggttttgtttagaaagtcggtgtttctttgggtgtgccaanncaaatgcaataatggngggttccttgccatttnaggnttnaccccg

SEQ ID NO: 132427 - DNA, 472 bp, Arabidopsis thaliana columbia
  unsure (1)..(472): unsure at all n locations
cccaccgtttcttaagactctctctctctttctgttttctatttctctctctctcaaatgaaagagagagaagagctcccatggatgaaaatagcgagaccgaagtttctccaaggtgatatgtctatctgtatatgtnatatatgtnatacgaagagttagggttttgnnatttcgaagtcaatttttgtttttttgtcaataatgatatctgaatgatgaagaacacgtaactaagatatgttactgaactatataatacatatgtgtgttttcctgtatctatttctatatatatgtagntgtagtgtaagtctgttatataggcattattccatggtgtacatgcattatacccaccataaatttgnatccatacctncttttgnttttcgggtgntnggatgtccctaggtatcctncatacggtttgtttccncatgnnttttccancgccatntntatttgggng

SEQ ID NO: 132428 - DNA, 440 bp, Arabidopsis thaliana columbia
  unsure (1)..(440): unsure at all n locations
cnatgatgcttgtagcatctgtntcgagcctttnaccctccaggntccttccactgtnaccagctgcaaacatgaatatcaccttcagtgcatcattgaatggtcacagagaagcaaagagtgtcctatttgctggcaattgtttgttttgagagaccctgctagccaagagcttttagctgctgtggaaaaggaaagacttttgaaaaccaggaatatatctncatcctctccaatctctattcatcactctcatgacgattttnactctgaggaggaggaatcacagtttagcagctttgatgaacaattcttgaggcatcttactgaagctgcacatagncgttgtttgcttcgcagaagggatggtcaaatatccnctagtcttgttttcgnccagnntcccactncgggttcanccnactgntttgggcaanctt

SEQ ID NO: 132429 - DNA, 458 bp, Arabidopsis thaliana columbia
  unsure (1)..(458): unsure at all n locations
gtggcattgaagaaggtgaagatggaaaaagaaagagaaggttttccattgacttctcttagggaaattaacatcctcctttcttttcatcatccatcaatagtggatgttaaagaggtggtcgtgggtagcagccttgatagcatattcatggtgatggaatacatggaacatgatcttaaagcattgatggagacaatgaagcagcgtttttagtcaaagtgaagttaagtgcttaaangcttcaaccttttagagggccgtcaaagtatcttcacggcaacctggggtgcttcatcgngnattttgaaaaccatctaaaccctgctttttaaaccaatcgggggtgaagttnnagntnttgtngcctttggggtttngctccggcaaattatngcaagncccgttcaaagccnttatnccccancctggntnttttcgggttttggnccaaggna

SEQ ID NO: 132430 - DNA, 602 bp, Arabidopsis thaliana columbia
  unsure (1)..(602): unsure at all n locations
gaaaatgtggagactctctgtgtcaattttcctcttctcatgtctctncgtttctncgtcttcgttgggcgattcggaggcgacgtgttccggtatagttccgttacggtaccggtacgataagatctcgataaccgactttggaggcgttggagatggtcgaacggtgaatactaaggcgtttagggcggcgatttatcggattcagcatctgaagaggagaggaggcacgcttttgtatatacctccgggagtgtatttnacggagagcttcaatctcactagccatatgactctttacttagctaaaggtgctgtgattagagctgttcaggatacctgggaattggccatttgattgatccctttgcngtcttatggaagagggagagagttaccagggggacggtaatattagctttattcatggtgatgggcttcgtnatgtaggcatcactngcaaaaatggggcaatagcgggcaaggngaagtttgtggccatttggcgngtagancgtnaagncnaagccnnncttatcggtnaaggccntaggggcanaanccatgtattccaatccctttggcatacccggattagaaga

SEQ ID NO: 132431 - DNA, 433 bp, Arabidopsis thaliana columbia
  unsure (1)..(433): unsure at all n locations
atctcttaacaacttctccaccttctccccaccaccaccactcaccgtcggagaaagaaaaaaaacaaccaccatgaaagactgtgaaaaccacggccactctcgccggaaactaataaggcgaatattttggtcaataatcttcgtcctcttcatcatcttcctaacaatcctcctcatttgggcaattctccaaccatcaaagncacggttcaacctccaagacggcaccgtctacggcttcaacggnttcggnaattcaccgnaccttcttaacttcaactttcaaatcaacttttntntttcccgggacccttaacaacaaaaattgggnantttntttnggnccgggtttnnngggnttacggttaattttcccgggggccaacaaatttaatttttcccaanatttaattccctcccaagggnttta

SEQ ID NO: 132432 - DNA, 581 bp, Arabidopsis thaliana columbia
  unsure (1)..(581): unsure at all n locations
cgctaatctccgtttgatctcgccgacactcgagccttttaccgatgaaggatggagattccttaccaataagcacttcttccgtcgcggcgacgacggtgaccggaaagaaggaaaccggttattccgctctcttctcgaaaggccggtacaagttttgggccttagctgcgattctgttactcgctttctggtcaatgctcactggcacggtcaatctccgttggtctgccggtaacattaaccatttcaccgacgatctcgtctttcccatccacgaggatctcgatgttcttgaaatggaggagagggagaaagtggtgaagacatgtgggatgtgtataacaatggccgtcgtatcagattacctaggtttttgcaagaggccttcgagnctncttacgnggagcttaccagtgatgacctaatgtggtttaggttccatttccgagatcgttggttgntatttgtccattgtaaaggccgcctccggttattcccgnattncgggantncaaagcttaaactttggcaaaggtgggattaaattaaacagnacgtgntaangatgggtttgangc

SEQ ID NO: 132433 - DNA, 577 bp, Arabidopsis thaliana columbia
  unsure (1)..(577): unsure at all n locations
cttgtaatcaaccaaagtcgaaaaacagagttattttgtcggatcaaaatggtgaagattgagataggaagtgtgggtgactcctttagtgtagcatctcttaaggcttacttgtctgaatttatcgcaactnttctctttgtgtttgcnggcgttggctctgctcttgcttttgccaagctcacatccgatgcagccttggaccccgctggtcttgtcgctgtcgctgtggctcacgnctttgcccttttcgttggtgtttccatagccgccaacatctccggcggacaccttaaccccgccgtgacactcggtctcgccgtcggtggcaacatcacagtaataaccggtttcttttactggattgctcaatgccttggntccatcgtcgggtgtntcctnctggcttcgtancaatgggngangtaccgactcatggagtanggccggtttagngntatttaaggagnagtnattgagnatttnggtacctttgcctgggtnnaaagttncgnaaaagggtttccaaaaaaggtaattggccatntccatgatggttatgtggcaaanctgangg

SEQ ID NO: 132434 - DNA, 590 bp, Arabidopsis thaliana columbia
  unsure (1)..(590): unsure at all n locations
actccttcttctacttcgtgtttcatcggaatctccatggntcgtcgccggagatgtgtctcgaatcccgatcaatttcctcgaattagcaaagagcccggaggttttcgattcaatggtgagaatcagaaggaaaatccacgagaatcctgagctgggatacgaggaattcgaaactagtaagttcattaggtcggagcttgaccttatcggagttaagtataggtttccggtagctatcaccggtattatcggatatatcggtaccggagaaccgccattcgtcgctctaagagcagatatggatgctttgcctattcaggaagctgttgagtgggagcacaagagcaaaaatcctggggaaaaatgcatgcttttggacattgatggtcatgtttctatgcttccttggtgctgctaagntaccttcaaccaacattggcaacaattttcaaggganctttggtncttacctttaagccactttggaaggtttagttgggcaaagttttntgggnagangnncgtttannccgngaannntttttgggtnnaantttccccgnctcccttggaaannnttncttcag

SEQ ID NO: 132435 - DNA, 382 bp, Arabidopsis thaliana columbia
  unsure (1)..(382): unsure at all n locations
caatggcggagcatgaagaagacgaagacgaagactgtttgattacagaaagcaagaaccctttttttgactcaactgcagccacagcctcaacctcagaagcagtctctgtagacgctgatatcgagattgatgaagatgtgggtacagatganttntcacctgaatgggttgaacgtaatgattcatcttcagccattgcaccgggaagtacagatnatgtgaagatncctnatgtgagaatcccaaacggttcttcatcctcagaaggtgagattagcccganatcaccanctgtacctttcattgttttggaaaaanattnttgaagtttttgggagttnanncaagaagggactnnaagggcaaattggntcaagct

SEQ ID NO: 132436 - DNA, 376 bp, Arabidopsis thaliana columbia
  unsure (1)..(376): unsure at all n locations
caaaantcgagtcagcctaaactcaagctaaatccatacagctggaacaaagcggcgaattttttattcttggaatcgccggttggagttggattctcctatactaacacaagccgtgatataaaacaactcggcgacactntcacagcgagagactcgtacaacttccttgtcaactggttcaagagatttccccagtacaagtcacacgnnttctacattgccggagaaagctacgccggccattacgtnccacaactttnggagctcatctacaaagnnaacaagattgcnttcaagaaagatttcnttaatctcaaggggttantgntaggnaacgcggttatttggatgccgggaacgggtcanaangggg

SEQ ID NO: 132437 - DNA, 330 bp, Arabidopsis thaliana columbia
  unsure (1)..(330): unsure at all n locations
tgctttcccaattctctctcgtcggcgaagntcctgtgaaaccctagacaaatcgcagngatgcaagattcaaagattccacctttctctgaagcaaaaagaatgaagattcctactccaaaacaacccttgactcaactaccaccacgtatcgggaaaaaagtttcaaatcggagcaaatcgaaccaggntcatgcgatttcacatcaacttgagatgtctccaaattcagattcatctccaggnaacgagtacagagcactnagacggaaagtntttgctgctagagggngataggtttnnngtttgngagagnagttttaaggnaag

SEQ ID NO: 132438 - DNA, 470 bp, Arabidopsis thaliana columbia
  unsure (1)..(470): unsure at all n locations
ctgcatgggtcaaatctgcatgtctacaaccgacatggcctgctatgtcgtggatgctcatgtctggggctttagagatgcctgttttgaacaccatctccagaaaggccagggagtcgctggacgagcttttctcaatggtggctcatgtttctgcagagacatcaccaagttctgcaaaacgcagtacccactagtccattatgcgctcatgttcaagttgaccacttgttttgcaatatctctccagagctcttacacgggcgacgncagttacaattcttgaattttttcttcccttcggagtataacagacggccangagcaaggatttccttgttgggttctattttttggtgncaantgnaaggncattttcagnggcttgaggggttgcaanttggggttggactttnggtnnaagnttnccggcnaaattgtttttcggngttcatccaagnattnnccgg

SEQ ID NO: 132439 - DNA, 527 bp, Arabidopsis thaliana columbia
  unsure (1)..(527): unsure at all n locations
tgtagaagcagaagaaacccatcatcatcatgatgaactcttctnttctaactccttcttcttcatcttcttcccatatccaaactccatcaacaactttcgaccacgaagacttcctcgatcaaatcttttcctcggccccgtggccctccgtcgtcgatgatgctcatcctcttccctccgatggcttccacggccacgatgtcgactcaaggaatcagccgatcatnatgatgcctttnaatgatggctcctccgtccacgntctttataatggcttctccgtcgccggatctcttcctaactttcaaatccctcagggatcgggaggaggattgatgaacccaacaaggncaaacgnaaacgcaaacggaacctcaggcggagcgggtttacagttactggtggtanggtggggggtcccccannagtagggcttaaatccgggcttggggnggnaaggaactnattctaaaggtttccnaaaggttnggnggnggnaattncggaaantttaannttttaag

SEQ ID NO: 132440 - DNA, 332 bp, Arabidopsis thaliana columbia
  unsure (1)..(332): unsure at all n locations
ggtaattccaaatcaagagtgtatgaaaaaagaagaaaggctgcaaatattggaaggagattcantgctcaaaaaacacaaggagtgcaaaccagatactagtcacttgatgantgataattctaatgcacaaaacaccgaagcagtttcantatttccacaaacggagccgttatattggnttganggctacaaatgcntctngtntgggatagagttaccaccatctttngtagaggaacggcaagaacactctgattttaatctcgctcagaggcttcaaaacgnngaaacntggctctagttcttccacaacaccttcaaaccggngg

SEQ ID NO: 132441 - DNA, 344 bp, Arabidopsis thaliana columbia
  unsure (1)..(344): unsure at all n locations
gcctccagaggtgtgcatttagtggaagctgggaggtcagaattgttgcaattcaagctcttactacaatagccattagatctggtgaacctttcaggctgcagatatacgagtttttntacaccttagcagagggtggtgtacagtctcaactttntgaaatgcacctgagtaatggggaagaccanggagctagtggtacaggtcttggagttttaataacaccgntgttaaaagtncttgatgaaatgtatgttggacaagacgggttantcaaggntatacnccatcacgntaaatgcaaacaaagganttngnaaggacgggggggcntttaaaaaacc

SEQ ID NO: 132442 - DNA, 339 bp, Arabidopsis thaliana columbia
  unsure (1)..(339): unsure at all n locations
gntaatctcgntcctctgtnagggntttacgttggcaacagaggagagaagcttatgattcatcccntcttcggtagttccgggaatctttctgcgttcatcaaatttttggcaggtggagatgttgacgcacacaaatcgagcaacattttgagtatcaccattggaatagcaaaagctcttgatcatctccatacaggaatgcagnaaccgattgttcacggaaatctgnagtcgaaaaatnttctactagacangagntttaggcctagagtctctgatttcgggcttgcatttgcttttgnacccttcagcttgggcaaagagggttcnnaggaa

SEQ ID NO: 132443 - DNA, 464 bp, Arabidopsis thaliana columbia
  unsure (1)..(464): unsure at all n locations
atctgccactcaaagagttactagaaatagtccaaaggttagcacaaagacacttttatctccctcttcttctgatgaaaaatacttttttttttctttncttttggcgaattatgaatacagcaagcttgaagaatcaaatgtcgataatgcaagtntggatactttaattnctctggaggaacagctcgagactgctctgtccgtaactagagctaggaagacagaactaatgatgggggaagtgaagtcccttcaaaaaacggagaacttgctgagagaagagaaccagactttggctagccaggggacaaaaacatctcttgaaggctaattcatcagttgntacacaataaaaattaggaattacacttgcgntaaacatnttttttaaangnttnaagggccttnaattnnnttttgggnattttttttngaacccccntttttnttaaacccnttgg

SEQ ID NO: 132444 - DNA, 522 bp, Arabidopsis thaliana columbia
  unsure (1)..(522): unsure at all n locations
aaaaaaaccaaacggtcaaccaaaacttgtctgacccacaaacacttcttgattctgtcattgaaaagaaaactttttaatttttggatacatcatcctctcattggaagagagaaacaatgaagaatccgatattgaagacatggagaaaagtgaagtcttttgggcatacgagctcttcgaccacaccctcgttcacgaagagcaagtnttgccatggctcttttcgtctcgaggaagctaagagcaacgaatcaaaaggaaagccgaagaaagagtcgccgtcacatggatttttcacggtttacgttggtcccacggaacaaagaattgttgtgaagncaaaaacttctgaaccatcccttttgttcaagaactttttnagaagatgctgngacttaagtatgggtatagacgcgntgncccnttgntcctnccttgtgaggttgncttcttncttcaaaggttttgcgggtatnaaggcttatcctggcatnatgtcannntgntgntatnttgntc

SEQ ID NO: 132445 - DNA, 502 bp, Arabidopsis thaliana columbia
  unsure (1)..(502): unsure at all n locations
acaaagatatcaaggaagagcacacagtgcaaagaaacccactcgctataccggggtgtgaaccggttaggttcgaagatactctggatgcatatctggttcccgacgaaccggtgtaccgggatttttttcgtcatggtctggcttacccaaaagccgatggaattttggtaaatacatgggaagagatggagcccaaatcattgaagtcccttctaaacccaaagctcttnggccgggttgctcgtgtaccggtctatccaatcggtcccttatgcagaccgatacaatcatccgaaaccgatcacccggttttggattggttaaacgnacaaccgaacgagtcggttctctatatctccttcgggagtggtggttgtntatnggcgnaacagttaactnatttgcgtggggctcnngcagngcagaacngtttgtatgggtggttnaccaccgtgccggtngttttttgcgggtatttntnggtaaggnggtgacctgc

SEQ ID NO: 132446 - DNA, 396 bp, Arabidopsis thaliana columbia
  unsure (1)..(396): unsure at all n locations
gatatnattatnatcgtgcttcccgcaattngctaggtttttaataattgatccngctagtattgcagcgaatcaagcaggcaaggaggaggttgatgctcgatcagtttttnttggcaatgttgattacgcttgcacacctgaagaagttcagcagcatttccaaacatgcggcactgtccatcgggtgaccattctgacagacaaattcgggcagccaaagggatttgcatatgtagaattcgtcgaagtggaagctgttcaaagagggctctacaactgantgnatcagagctccatgggccgtcaattaaagggcntttcnaganggggncaaaacgttcccggggttttaannaatttcccgggggtaggcggttaattccnanacagggg

SEQ ID NO: 132447 - DNA, 444 bp, Arabidopsis thaliana columbia
  unsure (1)..(444): unsure at all n locations
gttcttctcttcaatcgaaaaaaaagaaaggatttgctctagattgttgaatcgaagatgtcgacaagggaagagaatgtttacatggcgaaattagccgaacaagctgaacgttacgaagaaatggttganttcatggagaaagttgcgaaaactgttgatgttgaggaactttcagttgaagagaggaatctnctctctgttgcttacaagaacgtgattngagcgagaagagcttcgtggagaatcatttcttcgattgagcagaaagaagagagcaaagggaacgaagatcatgttgctattatcangggttacagagggaagattgaatccgagcttttgcaaaatccngtggatngggnttttgaaangtccttgaangncnacttttntcccccctngntttaccnccacctgnanctaaaggggttttttcttaag

SEQ ID NO: 132448 - DNA, 384 bp, Arabidopsis thaliana columbia
  unsure (1)..(384): unsure at all n locations
tggnattgcggtggagccaaaccctacattttnagtaaagggtaatagagattttaagcatcatcttccatttnatgttgtagaaactgcagcgagttcatctacaagcnatatgaaagctttacctggcccatctccaaaaatggatgtnaagaaactacttacaacgatgcatgggctgtcagagttactaacacttgcacatggttcagaatcttcagattcaccgaatgcggaagagcttgatctcattaacagtactgtacaggatctcaatttgtacatncaaaacaaccagtcnagggcctgcttgggttccaaggntttggccctttccaatttcnaattgnctttaagctngttcccntttcnnggggnaggttt

SEQ ID NO: 132449 - DNA, 427 bp, Arabidopsis thaliana columbia
  unsure (1)..(427): unsure at all n locations
aagcaaagctcgcaggttagccgagtctgtcgggttaaaagactatgatcacttagaaagctgcaggctataccacgcagcacggttagttgcaattcttgaagcttatgctatgtatganccngagataggctactgtcaaggaatgagtgatctgttatctccaatcctcgctgtgatctcagaggatcacgaggctttntggtgctttgttggtttcatgaagaaagctcggcacaatttcaggcttnacgaagcagggattcaaagacagctaagcattgtatcaaagntcataaaaaataaagnctctcagctttataaaccacttngggnatcttcaagcaggagnttntaggttccgnttacaaggatggtgcttgtaaatntttaggggggggtttangttttnancanaccgctgtnt

SEQ ID NO: 132450 - DNA, 427 bp, Arabidopsis thaliana columbia
  unsure (1)..(427): unsure at all n locations
ggagcttcttcaactgagaaagccgcacagttctcgaaccatggtgaattcgacgattttaatgagtttgaccaattgttccatgacgtttccatgtctttgganatggaacctattgatcagggaacttctgcaaatctgtcttctctgagtgattctnctaactacacatcagaccaaaaacagcaactcctttatcaacagttccaggnccagactcccgagaaccagctgaacaacatcatggntcctagtacaactctcaatcaaatcactagcgntatttggttcgaggatgatcagggcattctatttgatcancaacaatncttttnttggngcattttgntttacccncatcangggtgatgcctgatttcacccaatcccnnctatggggngtgaatgccccaggncctgaatccnc

SEQ ID NO: 132451 - DNA, 518 bp, Arabidopsis thaliana columbia
  unsure (1)..(518): unsure at all n locations
ctaagttcaactacgtcataggaatcgtacacactaactacttggaatacgttaaaagagagaaacaaggccgtgtcaaagcattttncctcaaatacttaaatagttggnttgttggcatttactgccacaaggtaatcaggttatctnctgcgactcaagaataccctaaatctatagtctgcaatgttcatggcgtcaaccctaaattnntcgaaattgggttgagaaaactagaacagcagaagctccaggagcagcccttcactaaaggcgcatactacattggtaagatggtctggagcaaagggtacaaggagcttcttaaactacttgaggaacaccaaaagggacttgccgagttagaggttggtttttacgggtgatggngaggcctctgaagggntcaaaggagcagcccgnaacttcggcttnacggttattgtttcccgggcgngtccngtgcncgnttttcccacntttaagngttnttaccccgacggcancggtntttttgc

SEQ ID NO: 132452 - DNA, 466 bp, Arabidopsis thaliana columbia
  unsure (1)..(466): unsure at all n locations
attatnatcaatcgaaattccaaccgactcaacaatgtcttcatccaacgcctgcgcctctccgtcaccgttccccgccgtcacgaagcttcatgtagactccgtcacgtttgtaccgtccgtcaagtcaccggcctcctccaatccattattcctcggcggcgccggttntccgaggccttgatatccaaggtaaattcgtgatcttcaccgtcattggagtatacctagagggtaacgccgttccttctctatctgtcaagtggaagggaaaaactacggaggagctaacagaatctatccccgttctttccgtgaaatagtcaaccggtgcgtttttagaagtttntnaaaggngncaantnaactncccgttaaagggggcaanaattntttnggggaaaagtttncggggnaattttttttggntnttttggaaaaaantttggggntttttaggggcctt

SEQ ID NO: 132453 - DNA, 501 bp, Arabidopsis thaliana columbia
  unsure (1)..(501): unsure at all n locations
aggtttctnatccttcctcttcctccgccagattcttttcttgcgaagatgagcaacgacaaggacagcatgaacatgtccgatctctccaccgctcttaacgaggaggatcgtgccgggcttgttaatgctcttaagaacaagttgcagaatttggctggacaacactctgatgtccttgaaaacttgactccaccagtcaggaagcgtgtcgagtttctaagagagattcagaaccaatatgatgagatggaagcaaaattctttgaggagagagcagctcttgaagctaagtatcaaaagttatatcagcctttatataccaagcgntatgagattgtnaatggtgtgggccgaagttgaaggttcagcttgaggagtaaaatccgaccaaggggaggtnatcagctgangggaaggggtncccnttttttggtttttcatttaggccattgaattccntcgggngggntannttnccngntttagggnnnnaagntt

SEQ ID NO: 132454 - DNA, 492 bp, Arabidopsis thaliana columbia
  unsure (1)..(492): unsure at all n locations
caaatagccccacagccacaggtgcagccgcagccacagccacaacaacatcagtattacatgcctcctcctcctacacagcttcaaaacacacctgcaccggtgcccgtttctactccaccatcacaacttcaagcaccaccagcgcagagtcagttcatgcccccacctcctgctccatctcacccaagctcagcccaaactcagtcattcccgcagtaccagcaaaactggccaccccaaccacaagccaggncacagtcaagtggaggctacccaacatactngnctgcaccaccagggaaccaaccgccagtagaatcgttgncaagcagcatgcagatgcaatcaccatacttttggnccttctcaacagtctatgcaaagnttncgggtacggtggntgnaccaccacananggntcttcctnagnaggcaaagntgttttnaaggccccagantggtgtngggnttttccttagggccttcttc

SEQ ID NO: 132455 - DNA, 521 bp, Arabidopsis thaliana columbia
  unsure (1)..(521): unsure at all n locations
caaacacattcagttcatcaacatggttcccaatttcaaagctcagacacttagagctctacttaatcatgctatcttcaacagcctccatatccatggagctcttcattggacctagaagacaccatccctttgacgtcgatggtaccatcccatcgaaccacctccacaacttcgaacattcttccatctccatgtccttcttagtctatgccgttttggcattagtcctggntcgagcacggcctagagccgccgcttctgaggggctaaccatgctagctgcagccgctgccttcagtcaacagctacttctctttcattttcactctaccgaccacatgggcgttgaggggcaatatcatgtgattctncaaggcgntatcttcggntctntcccttaccacaaatcatgggnantttttttcccaagaggtttnttggtggcctttgtgagntttntaaggatagcttttnaggggggtggnnattttgttggtgatggtttaaacgngtttgta

SEQ ID NO: 132456 - DNA, 401 bp, Arabidopsis thaliana columbia
  unsure (1)..(401): unsure at all n locations
ccaataactgttctgggcatgcnctgcatccttctgccatgaaacatgcagcagatgcattctctataataatgtctgattcggaagtgtgtctgaacagaaaattccatgcagttatacgaccactctataaacagcggtgtttctctacgatagttcccattttggagtctttgattatnaattcccagacttcactatcgagaacaatgttgcatgtagctctcgctcatgttatatccaatgtnccggtaacagtcatattggacaataccaaaaagcnacaaccgttgatactggagggcttgtctggcnttaagnttgggctctgtggggggaangaaccntttttcaggctntnccggggtttntntggaccggttncngttcntngggggcaa

SEQ ID NO: 132457 - DNA, 485 bp, Arabidopsis thaliana columbia
  unsure (1)..(485): unsure at all n locations
ggaagatgggaagttagtcagcagacaaaccaagagccttgtggagactactgaaggaaccaaatggntctttgtgttgagcacgacaagaaaactgtacattggtcagaaacagaaaggtcggtttcaacactcgagctttctctccggcgccgcgattaccgccgccggtagaattgtttcacacgatggagttgtaaaagctgtgtggccgtacagtggtcattatcttccgacggaagagaatttcagagaatttatctgtttcttaagagaaaaccacgtgaatctcactaatgtcaagatgaatgcgattnacggccggtggtcatctggtcaataatgattggaagcactangcngtcgatgattggtggcgaaatcgggccggtncagntnnnccagaacgnttttnaatccaaanggggttnaggaaacgggccccaggttncgggtttttnngggnntcccctttgttttttaaa

SEQ ID NO: 132458 - DNA, 381 bp, Arabidopsis thaliana columbia
  unsure (1)..(381): unsure at all n locations
gttaacaagtatgaggaagaggaggaggaggaagaggataggtataggagattaaacggtggaatggtggagagatcgttatcggagtcatggccggagctgaggaatggaggaggaggaggaggagggccgaggatggtgaggagtaatagcaatgtgagctggaggagttccggaggtggatcagcgaggaaagtcaacggattngataggaggaataagagttcaaggtactcacctaagaatggggaaaacggaatgttgaagttttacttgccacatatgaaagctagccgnagaatnancggtncagnnggancannagttttncggccgccggaggtttngccnaataantcaccgggcattctnttagcgagg

SEQ ID NO: 132459 - DNA, 436 bp, Arabidopsis thaliana columbia
  unsure (1)..(436): unsure at all n locations
gaataaatggtcagctattgcnacgcatttgcaaggtcgtacagataatgagataaaaaacttttggaacacacatctaaagaagaaattgatccagatggggatcgatcctgtnactcatcagccaagaaccgacctcttcgcaagtttacctcagctcatagccttggcaaatctaaaagacctaatcgaacaaacatcacaattctcatccatgcaaggcgaagagcccaacaacggcaacanttttngcccgagtagtattctngatatcgatcagcaccatgccatgaacctcttaaactccatggtctcttgggaccaaaggtcaaaaccgcgggttttggatccggggtntttgaactcgggggttacnggtcaaaaatcaaggttttttttccccntgggggtttttcattgntncannnncccnncc

SEQ ID NO: 132460 - DNA, 588 bp, Arabidopsis thaliana columbia
  unsure (1)..(588): unsure at all n locations
aaaagacctttgcttctnttcgttcgtaaaaccagctcaaagattcaatatgtcaggngatgaggctgttgctgctcctgtggttcctcctgttgctgaggcagcagtgatcccagaggacatggatgtnagtactgcattggagttgactgtaaggaaatctcgtgcttatggtggtgttgttcgtggtctccatgaaagcgctaagcttattgagaagcgtaatgctcagctctgtgtcctggctgaagattgcaaccaacctgattatgtcaagcttgttaaagctctttgcgctgaccacagcatcaaattgcttacngttccaagtgccaaaacactcggcggaatgggctggtctttgcaagattgattctgagggcaatgcaaggaaggttnttggatgctcatgtctcgtgatcaaggatttcggtgaggggncaactgacctaaacattgcaaggaggttctngatntacctaatcangaaaaaggcaagtttcaggtgntttttctaaaaggaacggntttttggcccntttttcttccngcnttcggttttgcataaacccgngggctcttgggntc

SEQ ID NO: 132461 - DNA, 526 bp, Arabidopsis thaliana columbia
  unsure (1)..(526): unsure at all n locations
gggtgaacggcttgattgcatagatgaggttctgacgatcgtntcaatgctttcagtaccttcagtgttcttcagacctaaagaaagagcagaagagagcgacgctgcaagggagaagttttttntgccggaatcggatcatctgacgctgctgaacgtatatcagcagtggaaagagcatgactatagaggagactggtgcaatgaccattacctacaagtgaaaggtttgagaaaagctagagaggtaagatcccagcttctggatatcctcaagcaactgaaaattgaactcaggtcgtgtggaccggattgggntattgtgagaaaagncatctgttcaagcgtatttccacaactcagcttggtttaaaaggtgtttgggnngtatgtgaacctncagaacccgggntgnctttgccatttncaccctnggcagttcacctntacgggnttgggtacacancggncctttgtggggtnccntgancctgntctttnccccaaagggggtcattcagtttng

SEQ ID NO: 132462 - DNA, 490 bp, Arabidopsis thaliana columbia
  unsure (1)..(490): unsure at all n locations
caaacatgatgaagaaaattgaacaactcgaagcttctaaacgtaaactcttgggagaaggcataggaacatgctcaatcgaggagctgcaacagattgagcaacagcttgagaaaagtgtcaaatgtattcgagcaagaaagactcaagtgtttaaggaacaaattgagcagctcaagcaaaaggagaaagctctagctgcagaaaacgagaagctctctgaaaagtggggatctcatgaaagcgaagtttngtcaaataagnntcaagaaagtactngaagaggtgatgaagagagtagcccaagtnctnaagtagagacgcaattgtncattgggttaccttgttctttcaaggaagtgntctccnctcaacaaaaaaaaccncnnaaaccaaccttagtaaaaancagggttttgcaggtnctttggggttttttgggcccggtaccaanctnttaagnttgttctctcttgntgccttatttcnc

SEQ ID NO: 132463 - DNA, 390 bp, Arabidopsis thaliana columbia
  unsure (1)..(390): unsure at all n locations
aagctccgtcagagattattcgctattcacgacgaagagaggagatacgttgtttagtcagtcatggtcacctctttccccaaatcacaggggacttattgtnctgctacatggattaaacgagcatagtggcaggtatagtgattttccaaagcagcttaatgctaatgggttcaaggtctatggaattgactngntcggtcatggcggaagtaatggacttcatgcttacggtccttcccttgattaagntgtcacagatttgaaatcaattctttgaaaaggtattcacaggggattccagggcntccccngtttctncttttgggcactnaaacaaggtngngcaattanccctnaaggnttattccttggtncccaagnattgaa

SEQ ID NO: 132464 - DNA, 287 bp, Arabidopsis thaliana columbia
  unsure (1)..(287): unsure at all n locations
gtcgaggattcatggagattgaagaccaaggactcagtagcagcttcttccctttcttagtggttgaagatgacgatgtttgtnctgaaatccgtatacttgaaaccacattagagttcactggaactgattctgctaagcaagctatggntttcatacatgaaatcgggttggcttcttcaccgaagtaaactttngggaatcaagacccaaaatnccaggnggttttnccattaaanncggntttccagtgggctaatccgagttctcaaattggatcgnngagt

SEQ ID NO: 132465 - DNA, 651 bp, Arabidopsis thaliana columbia
  unsure (1)..(651): unsure at all n locations
aatcaatatagaaatagtggccaagctttggagttcaaacagctaaacatccattcatgggaagcatttgacaagggacaggacatgcatatgcaagcggctccttcccaagctgaattgctctataagagctttcaggttgcaaaggagaaactgaaatctcagacaaaggacacaatcatggacaagtacgggaatgcagctacagaagatgaaattccaatggagcttttacttgggcaaagcgaaaggcaagttgagtatgaccgagcagggaggattataaaaggacaggnggtgatattgccaaagagtaaatatgaaggagatgttcatgcttacaatcacactagtgtgtgggggatcatattngnaagntccatcaatngggggtataaatgtttnccagccaggtccattcgcaatnggttcctgcncagggtcttcttgggattnaagcttcagngnttccctttatcctnttgagggtnatatttctngcaaagnagcactttagggngcccaagaaggttnngggnagggnattgcgcattggggcctgtttccctaaggttttgggttaccgggggccttctatnccttaaaggggccttttggggnggaanttgggcccgatcatntttcnctttc

SEQ ID NO: 132466 - DNA, 564 bp, Arabidopsis thaliana columbia
  unsure (1)..(564): unsure at all n locations
cctttntttaaagggattaatttgtttttcacgcttatcgatttcattttttgagaacaaattaagttgcggattaaggtttttaatgcttatgggttgaaactattgcaattgtggctgtttctctaactgatctatggagacgagtgcttttttgtccttttttaaggtgttgctgaaagtccatcggcttactctacgtcgatgttctttagatttcaggaatcaattgcctttgggagatctttcctttccagatttgttaatgaagtttggtggattctctaattaaaaatcaatggncttctcttgaagctccggcggtttcccggtgggtttagaggtccctgaggtgctaaccagaaccggtggtgaattgcggcaactaaaggcttcttcaagncaacgggnttcaactttgtttgttaacancacaacggggctttttgggggaaggggattttaaatttncttccccanaaagggtttntttcccgggttgggngttcttnatnggccccncctanaagnnggccntttngnntttaanaaaatgggcctnta

SEQ ID NO: 132467 - DNA, 210 bp, Arabidopsis thaliana columbia
  unsure (1)..(210): unsure at all n locations
ctgcttttgaagaagaagcctcagtggacgaaaacagcaaagaaagagctactactggtcatgctagtaatgatgagatgcatatcactgagtctngacaccacgnatccattgatgatgagagcatatccctgagcctgaacaacttaaatccattgctggtgagntgaaaattngnttgttcttcggnagnaaaatnacggcgggtac

SEQ ID NO: 132468 - DNA, 431 bp, Arabidopsis thaliana columbia
  unsure (1)..(431): unsure at all n locations
gacggagtgaatcacagaggaagcgaagtcagtntagagatatctaattgcnatggcttttttnagtaaattcgggaacatattgaagcagaccacaaacaagcaactcaatgctcaggtttctttatcaagcccttcgctttttcaagcaataaggtgtatgtnatcttctaagctctttattggaggtatggctttgtcctcccctgccttcgccggaaaggctgtgaagctgccggcatcanatgtcctcggaagcggccgtgtgaccatgaggaagactntngccaagccaaagggtccatcagggcagcccatggtacgggttctnccgngtcaagtacttgggtccattntccgggcgagcccccgnggntaccttaccggtgagttccccggtnnctncgggttgggcaccnttggtttnttcg

SEQ ID NO: 132469 - DNA, 562 bp, Arabidopsis thaliana columbia
  unsure (1)..(562): unsure at all n locations
gttcgtttgttttcgttatgtttatgtaaaattaccgcgaaccatatatatagaaaacttctaataatgtttttaacttttggtggcaggttaattttttaaaagatgggttattggaagtcgaaggttgttccaaggatgaagaaattnttcgagaagagtccagcaaaaaaggaagttgttgaggaggagaagccacgagaggtggaagtcgtggaggaggtcgtcgtgaaaaccgaagaaccggccaaggaaggagaaactaaaccggaggaaataattgcaaccgggcgagaaagagatagaaatanttgaagagganggaagaagaggctaaacccggtggngggttccggtcctcgcagcttcgggagggngaagnagccanccgttggaagaggnggagaagaccggcgccggttgaggagangaagccactttttgaagnggtgaagaaccctncntttgaagnnaggnaccttttgggggnggggaaaaagnntttttttcccttttcccgtgnttaaactccttggctttagntccgaaatncggtngttaa

SEQ ID NO: 132470 - DNA, 442 bp, Arabidopsis thaliana columbia
  unsure (1)..(442): unsure at all n locations
tctcttatctctctaacatccttcagagaggaaaatcttttcagcgtcgttttttgttttccgatttcagtcggatctgtttatactcttgcttatatgcaagcttaataatttccggtcttggatcggacttttgtttccggctatgtccggtctcctttctcgcttatagcgagtttaaatcttctnatcctctttgggctttaaacatcgnagtcttcgattgtccttccaaacttctttttcggataacctnccaaattgctccgagggataanaanctttcggcaactcttcctttttgnccaaaaatcgnatgagcaaccggnagggatccttnaggtgtaccatcaaaattggggtgtaagcttggtgggtgggaggcctnccccaanagnttgggggcntttncccgggggaaatttttaaagngnggttttna

SEQ ID NO: 132471 - DNA, 614 bp, Arabidopsis thaliana columbia
  unsure (1)..(614): unsure at all n locations
ctgattcaactccaccgaattcagaagatcgaagaagatgagtagaggaagcggcgctggttatgatcgtcacatcactatcttctcaccggaaggtcgtctctttcaagttgaatatgccttcaaggccgtgaaaacagctggtattacttcaatcggagttcgtgggaaagattcggtttgcgtcgttacccagaagaaagttcctgacaagcttttggatcagtctagtgttacacatctgttccctatcaccaagtacattggattggtagctactggcattacagctgatgcaaggtctttggttcaacaagcaaggaatcaagcagctgaatttcggttcacttatggntatgagatgcctgttgacattcttgctaaatggntagcggncaagtcacaggtntncactcaaacatgnttacatgaggcccctttgagttttcgtatggnaatgggtntnntgaagngattggcccttcctttcaaatttgncccanttggcattttncggncaaaagggaccttgtcttggttnagggcaagaggngcantttttgggnggantnaagaancccttttcaattgtgaccgnagtccattggtttnta

SEQ ID NO: 132472 - DNA, 307 bp, Arabidopsis thaliana columbia
  unsure (1)..(307): unsure at all n locations
acaaggctcatagtaatgcagaagatgacatcctatttccagctctagaatcgaaggagacacttcacaatgtcagtcactcttacacgctcgaccataaacaggaggngaagttgtttggagatatttatagtgtccttaccgaactttcaattcttcatgagaagttacagagtgattctatgatggnggacatagctcaaactgacaattgttnggncggntatcgntaaacggtgacttcaaccaggnattcaatgancctgggttncaaaggttccagggggntttncaaatnccctttaaa

SEQ ID NO: 132473 - DNA, 608 bp, Arabidopsis thaliana columbia
  unsure (1)..(608): unsure at all n locations
agctcttgaaggagctgatctcgttatcattccagctggtgtaccaaggaagcctggtatgacccgtgacgntcttttcaacattaatgctggaattgtcaagaacctttgcactgccatcgccaagtactgcccacatgcgcttattaatatgatcagcaaccctgtgaactctactgttccaattgcagctgagatatttaagaaggctggtatgtacgatgaaaagaaattgtttggtgttaccactcttgacgtcgtcagggccaggactttctatgctggaaaggcaaatgtcccagttgcagaagttaatgttccggtgattggtggtcatgctggggttactattctncctctcttctctcaggcaaactcctcaaggcaactttgtcaagtggcatacttaccggccctaactaaggggtacccaaagatngaggtcaggaggncgtggggnaaaagcagggaaaaggtcagcttcatttgtccatggctnttccgnggnattnttcgtgatgaatnttnaaaggcctaacggngtccantgtaatggatnnatagggaatttaataccgggtcctttttcccaggnaggtngnanttnc

SEQ ID NO: 132474 - DNA, 599 bp, Arabidopsis thaliana columbia
  unsure (1)..(599): unsure at all n locations
gaacttgattggatactgtgcagagaaaggccaacacatgcttatatatgtttacatgagtaaaggaagcttagcttctcatttatacagcgaaaaacatgaaccgctgagctgggatttgagagtatatattgctttagacgtggcacgtggtctagagtatcttcatgatggggctgttcctcctgtaatccacagagatatcaaatcttccaacatcttgctggatcaatctatgagagctcgggttgctgactttggcctctccagagaagaaatggtagacaaacatgcagctaacatcagaggaacatttggctacctcgatcccgaatacatttcaacaagnacattcaccaaggaaagcgatgtcttatggcttcggagttttgcttttcgngcttnttagcaggaagaaatcntcaacaagggcttattggattnggtgagcttgcggctnttnattcagnggaaaaagcgggntgggaggggttgtagntcaaggtttgntngggggtttgttccaagaggtgatnagnnnagcttttnttcaatnatttngggncctggacgccanatgggctttcggttcngnttta

SEQ ID NO: 132475 - DNA, 600 bp, Arabidopsis thaliana columbia
  unsure (1)..(600): unsure at all n locations
tacgcttctgctaagctattctaagagaagccagactagcaataaacccttcattttaagcattctgtttccttcttgagaaacctagatattttggtttcttgtatccggtgatgaagatacagtgtgatgtgtgtnagaaagctccggcgacggtgatttgttgcgccgacgaagctgctctctgtcctcaatgcgacatcgagattcacgccgctaacaaactcgctagcaagcaccaacgtcttcatcttaattccctctccaccaaattccctcgttgcgatatctgccaagagaaggcagctttcattttctgtgtagaggatagagctctgctttgcagggactcggatgaatccatccacgtggctaattctcgatctgctaatcaccagaggtctttaggcactggggtcaaagtaggtctgacctaaactatatgtagtaaagaaattgggagnataacctgnggcttccacaaccacagagggtattagntccgctaatcccaagcagnngaacacaactttttttgtatcattcctgggtttaggtttttnttcngatnanccgaanagcactttnttggngggtttc

SEQ ID NO: 132476 - DNA, 402 bp, Arabidopsis thaliana columbia
  unsure (1)..(402): unsure at all n locations
atctagatctaaaagaagagcgtcttcataaacgccctncttcttcttcgtcttcttccctgcaaatctagtttctagatcttttctttcttccgcgaaacgaaaatgagagagtgcatttcgatccacattggtcaggccggtatccaggtcggaaatgcttgctgggagctttactgtcttgaacatggcattcagcctgatggccagatgccgagtgacaagactgttggcggaggtgacgatgctttcaacaacttcttcaagtgaganccggtgcaaggggaagaacgtcccacgggnttgtcctttggtttgatcttgaggccaaactntnnatncggtttagggcnaaggcnttggnaancttnnccggnaaagntttttccaacccttagggaa

SEQ ID NO: 132477 - DNA, 615 bp, Arabidopsis thaliana columbia
  unsure (1)..(615): unsure at all n locations
ctcgatcgtgctagacaacagggtttctatgtggggaacggagtagataccaatgctcttagtttctcagataacatgagctcagggattgttgcatttgagatggaatatggacattgggtggaagaacagaacaggcaaatatgtgaactaagaacggttttacatggacaagttagtgatatagagcttcgttctctagtcgagaatgccatgaaacattactttcaactcttccgaatgaagtcagccgctgcaaaaatcgatgttttctatgtcatgtccggaatgtgggaaacttcagcagagcggtttttcttgtggataggcggatttagaccctcagagcttctcaaggttctgttaccgattttgatccctttgacggntcaacaactttttggatgtatgnaatctgaggcaaatcatgtcaacaagcagaagnttcggtnatcccaagggtttgggnaccttcaacatcattngcnggggngtttgcanccgggaacttngtgaaggagtnttttccnaaatacctntcctttggggggttgnggcttggcacttttaaacaantgtcactnngntggcattanagtatnggctacccgnttc

SEQ ID NO: 132478 - DNA, 584 bp, Arabidopsis thaliana columbia
  unsure (1)..(584): unsure at all n locations
acgtaaacaagtttttagatcaacttgagacaagcctttctcgctttcttagcaatcttagctctttgcatctccatatgtaactctatctgcatcttctccatctctctttgagcttccaacattgcagctaactccgatgccgctgagccccttcctcctttattcccaccactctttgtgtttcctcttgcacttcctcctcctctttttggctcttcttcttctgcttcttcttcctctaccgcgcaagaatgtaaatgcgtgccataatcacattccttgcaataatacggccagagattatctggaacagtctcttggcaaacatcacagttaaagatcaaaccgttctggtaaggagnaccggtagaggaaatgtgagtggatgtgcgtgtcccttaaaggtccacgggctnaaggnatgggcanaaattcaacaatgnacatcgtcctggnaggtnggggagtttaaagnnatccgggtccatanttaccgganggtnaacgggnaagttgctcgnaggtgggnataagagttaaagggnnnncgggtagctttnngggttncggggggtaaaaag

SEQ ID NO: 132479 - DNA, 633 bp, Arabidopsis thaliana columbia
  unsure (1)..(633): unsure at all n locations
ctctacaccgtcatgaacactgaatcagttgtcgagttccttgggaatgtgaccttgttgcagcggttacctagttcctctctgaagagaatctccgaagtcgttgtcttcaaaggttatgacagaggtgattatgtggttcgtgaaaatcaaaatgtggatggagtttattttctcttgcaaggacaggctcaggttctgagatcagccggagaggaaaactatcaagagttccctttgaaacgatatgatttcttcggccatggtattttcggggatgtttactcagcagatgttgttgctgtgacagagcttaccctgcttgctgttgatgtctgatcatcgtgctttacttgaaataaagtcagtctcgggattcagataaaggacccntgtcctttttgggangncatacctattatctagnaccnttaagnatttgaatgtatacccgggggtcaacccacccaaatgctccaacctattggaaagggttnttnggnggnaatttaggttggcaaggactttcccgaangatcnaaaacctnttgaacctntgaggtagncccaaatttnaattcnattnccncttntngggttaaatnccccnaaatggngaaccgtncgggcgga

SEQ ID NO: 132480 - DNA, 623 bp, Arabidopsis thaliana columbia
  unsure (1)..(623): unsure at all n locations
tttcttgaagccctacttgcaggacaaggaaaagaaggtcttgatgattgtnattcctctccaggttgtcgctaactttgctcaggtggttatcgatgagactggaccatatggccaagattgggtcacatggaaacagatctttttgcttgttgatgtcgtctgttgctgtgctgttctgtttcccattgtatggtccatcaaaaacttgcgtgaggcggctaagactgacggcaaggctgctgtgaacctggttaagttaactctgtttaggcagtactacattgtggttatctgctacatctactttactcgtgttgttgtgtatgcactggagaccattacctccttacaagtatatgtgggcctagcggttntttgccagcgggttagccacaacttngnttccaatctggttactnggcttaaaagttcaggccanagggnnaataaccctactttnnttgttnnggttaggaagaanagcttcttnttaaggccttaaggtttaagncgggtttnatttaaagcaccctggnaaaancggnacgggtggcactaaaanaacatctttttttcaggtttttaggaaccggcaaatnctnaaccctttttttggttgc

SEQ ID NO: 132481 - DNA, 511 bp, Arabidopsis thaliana columbia
  unsure (1)..(511): unsure at all n locations
cctctatctttctctcttctttaagagaaaaaaaaatggagatatcagtttcttcggtaacattttcactagctgtagttgttgtgtcttggtgggtatggagaacgttaaagtgggtttggttcacaccaaagatgcttgagcgttccctgagaagacaaggtctttccggaacttcttacacgcctctaatcggcgattttaaaaagatgatcagcatgttcattgaggcaacatccaaacccatcaaaccaacagatgatatcacccctcgtgtcatgcctcatcccttgcaaatgctcaaggctcatggaaggcctaccttaacatggtttggnccaataccaaccaatcaaccataaatgggtccctnnggcaaatnaaaggaaggtgttnaacaaaaggnctntggcctttccanaaggnngnatacggttccctttagggaaaatnctngggcncggggcntcgtnngttatnattggngggtaaatgggnggaacacccgagg

SEQ ID NO: 132482 - DNA, 520 bp, Arabidopsis thaliana columbia
  unsure (1)..(520): unsure at all n locations
gatgtcagttcaagtgacatctctgacaaatgcgaagacatccttaagctcctatcaaacaatcacggttgcaaagtggtggagatagtggttcctgaactggaagagatgcgtgcagcccatgtnatttcgattgggtctccaacactgtcttctcttactccctactgtgaagctgggaaaaattcaaaactaagttatgacactcgtaccagctttgcaattttccgttcattctctgcttcagactatatcgctgctcaatgtcttaggcgaagattgatggagtatcacttgaatatcttcaaaggcgttgatggtcattgtgacccctacaactggaatgncagctccagtgatacctcctgatggntctcaaaattggggnanccaatatttcaagtggcaactgntttaaatgcgntttggtcctngctgcaaanntcctcggnttncctgccanatcagncccggttnggtnatgtaaannggggntttcctttngggttcaaataatggg

SEQ ID NO: 132483 - DNA, 511 bp, Arabidopsis thaliana columbia
  unsure (1)..(511): unsure at all n locations
caagtnactttctccaaaagaagaaagggtctcatcaagaaagctaaagaacttgctattctctgcgacgccgaggtctgtctcatcattttctccaacactgacaagctctatgactttnccagctccagtgtgaaatctactattgaacgattcaatacggctaagatggaggagcaagaactaatgaaccctgcatcagaagttaagttttggcagagagaggctgaaactctaaggcaaggattgcactcattgcaaggaaattatcggcaactaacggggagtggaattaaatggtttnagcgttaaggagttncaaaaccattgggggggtcaactttgnaattgagttacggnggaattcgtnttgnaaaagggggccaaatttttgncccatggaaatttanaggggctnaccccgaagggggnntntttnttcacncantgaaaacccccggatttttcggggaaagntccaangggttttcctnggaaatttcggcccttt

SEQ ID NO: 132484 - DNA, 406 bp, Arabidopsis thaliana columbia
  unsure (1)..(406): unsure at all n locations
ggattgaggaaaagaaaagtgactggaatttagggtttagacnccggcgaagaaggagatttcaaagcttcgaagacagagaaaatntcgtcgactctcctcgagcaaactcgctccaatcacgaagaggttgaaaggttggagcnattggttgtggaagatctacagaaggagccaccgtccagcaaggacagattggtccagggacatcgtgttcgtcacatgattgagtctattatnctcaccactgagaaactttgttgaaacctatgaagataaggatggggccgtgggattantnaggatttcaaccctttgttggcccnacttnggccagggccaaatnttgtttagtgaattttacggtccgttttaaagngntncggngnattntccttaaaaggna

SEQ ID NO: 132485 - DNA, 455 bp, Arabidopsis thaliana columbia
  unsure (1)..(455): unsure at all n locations
ccggcaaccaccaccacatgggtctatcggagaagaagagaagattaaaagttgaccaagtcaaagctcttgagaagaatttcgaacttgagaataaactcgaacctgagaggaaaactaaattagcacaagagcttggacttcaacctcgtcaagtagctgtttggtttcagaaccgtcgtgcacggtggaaaacaaaacagcttgaaaaagattacggtgttcttaagggtcaatacgattctctccgccacaaatttcgattctctccgccgtgacaatganttcccttctncaaaggggtttagtaaaaatcaaaagcttaaggtaaaccgggtaaagnaggntnaccanccaccaacaaaagnttttttccgggnggggtttttaagggangggggnaggttcccaaagnccgggtttncgnttncctttggnctnccnttngaaggttt

SEQ ID NO: 132486 - DNA, 427 bp, Arabidopsis thaliana columbia
  unsure (1)..(427): unsure at all n locations
ctctgttttcgatggattcctccgcagtcttggcttcaagagcggctgaatttnctaaacagcgaagcaaagcttcatagaacgcaacaacggactgaatcaccatcccgcaatctcttccatgactacaacttgtttaaacgattggggctcattggatgggaagcttgactggagcgtccaaggagacgagctacagaagctcagaaaatccacttctttccgtctcanagccggtggcatggaatcaagactgcctaacggagggacttgggctcgaagcnaggattgtctcatgggtggagccgctggtgaaaanngccacagggngccaaggcttagctccggttttggatgggggcaatcattacattgggggnaagnnncagancccgtnggntttnaatnnaaaagtttttnacctttc

SEQ ID NO: 132487 - DNA, 538 bp, Arabidopsis thaliana columbia
  unsure (1)..(538): unsure at all n locations
cggtattgtcatgttgaaagggccaaagatagagatgataaagacaggaaggagagatagtagagggagctacttgggagatgttgagactctaatccctaaccacaatgactctctttcctctgttctctccacctttaactccattggcatcgatgtcgaagccaccgtcgctctcttaggtgctcactcagtgggtagggtccactgcgttaacctagtgcaccggctatacccaacgattgacccgactcttgacccaagttacggcctttacttaaaaaaacgttgcccaagtccaacttcggacccgaacgccgtcttgtacttcccgaaacgatcgtnagnntccgatggttgtngncaacatgtattacaagnncatcatngnccataaggggnttnttgtcattgatgatgggtngcaccgtttcagggccgaccgttttttgccaaaatggttnggcaattgtnnttccttgngagtttaaggngggtaaggttttttngggcaaaccnnttanggggccaagggggg

SEQ ID NO: 132488 - DNA, 401 bp, Arabidopsis thaliana columbia
  unsure (1)..(401): unsure at all n locations
tcctcctcctccttctnatatgtatgaacagttcccatcaacggattccaattctaacatcacaagtaaatacgtactcaaaagattcgtnttcgaaccttctaagattgctgagctgaaacacaaggccgctagcgaaagttccctgtncctacacgtnttgaagctatcatgtcacttatntggagatgtgctagaaactcctcacgctctaacttgttaattccaaggcaagcngtcatgtggcaggccatggacattcganttaggattccatctagtgttgcgccaaaagangtgattggtaaccttcaaagcgggtttcttntcaaggaagncggcggngagcgngttttagatccccgnaatcggtggccncattcagggnggnccaagggggg

SEQ ID NO: 132489 - DNA, 484 bp, Arabidopsis thaliana columbia
  unsure (1)..(484): unsure at all n locations
accttgccgngaatcaaatgtccggcgagattccggcgtcactgacgtcactcatcgagttgaagcatcttgaattgacggaaaatggaatcaccggcgtgatcccggccgatttcggatcgttgaagatgttgagcagagttttactgggccgtaacgaactaaccgggtcaattccagagtcgatctcgggtatggaacggttagcggatctggatctatccaaaaaccatatcgaaggtccgatacccgaatggatgggtaacatgaaggtactctcactttttnaatctcgnatttgcaattcgttaacccggtnccaattccccggttcgnttntttagcaatttcccggttttagattgttgccaattttgaggccgaaaatccgtttggaagggaccttttancccgncggttttnngggnnaaaaancgggttttaggttttcnctttantttttaaaanaantaggnttttnggg

SEQ ID NO: 132490 - DNA, 486 bp, Arabidopsis thaliana columbia
  unsure (1)..(486): unsure at all n locations
agaaccgagggacttcgtggactgttcaaaggaaatggcaccaactgtgctcgtattgtncctaattcggctgttaaattttnaagctatgagcaagcttcaaatggcatactgtacatgtatcgtcagcggaccggaaatnaaaatncccaacttactcctcttacggcttggagctggtgcaccnctgggataatagccatgtntgcaacgtacccgatggatatggttcgtggaaggctaactgtccagaccgcaaattctccttatcaatatagaggaattgcccatgctttggcaactgtcctgcgagaggaaggtccacggggccttgtaccgtggttgggcttccatcagtnntttggggttgttccatatgtgggggtttnaacttttcgggtgtntgagnctcttaaaggncttggctngntaaagngaccccnttacgggttttttggaaacaattnngttncgggttaaacgggg

SEQ ID NO: 132491 - DNA, 540 bp, Arabidopsis thaliana columbia
  unsure (1)..(540): unsure at all n locations
taagatgcattctcatggttggagatctgtttattgtacaccaaagttagcggctttcaaaggatcagctccaatcaatctttcggatcgtctccatcaagttcttcgatgggcgcttgggtcggttgagattttcttgagtaggcattgtcctatttggtatggttatggaggtgggttgaaatggcttgagcggttgtcctacattaactctgtggtttacccgtggacctctctaccgctcatcgtttactgttctctccctgccatctgtcttctcactggaaaattcatcgttcccgagattagcaactatgcgagtatcctcttcatggcgntcttctcgtcgattgcaataacgggtattctcgagatgcaatggggcaaagttngggtccgctgatttggtngnngaaacgnacaagtttttggggcaattggngggnngtttcttcggancctntttgcnctnttccaagggntccncaaaggtntttctnggggcggancnaatttacaggncantaaaagagcttttat

SEQ ID NO: 132492 - DNA, 592 bp, Arabidopsis thaliana columbia
  unsure (1)..(592): unsure at all n locations
cttcttaatccgttgacttcttcttcttcttctactctccgtcgtttcagatgctcgccagagatctcttctctctccttctcctccgcttctnatttctctctagcgatgaagaggcagagtcggagttttgctgatggttcggaacgagatccgtctgttgtgtgtnaggctgttaagcgcgagactggacctgatggactcaacatcgctgacaatgtgtctcagctcattgggaaaactcctatggtgtacttgaacagtatagcaaaaggttgtgtagcaaatattgctgccaaactcgagatcatggagccatgttgcagtgtcaaggataggattgggtacagtatggttactgatgctgngcaaaaaggatttatatcacctgggaagagtgttcttgtggnacctacaagtggnaacacgggtatttgcctagcattcatcgctncttcaaggggctataggcttatnttgacaaatncagcatccnttgggatggaaanaagggtnctttaaagnatttgngntnnntttattanaagncccctaaagnatgcttgccggnanaaggttaanggctttaaaa

SEQ ID NO: 132493 - DNA, 226 bp, Arabidopsis thaliana columbia
  unsure (1)..(226): unsure at all n locations
actactactcggataaccgtagtaattctagagctaatacgtgcaacaaaccccgacttatggaagggacgcatttattagataaaaggtcgacgcgggctctgccgtntgctctgatgattcatgataactcgacggatcgcatgggctctntgctngcgncggatcattcaaaattttggcctatnaacttttcgatnggtaggntagtgggctaccatggtng

SEQ ID NO: 132494 - DNA, 579 bp, Arabidopsis thaliana columbia
  unsure (1)..(579): unsure at all n locations
acctgacgatctctctctctctctctctctcgatcggataatatttgagctttgtggttggaggatctgagttagtcatgttcatgatcgattggttctatggcgttctcgcttcgttagggttatggcagaaagaggctaagatcttgtttctgggactcgataatgctggtaaaaccactctgcttcacatgttgaaagacgagagattggtacagcatcagcctacgcagcatccaacttctgaagaactcagcattgggaaaatcaagtttaaggcttttgatttgggtggcaccagattnctcgcagggtctggaaggattactatgctaaggtggccgctgtggtctancctaggttgaatgccttacggcaaaagagagnttttcagaatcaaaaaaagggacctttnatgcacttttttncagccggatccctagccagngtnccatccncattcttggaacaaggttngcannccnaattntnnaacaanggcgggntccgtacattnggcctncaatttanntcagaaaggaaaggattaccggtttgacggtagcccttggggntntt

SEQ ID NO: 132495 - DNA, 381 bp, Arabidopsis thaliana columbia
  unsure (1)..(381): unsure at all n locations
tgcggagagagcagctagattctnttgttttggtagtcggagctttaacggaagaaccaatacaaatcttccgattaacaacggtaataacatggtcaacaactccgggaagctgacacgtgtctccagcacaccagctcttaaggctcttgtttcaccggaagtcacacccggcggcgaattttcccggaagagaaaatctgtgcctaaaggaaaatccaaagaaaaccccatttctacagcttctccatctcctagtttctcaaagacggcggaaaagaatggtgggaaaggaggnagtaaaagttcagaaggaaaaggntggnaaanggtggagaggtggtggangatnntnangnnggaggangngnaggttaaggg

SEQ ID NO: 132496 - DNA, 426 bp, Arabidopsis thaliana columbia
  unsure (1)..(426): unsure at all n locations
aagagcttttgcggctgaagaaacagaggactaccacgactacgacggcttcaacgagggtatcgtctctctcgccgtcttcttcttcaagctcgacatcgtcttcttcgagttcgattggcgatgcggtgaagaaggaggagagagagaaggaagggaagagaggtaagaaagggttagagagaacgagatctgtgactatnaggataagnccaatgattcatgttcctgtttgtactccgtctaagncctcttctcgattgcctcccctgtttccnctaaggntccagaaaaacaaganttgagaagatgancttnttcaacatatctgtttaanctttttggggacttaaaaaaacccggtttacccctttggttngggtttttttgaaattaanatgggntcttttgnaatttnnaaanctt

SEQ ID NO: 132497 - DNA, 606 bp, Arabidopsis thaliana columbia
  unsure (1)..(606): unsure at all n locations
accaagaaatcatcgtcttcttcttcatctattcaggatcgatccggcttgagatttattacaaattcgtccttctatttgctccaaaagttcgacaatttcgtaggggcaaagatggacgctgattccaagagatttctagctacgcttcgatcccgatctgaaatgttaatgggctttgaagaaatagatggagatgatgatttccaggaggagtttgcttgcccgtcctgtgcagaatcgtatgatatcatcgggttgtgctgtcacatagatgatgaacatactttagagtcgaagaacgcggtatgccctgtttgtcctcttaaagtgggagttgatatcgtagcacacataacggttcaccatgggagtttatttaaagttgcagcggaagagnaagtcacggaaaagnggtaccnattcgncaatttcacttttncggaagancttgggnaggggcctcaaaggttttaggnttccttccgaatgggccttttcgcaaggncncctacccttctgcggattttntacctaangnccaggttncttgcacgcaaccaaacgtnccggaanagtgggaagaagtnttccgnttaanngngg

SEQ ID NO: 132498 - DNA, 561 bp, Arabidopsis thaliana columbia
  unsure (1)..(561): unsure at all n locations
gtctccgtccccaaatctntcagctaccttaaatcagaattctagggttcttccgattagggtaaaatcgaatccagatttcccaaaatnntgatctttgatttataaaagatgtctcaaaacgggaagataatcccaaatctggaccaaaacagtacgaggctcctcaatctcacagttctccagcggatcgatccatacatcgaggaaatcctcatcacagccgctcatgtcactttctatgaattcaacattgagctcagccaatggagtcgtaaggacgttgaaggatctttgtttgttgtcaaaagaagtacacaacctcgntttcagtttattgtgatgaatcggcgtaatacagntaatctggtggngnatctcctgggnggttttaaggatgaagtcaaggtccatattactttnccgaatggatctcagnaggaaatgnatttggtctcaaaaccgggatcngggggtgaccttttnacagntcttgnganttccaggtaccgngncaagcttcttaaggnggtttgggtgnggtcccaaggntttgtgcct

SEQ ID NO: 132499 - DNA, 611 bp, Arabidopsis thaliana columbia
  unsure (1)..(611): unsure at all n locations
cttagatgggttagggtttggtcctctagttcccactgagagcgagagatctttnatggaacgagtcagacaagaactcaaacatgaactcaagcagggttacaaggagaaaattgtggacataaganaggagatactgaggaagagaagagctggaaaattaccaggngacaccacctctttnctcaaatcatggtggcaatctcattctaagtggccttaccctactgaggaagataaggcgaggttggtgcaggagacgggtttgcagctcaaacagataaacaattggttcatcaatcaaaggaagaggaattggcatagcaatccatcttcttctaccgctcaaaggataaaccgcgnagcaattcaggtgaaacagcgggagnggccntttnggtcaagnttcatgttgggtccaaagcttttttgaaggtngggcattntgccaaggatttttcacaccaacgtggccggattttttccgncatggatgcttcaaatttggatgttgggccccaaatnaccccnggttgtttatttgggtttgtgcttttnngccgannttctcctncttcccaacnccttttttgnactggatcntggtnttc

SEQ ID NO: 132500 - DNA, 581 bp, Arabidopsis thaliana columbia
  unsure (1)..(581): unsure at all n locations
aatctttctccctcactctaacaccaaaagaagaagaagcatttnccaaagagaaagagagagaaatgggttccaagattgtccaagttttnttgatgtnggctctattcgccacttcagcactcgctcaagcccctgctcctactcccaccgccactcctcctcccgcaactccccctccagtcgcaactcctcctccagtggctaccccaccacctgctgcaacccctgccccagccacggcaccacctgctgcaaccccagctcctgccactactncaccgtcagttgctccttctcctgctgatgtttccaccggctttncaacaggaccggaaggtnccaccgtgaggccaagnaagtgttccggnacctttaagatgnatcccctggcccaaggggcggatttttcaacaagggtttttttggcnggaaccggctttgnngtnattatgnacgnggcgtttttggtttanacttttttaaaaaattnttttttaacgnaaatttttaaatttttgggtaatgtgggattnntttttttgnattggatttgnnggaatttttttaaaggtttgggg

SEQ ID NO: 132501 - DNA, 622 bp, Arabidopsis thaliana columbia
  unsure (1)..(622): unsure at all n locations
gaaaattgttcctctcaaataaaaaagagaaagagatccaccggaaaatatggcggagatgtcttaccttcagatcgacgatgctaacgatgccgttttcaaccattaccgccaccaacggcggctacatgatcacctgagagatcaatcgttttctcagatcctatatccgcttcctcactggatccaatcagacgacggcgatctctacatctctgaaaccgattttncttccggcgacgtttcggtgtccgatctagtattcacgaccgacgacggtctcgatcttctcgatcggcgtagttttgttatggatctgttcaccaacgngttgagcaatctcaggtaactncgcttgataatgancgggaatcgatgatttngaaaattacgggatgcgtgagggtaaatgtggaccttgaattttggntttgagatgaatctggnacggnttcgtgaaagggancttnttgtaaccttaatgacacgttattgngtanggnttaggggtnagcaggggntttaagttcagnggatcgggtttaatcttntgtnagttccaagaggangggtaaattgganagttaatagagtggttaaatgggaaatttannagnttttc

SEQ ID NO: 132502 - DNA, 454 bp, Arabidopsis thaliana columbia
  unsure (1)..(454): unsure at all n locations
gagcctctctttgcccgtacgattcttcgggctctatgagatatcgaatttncttctcaagaattgagtgggctgatcagtaactaagtncttcttatgcaggtaacagataaacacgaatgttttcagaagtagaaatggctcgagacgtggctatatgtgccaaacacttgaatggccaatcgccgcaccaaccgattctatgcagactactccaagatctaatacacgngaaagcgtgcagggaacacggattctatctcgggaatcaccggtcttaaaagcatcggtaacaaccaaggacaacaacatcggcaacgggaacaattcatcangcaaaaaatcctcaacattnccgggtggtccttnaanatggccggacaattntttgnctncnaanngggggtnttttttgcaaagggggcttttnaaaaaaggtntttttngnccgggg

SEQ ID NO: 132503 - DNA, 486 bp, Arabidopsis thaliana columbia
  unsure (1)..(486): unsure at all n locations
caagacaaaaagaacaatggcagcgagtgcatctccaatggcgagccagctaaggagcagcttctcctccgctnctntttctcagcgtctcgccgtcccgaagcaatctccggtgctcctttcggtgtttctccgaccaaaagagtctcttccttcactgtccgagctgttaaatccgacaagacaacattccaagtagttcaaccaatcaacggtgatccattcatcggaagtttngaaactccggtgacatcaaggccattgatcgcgtggtancttttccaaanctncctggntacccgtaaccgccgtcaaaccctnttcttcgcgggtgttgaagttgggcctgggccaangggtttcttctttagtgggnccattttgtcaaaagttggnccaattangggacaacttgtttanggccgggtaanccggggttttttagccgcggtttgggntttgaagtaatccnnaanaattttgncc

SEQ ID NO: 132504 - DNA, 362 bp, Arabidopsis thaliana columbia
  unsure (1)..(362): unsure at all n locations
gcctctggtgttatccccaatgtcgtcactccacgctaccgtgagcctcccactgttctccaactcaaaccacaaaaagctaacgtgcgcagtacattatcacctccgccatggaaacagagccggcgagttatctccgtctccttttttctctcccgtctnctcctnctcctaacgatgctaatggctggtgggcttaatnggtaaattggntaaatacggcaaggagttattgattagggaggaactttgatccnctttaaggatnatgtaccaccagtgatttntngctcaagttacaaattcnaggntctttangggnttttttgaattttgggggaaaccctgaatttttaggnngt

SEQ ID NO: 132505 - DNA, 279 bp, Arabidopsis thaliana columbia
  unsure (1)..(279): unsure at all n locations
gaaactgnaatttaaatctctatttcaactaataatattgtnttctaggttcggtaaaattaggttatacnaggcggtcattatgtagagatgtatacgctttaacatgatttcnagctaggttagggactcgnacggaataattatgctgatacttctcctaagacctttgnttttaaatttggtttgcnccatggttcaattgtaggtaaggttganagcctgtttnattaatttnttttttcggggaggaccttggaaaattccaaaccnttaggg

SEQ ID NO: 132506 - DNA, 484 bp, Arabidopsis thaliana columbia
  unsure (1)..(484): unsure at all n locations
cttggagttgtagaaacatacagaaaacgtggaatcgctaaggcacttattaacgaggtcgtcaaatactctnctggtatccctgtgtgccgtggtgtttaccttcacgtgattgcacacaacaatcccgcaatccggttgtacaaaagaatgtntttcagatgtgtaaggaggttacacggattctacttaatcaacggccagcatttcgattctaacttgtncgtctactttatcaacggttctcgctctccttgctcacccttagatcttgcgggtgttggttctgaattatatgagggagcggnatcaaatctttcgnatcaaaagctgacggtgaccncggttgaggaaggctcgaaatgncttnaangcaanggcaacacggggggtctttttcccccttnggcntaacggaacccttnattcggaagggttncncccggnttttttcggtnngggcccgttnccctttaaagggttt

SEQ ID NO: 132507 - DNA, 506 bp, Arabidopsis thaliana columbia
  unsure (1)..(506): unsure at all n locations
aaaaaaagtnctctctctctctctctctccattgatttcttctacacagacatctctacgaacccccaaactcatctntctctctttgctcttcatcggatctgactttttcccgaaaacccacaatctcattcttcggatttttcaacgacaaaacccccaaatcacaaaatccccaaaaagtttcaatctttttnacttgagaaaccaaatatatttatagaattnnctttataaagtctgcgttttttttgttttgtttctgtttgatcaaattcaccggcgaaggaattttccgatgggaatgtcttcgctggcttcatcacagctacggccatgagctaccaaaaccgggggnggagagggagggagggggcancaacggtttcttntnncggggntttttgatcggttagntttttccccttcttggcccttggtnccggttcnaacnctggttacnggtccgaatcctttctngngncncttccgccggttttaatggc

SEQ ID NO: 132508 - DNA, 562 bp, Arabidopsis thaliana columbia
  unsure (1)..(562): unsure at all n locations
gggaaaaaagaatgtntggagaagttgagaaacgatggaacgccaatggaacgtgtcaagagcaatacaggagattcaattcttcatattgctgctaaatggggtcatctagaactagtgaaggagattgtntttgaatgtccatgccttctattcgagcaaaactcaagccgtcagacaccgctacatgtggctgctcatggcggtcataccaaagttnttgaggctcttgttgcatcggtaacatctgcttcagctagtctgagtactgaagagagtnagagactgaatccacatgttcttaaggacggagatggnaatacttctctgtactacggcatttaaggccggtattttgngatggtaccctgtcttgtgaacgcggncaaggatgctcctttttttggaatnacaaggnatntcttccttgnccggagccgngnccnctggaataaattnaaggccttttnaagcaatttnaaaccccggcaacgggccccaagttggnagttncttggtcggatttcangggcaaattttcnatttntttagccagttgggc

SEQ ID NO: 132509 - DNA, 471 bp, Arabidopsis thaliana columbia
  unsure (1)..(471): unsure at all n locations
ggaggaggacaagcttganttggcaaagtcactcatggagaaagcaaaggccaaaggtgtctctntcttgctcccaaccgatgtggttattgctgacaagtttgctcccgatgctaacagcaagatagtgccagccactgccatccctgatggctggatgggtctagatattggtccagactccatcaagacattcagcgaagtcttggacacaaccaaaaaccatcatctggaattggtcccatggggtgtttttgaattcggataaggtttncttcttggaccttagggccttagcaaagcaggntttcaagacctaaggggggaaggggggtaaccccaattcaatttggnggggggggacnntttttttccttcccctcgggnaaggttngttttttgaaancnaaatttgggncccaattttttcccgggggggggcttaantttngggctttttnnggggnnacc

SEQ ID NO: 132510 - DNA, 509 bp, Arabidopsis thaliana columbia
  unsure (1)..(509): unsure at all n locations
tcaaatgaaagacacaattnaggttgatgaacctgaagaagttggagatcccttaactgctgaagaagtggaagaaaaggagctattgctggaagagggtttctcaacatggagcagaagagacttcaatgccttcattagggcttgtaagaagtatggccggaacgacataaagagtattgcctctaanatggaagggaaaactgaggaagaggttgaacgatatgctcaagttttccaagtgcggttataaagagctgaatgattacggcaggaatcatcaaggaatntttagngangggaagcaaggatctctngggaaggttgnaaatcatggaaagcttttttgggangaaactttggntccntnccaggaaaccccnttggctttggaaccttnaagggttccaatttttgggcccagacccaanaggggnagccttttcccaattnaagggttccgccccctttcnttggttttcantggncccctaaaactttnggggttt

SEQ ID NO: 132511 - DNA, 357 bp, Arabidopsis thaliana columbia
  unsure (1)..(357): unsure at all n locations
gagtcggggaacatgaatttcgacgagaccgtgccactgagccaacgattggagtggtcagacgtggtcccattgactcaggacgatggtccgaatccagtggtgccaattgcctacaaggaagagttccgcgagactatggattaacttccgtgcgatttacttttccgacgagcgatctcctcggcgcactacgactcacgggaagaaacccttcntcttnaaacttccgggcaactacaacagttgtggcaatttaaggggcttagtactncganggcccttnaattaacgncnttngtttttaaggaccttcgnggttcaatcggaaccnaattttcttgnnggnttaaacct

SEQ ID NO: 132512 - DNA, 368 bp, Arabidopsis thaliana columbia
  unsure (1)..(368): unsure at all n locations
gaagcgaaaaaaagagagaattaaagtcattcattatttggggaatggagaagaagctcctttcctacagacgccatcattaacaacatcctcttaagcttctncaattctntccgtttgtcggaagatttcacgacgattcttcaatccttatccgaaccggngaaatcatgtcggacgcttttgatcaatggattggcttgagctggtggtgggatcanttgctcagcttctnacttatccnccttnaaaactgtaaatacggngccaacagacggngcgggnatcttaagagggagaagagggaactttngaacctatcgnaccacatgttttccaggtttgtcaaacaaaggaaggtttnggng

SEQ ID NO: 132513 - DNA, 280 bp, Arabidopsis thaliana columbia
  unsure (1)..(280): unsure at all n locations
gagtcacatcncctaactgaaaaaaactcgccgccggagccaccatgtgcgacggagattgccgtcctctcggtttcctctnaggtcttcctttcgccttcctttctctccttctctccatcatcggtgtcatnatctggatcgncggattgttgtnatcatgcatatgtccatgttgcttgtgtgtnactgtactagtggagatcgcaattggtttgattaaagccccaattnatgtnatggagtggntcatgtccaagatcccttgttnanatcttct

SEQ ID NO: 132514 - DNA, 452 bp, Arabidopsis thaliana columbia
  unsure (1)..(452): unsure at all n locations
cgtttagtgattcgaaatntcccttctcggctcaaatcttcgatctgggctttcgtgtctttttgcgttttgatnggtaataaaaagaagctttttaaaaactttttccatggctggaagtgaagaagttaatcttattgagagcaagacagtggttcctctcaatacatgggttctaatatccaactttaagctagcttacaatctcctgcgtcggcctgacggaacttttaaccgtcatctcgcagagttttctagaccggaaagtccctgcaaatgncaacccctgntaaatgggggtcttctctttttgatngtgatcaaccgntcggcaaaactaaatttgctttaggcaggaggtttacaaggcccagccttnatgcttggcaccttttanccaangnatttcctgnntcttcaanaatcccngtttgntnggggaaaaaggngcc

SEQ ID NO: 132515 - DNA, 434 bp, Arabidopsis thaliana columbia
  unsure (1)..(434): unsure at all n locations
cggtcaaacttgttttactcgcaatacatattactctttgtcacctctaaagaagcttcgaaactagcacttgttgtttcaattttngtacatcaattctcatcaaaagccgactcaaacataaaccgagagtttataaaaaacagatgtcagaaagactagaagatgactttgcaatcgatgaagagagatcctcctactatggcggagctccataccatttcatatgggagtcaaggccaggnacacccaaaaaccacctctgctccgnttcctctnttccttctgcntctaacaacggncggcctnatactactncctncggggtttttttcggcaaccaangnncggaaagcaaaggtgaggttcaaaaacttaggnaaagtttttttncccttttccattgttnagtggttctctaggggggggnantt

SEQ ID NO: 132516 - DNA, 208 bp, Arabidopsis thaliana columbia
  unsure (1)..(208): unsure at all n locations
actnttatcttcggtacagngcaaatnacagctcccnatggccggcacgtcatcancaccgccgtgtaacatatccgcgtcctcccnactcctccgtcaaccttctcgatcaatccttaaagtgttcggtttnttaccacctgtaagtaggnttaaccgtaaactcggccggttaacgggtgacccgggttaatctggcgcaggattt

SEQ ID NO: 132517 - DNA, 201 bp, Arabidopsis thaliana columbia
  unsure (1)..(201): unsure at all n locations
tccaatcttcgtcttcatcatcatcatctccattaaagctgcttaagaatgcgcagctcactctaggtctgactctcagatccncctnctcctctnctcttccattcacctgcaactcccgnttctgctctnctcctcttccttcttcgtcctttagnctctacaaacggtttccatttcctnaaaccatggtntttccct

SEQ ID NO: 132518 - DNA, 571 bp, Arabidopsis thaliana columbia
  unsure (1)..(571): unsure at all n locations
cctcttctacattttccaacgatggcctcaaacgcactctcgtctttcaccgccgctaatcccgctctgtctcctaagccactactccctcacggctctgcttctccgtcggtttctctcggcttctccaggaaagttggcggcggcagagcagtggtcgttgcagcggctacggtggacacaaacaacatgccgatgaccggagtcgtgttccagcctttcgaagaggtgaagaaagccgatctggncattccaatcacatctcatgcctctntcgctcgccagaggtttgccgacgntagcgaggcaagtcattaatgagcaaatcaatgtgggatacaacgtctnctatgtgtaccattcaaatgtacggattactttgacaangncaacggttgctattaaggggctngccaatttttcaaaggatcaagtngggagagagagggaatctnagagnttttgggtccngacccaaggggggnagggtnaatccnccnnttggntaccttttagatngacattcttaaaggggtcttnttnaatgggtggctttttttnggaacnactt

SEQ ID NO: 132519 - DNA, 558 bp, Arabidopsis thaliana columbia
  unsure (1)..(558): unsure at all n locations
ggcaatttcatctcttccagaaaacttcaagccacacagggcagtgaagaaagtttatgaacaacgtgcccaaatgattgaatcaggagagggagttgactgggcccttgcagaagctcttgcttttgctaccttagttgtggaaggcaatcatgtccgattgagtggtcaggatgtcgaacgaggaacatttagtcatcgtcattctgtccttcatgaccaggnaactggagaagagtattgtcctctagatcatctcatcatgaatcaggatcctgagatgtttactgttagcaacagttctctttcagaattttggtggtccttngggttcgaatttgggttanctccatgggaaagccccnanctcgtttgggacctntggggaggctcagttttgngnctttcgccaattggggctcagggggnattttancagttcatcagnagttgggnaagccaaatggttcggtaaacccggnnttttaatcnnanttcccnntggttatantggaagggcctaacattaagttcgnggttgncgtacctcaagtgggg

SEQ ID NO: 132520 - DNA, 492 bp, Arabidopsis thaliana columbia
  unsure (1)..(492): unsure at all n locations
cacaaaacaccgcttagcttctaaaatctgaacatcgagaaaaaatgagttggtggtgggctggcgccatcggagctgccaagaagaaactcgacgaagatgaaccatcacaaagcttcgagagcgtcgctctcatcatcggcgttactggaatcgtcggaaacagcttngcggagattctccctctttccgacacacccggtggtccatggaaagtctacggcgtcgctcgtcgtcctcgtcctacctggaacgccgatcatccgatcgattacaatccagtgcgatgtctccgacgccgaagncaaaagnttccaaggtttcccttttaaccggttgttaaanaatgtttttttanggnaaccttgggccaatnggtgaattcgggaaangtgaaaactttttaagnaaaattggntnnaatgctccgnaangntttttccaagggggttntccccttaaggggcaaaattttcganatttttttntcca

SEQ ID NO: 132521 - DNA, 442 bp, Arabidopsis thaliana columbia
  unsure (1)..(442): unsure at all n locations
ggattttttgttaaactctccaagagaaaaacataaagttccaacctttttagtttccaacttctcttgaaacctaattttgattacagtgagtggatatcgtaaatttgtggctttctcgagtttctgagattttnagctaaacactctgcttaaacctcaagttcttacctttttactcttagtagagttgcaaagtttaatcctttgataaaatctcccgagattccgagtttgtctcccatgaggntttgaataccgnaggaaaaatgtcagtgggaagatcttttggaagcttggggaagaaggntcagaggcatggccaagncttaggttgnccgncttncntcaggggttttaacgggtttgattcaaatcaacccnccctcatttccntcggagnnattttnaccctgagntnccttaggcagcanttcggggt

SEQ ID NO: 132522 - DNA, 320 bp, Arabidopsis thaliana columbia
  unsure (1)..(320): unsure at all n locations
gggaataagaaggctatgttgattccgaattgtttgtttcgtgttggtggttcggcgatttttttgtcgaacaaggggaaagatcgtagacggtctaagtataagcttgttcataccgttaggactcataaaggagctgttgagaaggctttcaactgtgtttaccaagngcaagatgataatngggagacccggggtttcgttgtngaaaaatccttatgggtatagcttggggaagctctttaaggcngatatcactnncttttnagggccnttgggttcttcccataaagtgagcagnattcntttttttcaannac

SEQ ID NO: 132523 - DNA, 403 bp, Arabidopsis thaliana columbia
  unsure (1)..(403): unsure at all n locations
agtttacccatctccacaggtctctacctccgttgttgagccttacaacagtgtcctctccactcactctctcttggaacacactgatgtctccatcctcctcgacaatgaagctatctatgacatctgcagacgctccctaagcattgagagaccaacctacaccaacctcaaccgnctcgtctctnaggttatttcttccttgactgcttctctgaggtttgatggtggcttaaatgttgatgtnactgnggttccaaacaacttggggccatnacccaggatccacttnanggttttcctcctatggnccagtaatttccggagggaaaggctttccattgggaaaatttaagttnttnggggtncnaaaaaaaggggtttttaggccanntttcccnna

SEQ ID NO: 132524 - DNA, 343 bp, Arabidopsis thaliana columbia
  unsure (1)..(343): unsure at all n locations
gtctctacaccgtcatgaacactgaatcagttgtcgagttccttgggaatgtgaccttgttgcagcggttacctagttcctctctgaagagaatctccgaagtcgttgtcttcaaaggttatgacagaggtgattatgtggttcgtgaaaatcaaaatgtggatggagtttattttctcttgcaaggacaggctcaggttctnagatcagccggagngggaaactatcaagaggttcccttnaaacggtatgatttttttcggccatnggaatttccggggatttttccncagcanaatnttttttccttttacaanggcttanccnnctttccnggttnaat

SEQ ID NO: 132525 - DNA, 480 bp, Arabidopsis thaliana columbia
  unsure (1)..(480): unsure at all n locations
tcatcaccatctcttctttatctctcatctcaatctcagccatcattatcatcatcgttgtgacatcggagttgacgtcacgttgtggtcgtgattgtnatacgtggttggtttcgtcgtcgttcatcaccggattgttagaaaacagttcaagtggtggaattggtgatccgtttcccgtcacgtctgaaggattttgggcgagttctcaacggttctgcgtagatctcgttcccaagttttcagaatagttttcggatctaaaatcggaggtagagggttttaaagntcttattttcccgacggntccttnaaanaatcanatnccgtgaggttttnggggtcngttggaaaanatcttttnaggggggggaaaaaaagtaggcaaaatttncgttttcaacggtcccaagttttcaancttaaagggtttttaggnggnggttttttgntaacccccggggctnaattngnccaagg

SEQ ID NO: 132526 - DNA, 311 bp, Arabidopsis thaliana columbia
  unsure (1)..(311): unsure at all n locations
tcgcaatctcacctccaaatatcacaatgtgtttcccaatagccgcactagcganaacactcctttcgttaggcttcacaccgaatgtttccacttgtgtccatttgtcttcagcaggatcgtagaaatgaacatcatctacttcacatccgttaaatccatacacaatccatactttcccttgcaccactttcgagcccttgctcctccctcttatgctaaaagggatntcctgggattngnacaaatgnaaaccacgnnttgtnaaccgntatttntaagagtctagtgtcttgattngntcccatagg

SEQ ID NO: 132527 - DNA, 479 bp, Arabidopsis thaliana columbia
  unsure (1)..(479): unsure at all n locations
gagaatttcctctatatgctggattcaatgggcaataggtcttacaagcctaatcctcgtttggctcgagtgctggacatcctcttcatactgcatgctgaacatgaaatgaactgctctactgctgctgctcggcatcttgcctctagtggtgttgatgtgtacaccgcatgtnctggagctgttggggcgctttatggtccacttcatggtggcgcgaacgaggccgtgcttaaanatgttagcaagagattgggncctgcttaaaatattccagatttcaattgaaggcgtgaaggaccagnaagngggaggatgtcaaggttttggncaacggggtttacaaaaaacttttgncccccggggcaaaaagtntttaaaaaaacttggcaagttnaagnggttctccnttttttggtaggggtnccccttatncgggggngnaattttcttttanggaagggggaatttttttnnng

SEQ ID NO: 132528 - DNA, 443 bp, Arabidopsis thaliana columbia
  unsure (1)..(443): unsure at all n locations
gccgcttcggagacattctcgattgtaagatcatgctggaaagagatactggtcgttcacgtggattcgggtttatcacttttnctgatcgccgcgctatggatgagtccatcagagagatgcatggaagggactttggtgatcgggtcatctcagtnaacagagctgaaccaaaactggggcgagatgatggagaaagtcatggctctagaggtggcagngacagtggctactcgattnctggaaaaggaagctttggtggaggtggaggtngaggtgggcgtgtttgtgaagatgaatgcttcaagtntggacgggttnggcactnggcccgtaattgtccctctgctggtggtngtcgtggaggancncttggtggttttncttcaagngctaagtncgtatggnggtcttattgaccgtttttnnccccaattctgacc

SEQ ID NO: 132529 - DNA, 587 bp, Arabidopsis thaliana columbia
  unsure (1)..(587): unsure at all n locations
ggtaataaaaacgacggtggaaatgatcatatttccctttacgcaaggttcgaagagacaaactctcttccattaggttgggaagtgaatgttgatctcaaactctttgtccataatgggaagctacacaaatatttgactgttacagatggcttagtgaagcgatataacaatgcgaaaaaagaatggggtttcggacaattgattcctcgatcaacattctacaacgcgaacgaaggttaccttgaccaggncactggttcttttggtgctgagatctttattgttaaaccggctcaacaacaagnggaagttacattcatatcaaaccctncaaacaatgttttcacttggaagntacttcgtttctctaccttggnaggtaaattcctatttctccgatgattttctcggtgaaggccgtacttgnggcttggggttaacccgaaaggggnttgagggggaggcccatgacttccaatttccattttctcaaggcntaaggaacgggtnttcaaaacttgggggggttatntcggtaaggnacgggcttcctgnaantttttcagtggcccnttgngggnnnc

SEQ ID NO: 132530 - DNA, 587 bp, Arabidopsis thaliana columbia
  unsure (1)..(587): unsure at all n locations
atctctttacttctctcttcacatcatctttcttgaattctttatatacacagtttaaagatgcaaatnctaagaagcttgagcacgaggacaagaagccgtcgtggaggatacgagagagtgagtnatgattcaactttcagtttactcggagcaaagctaaggagatcgacgagtgttccttactacgcaccatctataaagcttggagctggtggtgttccgaccattcttgaggagcttcctcgtcagaaatcaaagaaagtcaaaccaacaggcaaatttagtcacccaatctttagtcttttctacggaaagaaggagaagtcgncggcggcgaagcctgaggttttctaggtatcttgagtatttaaaggaaggtggtatntgggttccnnagctaatgcgcctgnnatctttncaaggnggtccggtatntgaattttttaaaccaattatccaggaagggggggcttntgaaagtttctttaattngttaggcaaactcctcaattgngggnatttttgantantcnccgcccctttttttttaggttcagnttggcaaattttnttgccctttgtgc

SEQ ID NO: 132531 - DNA, 452 bp, Arabidopsis thaliana columbia
  unsure (1)..(452): unsure at all n locations
ctcgcttgcttgcctctntntctctaaaagcccatctntttctcctcctcctcctccattgaagaagaaacctaccttcgtaatatttcctcaattacgatcatggtgaatgttaaagggtcaaccaaaaaatcgaatcttgatcgattccttcattgcataacacccttagtgccaccccaatctntccccaagacggagattagaaccctaaatcgattgtggcatccatgggagagacaaaaggttgagtttttnaggttgagtgatttgtgggattgtaatgatgaatggagcgcttatggagctagcgttcctattcatgttaccaacgggggaatctctttgttcaatactatggtncctnanctnttttnncatncagattttnacccctaattnccccttgatccccttaagggnagnggcttaagatngggnatttaagggta

SEQ ID NO: 132532 - DNA, 433 bp, Arabidopsis thaliana columbia
  unsure (1)..(433): unsure at all n locations
tcgaagaagaaacagagaatcatcaaatcaaatccctaaaaattgatttttgaaatggagaagaacgcatcgacttcgtcgtttgaaggacttgggtccgagtggtctagatctaaccagcgcctttttcaaaccgatccacaactccgatccttctctcccttcaaaccgacgtaccaaagtctccgtcgtcggagtcggaaacgtcggaatggccatagctcaaaccatcctcactcaaagatctngcagacgngatccnctctcggttgacggccaaancccgnttaaggcttngtnggggaaatgctttgatcttccaacaaaggccggttggttttcctncccttggaccttaaggtcaaccggtttctttttgaattacggaggtnaaccngntggatnntgatctttggaatcggcnantncctgg

SEQ ID NO: 132533 - DNA, 426 bp, Arabidopsis thaliana columbia
  unsure (1)..(426): unsure at all n locations
gagatgttggatggtgtaccattggtncgatctgagaaggtgaaggatgagattgtncttgacggtaacgacatcgagcttgtttcaaggtcatgcgctttgatcaaccaggtactctctctaactagctggtatcaaagagatttaggtgttatctagccaaatttgcatttncttgggnctaaaaggttgagagattgtnttagatagggtgacacgggtcagttctaggaatcagattttncataaatgaagtgaaaatcgatttgtattatctctataggtctctaataggccggttaggttacctgctaaggnaacctttgcccaatttgnccantgntttgctccctnaagnttttcaagcattgtgtatgaaagggttttttttggggtnaagntttnggttnagggccccaattttnc

SEQ ID NO: 132534 - DNA, 434 bp, Arabidopsis thaliana columbia
  unsure (1)..(434): unsure at all n locations
catcaccaacgccgtgaagctgccgntttcaaatcatccgttgatattcagccggagtggaacatgcttgagcagatccctttctcaacattctcgaagctctcgtacacagttcaagaaccagaagatcttcttctctgtggtggccttgagtactacaaccgccttttcgatcgcataacgccgaaaaacgaacgcagactcgagcgtttcaagaacaggaacttcttcaaagtcactactagtgatgatcctgtgattaggcgtttagctaaggaagacaaagctactgttttngcnactgatgctatattagcngctcttatgtgtgctcctagatctgtttacncttgggggattgtattcaacgggttggnaacaaactnttttttncnagggggnttggtcanagtttgnttntngcttgtgnatng

SEQ ID NO: 132535 - DNA, 425 bp, Arabidopsis thaliana columbia
  unsure (1)..(425): unsure at all n locations
ggaggaatcatatacaagggtatccatccattcgcatttnccgcaaaggcagtgatcttaaggatgacaatgcacaccacgaccatgaatcctactatggagatcgtnatacggaaagcttagtgaagatggtggtgagtctggttgaaccaattcatctagagccccataatctagcattggaggacaaatcagacaattcatcgagaactctaaaaaaggcaccttntacaggaggatgtcgagttgaaggatacatgcgtgtnaaggaaggttncaggcaatttaaatggtttcagctcgctcgggatctcattccntttnaattctccnaaattgnattttntcccaanttngtttaaccnattttttcctttgggggggggggtttttgcccnaaaaaattttngggggtttaagggntt

SEQ ID NO: 132536 - DNA, 479 bp, Arabidopsis thaliana columbia
  unsure (1)..(479): unsure at all n locations
aaaatnattgcgggatactaactctaaagatgtccggnagananattttntggatgtncttctngatcttaccgaagagatgaagcagagctcaacattaacgatattgtacaccttctcttggacctgtttggagcgggcacagacacaaactctagtaccgtggaatgggcaatggcagagttacttcgaaaccctgaaacaatggtgaaagctcaggctgagatcgactgtgtgattggtcagaaaggtgttgttgaagagtctgatatctcgacacttccctatctacaagcagtggtgaaggnaactttccggttacatccggctgctncgctacttagtcccccgnaaagctgnatcagatgtggagggttcttggggttcatnggtgcntaagncactcagggtttttttnaacgtttgggcntttggaagggccccgacggtttggganatttngtcccggtttaanccaa

SEQ ID NO: 132537 - DNA, 560 bp, Arabidopsis thaliana columbia
  unsure (1)..(560): unsure at all n locations
aagttatggctgaaggcgaagagctttcaaagaaacaggctgctcaagaagctcagatcaggaagctaagggctcagattagagaggcagaagaagaaaagaaaggactgatcacaaagcttcagtcggaagaaaataaggtcgaaagcattaaaagggacaagacagctacagaaaagctgctgcaagagaccatagaaaaacatcaagctgaacttacttctcagaaagactattactcaaacgcattagctgcagcaaaggaagctcaagcgttantganggagcgtaccaacaatgaagcgaggtcagagttagagaatccgtctaaaaggaggctngagagcggggatctatgctngtccaggcggcttgaagganttnnggccaacccttaagccaaaaagggggcaccaggcnantnttttgggggaggcnattttcccgttggggaattntggccctttcaaggcggtttctaggcttgttgnncaaggtttttnggggtttttccccaggttcctngntttaaaggccttnctnngcaaantttgggttnc

SEQ ID NO: 132538 - DNA, 539 bp, Arabidopsis thaliana columbia
  unsure (1)..(539): unsure at all n locations
gtatttcagaggactcagaggagcccattaatctgaaaactagaagtgttgtcgctgcccatgataaagacatcaattccgtggctgttgctcgtaacgatagcttagtttgcactggttctgaggatcgtacagctagcatatggagactaccagacttggtacatgttgttacacttaaaggacacaagaggcggattttttctgttgagttctcaactgttgatcagtgcgtaatgacagcttcaggagataagacagtaaagntatgggctatatctgatggttcctgcctcaaaacatttggaaggtcataccccaagtgtactttaggggcccaattttataactggatgggaccccattttgtctcatgtggtgccnattgggttttttgaaacttttggattttnacnnctagnngggnnaattnnncanattgccccgccggggggcaaagnnttgggctttagnnttttggaaanaggcnagaaattttttcaacttgntgggggnaatccagtttttaatttttggat

SEQ ID NO: 132539 - DNA, 582 bp, Arabidopsis thaliana columbia
  unsure (1)..(582): unsure at all n locations
ggaacagctagagaaatctccattcctggagaggctcatcaagaagggctntgaggtcatcttcttcacagacccagttgatgaatacttgatgcaatacctgatggattacgaagacaaaaagttccagaatgtgtccaaggaaggactgaaggttgggaaagattcaaaagacaaggagctgaaggaagcattcaaggagctaacaaagtggtggaaaggaaatctcgctagcgaaaacgtagacgatgtcaaaatcagcaaccgtttggctgacactccatgtgtagtcgtaacatccaagtttggatggagtgctaatatggagaggatcatgcagtcccaaactctctcggatgctaataagcaagcttaccatgcgcggaaaagagnagtcctcgagatcaaacccacggcaaccttttcatcaaaggacctcaagggttggatttcaaagtgcccccnaggnttagnngtttaaggaaccagnacagtnatgtnccngcagttttntcgggngtggttntttnttccgncccaaagantttnttcccgattttnacnngtaaggngggttnnata

SEQ ID NO: 132540 - DNA, 555 bp, Arabidopsis thaliana columbia
  unsure (1)..(555): unsure at all n locations
gcaaaaacctagtttcgatttctccagaaggtggcattttggtcaccctgatcatcaccagcaatatcaaaagcctggagaagaaggggagaagatattccggctaggtctcaccgcagatataggtttatctgtcgcaaaagctctcaccggttatctctgcggcanaccgccattatcgccgatgctgctcattccgtttccgatgtggttctaagtggtgttgctctagtgtcttacagagctgcaaatgttcccaaggacaaagaacatccttatggtcatggtaaatttgaaacgcttggagcacttggcatctctgccatgcttttggctactggctctggtatttgcctgggaatgcttttagaccttttaatctattgcactgtccgnagctcctgagggtaattcatagtgggcataatcangggaattgnntttgaataatcccatttnggttttgccttgtnncnantggnttccattcntttcaaagnanggggntttttggntccaaaaacgggnangngaaaanaagggggtgntttantg

SEQ ID NO: 132541 - DNA, 505 bp, Arabidopsis thaliana columbia
  unsure (1)..(505): unsure at all n locations
ctcaactttatctcccaaaacacaaaacaaaaaaaaatggcttccactgctctctcaagcgccatcgtcggaacttcattcatccgtcgttccccagctccaatcagtctccgttcccttccatcagccaacacacaatccctcttcggtctcaaatcaggcaccgctcgtggtggacgtgtcacagccatggctacatacaaggtcaagttcatcacaccagaaggtgagctagaggttgagtgtgacgacgacgtgtacgntcttgatgctgctgaggaagctggaatcgatttgccttactcttgccgtgctggttcttgttcgagctgtgctggtaaagttgtgtctggatctnttgatcagtctgaccagagtttccttgatgntgaacagattngtgaagggtttnttctaacttgtgctgnntancctaccnctgangttaccattgnaaccccaaagnnggggganttntttaagngtacctctnacnngttttnat

SEQ ID NO: 132542 - DNA, 442 bp, Arabidopsis thaliana columbia
  unsure (1)..(442): unsure at all n locations
actttagttagtggcagtagtattgagcaaatggttcaacaaataatggaaatgggaggaggcagttgggacaaagaaacggttactcgtncacttcgtnagcatataacaaccctgagagagcagtggattatctatatnctggaattcctgaaacagtaaccattccagcaactaatttatctggagtaggatctggtagagaacttactgctcctcctccctctggaggccctaattnatctccnctggatttgtttccccaggaagcagtttctgatgcagcaggtggagatcttggaacgcttgaattcctcanaggcaatgntcagttccaacaattncggtccatgggtcaantcccaacccccnagntttttgaaggctntggttcaanngntcgggaagnaggacccccaanttcttggggtaaattaagggg

SEQ ID NO: 132543 - DNA, 587 bp, Arabidopsis thaliana columbia
  unsure (1)..(587): unsure at all n locations
ctattttataattcctcttctttttgttcatagctttgtaattatagtcttatttctctttaaggctcaataagaggagatgggtgaaaccgctgccgccaataaccaccgtcaccaccaccatcacggccaccaggtctttgacgtggccagccacgatttcgtccctccacaaccggcttttaaatgcttcgatgatgatggccgcctcaaaagaactgggactgtttggaccgcgagcgctcatataataactgcggttatcggatccggcgttttgtcattggcgtgggcgattgcacagctcggatggatcgctggccctgctgtgatgctattgttctctcttgttactctttaactcctncanaacttcttagcgactgcttacagaacccggcggatgcaagtgtcttggcaagnggaaactacaactttcaatggngtgccggtnggtcaaattctcgggtgggtcaaagttcaaanatttttggggttnattaaanacttgantctnttttggatnggaattgggncacggnggaggttcntaagatnttggggtaaaagggncacttgttcctgta

SEQ ID NO: 132544 - DNA, 513 bp, Arabidopsis thaliana columbia
  unsure (1)..(513): unsure at all n locations
acagatttgtnttattttcaaacacaaaatcaaccaattccgatgaatcanaaaccnccgccgtacggttatggcggcgctggtggtggaggagtcggtccttcttccacttccaacaccacaatcatcgggacgttgagtgcacgcgccaagcagacgacgcaatcgatgatcacgacgctccgtccatggcgagagattctngatctgtccgcgctctctctccctcgcgggtatgatgaagccatggcgcatctaaagcacaacatctcttatttccgtggaaattacgntctcgccgttctcgccattgttttcctcggccttatttaccatcccgatgtctaatnatcgctttcatcgtcgncttcatcggatggnattctttctctaatttntctcgagacgnaaaacnattcnatttgtaatttcgggggaaanagtaggttncaagatccgnnctngntttactcagntttgggaacgggtttggaattgggatnttacaagttt

SEQ ID NO: 132545 - DNA, 443 bp, Arabidopsis thaliana columbia
  unsure (1)..(443): unsure at all n locations
ctcaaaccctatctggctctctacccatatgcttcanatccgcattaaaaaaatctnctatccgcagtcatctgttcataggaaaagatctggctttacttttagattatctcagatccagcctttnacccaattgangtgtgcaaaagtaagtacccccccacctctgttcctcacggttttnctgcaaaggacccaccctccttgaacttcagcgtccatcacaatgtccccatcatcatcaaacctgtacaagccagtggcgatcctaacattgtagaagttgatagcatttttgcaagtggagggagcacttgtgtttctccacgtattgctgtcttgattaangcggttgtcaactctgtaaagtccctntacttcaatagggtatggtaaatgagtttgattctgggnataggttgtgggttgttataaagaatgct

SEQ ID NO: 132546 - DNA, 514 bp, Arabidopsis thaliana columbia
  unsure (1)..(514): unsure at all n locations
aactcaagaaggagtgaaatcaacacaaaacacaatgatgatccttaggctggctctagccatcgtnatctccacctatgcaaccgcacaaccagcatcaacatcgtcgcttgtaacctatatattcggcgactcgctaaccgaagttggtaacaacaatttcttgcaatattcgctagcaagagcagactttccatattatggngttgatttctccggtggtaaagctaccggaagattcaccaacggtagaactatcggcgatatcatatctacgnagctcgggattctatcgccaccaccatatctatngttatcacaaaanggcggntgcattttctcaagtgggntaaanttacgnattctgggaggaggctgggaattctcaaatgaaacctgggaattttnctttcatccaaaaggntaacctttcaaatggtccaaataaattngtttcaanggaaanctnaanggnggtttttttggggnggaaaatcggggggttggggnttng

SEQ ID NO: 132547 - DNA, 390 bp, Arabidopsis thaliana columbia
  unsure (1)..(390): unsure at all n locations
ggagcaagagggagaggcagaggaagaggtggtgatggatggagagatgataagaaagaagaagaaggtgaacaagaggctatgcgtatatttcctggagattcanctgatggagagaagtttnctgagaaaatgggacctgaattgatgaaaacncttncggaaggttttgaggaaatttncgaaaaggcgttgccttctactactcacgatgccattatagatgcttatgataccaatctcatgattgantgtgagcctgaatacattatgccagactttggatcaaatcctgacattgatgagaaaccaccaattgtctctncgtgagtnccttnnggaaggtgangcctttcataagtggcttacggagggnatcaaaggntcnna

SEQ ID NO: 132548 - DNA, 579 bp, Arabidopsis thaliana columbia
  unsure (1)..(579): unsure at all n locations
aggaaactctgatgatccagagagtacaagttacagaagcaaggaagaccataaactgtcaaaggtggatgttgatcgatgtaactttcctgatcaacttgaaagtgcaaaggcgaataagaatagtaaaccagggtatcgaacgagatatttcatcatcaaaagtctgaattacgataatattcaagtttcagttgagaaaggtatttgggctactcaagttatgaatgagccaatattggaaggcgcttttcataaatctggtcgagtgattttaatcttcagcgtgaacatgagcggattcttccaagggtatgcagagatgttgtctccctgtgggtttngaggcgagaccagatatggagtcagggaggtggtaaaaacaatccctggggacgtagtttaaagtgaaattngttcgggttgagtgaatttgcctttcagaaacnacttcatctcaaggntncctttgaatggtnncaagccttccaggnttgccgggntttcccggnttnccntnaggttncggggaannctttttgaccnccttnntcnaanacctttnttcgggttctgana

SEQ ID NO: 132549 - DNA, 584 bp, Arabidopsis thaliana columbia
  unsure (1)..(584): unsure at all n locations
cacaatctcaagattttntacttcttattacaaagattcaatctncttgtttcttcttgcaaccatgagtcttcttgcagatcttgttaaccttgacatctcagacaacagtgaaaagatcatcgctgaatacatatgggttggtggttctggtatggacatgagaagcaaagccaggactctccctggacctgtgaccgatccatcaaaacttccaaagtggaactatgatggttcaagcactggtcaagctcctggtcaagacagtgaagtgatcttataccctcaagcaattttcaaagatccattccgtagaggcaacaacatccttgtnatgtgtgatgcttacactcccagcgggagagccaatcccnactaacaagcggcaatgctgcggnttaaatctttgctaacccctgnatgttattgctgaagtgccattggtattgaatcggacaagnataacttttnttgaagaaggatgtaacttggcnntttggatggcccattggngggttccttgggcntaaggnncnantttnttnagnattggggtncaaaacttttgnangnaaattttatgc

SEQ ID NO: 132550 - DNA, 591 bp, Arabidopsis thaliana columbia
  unsure (1)..(591): unsure at all n locations
ccaatagatccagtgacgccacagattctctctctgttaacgccacttctccacctctcaattcgaattccaaaaacggaactttacaaacaccggcgccggaaactcacactccggttgctaaaaacacaacctttgagtctccgatcgtaaacggaaccaacccagatgcaaagaacaacacttcatctcatcctctgctttcagacaaatcttcaacgacgggatcgaataatcagtcacagaccaccgccgatactgaaaccgtgaataganaccaaacaacatctncggcgccgtcgaaagcacccgtgtcggtagatctgaaggccaatttncagttccaattcatcaactgnttcggctacancgnaaaaggagnctnaaanccgttgattttggtttcgtcggtgaggaagaggtcgtggaattggggtgaatctttnagnattntagtttttcgncnggtgaatgggtcaaagntgnttttgtatccgctttntaaaccttgggttngggnattttttcggtgancagttcaattgttttccaacggggggcccgcaaaggtttccgaattttngtgggggc

SEQ ID NO: 132551 - DNA, 516 bp, Arabidopsis thaliana columbia
  unsure (1)..(516): unsure at all n locations
gtttagagaaagctgaagatccgattttaacttgttgtggtcatttgtnctgttggggttgcttctatcagttgcctttaatttacttaaacataaaggaatgtccggtttgcnatggggaagtgactgacgccgaggtgattccgatatatggtaatggagatgattgtaatggtactaaaccaaagttagaagattgtggtattagtctacctccaaggcctaatgctaaaagagtggaaagtgttcgtcaaaagatcataaaccgagggaaccctttcttccctgggcacgnaaacggaagcaatcgnacatattaggagnactattgnattccataggnctacaagctttagcttcaaggcgatgagttttnggtttgacaaacataattaaacaattggnggggnccaatggtggnccaacaaccaccaccaccaacattanncatcatttatcaccngcctttttgnccctttgngggttttttccncccntntgttactttccccnggc

SEQ ID NO: 132552 - DNA, 509 bp, Arabidopsis thaliana columbia
  unsure (1)..(509): unsure at all n locations
caccgccaccaagacgagaagaatatgacgacggaggcgaattctacggcggaggagggttatagtgtacagagagacttttggcgtcaagcggcgaaatccgatggtttcgatttagagaacatctcacttccaccaggtacgaatggaattgtcatgggactgattccctacgactntcaacgtgcaaggcattatccgtttcctgtcttggtcaaactttatgctaagtttgggcttcatcgttacaatatgttgaaggggacaagcttccagctcgctaccntaatgaaattcaacatgttaccgnactatatttnctctttctacatgactcttgcttgcacatgatccccgatccagcttgcttngctcatcgnagaaaaccttttcaggttcggagtttgatgaacaacaattttgcagttttggtataaccngntccatttgtntgccntaanacggnggggcctttctttaagggtccncnggnnggcnnttnatgccnc

SEQ ID NO: 132553 - DNA, 490 bp, Arabidopsis thaliana columbia
  unsure (1)..(490): unsure at all n locations
gatacngccaagtttttngctttctcagctcttccttcgatggttggtgctttgaatatcatgtcagagactggtgatttatgtgtagancttcccaaagatgatccctttnatcaccacaaaaagaagttcttgagttgcaaaggtttatgcgtaaaggaaacattgaacctcagtggatcattatctcaacaactgttgaatgcngcattggaaaagttgcttcattttggacgaatagttaatctcgataaggtggaagtttactttggtgaggatgcttgcacncctgcaggaatttacagtgttagaaacggaatctcagctctcaagctggatcctttcgntttataccggtttcttgtaagntngcaaaccacaagttgntacctttnaggtnttcggggtgctttaaagggtggatcaatggggtttttggggctgaaagggggaancctagngtnttttnnnancttttggtcgggaaggg

SEQ ID NO: 132554 - DNA, 527 bp, Arabidopsis thaliana columbia
  unsure (1)..(527): unsure at all n locations
ggtcttgcacctgatagtcgaactctccgctttttgcgccaggaaatcgaccttcgatatnctgttccactcgggttttatcgtgctgctctgaactttggtatagctgggggaatcacatttccatggggaagcggatacaagagcagagcttcttgtgtacctganaggttcttcttaggtggaaacatatcgcctgtntgttctttgggaggaccatctgcattatggggattcaagactaggggattgggtcctaacgaaccaaggagggaagtacaggacgatgagagtggtgacacatatgaacgggattttntgggaggagatgttgcggttacttcatttgcagacctttcttttgatttcccattgaaatggttcagagacagngggatncacggacatgtgtttgcatgtnccgggaatatggcggattatcagggaccaagntaggacttacagtccaagttttggngcattcagaacnaatttgtcagaatcgtgaccactgctttngatgngtc

SEQ ID NO: 132555 - DNA, 548 bp, Arabidopsis thaliana columbia
  unsure (1)..(548): unsure at all n locations
attttttcaaacnctaaaatcaatctctcaaatctntcaaccgtgatcaagatgcagatcttcgttaagactctcaccggaaagactatcaccctcgaggtggaaagctctgacaccatcgacaacgttaaggccaagatccaggataaggaaggtattcctccggatcagcagaggcttatcttcgccggaaagcagttggaggatggccgcacgttggcggattacaatatccagaaggaatccaccctccacttggttctcaggctccgtggtggtatgcagattttngttaaaaccctaacggggaagacgattactcttnaggtggagagctctgacaccattgacaacgtcaaaggccaagattccaagataagggaggggtattcctccggaccancagaggttgatcttngccggaaaagcaactttagggcggaagaacttttgcggggttncaacatccaggaggagttttgggtnnattttggctttnggctncgttgggggtnttaanttttcggaaagcttttccggaannctta

SEQ ID NO: 132556 - DNA, 527 bp, Arabidopsis thaliana columbia
  unsure (1)..(527): unsure at all n locations
gtaatatcaatcgatcgccattctcgacatttctctctctcaagctagtctaaagtttctncttatctccttcctccgaccaaaacttcgacttctctcttattttcaccctcagagagtaaccatggatgccttgacctcgagtttggttcgatctcccatcgtaccatcgagaacttccgacaacggttctggatctatgttccttaccgccagtggccctggattcacgcgttctggttcttcaagacttcaacttcgtttaaggcaaaacgcgtctgctagatcctcaagatcattacagagcttaacaacggcctgctaaaaactcggagaaggttttgtgggntnagagcttctttcagncgncttaaatggatggcttcaatctgggttcttttcccccaaaancgnntncggttccgttccagctgcaaatcggccttccttggcnaagttttttgntncaanaattttggggngggccaatccnaaannttgngccntcnaggttttttnacaagaaa

SEQ ID NO: 132557 - DNA, 531 bp, Arabidopsis thaliana columbia
  unsure (1)..(531): unsure at all n locations
gaagaactttaccttatggcagctgataagtttgagaggtgggtttccatatatgtntttaacatacactgccagtttcctgattccccatgggacaatgtgtagccagcttgaccctgcctgtttcaagtatggtaagcagcagcatgagacaacagaatgttatgagctacaatatacggttcgaccgatgacttccccttcttacagaaccaatgtcccagaagtgagcaccttcctggagcttgtatccctgtgtcatagccttggntcgataccccatgaggctcattgaaagtgatccagtacttcactctatctccaaatgctttgaaaacagtttggagaaggtgnaagaaggaggagggattttcacctgggtaagctgaagaagnttnttcccgnntacaaaaccccatnttgggaaaanttnncncgggtggtagngtttttgaggnaacattgatcaagggggtaccggagaanacggcggnggaccggnaacaggncntaggcggggttttnttaaaa

SEQ ID NO: 132558 - DNA, 396 bp, Arabidopsis thaliana columbia
  unsure (1)..(396): unsure at all n locations
ctttaccngcttgattatctgaagtgaagcatcagtnagttgaaactatttggaagctgtctagccttggaaacaagcttttgtaatgtcactctttgctctaaatagatattnctngtnatgctcatatcttgatctaataatatnagattttngtcttacgttcagcatccaaggtggatccattgcatcctgacttcttcgagttcacgggtcgtgtgattgccttagctttnatgcacaaagttcaagtgggtgtnctgttcgatcgtntttncttcttacaattggccggactgaaaatatctttggaaggtattaagggcaccgatcggaattatngtacaatagctgcaaacagntttcttnggaaatgggtcccagagtttttcggnt

SEQ ID NO: 132559 - DNA, 382 bp, Arabidopsis thaliana columbia
  unsure (1)..(382): unsure at all n locations
aggagagaagagagatagacgatgagaccaaaacgttgacgttaagaggacttgagggtcacgtgatggagcagctcaaagtgtacgacgtcgtctaccaattcattcccaaatctgaggatacctgcatcggcaaaatcactttaatatgggagaagcgcaacgatgattccccagaaccaagcggctacatgaaattcgtcaagagcttggttgctgacatgggaaaccacgttagcaaaacttaatcatcattcccacagtcgtcgtcgtcgtcatcatcatcatcatcatcatcatcantatcntgatntanaaggttaagnatgnatttnagtataattanatnggggtcnntgtgggtccgttcacantcttannt

SEQ ID NO: 132560 - DNA, 483 bp, Arabidopsis thaliana columbia
  unsure (1)..(483): unsure at all n locations
attcatcgttnttgcaatcaacggctacgattgcaagatagtccaatttatatttggagattcattgtctgatgtaggcaacattaagaatctacctaggagtttagcgacggcgaatctncccttttacggtattgattttggcaatggtttgcctaatggaaggttcactaatggccgcactgtttcagacattataggtgataaaattggattgccaagaccagtagccttcttggatccatcaatgaatgaagatgtaatacttgaaaatggagtgaactatgctttcaggaggtggtggnatcttgaacgnaantngtggttatttcatcccaaagnattttccgctgtggaagcaaatagnattattncccanggggcacaaagatgtnagttgtngcaaaggtagggganaaaaaggagcaggcaangttctttnaaagnttctccgatacggccgtccnctttngggaacaaatt

SEQ ID NO: 132561 - DNA, 579 bp, Arabidopsis thaliana columbia
  unsure (1)..(579): unsure at all n locations
aaaatggctccgagatcagattcacaaaccctagccaccggctccgacgaaaatgaatcctcaatcgatccgatcttccacattctccgtatcatccctttctccttcctccgaccaccacgtcttcgtctcaagctcccttccttcactctcccatctccaatgactgtcttctcactgattctcctcacttacttcctcgtcgtctccggtttcgtctacgacgtgattgtcgagcctccaggtatcggatcgacacaggatccaatcaccgggtcagtaaganccgtcgtgtttatgtcgggtcgggtcaatggtcaatacatcattgaaggtctttcttncggattcatgttnggtactcggtggggattggaatcataaatgntgggatctggcaattggntaagnaatcgagctaaggaggtgttaaaggaatcttnttgaacagctggnggtttcctccattgggnatgcttanggtatggggattnncntaattcggattaagnncccnggnnattccggtagggggtnggtaattttgggttaannctgaaatggncttnggtaaagccg

SEQ ID NO: 132562 - DNA, 504 bp, Arabidopsis thaliana columbia
  unsure (1)..(504): unsure at all n locations
tgttagattaccaaagtatcctcatttctctcaacaattgtaatgctgtcttctgttgtttggataatcntgaagggtacgatgaggagaaggaagtggatttggaggtgagaggagctattaatgtggtggaagcatgtgcaagaacagagagtatagagaagattgtnttctcatcttcgttaactgctgcaatttggagagataacattggaactcagaaagatgttgatgagaagtgttggagtgatcttgacttctgtctcaaaaaaaagttgtggcatgctcttgcgaagacacagtccgagaaggcagcttgggcattagccatggatccgtatggtcaacatggtttcggttaacccgggcctcatcggtggncccatcagtggctcaancacaacccaagnccgnccatggtttaccnnaaaagggnttcacaaatttntganacgggtttntnagctncgagatttnatttttnggggtntcaaatngggnntt

SEQ ID NO: 132563 - DNA, 308 bp, Arabidopsis thaliana columbia
  unsure (1)..(308): unsure at all n locations
aaacattataatgtatggttctccactttnagcaatgaaaacagtagtnacaacaaagagcgtgaaatacatncngttttggttgtngtttttcctcttcttaaacggcgcgatttgggctgtctatgctttactccaacacgacgttttcttactcgtgccaaatggagtggggtttgtntttggnacantgcaactnatactttatggaatttacagaaatnccaaaccggttggtttaagcaacggtttaagtgagattnctcaagatgaagaggaaggcctcacatcacgngttgacctctccc

SEQ ID NO: 132564 - DNA, 479 bp, Arabidopsis thaliana columbia
  unsure (1)..(479): unsure at all n locations
ctctcgtctctatctttctctcacactcatgggtcttcctacagatttcaaagagcttcagattccaggttacgtactaaaaacactttacgtcatcggtttctttagagacatggtcgatgctctttgtccttacatcggtctaccaagttttcttgaccacaacgagacctctcgacccgacccgacccgactcgctctctccacgtcagcaactcttgccaacgagttaatcccggtggttcgtttctccgatctcttgaccgatccggaagattgctgcacggtttgcttatccgattttgtatccgacgntaagantagncagctancgnagtgtggacanggggtttancaatncgttgtttagaccgntggntccgttgantgtaataaggtaacgngccccnttttttnggaacgggttttnacgggggnaaaagtcccggcggtttntttgggnnttcaaaattggtttg

SEQ ID NO: 132565 - DNA, 480 bp, Arabidopsis thaliana columbia
  unsure (1)..(480): unsure at all n locations
acatcagatcagaagattttggtttcaagctcttcttctacgattccccgaagcttctggattganatctctctctcaagcaatggcagctacaagtgagaaacagaacaccacaaagcctcctccttctccttctcctctccgcaattccaagttttgtcagcccaatatgaggatcttnatctctggaggagctggcttcattggttctcacttggttgataagcttatggaaaatgagaagaatgaggtggttgttgctgataactatttcactggctcaaaaggaaacctcaagaagtggatccggtcaaccccagggttgaaccttatttcggtcacggtgttacccgagcctttntttgatcgngggtgatncggntttacccanctttgccttgccccggccttttccnaattnttntttcaaaantncaaccccngttnaggncanttaaaggcccattnggnttngggaac

SEQ ID NO: 132566 - DNA, 555 bp, Arabidopsis thaliana columbia
  unsure (1)..(555): unsure at all n locations
cccaatttgtctgtctctcttttgttttctctgctaacagatctctctaaatatctgtnacttttgttcatatctttttacttttcaaactgctaattttcctttcgcttcttctattaataacaacactctctctctcagacttctttncttttttttctacggcgttgattcattcgcaatgacctcagtttctgtgtaccataattgacctagcagattctgtttttaatggtagattctgacccggtggaatttccgccggagaaccgccgtggacagctcttcggcaaatacgaggtcggaaaattggtggggatgcggcgccttcgcgaaagtntaccacggggagggacacagcgacggggtcagagcgttgcgatcaaagtggtgagcaagcaacggctncagnaaggagggctcaattggcaacattcaggggngntcgtataatggaccgtnttggcacccttnnatgngngctnttcgnggcctgcaccaaatccagntttttngtatggattgcaagnggtggntttngcaaagttcaggagc

SEQ ID NO: 132567 - DNA, 553 bp, Arabidopsis thaliana columbia
  unsure (1)..(553): unsure at all n locations
agctgcagacaagtttcaaagttcaaacttgtatgttaagaatttggntcctagcatttcagatgagaaacttaaagagatcttttctccttttggtaccgttacatctagcaaggtgatgcgggatcctaatggaacaagcaaaggctcaggttttnttgctttcgcaactcccgaagaagcaactgaagctatgtcacagttgagcggtaaaatgatcgaaagcaagccactctatgtggctattgcacagcggaaggaagacagaagggtcagactacaggctcagttttcccaagtgaggccagttgcaatgcagcccgtctgttggtccccgcatgccagtttatnccccgggtggtcctggtattggncaacaaatgttctatggtcaagnccctcctgccatgattccttcccagcctgggtattggtnccacagcagcttnttcctgnattaacctggtgggggcctgnnccagttttnatgcctntggtnagccanaanaantcctggggggancgccttggggntcaanatncanagaaatta

SEQ ID NO: 132568 - DNA, 453 bp, Arabidopsis thaliana columbia
  unsure (1)..(453): unsure at all n locations
atccgagaaggttatcagtttgactatgtatttnattggacaatattgaggtatccacagttcggctccagttccagctcgaattccaaaccaagagtaagtccattctgaagctagctgtatgtgcagaattnttatcattttgaatagtgtatcaaccttctcacgcttttcctgttccattagccaactttaagaccanctatgaatattccagtaccatctgncgacaaagcggnaaagcctccaattggacaggacagccgtgagaggttctcaggtgttttcgaggnatacaccagaagaaatggctcaggaaccggcgttcaagctgatcagtctagtagncccnngnaccctcngagaatnttcttgcatccaaagggcacggaaaaaccagggggggncanaattttttatttnggggcctnngtttgtcaangaaaagaaatt

SEQ ID NO: 132569 - DNA, 457 bp, Arabidopsis thaliana columbia
  unsure (1)..(457): unsure at all n locations
gcggcacagttagataatgtggagttccttgttgaaagctgttcagtaaagagcatcactgataaatccgtagagatagagttcatttaccttggttcttcagcttctggctcttcaaagtcagatgccttattcaaagtcaatgtgacatatctnatctatggttccggagatatcatcaccaattggtttgtaganccaaactctgatcttccaccgctaccacgtgtaggtatagaattccacattgaaaaaacactggaccgtgtagaatggtatggcaaaggtccctttgagtgttacccagacccgnaaagcagcagcccatgtgggggtatatgnncacaaatgttggggncatgcatgtcccnnatattgttcccggggaaatggnggtngnacanatntttggggggnaacaatccggaacaaaaatgggtttgggnttatancntnc

SEQ ID NO: 132570 - DNA, 363 bp, Arabidopsis thaliana columbia
  unsure (1)..(363): unsure at all n locations
gaacttcattgatcatactagtaacattggatggaaagcatcacaaagagcaaaaccggtgattatagatcctggactgtatttnancaagaaatctgatgtttttngggttacgcaaagacggagcatcccaacagcattcaagcttttnacaggctctgcttggatggcgttatctcggccattcgtcgactattgtatatggggttgggataatctacctcgtacggncttaatgtattactcgaatttcctctcttctccagaaggntatttncacactgttctctgcaacgctgnggnattcagaaacacacggtaatagcggcctncacttcattattngtgggggcnatccggcct

SEQ ID NO: 132571 - DNA, 215 bp, Arabidopsis thaliana columbia
  unsure (1)..(215): unsure at all n locations
cttttgaanatcaacaacgattttccccagctgacaagtngtcctgggtctnctggtggcactcaaggacatctaggctctttaaggaaacaaggtttaggagttccacttgtccaacaaaaccaggagttcagcatccaaaatgangactttcctgcccttcctggatataanggtggtaattttnagtatcctatggntttgcntcaaaaaga

SEQ ID NO: 132572 - DNA, 363 bp, Arabidopsis thaliana columbia
  unsure (1)..(363): unsure at all n locations
caattacagagatgctgtcacagttagtagtctacttcttgatagaagactacactaactactgggtacatagattctttnatagtaaatggggatacgataagattcatcgagttcatcacgngtacacagctcctataggatatnctgctccttatgcacattgggctgaagttttgcttctnggaatcccgacgtttatgggaccagctattgctcctggncatatgataaccntttggttgtggattgctttaaggcaaatggaagctattgagactcacagtggntatnattttccatggggtccaacaaaatacatcccnttntacgggnggtgctgngtaccatgnctttcaatca

SEQ ID NO: 132573 - DNA, 495 bp, Arabidopsis thaliana columbia
  unsure (1)..(495): unsure at all n locations
cagttatagggatgaatcgatcaacgatgatgattataaggattgaagagtcggcgattgttttgtctctgctcaaatcggatctccggccgatggaagacgttttatcggaattcgactctaagttcgaaagcgctcgtaacctcagtgtctgcaattctctttccatgatgttgcaggatcagcagatgtttaagaatactgaacgtctaattgcatttggtatcatataccagtgttattcttcacagaagccatctttcaacccgtttttatctgaaatgataagtgctgcttgtaatgaacagctggaaaagtctnaaagggcatttnttctccacctgttacaatggnataggtacaacaacgngnaagggttctcaaaacctcagctgttgnttatatcanancggttgncccnncaacccatgtttcccggancttggggggctccacggggntttgggggcaaagccgtcctggccctctggttta

SEQ ID NO: 132574 - DNA, 514 bp, Arabidopsis thaliana columbia
  unsure (1)..(514): unsure at all n locations
tgtattcattgatgagattgacgctgtgggtaggcagagaggagctgggatgggaggaggaaatnatgagagagaacagactattaatcagctgttgacagagatggatggatttnntggcaactctggtgtgatagttttggcagctacgaataggccggacgttcttnattcggctttgttgaggcctggaaggtttgatcgacaggtcacggtggataggcctgatgtggctggcagagtcaagattcttcaggttcattctagggggaaggcactcggtaaagatgtggactttgacaaggttgccngaaggacccctggtttcacgggtgcctgacttacaaaaccctgnatgaaattaaagcggcggatttctttncggctaggcgtgaactttaaaggnaataaagcaaagggntgaaaanctcctgaatgctntttnagagggntccaatttncttggncccccnggaagaagnaattccangttttctncttaaagggaagnaag

SEQ ID NO: 132575 - DNA, 533 bp, Arabidopsis thaliana columbia
  unsure (1)..(533): unsure at all n locations
cttgtttttgagtttgcccaaaatggatctcttcatgatattcttcacgggagaaaaggtgtgaagggagcaaagcctggtccactcttgtcgtggcatcaacgagtgaagattgctgttggagcagcaagagggcttgagtatttacatgaaaaggcaaatccacatgtcatccaccgtgncataaaatccagcaatgttctaatctttgataacgatgtagccaagatagctgactttgatctctcaaatcaagctcctgatatggcagcacggcttcattcaactcgtgttcttggaacctttggttaccatgcccctgaatatgcaatnactggggcaattnagtgccangagtgacggatacaagtttcggngttgtacttcttcgngcttcttacaggtcggaaggcctgtttgtncanacaattgcctcgnggccagnaaagttttgtcncannggggtnnnccaaggttaggggggcaaaggtaagnagtntntttttaangccttgggggggttnccccccaaa

SEQ ID NO: 132576 - DNA, 368 bp, Arabidopsis thaliana columbia
  unsure (1)..(368): unsure at all n locations
tttccaattgggagaagaagaagacgacgatgaagcatttatctgattctgggtctgttgaaaatcaaaattttcttgagaactttttttgaagagttatgattgcattagctgcttctncgttggggaatacaccgattgcttcgtttaaccgtcattttagattccggttacatccacgnaaccctctgatacaagcagcggtttcaccttcgtcttcttcntgttntcctactgcttcatctggctttnatttgagttctctcgaatccgncattaacaaggaaggtagtaatggtgttaagggaagctcctcgntaaaattgagtnaaggaagggttgggctaanaaatggngntnccannccg

SEQ ID NO: 132577 - DNA, 531 bp, Arabidopsis thaliana columbia
  unsure (1)..(531): unsure at all n locations
agaccaaatcaccagaaacaaaacaaaaatgtatttcgccgccatagcttcttcacgacaaagctttttgtcaaacaatttcagtttccaacacagttttaaacccaaatccaatgttaacctcactcgtcctaattcaatctgttgtaaatcttcacaccacgacgacgaaactgattctnctcggaaaaatgaaaatcagctggcgaagttggcaatcgcgacgctagcggttggcgttttggctttgggaagtgttggggatgcgtttgcgggccaaaagcggtggaagaatcggcgggtcaagcgtttcggtcttcaagctcctcgtccttcctcccaagaatttaacaatcggttcaaaggncccaacatctncggggaatccntcaagggttgcanccancttttganccgggtnggcttattggggtaattgggttancgggggggtnacggggttggtcaacccnttttcccntttttttncccctgggncctnnnggttgnnantaaggtttttggnggtgg

SEQ ID NO: 132578 - DNA, 480 bp, Arabidopsis thaliana columbia
  unsure (1)..(480): unsure at all n locations
cacaaactccatagctagctagagagtaaaaagaacaaagatgtcgaaagaagtgagcgaagaaggcaaaacccaccatggaaaagactacgtggntcctccaccagctcctcttctcgacatgggtgagctcaaatcctggtctttctacagagctctcatcgctgagttcatcgctacactcctcttcctctacgtcaccgtcgctactgtnatcggccacaagaagcaaaccggtccttgtnacggcgttggtttacttggtatcgcttgggctttcggtggtatgatcttcgtcctcgtctactgcancgccggtatctctgggtggtcacattaaccccagctgtnaacttttcggtctgttctttgggcccgnaaaggtctcttttgggtgcagagnntttttnggtnanatgnnaagccccaaggnttttngggcccattttnggggnttggggtttcggtnaaaagttttca

SEQ ID NO: 132579 - DNA, 486 bp, Arabidopsis thaliana columbia
  unsure (1)..(486): unsure at all n locations
atagattatattctattccttcagaaaatttttatcgtcctaaaatcttcgtagcctgcaacaaagaaagactaagaaagaactaaaatattttncttcgtctaattacttttttcctttggatttaattctcagccatcgncgccgttttcggcgggtgtaaaaaatgaagaaccgtaggaaacgcggtggtttaagcagtgtcgacgtcgttgtttcatggagaagattttnccgatttgtttctttgttcgtcttctccttcgttctcttctctgctttcttcaatcttcttaggcaaaattcgaccggtggtgcggtcttcggtcaaccgcagttccttccgtgggtcttgtnanccggtgggttnaagggtgatcaacgnntnccatnnaagcaaagtttgaagnttncccgggcccaaanaattggantttccctcaaaaaaaacccnccccatcntttctcngggttttttnacggaaa

SEQ ID NO: 132580 - DNA, 478 bp, Arabidopsis thaliana columbia
  unsure (1)..(478): unsure at all n locations
aaattccttgtcgcataagtagcgacctgcacgaatggtgtaacgactgccccgctgtctccgacatggacccggtgaaattaaattctccgtgaagatgcggagtaccaacggctagacggtaagaccccgtgcaccttcactatagcttcgcagtgacaaccttgatcgaatgtntaggataggtgggaggtcgtgacatagaaggaccaatcctgaaagaccactctttcgtctaagggtgcctaaccgccgnaccgagaattcggggggaggcgggacactncgaggtgggtagtttatctngggcggatgctcctaaagagtaacggaggtnttccgaaaggtaaggctcaagcttaagattnctncctcgtaaagcntaaatggttttaagcctgccttacttntaannccgcttntttgaacanaggcggaattnggccntngtttatnccgggngccccntttgaaaggg

SEQ ID NO: 132581 - DNA, 529 bp, Arabidopsis thaliana columbia
  unsure (1)..(529): unsure at all n locations
aaatcttggaactcaagaaacaacaatntcggagatggccggagattcttcaacatcagaagataaaatccataaaccaaaccgcgagaggaatntntccggcgaacttgacgtcttcgaagccactcgatatttttccgacttcaacgaaccaacgacgatcgantactcaagaatccaaatacagaaacaaagcattgttacagaaaatcgacagaagagagtacaccctgagacagaagaacacctccctaaacctagagtcgtcgtcataaagccgcagaagaaagagatgacacgtggcggcggtaagaagcttaccagtttcttgaactcttcttctttcggtcagctggtcttaagnagnagtcaaagtcagcgccggaggtggagncaccacgggtnggaaagggtttnggngggaagaccttcgtgggtgcttttnanacggcgganatnntttngctttttanccatttcccggcgggttggggttttaaccggggtttagaaaacntttttttnnnaa

SEQ ID NO: 132582 - DNA, 442 bp, Arabidopsis thaliana columbia
  unsure (1)..(442): unsure at all n locations
gagaggaggacaagtgatttacgcgggtccattgggtcaaaactctcacaaggtggttgagtactttgaatctttccccggagtgtccaagattccagaaaagtataacccggccacttggatgctcgaagctagctcactcgccgctgagctaaagcttagtgttgactttgctgagttatacaatcaatcagcattgcaccagcggaacaaagcgttggtnaaagaactaagtgtaccaccagcaggagcatcagatctttactttgctacacanttctcacaaaacacatgggggcanttcaaatcatgcttatggnggacaaaaggttggncggnanctncnagntcttccanacctncaaaatttntcccctttnttcttttacaacttggnnacaatcctcttcttttnttttgggtacccccctttttgggaaaa

SEQ ID NO: 132583 - DNA, 505 bp, Arabidopsis thaliana columbia
  unsure (1)..(505): unsure at all n locations
cgcgacggtggagttttattgggcgccatttttggtggaatcaaattcagacgatccggaaaagcacagtataatcgaccgtataataatgccagagtccatcgagaagcatggagtcaactggataggcgttgactttcttgtcttcaatagttacatctggtggatgaatactgtctccatcaaagtcctgtaagtagtaatgttatagtatacacactcacacatacttatgtattgaatatcctaggattgaagatttgtgatgatggaaacagacgtggatcgttcgatgatggggacacagagtatgatgagatcaaacggccaatagcgtacgagagggtgttgaggacattgggagattgggtggaccataacattgatccnctaagtacaaactgntttcttcatgagcatgtttcccttcacatcaagtntaaatttctcccatccntaacattttttttttgaaccaaatgttntattnatgtgncccctttgc

SEQ ID NO: 132584 - DNA, 508 bp, Arabidopsis thaliana columbia
  unsure (1)..(508): unsure at all n locations
cgacctcaaaaatctctcaacaacacacaaaaagatccaaaatccaaaatcatcctctccctccatttcggacgaccctctaaattcttttgtctaccggaaaattttcgattggttccaaattttctggcgcctaatttatcgatttggttttctattgtcattttcttttcacaggtcactcgattttntccatttnnttttcatttgggactctcttctcgccgtcgccatcaccggagataaattccgtggtgctgcgtttggccttaccaaaatttgagatctcaattgaagnaagnaacatagcgaagaagaagacggtcanggaattgaaatttaggattctggttatctctctatcaancttcaattttttttaatttnnattgnttttacccnaaaaaaacaaaaaacttttntnccanggcgggtacgnttaggttcccgggacaaattnttggggggaacgggaaccggnnagggttnaaccatagggtttttnccg

SEQ ID NO: 132585 - DNA, 536 bp, Arabidopsis thaliana columbia
  unsure (1)..(536): unsure at all n locations
ggcaataatatctcagttttttgctccattaccatctctcaccggaaccctaaccctaaccggtcgttcttttctccctctaaaccttgatacccaattcccaaaacctagactttccagggacagagccgccacactcgtactccaatccaagggtgatgattccgtcgatgcatcggatcggataatctcagccgtctgttacttctacccattcttcgatgggnttcaatacggnaaattcatcatcacacagtaccacccttttcagattctcatccaacctttgtttnccgncatcagagctttcaagagntttccctttcaatggggtttcttatcttcaatcaactctctacttcggtcgttgtgaggaacccctaatttttangcagggtacggtcaggttcaacaacggatgcagggcggtttgttnctttnatggtggttggtggantttncccgggntttgnttttaggnggggggttttnnttcnttgnngggtgggggtttgggtttanaaantgggggntta

SEQ ID NO: 132586 - DNA, 432 bp, Arabidopsis thaliana columbia
  unsure (1)..(432): unsure at all n locations
gaaagaaaaaaagaaaacaacatgacagaaaattccgaaaaaaacgatcgtttaaacgatctcacgactttnatctcgacgaagacaggagtgaaaggactcgtcgatgccgaaataaccgaagttcctagcatgtttcatgtcccttcttctattttatcaaacaacagaccttctgatatatccggcttaaacctcaccgtcccaatcatcgacctcggagatcgtaacacatcttcaagaaaccttgtcgtttcgaagntcaaagacgcagctgagaattggggntttttccaagtggtcaatcatggtgttcctttaactgtttcttgaagggntcaaaaggaaagnttttcgcangatttncatgtaccaagggacccnnagggtganggnttcaannatctttcctttccggntnncaaacangga

SEQ ID NO: 132587 - DNA, 293 bp, Arabidopsis thaliana columbia
  unsure (1)..(293): unsure at all n locations
gaaatgcgatacttggtgtgaattgcagaatcccgtgaaccatcgagtctttgaacaaggggtcacgngtaaaantttcatacaacgttgaatctntgggttcttccttataccttgtgatagcccaaggtgtggatgggctctctnagtgggtacaagatccgncgggtccagacactacactntcgtggcatataatctctgatagtggttatattgagcaggacataactaagtcgtcgagttattatnttgcagtaggcaacgtataccnnnatgaagtnaaggcgacg

SEQ ID NO: 132588 - DNA, 447 bp, Arabidopsis thaliana columbia
  unsure (1)..(447): unsure at all n locations
agaatagcgggatttctattcgagcctattcaaggcgaantggagttattatncctcccgacggttacttgaaagctgttagagaactctgcacaaaatacaatgttttgatgatagcggatgaagtacaaagcggtctggctagatccgggaagatnctagcttgtnattgggaagaaattcgtcctgacatggtgatacttgggaaagcattaggtggaggagtaattccagtaagtgcagtgcttgctgataaagacgtgatgcttcatataaaacctggtcaacacggaagcacatttggtggtaaccctttagctaggtgctgtagcctatggcttctttagccgtatccgtggaagaaaaacncgtttnaaagttcancaaagtttttggnggggnanctcnggtttcaatttgnttnaanncaaggaaacaatttnccna

SEQ ID NO: 132589 - DNA, 521 bp, Arabidopsis thaliana columbia
  unsure (1)..(521): unsure at all n locations
ggagaaaaagagagtcaagtacttcattgttgatgcattcgctgaatctgccttcaaagggaatccagctgctgtttgctttctagaagacgataacgagaganacgacgcgtggcttcagtctcttgccaccgagttcaatatctccgagacttgtttcctcactccgatcatcggagacttgcctcgcttccgtctccgttggttcactccagtcgctgaggtggatttgtgtggtcatgcaactttagcatctgctcacgttctcttctcaactggtttggttggttcanagacagttgagttcggcacattatcagggattctaaccagctaaacatctcaaaaattgatgatgatggagaagnaatcaaagtatcgaatttggttttccctgtttgttccaacatnttgaggcaacctcaatttatggnggnncnccctttgtttnccaaggccttnaattgggggctccatttttgntgtnaaagccccaaagaaancccnnccgttgtgntttc

SEQ ID NO: 132590 - DNA, 480 bp, Arabidopsis thaliana columbia
  unsure (1)..(480): unsure at all n locations
tgcagattgccctcctccccctcctcctcctccntgctcncctccaccttntccccctccatgccctcctccaccctctcctcctccaagccctcctcctccacagcttccacctcctccacagcttccgccgcctgcaccgcctaaaccccagncatcgncgccaacacctgatctaccgtttgcgagctcattattaaagaaagtctatccagttctccaaagatttaaggatctagtcgcagatgataaacttaagtnttgggaaggccccgncatttgcaacaaatacctcggactcaaatgnggcatttttccgaaaacaaagcatctcgnactngcgagcgtccagtttaatgggttaaacttgagaggcaaagatngggaagntcctcaaggtaggtaacntcctcggcaaagttngnaggnggtaaccatttttcncggaaaattcaacgggttttaaaggntttttncctg

SEQ ID NO: 132591 - DNA, 514 bp, Arabidopsis thaliana columbia
  unsure (1)..(514): unsure at all n locations
atagagaaggtgcagggaaacacattgaagctggtgccaagaaggttatcattactgctccaggcaaaggagatattccaacttatgtcgttggtgtcaatgcagatgcttacagtcatgatgaacctatcatcagcaatgcatcttgcactaccaactgtnttgctccctttgtcaaagttcttgaccagaaattcggtatcataaagggtacaatgacgactactcactcttacaccggtgaccagaggttgctagacgcgagtcaccgtgatctaaggagagcaagagcagctgctttgaacattgttcctacttctacaggngcaggtaaagctgtggctcttgtgctncctaacctcaaagggaacttaacgggntcggttttcggntaccaacaccaaanggtcagtgggttnanctcgttttncaagnttttaaagnaggcattttnttngggagtaacggttgnttttaggggttttcagggaagggcttaaggtttcncgntngc

SEQ ID NO: 132592 - DNA, 529 bp, Arabidopsis thaliana columbia
  unsure (1)..(529): unsure at all n locations
aaaacaatgggaacgagcgaagacaagatgccatttaagactaccaaaccaacatcttcggctcaggaagttcctcccacaccgtatccagattggcaaaattcaatgcaggcttattatggcggaggaggtactccaaatccttttttcccatccccagttggatctcctagtcctcacccctatatgtggggtgctcaacaccatatgatgccgccttatggcaccccagttccgtacccagcaatgtatcccccgggggcagtctatgctcatcctagcatgcccatgcctcctaattctggtcctaccaacaaggagcctgcgaaggaccaagcttctggcaagaagtcaaagggggactcgnaaaaaaaggcttaaggaggtgataaagcgntctctggttcagggangatggtgctctatagtgtgaagtntacagcgggntaantgtgaattntgngatncantaacaggncagggttatngaagccagctttgcanatcttctncgaanttaagncgntcc

SEQ ID NO: 132593 - DNA, 452 bp, Arabidopsis thaliana columbia
  unsure (1)..(452): unsure at all n locations
ccctaagaacaagtctgttgctgctgttggcaaagctggtggtgaaaagtggaaatccttgtctgactctgagaaggctccttatgtggctaaggctgacaagcgcaaggttgagtatgagaagaacatgaaagcctacaacaagaaattggaggaaggccctaaggaagatgaggaatctgacaagtcagtttcagaggttaacgatgaggatgatgctgaggatggcagtnaagaggaggaagacgntgattaagaagttnaagttgtggtagcgtaatatagaaggctgcaaggaatctctcggatgtttttatctcccctccttaaaaatgttaattccggggtgggttaaaagngggttttttttttttttttccccntcctntttcnttancnnnangtttcccttttangaaannaattncccatnttcccccggttnttccggg

SEQ ID NO: 132594 - DNA, 317 bp, Arabidopsis thaliana columbia
  unsure (1)..(317): unsure at all n locations
cttganccagttaaaggtgaaagacaaaaactgccctgctaaaacgctgttagctctctggnaagatcatnaactgaagnccttggctcctctggctcccatacatgcacttttggatttctcaagtaatatggancttagagagagttttgatagagggaaggagcttcgtcttcaacggantattagttcagcaattgctatcacaactaggcagaagaagggntctcaaaagtggctattcttngacaatcaacggactcanttctacacaacttcgggtganttacagtgcaacggagngctntttcatggga

SEQ ID NO: 132595 - DNA, 541 bp, Arabidopsis thaliana columbia
  unsure (1)..(541): unsure at all n locations
catctttnaatctctcttgattccaatccattcttcttcaagtgccgggttctcgggtcggatcttctaagtctagctagggataatggctactgtnactactcatgcctcggcctcgattttccgaccttgtacttcaaagccaagattcctcaccggttcttccggtaggttgaaccgcgacttgtcgtttacatcgatcggttcatcggccaaaacgtcgtcgttcaaggttgaagctaagaaaggagaatggttgcccggtttggcatcgcctgattatctcaccggcagtcttgccggtgaccaatgggtttaacccgttgggtctagcagaggatccagagaacttgaaatggttcgtccaggcagagctggtcaacggacgatgggtatgcncggtgtcgctgggatgcttttgccggaagtttcaccaagatcggatataaatgtccngagtggnaggatcttggaaangnagntttnanngnggcgcaatttnggatcgggtnaaatgntcatacgttggnaacgggaagna

SEQ ID NO: 132596 - DNA, 509 bp, Arabidopsis thaliana columbia
  unsure (1)..(509): unsure at all n locations
gtatgagatgtgtaatactgcctccatcaaaacgaacactcaagttcaggcagcaagtgatgctgtcaaaacagaatcagaaaatggagaagatggacatgtccctcttgaaaaaattatggaatgcgtcaagtcttgcatccaagtggcaactatagatgacattcttagcgcaaaagcagatttgattcatgttcttataatttccttatcacctggttttctgtggactgtaaaaatgtctggaatttcatgtgtgggaaagctttgttcaaggtttccgngtctatggactgactccatggatgacctttcaccnagtgatncgncaaaattcgttcatgaggtatttcactcactaggtcctaaactcctggggngcatacacactntgaaggtagcacagtttcangtggntgnttccaatgcctctttngctcatcgactgtttagacaatncggnttttnatcccnggnngtgnttttaaggtnagggtgttttttnctna

SEQ ID NO: 132597 - DNA, 506 bp, Arabidopsis thaliana columbia
  unsure (1)..(506): unsure at all n locations
caaatcaaggtctctacgcctcacgcagcttccatcatgctcgatactttcccgccttctcaagcttactttaaccagacttggcattcgattatggttcctctgcttcagttcttgtcgaaaacaggttctcctttgatgatgaatctgtatccttactatgtttatatgcagaacaaaggtgtggttccgctcgataactgtttgtttgagccattgacaccgtctaaagaaatggtggatccgaacactttgttgcattacacgaatgtncttgatgctatggttgatgctgcttatgtctcgatgaaaaacttaaatgtgtctgatgtggctgtncttgtgactnagagtggctgggccttcgaaaggtgactcgaaaggccttatgctactatcgncaatgnctgatccggacaactggattttgtcaagcatnnntttnntagaactggancnccttgancctgngnnggcttaaagngncncaattaangggtgttaat

SEQ ID NO: 132598 - DNA, 456 bp, Arabidopsis thaliana columbia
  unsure (1)..(456): unsure at all n locations
gacattaagaggaaaaataaacccatcatcttgtcccaccatatgcttcctggtctccaacaaggacaagaaaagatgtccaaaagtgatccatcatctgcaatatttatggaagatgaggaggctgatgttaatgagaagatcagcaaagcctattgccctccgaaaactgtggaaggcaatccatgtctcgagtatgtcaaatacattgttctaccacgattcaatgagttcaaggttgaaagtgaaaagaatggcggcaataagaccttcaacagctttgaagatattntcgccgnctncgggaccggcgngctacatcccgaggntcttnangaaagctctgntgnaagcatttgnattataacttttgcaacctgttngnggtcactttaaaaccacggggggtgccaaaatnttcttggaccggtcaagggnttttngggnncccggnta

SEQ ID NO: 132599 - DNA, 549 bp, Arabidopsis thaliana columbia
  unsure (1)..(549): unsure at all n locations
gtttcttctaatgtttttattggaggtaccgttcaagttagggttcctaaggttgttcctgctcctcagacggtttcgattttgggggttggagatggtgctattggttctggtgttgatgaattggcggaggaagcttctgctcagaagaaacgtgttgctcttcagagacaagctgctgttactgtcgaagctgctgaggattatgctcggaggtttgaatctggtgtcaatnaccttagctcaaacgatcatgctggtgaagaattaggccactccggcatgaatataatgtgcagaatgtgcttcctaggagaaggtgaaggaagttatagagcaaggaggatgctttcttgtaaagacttttggaaagaagtaccncaaggaattttttaaagtcttnggctcaacatagnggttntttcatttggngttcatngggttgtcccccttncccgggttttnaggcttccccagacnaggggtcctacaagtnaatttntcaaaagggtnatcctntaccctgtntttcacancccccaanattgc

SEQ ID NO: 132600 - DNA, 441 bp, Arabidopsis thaliana columbia
  unsure (1)..(441): unsure at all n locations
cccacgcgtccgaactccaacatctacgtcgaaatcccgccggtttgcaaacgcaacatccgtaaaatcgaacaacttttccgggaaaatcttgctccgtcgaaattacagaacataattntcgtccaaggatgcaagaaacagaacaagtcttctaattgcttaatccgcaataaattcgttgaaaaccggttaaatctcagcaaatgtaaatntccggttagctgtctcgacggagcaacaacgncaactgccgatgtgatgagtttaggcgacgttntgaacggaagtggatgtaagtattggttctcttctatttntcaatcgcaagtttcgggcaaatttngggcgnctcaagctttgatttggtggctttaagggnaagtttcagtaacancactttntttcggngnaccncngacttntnccaaagtaaagcnc

SEQ ID NO: 132601 - DNA, 381 bp, Arabidopsis thaliana columbia
gtcatgggaatctcagtacggcgatttcttcttgtcttggtattcgtctcttctcacctcccacgcagaccgagtcctctccgttgcttcatctgcatttagcgggattggagtgcctctatgtgggaagctacctctcttacaccaatggcacaagctaagatctcatccttctgaagttaacagctggattctacagctctaatggtcaggacaggtacgaggctatcgcagagatctttgcaaagaactcttgtagaatgataataccaggaatggacctatccgacgagcaccaatcacctgaatctctctcgagccccgagtcattacttggccacatcaaaaattcctgcaagaaacaaggggtcgttgtctcag

SEQ ID NO: 132602 - DNA, 358 bp, Arabidopsis thaliana columbia
ctgttactgggacggctagtgctgccgcactgttttcagcctatttggttgcagctgctgtttctgccttgtttgggctcacttcacggttcttaaatctctgtcctgcttctgccgagcttggttgtagctcagtagtgtgagggaaggcgaacgaagaagcaaactctgttcaaagcggagaatgcggatgagtctgtccacttataaggatgaaagcgaggcaactgttagaatgtctttgttgtttgagtttgaactgtatgatctacctcttcccttcgttcatctgttagttctcttttatttaattgttgcttcatatgccgaaaaaggagcccttcggtcgaagcaaaag

SEQ ID NO: 132603 - DNA, 540 bp, Arabidopsis thaliana columbia
  unsure (1)..(540): unsure at all n locations
tnggntcctcactcccactcccactcccacctagatttacacccggttccggctccggcaccgttacaacgagctccttctcttctggntcgggtcaaatccatcaacatgtcatacttcaaattccagcagtataacccggaggagaatgattatgctcatcacacagaaccgacccgattcgaaagtattccgacccggatgggtcggggttgacccgattgatatctcaaaattcagaatcccggaagaagatcaaccaaccggaaccggagtgaacagtcaaattaacccgtccggtttaactcgagctccgtctatcttagaangggtcaaatccattaaggtatcctnctnctacagattcgacccggnatttgggtcaaaaaaaaaatccggatcgggttctttaaggnggnggacaaggattttacgnggcaaattggggatngnaaaaacccggttaggaggaganggaaggtttttacggggggtggcaaaaancggtttggggnaannaagggttttgntttgcaggaa

SEQ ID NO: 132604 - DNA, 491 bp, Arabidopsis thaliana columbia
  unsure (1)..(491): unsure at all n locations
aaagnctctctctgtctctttctcaaaatcatctgcaggaagtgaatcgtcaaaaccgagtttggaggatctgtcttgagggtttggttttttggatctaggagtttttttttggttgagaaatggcttcgaaacggatcttgaaagagctcaaggatctccagaaggatcctccaacttcctgcagtgctggcccagttgctgaagacatgtttcattggcaagctacaataatgggtccatccgatagtccttattcaggcggagtgtttctcgtaaccatccacttnccaccggattatcctttcaaaccnccaaaggttgcattcagggcaaaaagtgttccaccctaatgtnaaccagcaacggnaggcatttgccttgacattttgaaggacaatggggtctngnactnnccntatcggaggttttgctttcgnnatgttcattttacnggcccaacccccggtgtcccttgntccnanngttgc

SEQ ID NO: 132605 - DNA, 552 bp, Arabidopsis thaliana columbia
  unsure (1)..(552): unsure at all n locations
gnaaaagaaacggtatgacgtcgttttgctccatgatttctcttcttcttcttcttcttcttctctctctttcatcggcggttatctccgatgacgcttctttccagaaacttccggtgccggaaactaggtcaggtcccgaagctttcgcttttaattccaccggtaaagggttctataccggtgtctccggtggtaaaatcctcaagtacctccccgagacgggttatgttgactttgcccagatcactgaatcctcgaactcttcatggtgcgatggtactattggaacggctttagcggaccgctgtggtcgaccagcaggaatagcattcaacgagaaaacaggtgatctttacgtcgccgatggtncgttgggncttcacgttatttctnccgccggtggtttggctacgaagatcaaccgcagtttttncgggaagccttttcaaanttttttnangggcnttacggtnatcccacnanctggggtggnnanttaattcntcaggtaanggtttcccaatcaaagtttntttnattgggnaantc

SEQ ID NO: 132606 - DNA, 550 bp, Arabidopsis thaliana columbia
  unsure (1)..(550): unsure at all n locations
agagaggttctacaaaaggctgttcgataaggccatgaagaaggaaagcgttatgattcataaggaagcgtccagattcgttaacaatagcctttacaagatgtgcacgggaaggagcttttcagtggagaataatgaagtggagagaataatggaacttactgccgacttaggtgccttgtcacagaagtttttcgtgtcaaagatgtttcgtaagctgcttgagaagctcggtatctcacttttcaaaacggagataatggttgtttcacgtagatttagtgagctgnttgaaaggattcttattgaatatgaagagaaaatggncgggcatcaaggcacacaagtttatggatgcctttnttngcagcttatcgngnntgnaaaatnccagnatataaaatcactangnggcnttatcaagtcggttttcacggggnttttcattggggccncttgcgcctcatcaataagcaattcagtggcaattncaggtttcttaacaaccccgggatcttttgaattttggangattttttcggtttnnggc

SEQ ID NO: 132607 - DNA, 585 bp, Arabidopsis thaliana columbia
  unsure (1)..(585): unsure at all n locations
ggaagaacaagaagaagaagaacaagacaagaagaacaaagtacccaagaaaacacacaagaaggaaacacaaagattgatattgatccaaaagcaatggcgtacgagaaagtcaacgngcttaaccttaaggacacagagctatgtnttggattacccggaagaacagagaagatcaaagaagaacaagaggtttnttgcgttaaaagtaacaacaagcgtctntttnaggnaactcgtgatgaagaagaatcttcacctcctaccaaaactcaaatcgttggttggccaccngtgaggtcttccccgtaaggacaacaaccagtgtgngctncggtggaagttgagttttggnccggggnttccttacctttggaagnttcgnttttnaagggcattccnaaaantttcccccgggntttttttaaaggggttnggtggntnntttttcaaagtcattgttttggtggatttttttttggnggnaggggttccaaaggntctttgggttttttcccncccattcggggggtntnanggttggttncttgggtttttggtttgggggattttcccttgggccat

SEQ ID NO: 132608 - DNA, 497 bp, Arabidopsis thaliana columbia
  unsure (1)..(497): unsure at all n locations
caaaagcggtaagtgcataatcaagcacaacaagtggagacgctttactacaaacacggtaacacagccgtatcttggctccgtaatctcttccatgactgtntcgtcaagtcgtgtgatgcgtcgctgctgctagagacagcgagaggtgtggaatctgagcagaaatcgaagaggagtttcggtatgagaaactttaagtacgttaagattatcaaagacgcactcgagaaagagtgtccttccacagtctcttgtgctgaatattgtcgctctttcctgcgagagacggtattgtcatgtttgaaagggncaaaggattgagattgntaaagnccagggcagggtgngatnagttagngggnngctactttgggnngattnttggaagaccttcttaaatcccnaaccnccaattagccttctntcntcaaacctagttaatctccnaacctttaaactncccctttgggnatcnnattgtcngaangccnccc

SEQ ID NO: 132609 - DNA, 262 bp, Arabidopsis thaliana columbia
  unsure (1)..(262): unsure at all n locations
gagaaatcgatctctactctttnaaaggtctacttaagaaagaagggaaagagaagtttggggaagcttttaagcaatggcaagaagatccggcgaacttnatcatcgatggtcattatcccgtaagaaagttatggtcacgtnctagaagctgttggcctggtattcttgctcatnagagcaagtntgtnctcgttgttgctcataatnctgttaatcaggctcttctggcaacagcaattggcctgggnacagantattt

SEQ ID NO: 132610 - DNA, 613 bp, Arabidopsis thaliana columbia
  unsure (1)..(613): unsure at all n locations
cgatccaaaatttcatcttttaccaaaactattacaatacccctcactctacttgtaaagcttcaatcttcttcacttctcaacaaacagataaagaaaaagcttcaatctttgatactttctcgatggaacttatccccaatcttcccgacgacgttggtcgcgagtgtctccttcgctcctcctaccaacagttccctgtcatcgcctccgtttgnagagcctggaaccgtgaagtctctctctctcagtttttacatcagcgaaaagcttcacgccatagccaagagcttcttattctgtctcaggctcgtgtcgaccccgctggatcccggaaaggatcaatcggctacgnctgaataccggatctcttgttcttcgaatccgggtcgggtctttgggangggggttcctcccgatcctgggcaaaccaaaggattccctgtcttgagttgggttccgngggtccgactttttgnttgggtgggttggcccgnttaggggnaggccagatccggtttcgnttcannnncttaatccaatgggggnnggggaacaancagggntgggggggcnctccgttggttcggttcngtnggngggntntngggnt

SEQ ID NO: 132611 - DNA, 289 bp, Arabidopsis thaliana columbia
  unsure (1)..(289): unsure at all n locations
caaccaaaaaaaagaaaacacaaaaacaaagattataatggnttcctcaaccatggntttntcctcccntgcnttcgccggaaaggntgtgaagctgcngcatcaaatgtcctcggaagcggccgtgtgaccatgaggaagactgtngccaagccaaagggtccatcaggcagcccatggtacggttctnaccgantcaagtacttggttccattctccggcgagcccccgagctaccttaccggtgagttccccggtgactacggatgggacaccgntggtttatccg

SEQ ID NO: 132612 - DNA, 253 bp, Arabidopsis thaliana columbia
  unsure (1)..(253): unsure at all n locations
gagaagaagagaagaaaatggaaggnataagccatatcgnactccctgtccttggaatcntcgcagtctcggtcgtaacattctatgccgttagctttgccgagatcagagagaaatcntttaaagatgtgtacgactcggagaacgaagttggtgttcaananttctntaagttcaagggagagaagatcaaagagagaagcaaacaaaaaacgtcctaantnttgattccaaaaatcaccatgntccatga

SEQ ID NO: 132613 - DNA, 214 bp, Arabidopsis thaliana columbia
  unsure (1)..(214): unsure at all n locations
ggattacgagcagcagcaactcctcaacgagtattccaatgctctgagccgttctggtcggatgaaatcaatgcctccttcgaatcttgaagatcttttttcagcagaaggctcttcatcttcccggttcaactgattccgctttagnttccgcggtgntcttggctncanacaagtcanctgtnttnaancagttccaacaacagcaacaagc

SEQ ID NO: 132614 - DNA, 375 bp, Arabidopsis thaliana columbia
  unsure (1)..(375): unsure at all n locations
gggggaattggatagagtacnccgtctatgcattggagctggggttnactctttctatgaatacctcttgaaggcttatattctttttggaaaagaagactactggcgaatgtttcattctncttatctggcatctnanaagtacttcanacatgggccttggtaccatgaagctaatatgtggagtggaaaaccaacttactggcagctcacaagtnttcaggcgttttggcctggtctgcaggttcttgttggagatattgcagctgcaaattcatcgcatcgtgagtttttccatgtatgggnaaagttttggtgtattacctaanaggnatctactcgntcatcaantaatacatncggcaatgaagnact

SEQ ID NO: 132615 - DNA, 214 bp, Arabidopsis thaliana columbia
  unsure (1)..(214): unsure at all n locations
ggcactcaacctgagctcacaaagctaaacaaaaaaaaaagagcttaggcggagaagaagaggagaccaaaacaccaaacaaacaacattggctgtntcanctttntactcaacacaggctctcatttcacctcnttttttaaccnntttttcctcctccaaacaggttttcctctacggtggtcaacgacaaaccaacngtgggttcancaca

SEQ ID NO: 132616 - DNA, 257 bp, Arabidopsis thaliana columbia
  unsure (1)..(257): unsure at all n locations
cggcaatatggcagcccgctcaagcnttatactcatctggttgtnacgctttggtacagggcacctnaacttntnttgggagcaaaacaatattctacagccattganatgtggtcactgggctgtatcatggcagaactattaatgaaggcgccattnttcaatgggaaaacggagtttnatcaacttgacaagattttaanaatccttggtactcccaatgantctatttggcctgggttctctaaactacctgg

SEQ ID NO: 132617 - DNA, 326 bp, Arabidopsis thaliana columbia
gacccacaattatctcagttttgacctctctgaagattaagcaaaataacacttcgttcgttcgtactctatgaactcgctgctgacctcctccacatccttagccctgccgtgtgcgataccgatcgtcttcgtcaatttcttaagttctttttgttctccaattcatggtggtaccaacgatttagctactgaagtttagaaagcccccaatttttgttttcgttttagcgtttcccgatctgtgaattgggtatcagctccaaaggtttaatgcccagtaaagttatcgaggacgagagtttaggggtcttacagtgcgagtg

SEQ ID NO: 132618 - DNA, 383 bp, Arabidopsis thaliana columbia
  unsure (1)..(383): unsure at all n locations
tgttgaagaaaagagatctgatgcgaaagaaagcagaggaagataagnaaaagctcatcactcagctattagcagcagaaggtctcgagcttgataccgaagcagaagaggaagaagcagcaaagtaagattccaaacattttggaagcttctatagctacttcaagtaattaagcacatggtacttgctccctctctgtctctcttgtagtataaacatacatgtagataatcatatttgacaatttacaagatcttcactgcaaaaaaaaaagcttgatgcatattctatagtgtcacctaaatctgcggccgcagcttaggttcggtanccataacttcgtatagcatacattatacgagttatggggatcctctagaac

SEQ ID NO: 132619 - DNA, 399 bp, Arabidopsis thaliana columbia
  unsure (1)..(399): unsure at all n locations
gattcccaagagttttgtcttctcaagaatgaaacttgctggccctgttaaacaactccagatggatttgaggaagctcatgcttccctacactgctctcagtcttaaggagaagaagcggaacactttaagggactttttgaatgtatcaggtccaatgggtgttacacatttccttatgctttcgaaaacagcgtcttcactgtctcttagagtagcaagaacccctcagggcccgactcttaccttcaaaattcatcagtattccttagcatcagatatagctcagtctcagcttcgacctagatgtcctcaagatcttttcaagagtcctcctttgattgtcctnnctggattcggttctcaagagttgcatctgaaactggcaacgattatgtt

SEQ ID NO: 132620 - DNA, 417 bp, Arabidopsis thaliana columbia
  unsure (1)..(417): unsure at all n locations
aatgtctttcacagagctcacaataagtgtcatcaagatgctttcaggtcttcacctacgtggaggtttttcaagtcctaacacgaacaatgtgaattctcactattcaaatggtggtaatcatgattctgttttggaagcaaataggaaagttaccaatgaggttgtgacaatcagttcagatacatactcgaccgttggctctatctccacgaggaatgggagtgtatcccaaagaagtcaatccataatccatttagatttctcgccaacatcaatgtcgggttctcaatcaagtgtgtcggggaatgagcctactacggcaaaaacaagnggtcggttccaccatctttgggtcatttcagggggnttnggcgcatttgggtaggngcatttccngaaccttcttttaagggc

SEQ ID NO: 132621 - DNA, 372 bp, Arabidopsis thaliana columbia
  unsure (1)..(372): unsure at all n locations
cattgaagaagcctcctctcattacctctcatcaaacatctagatctgtacccaaaccttatccctttttccttatttctcgctttgtctattcttaatctgattaatacttgttgttgttccaggttatagaagatctgggttgtgttatatgcttcattttctccacagcgaccagttggtgtttggttcttagattcatgaagaccaatagagagcaggaaatttacgttgaaagaagcttcaaaccaaacaattcaacaattcagaatttgatggacattgaaaggttcattttgcctcacacttctacatcaggtgtcgcaaggctcaaaatgngggtcatatcatgggtcgggcttcagtctacaa

SEQ ID NO: 132622 - DNA, 373 bp, Arabidopsis thaliana columbia
  unsure (1)..(373): unsure at all n locations
actagtccttcatcgtttacaccttgtttagatggacgttatcttctgcttggacctgatcaagatcttaatcattctgagatttcaaagttctctaaacatgatgntgntgcttacccaagatacgagaagcagctagagaggttttgtggattcatggatcctcttttggattcagctccacctgaatctcttcaatctgcctcttcttttaatgataagttgagcaacaaaatgtacaaatctgctttctgggctcgttgtttccggcaagcagtttctttggggcataaagatatggtggattttatggatcttttattggcaccagctttcaaaaggttttgaaccaactggtttgaggnctgatgtc

SEQ ID NO: 132623 - DNA, 373 bp, Arabidopsis thaliana columbia
  unsure (1)..(373): unsure at all n locations
ccgccctgccatagtcgcgagtctgtttatagtcgcgactcttgtcatagtcaagaaggttgaaacttncaggaaaaaacttcgaattgggagggcgatcctcccggtgaactgaccgtaccccaaaccgacacaggtgaacaagtagagtatactagggcgcttgagagaaccatgtcgaaggaactcggcaaaatgaccccgtaacttcgggagaaggggtgctctcctatcttttgattaggaaagcggcacataccagggggtagcgactgtttattaaaaacacaggactctgctaagtggtaacacgattgtatagagtcttgacaactgcccggtgcttggaaagtcaaaaggaggagtgttatta

SEQ ID NO: 132624 - DNA, 373 bp, Arabidopsis thaliana columbia
  unsure (1)..(373): unsure at all n locations
aacgatgttcaaaacacttatggattgaatagaatcagttggcaaggagatccatgtgtccccaaacagtattcgtgggacggtctaaattgcaacaactcagatatctctataccaccaataatcatttccttataataatttaactggtgatatacctaaatttctagctgacatacaatcactcttggttataaacttaagtggtaataatctcactggatcggtgcctctctcacttcttcagaagaaaggattgaaattaaatgtcgaaggcaaccctcatcttctttgcacagatggtttatgtgttancaangggagatggncataaggnaaaggngcatcatagcacccgtggtcgggatccaat

SEQ ID NO: 132625 - DNA, 354 bp, Arabidopsis thaliana columbia
  unsure (1)..(354): unsure at all n locations
gccagttagagcacagagaaagggccgtggtggcgtcttcaaggcacacacgacacaccgcaagggcgcacaagctacgacctcttgactacagtgagaagaatggttatntcaagggtgtagtgaaggagattatccacgaccctggacgtggtgcacctntagcacgcgtacagttccgtcacccatacaagtacgccaaggtcacagagaacttcattgcagtcgngggtctatacactggtcagttcatatacgcaggtaagactgcagagcttaagatcggtaacgttntaccagttagcgtactttncagaaggtaccgtgatcagcaaacgtggaggtgaagccatg

SEQ ID NO: 132626 - DNA, 363 bp, Arabidopsis thaliana columbia
  unsure (1)..(363): unsure at all n locations
tggcattacagatattcgccatcatcattcccaactgagggcctacatcattgctttacttaatgaagaaggactatacattaaatcgatttccaaaaatgttgaagaaaaacttaaacttcactcatcagaagtacagaatgtagtgccaccgcaacacgnnttaaaacctnatgagtctgaatgccgngatgtgcatatgactacagntgttgaatcttnccacgtaacgcagctttcggnagctagtnttnccacaatcatggctgtaagtagaggggatgcatctnnagcctntgcacangcattacangagaggttggagctccttttacttcttatcacagcaggaggagaggcatt

SEQ ID NO: 132627 - DNA, 332 bp, Arabidopsis thaliana columbia
  unsure (1)..(332): unsure at all n locations
gttcggcatggtctatcacggtactgtaaagggttctgaacaggtggccgttaaggttctctctcaatcgtcaactcaaggctctaaggagttcaaagcagaggtgcccatatttctgttgatctccttctgagagtgcaccatacaaatttggtgagcctggttgggtattgctgtgaaggagattacttggccctcgnctatgagtttcttcccaatggagactnaaaacaacatttntcaggnaaaggaggtaattccatcatcaactngagtattcgnctncgaattagcttttngaagcagcaccnaggttttggagtacttgcnat

SEQ ID NO: 132628 - DNA, 352 bp, Arabidopsis thaliana columbia
aagaagcatgatgctctcgtgttctcctctcaccgttccttcttcttcttacccattccatttccttccttcgtcttctgatcccccttacgattctatacgaaatcacccttctctttctcttctccacaattgcaaaactcttcaatctctccgcattatccacgctcagatgatcaaaatcggtctccacaacaccaattacgctctcagtaagcttattgagttctgcattctctctccacactttgaaggccttccttatgcgatatctgttttcaaaactattcaggagccaaacctgttgatttggaacacgatgtttcgtggggcacgcgttgagttcgggacc

SEQ ID NO: 132629 - DNA, 332 bp, Arabidopsis thaliana columbia
  unsure (1)..(332): unsure at all n locations
gcttctgatcttgcgactgttgctgtctccgccgcgaatcgttctcctaccttcgtcaactacaccggcaaggtacgaagcttttgtnatactctaattagatttgtggtatcntcgtgaacctncaatncaatttagggtttctcaattcgattacaaagattcgnacttnattngttttcgaattgctggacgagtttgtcttattgggaaangatttnagtaaatcgttgaagagaaatcaggaaagttgaatactttctctcttaaagttttgagctttttggattgtaaaattggactaatgggagaattcaattctgtgttagagt

SEQ ID NO: 132630 - DNA, 305 bp, Arabidopsis thaliana columbia
  unsure (1)..(305): unsure at all n locations
gtaggaactggtttagcagttatgaacaatatgggtcagatcgggcttgcgcttggttacactgatgtctccatttttgtctccatgactagcatttggggattctttggtcggattctctccggtactatctccgagcacttcatcaagaaagctggaacaccaagaccatnatggaatacagcagctcaaatcattatggccgtnggatatctnctnatggctntagcttgnccggttnactctatattggttcaatngtggttggggatnctatggatgttcggntagngataaccgtacca

SEQ ID NO: 132631 - DNA, 365 bp, Arabidopsis thaliana columbia
  unsure (1)..(365): unsure at all n locations
aaaatcactaaacctatcttcttaaccaaaagatcaatagattacaaaaatgcagggagctctgtttatcaaaccaactattcttcttccncttccttcttcagtttcttcnccaaaactcacttttnttcttcctcacgnaaccaaagcttcaagactctcatctctcagatcaaacaactcatcatcatcatcatccttaacgnctgaccctaacaccgtcgactataacnncnccatcctttcgtaagtccttttgatcacntcctcagttcatccccncttgtttcnnttctcattgacttactcaataacatctctatactcagtgtttttccagctgaagcatgcgaagtaatcagtgg

SEQ ID NO: 132632 - DNA, 378 bp, Arabidopsis thaliana columbia
  unsure (1)..(378): unsure at all n locations
aaaacgagccggtttcaactcaaatcggcggacatgaaaagcacagctacacggatgtncttttnnagggcaacacatcattagtagacagtctggagaaagcagatgacttatcatctgggaagggtctctttggtaagtntgggaggaagctatcggttgttgaggaagaccgccgtgcaacctatgaagattctnatcagcagggcgatagatcggagtccatattcacaacatttnagagtgaaatcaagcagtttnttgctgtagggcttcatgcagaacatgcgtatggtnggngccttgcacgtttttgctgcaactnttgggncccgttgcatggaaaatagcttctcagcggantcgagcaagcactta

SEQ ID NO: 132633 - DNA, 270 bp, Arabidopsis thaliana columbia
  unsure (1)..(270): unsure at all n locations
atcttcaagcagattttncctaacctttgtgcctcatcttctcgtgattgcagagagatgcttggagactcgctgatactcatgggagagattggaggtaacgactttttttacccatcctccgaaggcaaaagtatcaatgaaaccaaactacaggatttgatcatcaaagctatttcttctgcaattgtggatttgatcgctttagggggcaaaacatttttggtacccgnaggcttcccagcaggatgttccgcagcgtgtcttact

SEQ ID NO: 132634 - DNA, 242 bp, Arabidopsis thaliana columbia
  unsure (1)..(242): unsure at all n locations
acgcctntttggacagtctacctttgatgtttcaagataatttcaatgtggaatcagcttttngcccagccctcagagcggcgtttatggttatgaaccaacttgggggcaagttactaattttccagaactcattaccttctcttggtgctgggaggttaaagttgcggggagatgatcctcgtgtctatggaactgacaaagaatatncattaaagggtagctgaagatcccttcttata

SEQ ID NO: 132635 - DNA, 336 bp, Arabidopsis thaliana columbia
  unsure (1)..(336): unsure at all n locations
gnaatttttccagccagacttgcttgaaagtattttngcacagtgattacgtgacttgcattcaatttaatccggttgatgatagatacttcatcagtggatccttagatgcaaaanttcgcgtctggagcattccagatcgtcaagtagttgacnggtatgatcttcatgagatggtcacttctgcttgctacacnccagatggtcagggtgtgttggttggttcatacaaaggtagctgtcggatgtacagtgcatcagataacaagctgcaacagaaaagccagataaatttacaggacangaagganggaagctcatcaaaaaaagggtaac

SEQ ID NO: 132636 - DNA, 320 bp, Arabidopsis thaliana columbia
  unsure (1)..(320): unsure at all n locations
ctttgcattcactgctcttgttggtatggtgtcaaacgcaacgggactatcagnttctaagcatgtncctctttgggagcttctctggttctcaattgttgctaatatctctatcgctgctatgaactttagtcttatgctcaactctgttggcttctatcagatttcgaaattgagcatgattccggtggtatgcgtgttggaatggattctacatagcaagcattattgtaaagangtgaaagcttctgtaanggttgtggttatcggtgttgggntttgtactntgactnatgtcaaagttaatgccaaagggttca

SEQ ID NO: 132637 - DNA, 363 bp, Arabidopsis thaliana columbia
  unsure (1)..(363): unsure at all n locations
gcatgaggctagaactttaattgagagaagtgacagaccgccggaaaagaaaagagcgccgtgtataggagaagatttcaccttgttacaagctttgggacaagctgacttctggcttatatttatgtctctggttctaggtgtaggttcgggaatcacgattatagacaatcttggtcagatttgtnatnccctcgggtacagcaacaccaaaatatttgtntcactgatcagcatctccaatttnntcggccgtgttgctggtggctacttctctnagctaatcataaggnaactctcacttccaagaacgttggcaatgtctgtggntcaggcgataatgtctttggggctcatctacta

SEQ ID NO: 132638 - DNA, 373 bp, Arabidopsis thaliana columbia
  unsure (1)..(373): unsure at all n locations
cgaatcgcgatttttttttgagatnacggaagcttcgcttgatttgggattttaagggttttctttcnccgaagacgacnccgagagaccaacagtgatttgacaatnacgctaccnccaggtctttacnccggcaccagctctcttgctctggtggctcgtgcttcggcttttgggttgggtctcgtctatgggaacatgaagctcaaggtccttaagatcaaatcgatgtcacagaagaaggttgaagccaccgctcatcattaaaccactcttctttctttacaataagatnccaaaagctgggggtgatgtctccccggttagtttgatttcttntttcatgattcatcctttagcataagaaggaaca

SEQ ID NO: 132639 - DNA, 355 bp, Arabidopsis thaliana columbia
  unsure (1)..(355): unsure at all n locations
ctaacttttttnaaagtctctgtctttctgtggnaatctggggaataaacatatgaatctaaagagnaaaagaagaaagtaaaaaagcaaaatcgaagtttttgttcaattttntgggatcaaagagcaatttnggtttctttattcgttgaaagtgtgaagcttttttnatttagtgagaagtgttaatngcgggatacagagcagatgatgattacgattacctattcaaggtggttctgatcggtgattcaggtnttggaaagtccaatttnctttctcggttcaccagaaacgagtttagtctcgagtctaantcaacggatcggggtcgangttcgcgactcgtagcctt

SEQ ID NO: 132640 - DNA, 373 bp, Arabidopsis thaliana columbia
  unsure (1)..(373): unsure at all n locations
tgcgatccctgcacaagttacccacacccagcaaatccctgttcctcgtgatactgacaggaaaagatctgatagagaccggtatncccctggtagcagtaggggtcacccaacacgcaaacatgaaagaagacgtgcttcacctcctccacgcagagaagaacaaccgcgtgatttatatcttagtgaaagggagtatcgaacatatggcttgagaggaggagaaacaacccagcattaccaaattccacctccagaatcctcttcttcttaccacattntcaaccgngaccgtgttcatttggattcttacccgttcatctatggnccaatgaccggctttttnagncaagcagagatttagaaggcattg

SEQ ID NO: 132641 - DNA, 373 bp, Arabidopsis thaliana columbia
  unsure (1)..(373): unsure at all n locations
caagccggatatgaatggggacggctgaacaaagacacaggcagcaatccccacggttaccttcccacccactacgagaaggtccaaatgctcttgagtnaccgtttcttcgggttctacatggttcctgagaacggaccctggaactacaacttcatgggagcgaatcacacggtgagcataaactacagcttgacactcggaacccccaaggaatactatcaccaagtccatcgacccactcatttcctccagttcagcaaaatggaggaggatggtgacctcgatcgtnatgactcttttgcttaagacttttttggatgtatggtgtatattgaggtttgcaaatttgttaatgattaggcctgaaaag

SEQ ID NO: 132642 - DNA, 363 bp, Arabidopsis thaliana columbia
  unsure (1)..(363): unsure at all n locations
tnttgccaaaataaaaaataaaaaaggagtttgttgtgaagccaatgaacgagatcgtgacaaacacatgcctaaaacaacagtcgaatcctccttctcctgctactcctgtggaaaggaaggcaagaccggagaaagaccaggctttgaactgtccaagatgcaactccttaaacaccaagttctgttactacaacaactacagcctgacgcagcccaggtacttttgtaaagactgcaggaggtattngaccgcagtgggttccctcaggnacatccccgtcggtggcggngtncgcaagaacaagagatcttnttccaattcctcttnctcttcaccctcttnggtcttcttcttnaaag

SEQ ID NO: 132643 - DNA, 259 bp, Arabidopsis thaliana columbia
  unsure (1)..(259): unsure at all n locations
caacaacaaatcttaaacgttttactttgtgctgcactactcaacctcaatggccgnctcaacaatggctctctcctcccctgccttcgccggtaaggccgtcaagctttcccccgcggnatctgaagtccttggaagcggtcgtgtgacaatnaggaagactgttgccaagccaaagggcccatcaggcagcccatggtacggntctgaccgtgtcangtacttgggtccattatttngcgaatcaccnagctacctt

SEQ ID NO: 132644 - DNA, 344 bp, Arabidopsis thaliana columbia
  unsure (1)..(344): unsure at all n locations
agaagatgaaactnttcgacgcgcactgtcaccttcaagacccgtggattatcaccaaagctcctcagataatctcctccgccgtngcttccggcgtctctnctttcgccgtcaatggagtctccgagaaagattggagtttggtcaaagagatgggagctaaatacccttctnttgttccttgctttgggatccatccatggtatntagcagagaggagtcctcaatggtttgagacattaaagagtttctttnagaccacncctactgctgctgttggagaaattggtttggncaaagggtctaagggaagggcgattttattttctcagaacaggttaccg

SEQ ID NO: 132645 - DNA, 371 bp, Arabidopsis thaliana columbia
  unsure (1)..(371): unsure at all n locations
gtacatttcattcaagattatgagaagcatgataaatacacagggtttcctgttctcggaattgagtggcaaaagatggaaaatcctgatttgcggaagtcaatgggtatggaatctcatcaaaagggagtgcggattagaagaattgagccaaccgccccagaatcacaagttttgaagccgtctgatattatccttagttttgatggagttaatatcgctaatgatgggactgtnccatttaggcatggagaacgaattggctttagctaccttatatcccaaaagtacactggagattctgctctcgtnaaggttctacggaaacaaaaggaaatatttaggngttcaaccattaaaacttttcaaat

SEQ ID NO: 132646 - DNA, 331 bp, Arabidopsis thaliana columbia
  unsure (1)..(331): unsure at all n locations
aacttttcgttagtggctgagcaaaaatggaggctacacggagcgacgaccccagtctgaaccctatacgcaatcggaatccgaatccgaatccgaatccaaacccattgtcgacgatcatctcttcagctcaggtttggccaaccattgacggtccnttggggttaacggaggaagcatcggtggattacgctcgtcgattctacaagttcggtttcgctctcttgccttggctttggnttgtcaattgcttctatttctggcctgttctccgtcactntcgggcttttccctnaaanccgcaattatgttttccggtcaagcaatttgg

SEQ ID NO: 132647 - DNA, 328 bp, Arabidopsis thaliana columbia
  unsure (1)..(328): unsure at all n locations
agggtttgggagtnttttaccagatgattctnccaagaaagagaaactaaaaatggttagtgacaaaccaaaggtcgagttgcacaatgaaccattcaagcctgtccaaccgcagatgagggtcaatgtggatgcgaatacngctgctgctattcttcaagcggctagaagaggcataaggaatccccagttggggattntaacaggcaaacccatggatgngacttctcagacccttngaaatnatgtgagttacccttcatctaagtcccctnatttggncaaatctacaggtcaatcactntcntggctcgncttgctgctaagt

SEQ ID NO: 132648 - DNA, 342 bp, Arabidopsis thaliana columbia
  unsure (1)..(342): unsure at all n locations
cacatacacaacacaaacacatacatacagcaaccatggcaatagcaacagcaaaagtcgatgcaagtggtttgttagagggtggtgcatatcanctagaaattaagtataacangttgtttatcaacaatgantgggttgacgctaagagtggcaagacatttgagaccgtcaatccaattacaggtgatgtgatctgcagtgtagctgaggcagatgcagctgatgtagacattgctgtacgtgctgcacgtnctgcgttccgtggtccattggngtaagattnggnctgctnncagangcacggtntatctttaagctagctgagttgatttgtgcgtg

SEQ ID NO: 132649 - DNA, 340 bp, Arabidopsis thaliana columbia
  unsure (1)..(340): unsure at all n locations
aaagatattgtctctgcttgaagctgaagatgctgatgtgaggattcatgctgtcaaagtggtagcaaatctggctgccgaagaggcaaatcagcagcaaattgtggaagctggtggtcttacttccttgttgatgcttctnaaaaatacagaagatgagactattcacagagttgctgctggtgcaatcgcaaatcttgcaatgaatgaaaccaaccaggagctgatcatggntcaaggaggcattggtttattgtcatcancagcagccaatgctgaagatcctcagacccttaggatggttgccggagccattgcaaatctnntntggnaacgataa

SEQ ID NO: 132650 - DNA, 372 bp, Arabidopsis thaliana columbia
  unsure (1)..(372): unsure at all n locations
aatggccctttgagatctaatagtagcctgtttagactacaacatcttcagatcctagaccttggcagcaataatatttggggtacgctaccagattccatcggcaacctcaaatatttgaggtttttgagttttaaggattgcaatctctatggaaagattccttcttcactcggaagtctttcttatctcgctcgtcttttacttcctcataacgatttcaccagtgaaccaacagattcggtgggcaacctaaaccagctaacagattttcaacttatgctactcaacttgagctcgctcatctggattgaccttngtgataaccagttcagtggnatgcttccatctaacattgagtaggcctctccc

SEQ ID NO: 132651 - DNA, 336 bp, Arabidopsis thaliana columbia
  unsure (1)..(336): unsure at all n locations
ctctctcccaaacaaaaaaaaaagcctcactttttacaaatgggttgtgctcaatctagggttgataacgaagaagcagtagctagatgcaaagaacgacgaaacgtaatcaaagaagcagtttccgcaagcaaagcattcgccgccggtcatttcgcttacgctattgctttgaaaaacactggtgctgctttaagtgactatggccatggcgaatctnatcaaaaagctttagacgatgtgttgttagatcaacaacattacgagaaacagagtcntaacaatntagatccggcttctncttcagccaccttcttccaccgncttatnttgtag

SEQ ID NO: 132652 - DNA, 661 bp, Arabidopsis thaliana columbia
  unsure (1)..(661): unsure at all n locations
gcnnntgccncgtgcctatgantcatccantaaagatcatagaacataagggttcgtgaaatgcagcagctttattactcttagataggtaaataaactagattcttacttnnaccgctgcttcctcgactatatttacttctccgccantcacattcattgaaactggcccttgntcatcctaaaccgtaatggcccttgttcctcctttggtttggctcgatgatgctgcaccaaactacggattgtggataagctttttcagagactggaagattcccaactagcataaacagcacctataatcttctcatgtaaaacttgancagaacatgcgatgattccacggtcaagaccttccaagttaaacaccttncggagaagtctaagtttctccctcccgcatcagtcaccacaccaccagcttcttcccacaataacaactccaggtgcgtgatccccatattcttcctctttngggaattngattgtgnaaacttcattaaacacttcagnggtcttcacgngcaatcggttgaatntttcaccaatgntatncacncggattgggtgtttcttactncccatgttttgggaaanccgcagggacaantgggtggggttggtttttttctgggtnaaaatntggtaancgnnaant

SEQ ID NO: 132653 - DNA, 494 bp, Arabidopsis thaliana columbia
  unsure (1)..(494): unsure at all n locations
gcttccaagcattagaaacctattaagagctccacttaactggttatataatattatatcggagaaggtggatcggccatggctactactctcagctcatcctctctcttcatccaattcagaggacggagatacaactccctatcatcattcaataatctccaaaagcgcaccgttttgtngctttcttgtgctctatcctcacaaggtggagacatgattccaccagagggnaaaagcaatgntcgcaactntgcctttgacttcaagtcgtatatgatccgtaaagccggatcccgtcagtgcggctctcaacgtttcggtaccctctncaaagaaccactcacgntacaagaggcggtgcggtactcattnctagcggggcggnaaaaccgttntgagggcctctncttctgcanttnctgcnttntaaagctcnttgggtggctnccggtgnttattnccttgtnaaccngtttttcaanngnggttnt

SEQ ID NO: 132654 - DNA, 559 bp, Arabidopsis thaliana columbia
  unsure (1)..(559): unsure at all n locations
tgaatctntccaagctctcttctcatcaaccatggntccttacaagtatcgtccagctagttcttacaactctcccttcttcaccaccaactctggtgctcctgtatggaacaacaactcctccatgaccgttggacccagaggtcctatccttcttgaggnttaccatctcgttgagaagcttgccaatttcgacagggaacggattccagagcgtgtggttcatgccagaggagccagtgctaaaggtttctttgaggtcactcatgatatctctaacctcacttgtgctgactttntncgagctnccggtgttcagactcctgtcattgtccggntcttcaccgttatccatgagcgtggaagtnccgaganccttgagagancctcgtgggttttgnagtcaagttctacaccagagagggggactttgatcttttttggaacaactttnctgttttntttaatccncggttggntgaagtnccttanatgnccncggtnttaagcggacccaaatttaaatcaagganttggancnttnattttttccncactc

SEQ ID NO: 132655 - DNA, 474 bp, Arabidopsis thaliana columbia
  unsure (1)..(474): unsure at all n locations
acaaatttttntcatcttcttcatttctctgaattcgttcatcaactattatggtatcagagtgatggatctcgaagattcatccgattcaacctaaactctgagtatcttcgagctcttggatcttccaaactcgttgattctttgtttcttcaattttctacgttttctggaaaatntcagttgtttagagcttcgttgatcttgcgatggtttccgtagagaaattgcggcgtcgtactagaagatcgagcaaaacttcagctgagaaaactncagatcgtgttcaagcttcaccgattncaccgatttncaccaatttcgaatncgtttcancaaaaatttnnaattcaaaaaccatcgnancntatccttttanccacagtttcgantttntcgggnggctcanttatttcgccattngcggtctcaaaaaggtaggtcccgggatnannttttntttnagggaccttg

SEQ ID NO: 132656 - DNA, 545 bp, Arabidopsis thaliana columbia
  unsure (1)..(545): unsure at all n locations
tttctttctccggcggaacaatcacgaactcaggcgaatccgatggatagaggaaaaatgaatgtatcactcccaactgatctcattcgcgagatcttcgcgagattgccttcgaagtcagtggctaggtttcgtacactgtccaagcagtgggcgtctatacttcgcagtactgatttcaccaagctgttcctgagcagatcctcgaatcgtccacgtctcttgtttgctgttgaacgatacaaatgtaatgagtggcaatttttctcatcgnctcagtcacagaatcggtatgaggaatcagctcatttagagtttcatagcaaggttctcagggngatgttagnccacctacaattttgtaggttatgcctcaaggggtttgctcctaatttttccnccctggtgaataatccgntggatacctnngnccgggttgtnaattttntaancccnatttanccggggattttttaacgggggtttacccncngntncnnntnagggccaaaaagggttttgggggntttnanggtttnnccccc

SEQ ID NO: 132657 - DNA, 453 bp, Arabidopsis thaliana columbia
  unsure (1)..(453): unsure at all n locations
tcttctaccaatctaattcctctcttcagcttcttgtgttgtgacgcatactcgtcgcagtcttgagatatggccgccgcagtttccaccgtcggtgccatcaacagagctccgttgagcttgaacgggtcaggatcaggagctgtatcagccccagcttcaaccttcttgggaaagaaagttgtaactgtgtcgagattcgcacagagcaacaagaagagcaacggatcattcaaggtgttggctgtnaaagaagncaaacaaacccgatggagacagatngagaggtcttncctacggcanttctgnatggtcaacaaagnccattanccagaggcaaggggtattggtttgncctcttgtntttccaagnttcctnttnggancccgaaactttaaccacgggtntnccttagggttaanacggntttncngttnggnccaaaggccttt

SEQ ID NO: 132658 - DNA, 464 bp, Arabidopsis thaliana columbia
  unsure (1)..(464): unsure at all n locations
gtcaagtcaacgatggcgaaatctccggtggaagtgaatctgataccaatcgaaggtacacctgagaccttcgcagagtatggtcaagtcatcgaagcctctcgtgatggggccggttacggtcccaacgacgctcaattggntctctctaaaggaatcccacggctctatatacttaggctgaaagaaacacccttagggtttttcaagatcacgcatcacgcaaaggtgacacagtgtctaggatcaataggaggtgatatttggtatatgggagtggctaagcatctntttatttnaaggttgatnnttgnttngaaggagtttttggnttccagtnaaaagccaaaatttttgttcancttttttncattttcccccntgcggggggnaaanangnnttcccggnttttttnaagggttttttggggcccccaaattttttttgaaaccttnnanncctt

SEQ ID NO: 132659 - DNA, 386 bp, Arabidopsis thaliana columbia
  unsure (1)..(386): unsure at all n locations
cataagtatnggctctctagatgatataccnggtacttctgtcaccaatttctttaggnccataaggagtaccctggactttgattttgaagatgaaaacgaaggaacttgggagcccaaggagccaccgaccctttatatatttatcaattgcagcactcgggaactctctttcatagagaagtttgtggaaacctttgccagttcaaccccagctcttctngttcaatcttgagctagatacttttgcgtgctgaccnagggnttcttggctttcccccnaaagatcttnnactnccgggttcttttctnaattttattncccgtcnttttantatnccgaaccactngaggtatttaaaagtgggnagttggaacnatcttnt

SEQ ID NO: 132660 - DNA, 328 bp, Arabidopsis thaliana columbia
  unsure (1)..(328): unsure at all n locations
gggnatttacatacattcctcctactagtgaagacagatattnnctcttcattgatgagctgcttgggcgtttagttacccntcttggaggncgtgcagctgaagaagttgtttactcagggcgtatatcaacaggtgcatttgatgatataaggcgggcaactgatatggcatacaaggcagtagctgaatacggtcttaccaaaaanatcggnccnntgtctgtggctacactttctggtggtgggattnacgattctggaggntcgncatggggnagagatcaggggaaactagttgancttgttcaaaaangaangtgacaaat

SEQ ID NO: 132661 - DNA, 283 bp, Arabidopsis thaliana columbia
  unsure (1)..(283): unsure at all n locations
ggaggaggaggacggtaccaaggaggaggaggacgntaccaaggaggcggtgggcgacaaggnggagggggaagtgggggaagttactgccgccacggctgctgctacagaggttacaacggctgctcangatgctgctcgtatnccggagaagctgttcagactcanccctntcactaaaacaatatattanccaatcaccaccatgcatgtattncattatntatgtatgattttaagnaaaccatnntgccgtttntaatgaacttccncaaagtttttt

SEQ ID NO: 132662 - DNA, 465 bp, Arabidopsis thaliana columbia
  unsure (1)..(465): unsure at all n locations
gggtaacatggcctgtgaaaatgaagttgtcgtggacctgtttgctggaattggatattttgttctcccatttcttgtgagggcaaaagcaaagctagtatatgcttgtnagtggaatccccatgctattgaagctcttcgacgtaatgttgaagcaaattctgtttctgagcgttgtatcattcttgaaggggataaccggatcaccgcaccaaaaggagtagctgacagagtcaaatcttggtctcatcccgagtagcgaagggaagctnggtcacagctattcaggcattaaggnctnaggggnggnatactnccatgngcaccgggaaacgtcaagggcctcagnttnngagcagttnggggcgagcattttancnaaaacanttaannggntatcgccanaagccgaaggcngttagctttggnagttacaagtggancatttggngaaggggaaattgt

SEQ ID NO: 132663 - DNA, 503 bp, Arabidopsis thaliana columbia
  unsure (1)..(503): unsure at all n locations
ctcttttccatttagatttttgattttttttggttctctaaaggaggagagaaatgttggctatcttccacgaggcgtttgctcatccgccggaggaactcaacagtccggcatctnagaaatgctctaaacaaccaaaacttccagaagaaaccctaaatgatttcttattacgttaccctctcaacactttctccatgtctttcggacaagctgctgttcttgcttacgttcgtccctctgcttccttctncatccaccagaggttnttttgtggatttgatgacatctactgtctctnctttgggagcttnnacaatctgttgtcaagctaaaccaaacaagtatgggtcttcaaccaagncnaacaaaacggngggccaatgttttgctgnatccganagggttattagggcctncttnggagncaagagggtccnttatncaagctngntccaagggtnggtcaaaagaccttngnnnngggtaagctttttccnttt

SEQ ID NO: 132664 - DNA, 523 bp, Arabidopsis thaliana columbia
  unsure (1)..(523): unsure at all n locations
tcaaaccttcacataaaaaaaatacttttgaatccgtgtttcattcatcgaatctttttccgataactatggctgaggaaatcaagaatgttcctgaacaggaggtgccaaaggtagcaacagaggnatcatcggcagaggttacagatcgtggattgttcgatttcttgggaaagaagaaagacggaacaaaaccngaggagactccgatcgcttcagagtttnagcagaaggttcatatttcagagccggagccngaggttaaacacggaagtnttcttnaaaagcttcaccgaagcgacagttcttcctagctcccnaagtnagggaagaaggttcagaatngtgagaagaggnaggaagaaggaagggagnaaggangaagcccacctnccttanaggtttatgggtaaaggnagggaaggggaaggaaggggtttnttttgggaatnttnaaaagtnaagctttccttggccacaannaanccctnatngccggtttaancccttcgtttnggacccc

SEQ ID NO: 132665 - DNA, 502 bp, Arabidopsis thaliana columbia
  unsure (1)..(502): unsure at all n locations
gttagttgattatggtgaagaacacagtaaagcttgtgggcactctcaatttggtcgtttttatgaaaaaggggaataccaagaatgggatgaagatcatcctattcactttgttggtcactctgctggtgctcaagttgttcgtgtcttgcagcaaatgcttgctgataagatgtttgagggttatgagaacacgaatgagaactnggtgttgagtctaacgncattgtcaggagcgttaaacggggctactcgaacctacatcgatggaattcagcctgaagatgggaagtccctaaaacctatatcactgnttcanatttgcaaactttngagncataatgntatgnctgggntttacattcctttgggtcaaaatccctattnncaaatttcgggttcggnccatttnaaacaatgtcgnggaangaaancttggtgtncgngggcctngtncggtctttcttgcttgggaancgaanggcccttttcnctncaantt

SEQ ID NO: 132666 - DNA, 594 bp, Arabidopsis thaliana columbia
  unsure (1)..(594): unsure at all n locations
aacgatacatgggcaagtatgactacaattgctgatttgaataacaagtgggctgcatatgctggacctggtggttggaatgatccggatatgttggaaatagggaatggagggatgacatacgaggagtatcgaggtcattttagcatttgggctttgatgaaggcacctctcttgattggttgtgatgtaagaaacatgaccnctgaaactttggagattttgagtaataaggagattatcgctgttaaccaagacccacttggtgttcaaggaaggaaaattcaagccaatggngaaaatgattntcagcaggtgtggtcaggacctttatcttgtgaccntatggtagttgctctctngaacccnttgctcttagccagcaacctattncaagcaatcattgggntattgtccggccttgnaatctaccnttaggcgntttcangtaaagagantttttgcagcncanangggttnaccagggaatacttcttgggtccctttgaaggtcaaagtttncgnncacggctttcanaatnnnccggtttaactccccnggcagntcccnacccttgtgatngggcntttttt

SEQ ID NO: 132667 - DNA, 548 bp, Arabidopsis thaliana columbia
  unsure (1)..(548): unsure at all n locations
gataattctccttctacttgttgcatgggtgactcttcttctcttcaattcagcattgatagttgtgccagtttcgctgggacgtgctctattcagtgccattcccattcttccaataactcatggcatcaagtgcaatgatctgtatgctttcgtcattggcacatatgccttttggnctaccatatctggggccaggnatgctatcgagcatgtcaagtcaaagaggacttcagtcttgcttaaccaantatggaaatggtgtgggattgtattcaagagctcggtgctgttagccanatggggntttatcattccggtgctaattggacttctgtttnagcttttngtgattgtccnncngagaggnccccctngatgaaagnccncgtggttcctccncgtatcaaagactggggctcttggggtcanncttttttgaaaaaacttgggctnggcttggtaantcctggggncanaatgntttccaaaaagtgggtggtagcttgggngnaaaagtttttgccggggaaagaaaantngggttc

SEQ ID NO: 132668 - DNA, 423 bp, Arabidopsis thaliana columbia
  unsure (1)..(423): unsure at all n locations
caccaaatggtccaacctcaagtatctttctcttgcccggaacaagtttagtggaacacttccttcttggttgntcaagtttgncaaaatccaaatgattgactactccagcaacagattctcttggttcataccagacgntaacttaaacagcacacgnttcaaagattttcagaccggtggaggtgaaggatttgctgagccaccaggnaaagtagagatcaaaatatcagcagctgttgttgctaaagatganttaagtttcagctacaatctattgtctatggttnggatcgatctttctgacaatctanttncattggggagntccccgaangntttnttcagacagaagnantatttnagtactttgaanctttggcccctacaaacttnccttgaaaggncangctttccacggnc

SEQ ID NO: 132669 - DNA, 369 bp, Arabidopsis thaliana columbia
  unsure (1)..(369): unsure at all n locations
cttctttttttgtttctctctcacaaacacaacaaatatggaatacagctgtgtagacgacagtagtacaacgtcagaatctctctccatctctactactccaaagnngncaacgtngtnggagaagaaactctcttctccnccngcgacgtcgatgcgtctctacagaatgggaagcggcggaagcagcgtcgttttngattcagagaacggcgtcgagaccnagtcacgtaagcttccttcgtcgnaatataaaggcgttgtgcctcagcctaacggaagatngggagctcagaatttacgggaaggatcagccgantttggctcgggaacttttnanncggaggaagaangaagcctncggtnttc

SEQ ID NO: 132670 - DNA, 447 bp, Arabidopsis thaliana columbia
  unsure (1)..(447): unsure at all n locations
ctntnctttccaagcaattaactgaagtccatcaaaacctnctctgacaatggtgtctccanacccagcccaccaaccggttcggcgancgcaaccgcaactgtaaccccaatcgnaacctcgagcacaacccctgccgggcaggcgtatgaaccccgtcctatgcatcatcgncgacctcgtcctcttgggactcctcgntgggtctcgccatattgatcacatncctcacactcaggncaaagcgactcatctacacgggtaggaagctcgcgtcnggtncaaggagtttgcttatttgggcaaatgancggatcaacatcaatcgtaaaaattcagcnttcggtgattcaaaattcatcccancccnggcggaaaccatgttttccgncaaggattaccactcccatggcggtnttcttccangggnttcnatccattaacnag

SEQ ID NO: 132671 - DNA, 643 bp, Arabidopsis thaliana columbia
  unsure (1)..(643): unsure at all n locations
actttcttatcacagggtaaggaatatgtgtttgttgccaattcagacaacttgggtgccatcgttgacttaacaatcctgaagcatttgatccagaacaagaacgaatactgcatggaggttacacccaaaaccttagctgatgtaaaggggggaactctcatttcttatgaaggcaaagtccagcttctggagattgctcaggttcctgatgaacatgtcaatgagttcaaatcaattgagaagttcaagatattcaacacaaacaacctatgggttaacttgaaggncatcanaaagcttgtggaagcttgatgcacttaaaatggaggatcattccaaacccaanaggaagttgatggagtcaaagttcttcaacttggaaacttgcagccggngctgcgataagggttctttggcaacgctatcgnngtttaatgtncctcncncacgggtcttggcagtgaagggaaattcaaaattggttgttcggccagcttntctcttcaactagnntggtggttnggcactccnaanaaannttgaatttncccccgacccccaatgattgggnccnnntcaaaaggggttctcttgnccgttantcnncccgttgncncnccaaccnaggtnttggatnctt

SEQ ID NO: 132672 - DNA, 309 bp, Arabidopsis thaliana columbia
  unsure (1)..(309): unsure at all n locations
ataattatgtctatggggaagaaacatcttaacatcaattctctgaatcaccaatccacaagggacgaagacaacaattgcaagaacagtctcttttttggattgtttgacgatcctgaatctacaaggttgagaagtgggagtatgaagagacaatacagcgacatgggagatagctaccacagagtttatgacgaacaaaatgatgatgttgantatgatngtgatggngatgangatgacggatcancggctggcncatnacagtcttncntncnnctnggcgtactcntgagagcncttttccgt

SEQ ID NO: 132673 - DNA, 526 bp, Arabidopsis thaliana columbia
  unsure (1)..(526): unsure at all n locations
ggaaaaacccataaccacaacaatggncaccgaaacccaaatccgaatcggagtaatgggttgcgccgatatcgctcgaaaagtctctcgagcaatccacctcgctcccaacgccacaatctccggcgtagcaagccggtctttagaaaaagccaaagcctntgncaccgncaataactacccagaatcaaccaaaatccacggntcttacgaatctcttctcgaagatccagagatcgatgcgctctatgttcctctccccactagtctccacgttgagtggnctattaaagcagctgagaaagggaaacatatccttcnggagaagcctgttgctatgaacgntaacttgaagtttggtaaagattgttggatggcttggtgaagcntaattggnggttccaanattaatggatgggnacttatgtggggtttcaanantcccctangaacttnntttgggttttaaagaagattcctttcctantccttaaccgnnntggggcaantttaaaaactnnnaatt

SEQ ID NO: 132674 - DNA, 566 bp, Arabidopsis thaliana columbia
  unsure (1)..(566): unsure at all n locations
agcagtttcattccatagaagaactagggttaggtgagatgttaaagatcgaaaaagaggaggtggaggaagaggaaggagttgtgacaagagaagtgcatgatcaagatgaaggtgatgagacatccccatttgaaataagctttgactacgagtacacacacaagaccacattcgatgaaggagaagaagatgagaaagaagacgtgatgaagaatntgatggagatgggagtgaatgagatgagtggtgggattaaagaagagaagaaggagaagnctcttatgcttagattggactatgaatcagtcatttccacttngggaggccaagggatcccattggaccgcccgggtgccatctnnaaatagacctcgtcatggtttgttttcccaacccataccatgggntgaaaagttggngcanaaggcttaatcaatnacaaaccactttcctngggcctntggggttncaacctttggagaattctttgnggattttanggannannggcnttgggtttntaaagttnccccnggnnaaangngcccaanttttttcccnaa

SEQ ID NO: 132675 - DNA, 655 bp, Arabidopsis thaliana columbia
  unsure (1)..(655): unsure at all n locations
gcaatcccggcttctggatttacttgcgtagggattgtgggaatcaaagatcccgtacgtcctggagttaaagaatctgttgagctttgtcgccgtgctggaatcactgtgaggatggttacaggagataacattaacaccgcgaaagcaattgctagagaatgtgggattttaactgatgacggtatagccatcgaaggtcccgtattcagagagaagaatcaagaagagttactagaactgattccaaagattcaggtgatggctcgttcttcaccaatggataagcatacactngtgaaacagttaaggacaacgtttgatgaagttggttgcttgtcactggagatgggaacaaattgatgcacctgcacttccatgaagctgatatttgggctagcaatgggaattgnttggaacttgaagtnggcgaaagagagcgctgatgtcatcatcctcgacgataattcaacagatccgcanaggtggttatgggnangtcctnttttaatnaacaccagaattccgtccagttcanttaccncaatntggnggatggnnggnaacttcnttcactggttaccgnagngnccnnantnttncaatntggggggnaaaaccaagnnantngggtttgtttgtcaagcccncccnt

SEQ ID NO: 132676 - DNA, 554 bp, Arabidopsis thaliana columbia
  unsure (1)..(554): unsure at all n locations
accatcatcacacaccttcttcttcttcttcttctctctctatcacaagagagtcaaatccatggcttctacttcttccctcgctctctctcaagctctcctagctcgtgcaatctctcaccatggttctgaccaacgtggatctttaccagctttctctggactcaaatccaccggttcacgngcctcagcttcgtctcgtcgacgtatcgctcaatccatgnccaaaaaccgatctntccgtcctcttgttcgcgctgcagctgttgagactgttgagccaaccactgattcgtcgattgtggncaaatcggtcaattcgattagggtttttggntaatccgatgcggtggaggaggccaaatcagggcaatcctgggntttcctatnggggttgtgctnccgatgggntcanaattttgaatggtggagggcaatgagggatnaaccccaagnaacccnttattggtnaaccgngaccnattngtntttnttntggcaaaggnttaatttttgcttncggggtgggttnaatttccggtntgnaaangtnc

SEQ ID NO: 132677 - DNA, 503 bp, Arabidopsis thaliana columbia
  unsure (1)..(503): unsure at all n locations
agagagagagccccacaaacaaacaaaatggatttnaaccaaatcttgatccnctcatttctctctctttttaccttagccatattcttgctcacaagatccaaacggaaactaaaccttcctccgtcgccggcgatctccttgccggtgatcggacacctccatctcctnaagccaccgcttcaccgtaccttcctttccctttccaaatccatcggaaatgctccggtcttccatctccgactnggaaatcgccctcgtttatgtcatctntttcacgntccatcgctgaagaattgtttcacaaagaacggatttcgttctngcgaaaccgtncnaagttcaaccataagtaaggacnctagggctacaancggcaaccctnctttaactttngggcaatcttacggcgnttcatttggaggnancctccggccgcattangccgccgtngaggtatttttcactnattagnctttaattcnggtttctngaanantcng

SEQ ID NO: 132678 - DNA, 645 bp, Arabidopsis thaliana columbia
  unsure (1)..(645): unsure at all n locations
acaacattcccgcccgcgaggaaacagggaggatgagtttgacgttgaccttgaggaattgatggtcatggaagcaatatggctctctgttcaggaaacagggacgcagagaaattcagcttcaggggaaattacctcttctaggcagtatgtaacagataatcatagttatgtttcttcaccaccacgagtgactccaatcgtagaaccagcaacaccgtcttcatcatctggtgggctttcttgtgcaatctccgcacttgctgaacgccaaatggttggcgaatcctccagtcacaatcataatcacaatgtcaacgtttcttcatacagtatgctttcccgggaattgtgacagttactacgggcattgggaccaagagggtaggttggcatnaggcaaccctcatcatcaatcggnaatcattncgggnattggggngaacaaggaagcagcancagctntntnaagtttttccatgccaggggggggtttccccaantttcctcnncctccnccttggncatttttncccnngggtttttggaccaaatgttatgcttttgctttttttttggaanggtttttncccgggnatttcnccncttaggttcctggntaaatgggntnttgancttnggnna

SEQ ID NO: 132679 - DNA, 502 bp, Arabidopsis thaliana columbia
  unsure (1)..(502): unsure at all n locations
caatggagtcacgcgtgctgttacgcgccaccgcggatntcgttggaattccgaaattgagacgaccaatcggagcgatccaccgtcaattcagcactgcatcgncttcctcgttctcggttaaaccaatcggaggaatcggagagggagcgaatctgatctccggtcgtcagcttcgtccaattcttcttctcgattcgtcggcgatcaacggaggagagaaaagagaaattntcaaaccggttaaagccgccgctgctgaaggtggagataccnctngggatgctaaanttggattnctcgncaagtatccantggntaagtcactgggnttctttcntcttcaaagtggtaacttctttgaatgtganttttcaacaatccttnacaagaagatctnataatttactttcccntaatcccnaattttgttattccggtgntnaaacatttttttcggtngggnagtttgtttannttgctttaaccaannttgggcccg

SEQ ID NO: 132680 - DNA, 577 bp, Arabidopsis thaliana columbia
  unsure (1)..(577): unsure at all n locations
gagaggtttatcgagaaaaatccaagatttactaaaaaaccactatctctctgctcttcctctgtctacattaatgtaattttgatcatcggattgggtgaaagaaacatcaaacncctaaaagagaagcctttaaagttttttttaatcaaaaacaaaaggaagaaaattttcctttttgtnttagatggcatgaatcatcatcatcgctttgctttcttgattctctatttcgtttgatgggatttgtttttctgggaatttattcattcacccgctgccatggctaaattatctttcaaggattctcttaaagctcttgaagncgatattcaacacgntaatacactagctnttagatttatcccccggggngaaggattgaagcncgcgttcagaatgaggnttatccatacagnccgncctggtnaaatttttcctttttcctggnacaangggcctgnntttaaggtttcctgggttncccccggnntacccnaggggcccnntttaaaaagccttttncanngtgggggaanaaccnattccgggtttcggaagaaaagcccccntttng

SEQ ID NO: 132681 - DNA, 522 bp, Arabidopsis thaliana columbia
  unsure (1)..(522): unsure at all n locations
agaaacgatgagttctcagatttcggagattgaacaagagcagctgatcgagaagcttgagatcttcaagatccatggcagagacaaacgtggccgtaagatccttcgtattatcggaaaattcttcccagctcgatttctgtcacnggatgtnttgaagaagtatctagaggagaagatatttccncgattaggtagaaaaccattcgccgtactctacgtccacaccggcgtacagagaagcgagaacttcccaggtatctcagctctacgagcgatctacgncgcaattccggtaaacgtcagagacaatcttcaggaggtttacttcctccatccaggncttcaaatcacgntntcttcctcggcaccntcgnccgattttctattttccgncggggttnntacgggaaagcttangggacantaagcaagagtttgatnttctnttgggaacaattttaaggangnattaanaatnaaattccccggagnttttttacgatcaacnntgatnaacct

SEQ ID NO: 132682 - DNA, 445 bp, Arabidopsis thaliana columbia
  unsure (1)..(445): unsure at all n locations
gagaagaagaagtttcagagaaattttccgggaaaaggcgcaagaaaatatcagacaaaaaccgattattattctgggtccattttttcaaaggtttattaaaaacgcaaccgttttntcaaaagcgataatgagaaaacttcttcgacgactctgggtttctcgggaaacaagtactcagagagagagagatatttcgagaaaagaagaaacactcctccgatccatacgnaatangataaaggggaaaccaanccctaaatcgagcttctccttatcggaaatntcgcactttcaccacttttgactcctncnttcatcggcgggcgatctgaatcaccgtcaatctgattttcgtnttctgtganggaatggntcaatatgngtttccagttagngnngantgaggatgaancatnaagggnaggaaatnttatntngncct

SEQ ID NO: 132683 - DNA, 567 bp, Arabidopsis thaliana columbia
  unsure (1)..(567): unsure at all n locations
aaacacattgatcaagaatctcatctctaagataaaagttcggtggcaatcaggaaggaacagctcaggagaactggacatcaaggatgcaattcagacagctctccagacgactgtnatggatgttttgctcccagatccgctaacatttggtttcagactggtcagaaacggtctggagaaggatcctgagacaaaggctgagtccccattttcaaagggatctgttctgtcacatgaagtcactcctatggaggttctggtccgcaataacactagcgaagtattcaagttgaatctaagtgttacttgcagagatgtagctggacagaactgcactnaaggagctgatgccactgtcctctgggctggtgctcttnagtgggatnctcaaatggaagtagcggccgctgcaaggaagcaagcaactgttttctcactcttctttccttgttccagggngagnnancgntngtngcagctncctgtaatttaaggcggtaccaattttcttagnnncgggnangtcctnntnttctaacgganccanntcnttttgntgccnnc

SEQ ID NO: 132684 - DNA, 349 bp, Arabidopsis thaliana columbia
  unsure (1)..(349): unsure at all n locations
caacaacaaatcttaaacgttttactttgtgctgcactactcaacctcaatggccgcctcaacaatggctctctcctcccctgccttcgccggtaaggccgtcaagctttcccccgcggcatctgaagtccttggaagcggacgtgtgacaatgaggaagactgttgccaagccaaagggcccatcaggcagnccatggtacggntctnaccntgtcaagtacttgggtccatnctntggcggantcaccgagctaccttaccggagagttccccggagactacggatgggacanccgncggactntcagctnnccccntgncatgngtaaagaaaccgttnnctagaa

SEQ ID NO: 132685 - DNA, 270 bp, Arabidopsis thaliana columbia
  unsure (1)..(270): unsure at all n locations
gtgtgncccagcaacagtntgaaaactactccagtgtacagcaaaccaagggggaagccacgccccatgaacctccatcagttccttagcctttgtggtggcttcatgctttgtccgcaacanttcttcctnagnaattttaagagcacgctcaagttttcgtattttgttcntctgcncttcatttgtcttgtgaagtttctccactctcgagttcaattcgtttagcttcttctcggtttcactagtctgagcttctatcaaatcttt

SEQ ID NO: 132686 - DNA, 425 bp, Arabidopsis thaliana columbia
  unsure (1)..(425): unsure at all n locations
tttnttgaaagccggggnccttgaaacttacttgaacaagccgancnnacacttgaagtcaancattgtttcaaaaaggcctgaagaacattnctcaaaaaatttnctncaaagcagactccgtaaccagcaattgnaggtccatgcttcctaggaatggatgtttctattcgtgcacggctacttgtcacacttctgcccacaaggaagatttgtgccagtccttcttgcattagaactacagctagatcagcactagcagcgggatntgaggcctgtttgagtgtatcaagagccattgagtcccacatttcctttctcaacacaaaaggtcgtttcagctcaagttccaaagtatggaatgcaccaatctttacgtgctcattctccaggatatttttgccacgtatgcgcaaaacagatcc

SEQ ID NO: 132687 - DNA, 355 bp, Arabidopsis thaliana columbia
  unsure (1)..(355): unsure at all n locations
aagaattttgaacacatttaaggcttctttttaacaacaatggcgaatccctntaattncactaactccaagcatactnaaattcttctggaatattgtanccttagaagcaaatttcgccgcccaagctaatgcgagactctcgntctcacgtttaccaacgaagtagttgattgcgagtgcgattnagaaacagangcaagcgatctccaccgcgtacgacttcttcttcttcgtttgatnattagtgtctccttgagcttccgatgaagtcttgagatctggcgtctttggatcagcatgagttccgttttctgtaatcaatggagattcaagtgtctctatctcaactggt

SEQ ID NO: 132688 - DNA, 247 bp, Arabidopsis thaliana columbia
  unsure (1)..(247): unsure at all n locations
cgggaccaacatncanctattgacttttctaaactcaaccctcagtcnagntnctttggttatgtnaccaatgaacaacctattcnncgtttcggaaagagagcaccttatggttttncccttaaactctttactgtgcaactcctcaatggccttttgtgcaacgtctttggttttgaaagctacaaaagcatagcctttgctatcaccagagtccctatctttcatcagtctcacctcaaagaac

SEQ ID NO: 132689 - DNA, 266 bp, Arabidopsis thaliana columbia
  unsure (1)..(266): unsure at all n locations
ggtcaaaaaaagttgttgnccccggattccttgaccccttacccntaattccaagaatncaanganttgnaaaaaatccatggagaantccctggtttnaaaaagggtttcaagaagatcgaaacgcctaaatctcccnaaagtcatnagatcgactcactgatcagcgatgtccacgcagctttttccgtaaaaccgatgtcttacaacgcgtttgacttgatctcttcgctgtctcaaggattcgatctctcgggtttgtttga

SEQ ID NO: 132690 - DNA, 577 bp, Arabidopsis thaliana columbia
  unsure (1)..(577): unsure at all n locations
acgagatagactttgagttccttggaaacagaacaggacaaccagctatattacagacaaatgtattcacaggaggaaagggaaacagagaacaacgaatctatctctggtttgatccttctaaggcttatcacacttactcaatcctttggaacatgtaccagatcgtattctttgttgacaacataccaatccgaacgttcaagaatgctaaggatctaggagtacgtttcccattcaaccaaccaatgaagctttactcaagcctttggaacgcggatgattgggccacgagaggcggtttagagaagnccaattgggccaatgcanctttcgttgcatcttacaaaggnttncacataggtggttgccaagcttctttnggagccaagtactttgncacaaaaaggccncatntggtnggntccagaaagagttccgtgaccttttcggttgacaatgnggnggntnaaatgggtccgattaagtggncnntttaaatttttttccgcccnctnggtcccggttttccccttnntttaaagggccaaggcggttagttttccccttgggttgc

SEQ ID NO: 132691 - DNA, 512 bp, Arabidopsis thaliana columbia
  unsure (1)..(512): unsure at all n locations
tcgacttcctcttcctctgactttnagcagctctgtcttcttctcgaaatcgtctcctgtttctcctgctttcatggatgcttcaaatcccaattcttctagaaaatctaatgtctctnccttcgctcagtccagtcgaagcggtggtagaggaggaggatatgagagagataacgatcgacggagacctcagggtcgtggcgacggtggaggcggaaaggatagaatcgatgcacttggacgactcttgacgagaatattgcgacatatggctactgagctgagattgaacatgagaggtgatggttttnttaaagttgaagatttactttaacctgaaatttgaaaaacttctgcaaatatncagttaaagtcacacacggnttgatgaaaattagnggngctttaagaaagggncaataagnaacggttttagtcncatcggttgagaattggggnnccctttantccgggntnaccaaggccntttgtnanngacggttttagncaaa

SEQ ID NO: 132692 - DNA, 453 bp, Arabidopsis thaliana columbia
  unsure (1)..(453): unsure at all n locations
ctaaattcctcagtctcgagaatcttcatcgtcttcacgagctcactcgaagatgttaacggcagatataccaccgaatcaatcaatctacatccaaaacctcaacgaaaggttcaagaaagaggaattgaagagatctctttactgtttgtnctctcagtttgggaggatacttgatgtggttgctttgaagactccgaagctccgaggacaagcttgggttacttttagtgaagtcactgctgctggtcatgctgttcgtcagatgcaaaattttcccttctatgataaacccaatgcggttncaaatatgcaaaaagcaaaagttaagntttgtntngcttnaaggcttttggggaacttttngttcccaaaaaggtttagganggggggttccatggnnggnaaangtttttnaagaaaaccggttanggtttnccnaanggccccaaa

SEQ ID NO: 132693 - DNA, 572 bp, Arabidopsis thaliana columbia
  unsure (1)..(572): unsure at all n locations
ctaaaaatggtagcttctctttcctttcattccatcgccaccgttaatccaatcttctccggcgatggtggtcgttcaatcttccggactaatcgccgattcgaagcaactggagtnagttgccgaggacagaatcctactgacgagccacagacaagtaaaggacccgagccggataatgttctactcaaaatcgcttggtacggatctgagctactcggaatagctgcttctgttttccgatctccggagacttctccgattgtaacaggctttgaggttcctgttgattgttctggtcgagccgttcgtgtagctgtcggtgggctcgattaaacangnctttaaaccggtcctacttcgtnacaggtaaatttgacgccggaggttttatgagggngaaggtgtgaattcgctgatccggnctggatcntcaanggggcttnnctcnttcaaaagggattgcacttaattccggaagccttaatcgnggaatccaattttngtncnncatgaaaatgggggnatttttgagggtaaanggattttgncaattggaattaaccttttta

SEQ ID NO: 132694 - DNA, 570 bp, Arabidopsis thaliana columbia
  unsure (1)..(570): unsure at all n locations
tttttttttttttttttaaagaagaaaaagagtttacttacgagtctcttcaagaggagacaaacagtacaaggagaaccttacatagagaaacatagcacaagagatgcgattaaaagggtatttaaaaagcttcatggagcttcttcaaagacaagatatgatgatgaagatgattctatgtccaagaagaagaaagatctcaaaaaggtttagtcttctttagcttaaagcattttcaaatcttacccaaagagattagtctgaagaattttgaatgttaatatggtttctgttttggctatagaatgttcaaacctgccgacgtaaagtccaccctgttctctgtacanctgcaacttcacgggacggtaagggggttaggtgncaggaggaaaagtnggtcctcaaaggtccctagtcttacctggggggggttcctccggtgcaagttnccatgncccgggacncgggaaagggggaacttggtncaaggccngcccaagggtttaagccaaggttcttggaattccagncccggggcccaaatacccctnttttttttttnna

SEQ ID NO: 132695 - DNA, 472 bp, Arabidopsis thaliana columbia
  unsure (1)..(472): unsure at all n locations
aaaactcattcagggtcagcttataactggagaaacagtagcaataaagagactatctcaaggntcgacacaaggagctgaagaattcaagaacgaagttgatgtggtcgcaaagctacaacacaggaatctagctaagctcttgggatattncttagatggagaagagaaaatacttgtctatgagtttntncctaacaaaagcctcgactacttccttttcggtataacaaatcatcactcattcctctaaagaaaatatcggttttcggattaatcagattgttttctttttgtttgtaggtaatgagaagaggagagttttgggttggcaaagaaggtacaagtccattgaagggntagcccgngggatacnntatttncatcggggttctcgggntaacgtccattcaccggncccttaagnntgtaacatccctttggtgcagcatnatccnggtnncanattcgg

SEQ ID NO: 132696 - DNA, 481 bp, Arabidopsis thaliana columbia
  unsure (1)..(481): unsure at all n locations
acttacatatttggcgcgtgttgtgcaaccactgtctttataccgtcgtttcacaattaccgaatttggtcattcnttggccttggaatgaccncttacaccgcttggtacttagccattgcctccatcatccacggccaggcggaaggtgtgaanattcaggtccaacaaagctagtgctttattttacgggagccacaaatattttgtacacctttggaggtcacgcggttactgttgagattatgcatgctatgtggaaaccacagaagtttaagtacatttacttgatggcgacgttatacgtgttcacgctaacgattccgncagctgcccgccgtttactnggctttcggagacggacttcttngaccacttcaacggtttctctnttatgcccaagaacgngtgggtnacgccgnntgttatcctaatgctaattcatcaagtttttaancgttngggtnngttnntaaccttt

SEQ ID NO: 132697 - DNA, 469 bp, Arabidopsis thaliana columbia
  unsure (1)..(469): unsure at all n locations
gacgacgagccatggcttcaactttcagcggcgatgaaactgctcctttcttcggattccttggcgctgccgccgctctcgttttctcctgtatgggagcagcgtacgggacagcgaagagcggggttggtgtagcgtcgatgggtgtgatgagaccagagcttgtnatgaaatcgattgttcctgttgttatggctggagttttaggtatttatggtttgatcattgctgttatcatcagtaccggaatcaaccctaaggccaagtcttactatctattcgatggctatgctcatctctcttccggtcttgcttgtggtctcgctggtctctccgccggtatggctattggaatttntcggcgatgcngtgttagagcgaattcacaacaacctaagtngtttgtgggaataattctgattctcaccttttctgaagaactttccctttnacgggctcanttgttgga

SEQ ID NO: 132698 - DNA, 475 bp, Arabidopsis thaliana columbia
  unsure (1)..(475): unsure at all n locations
aggaaataaaaaacatgatgatgggcaaagaagatctaggtttgagcctaagcttagggttttcacaaaatcacaatcctcttcagatgaatctgaatcctaactcttcattatcaaacaatctccagagactcccatggaaccaaacattcgatcctacatcagatcttcgcaagatagacgtgaacagttttccatcaacggttaactgcgaggaagacacaggagtttcgtcaccaaacagtacgatctcaagcaccattagcgggaagagaagtgagagagaaggaatctccggaaccggcgttggctccggcgacgntcacgncgggatcactccggatcgaggggtacttcacgtggaacctcagattgaggaggaagacggngggcgnaacgtcgnnggaagaaanttnangttnttcaaagatcgncctcctttttttgggggntttncaangnncaaaanantttt

SEQ ID NO: 132699 - DNA, 473 bp, Arabidopsis thaliana columbia
  unsure (1)..(473): unsure at all n locations
aagatgcctggaagatgctggtgtatcacctgaggaggtaaatnacatcaatgcacatgcaacttccactcttgctggtgatcttnctgagattaatgccattaaaaaggtattcaagagcacttcagggatcaaaatcaacgccaccaagtctatgataggtcactgcctcggtgcagctggaggtctagaagccatcgccaccgtgaaggctatcaacactggatggctgcatccttccatcaaccaatttaacccagaacaagctgtggactttgacacggtcccaaacggggagaagcaacacggnggttgatgttgccattatcaaactggttcggggttcggtgggcanaacnnnggtaggtcggcttntttgcctttaaaaccctngttttttttaaacccttttanggttttttnncccttttggggtaanttaaananncctttncccccnttttgggtttttt

SEQ ID NO: 132700 - DNA, 395 bp, Arabidopsis thaliana columbia
  unsure (1)..(395): unsure at all n locations
aaaaccaaccaaaggtccttctaatgttatggtgaaaggggtcgagaaaactaaatcatcagcttctgggattgaaccaagtggtaacaagancaaatccttgtnccaaantgatattgatgaaacnccagtggttgagaagacagtagtgatggtgttgccaagttcagctcgaagtataagtagagatcaggtaacacacgagaagtctgatgtagtctctgaaaacnccaccattcgagaaggngttgagaaagaatccattgaaacaatgcaggtgagtgggcnatnntctagtcttagttagattgggatagtcttgagtcgcttagtaacagaaccnccaanntttcttnacaaagtcaaagtttttttgnaaaaccatttggaggncc

SEQ ID NO: 132701 - DNA, 337 bp, Arabidopsis thaliana columbia
  unsure (1)..(337): unsure at all n locations
ctgtttcgccgctcaggtttcgtgaaaagaatctatcttgagcaatgtctccagctaaagttgatgtcaccaagaaagccgaccctaaggctaaggctttgaaagctgcgaaagagtgaaatctggccaaatcgttaaaaagcctgcnaagaagatcaggacaaaggttactttccacaggccaaagacattgaccgttcctagaaagcctaagtacccaaagatcagtgctncttcaaggnacaaattgggtcatttnccaggtnctcaagtacccttttaatttctggaatntgnccttgaaaaaggtttnggggnaanaaaaccctttnggntt

SEQ ID NO: 132702 - DNA, 225 bp, Arabidopsis thaliana columbia
  unsure (1)..(225): unsure at all n locations
ccagaactggtgtnctntgaactttagcaccggagatgtttggtggagatccgtgtccaaatntaatgaagaaactngcggtggaagcngtttttccttaantnaaagcagacgcagcagcaatcaaaagactgtaaaggtggttacttacgcnttcttacaggtttntaatggtattagtatgtttnatggaggcaacagnagaagttgggtattttccttagc

SEQ ID NO: 132703 - DNA, 518 bp, Arabidopsis thaliana columbia
  unsure (1)..(518): unsure at all n locations
catggncttaggtcgtggtccattgtntttaatctcacagtcacaaaatctttatcagtctacattctcgtattgcttgcctaatagtaagtccagcaatttntccggntcactaagattgggacctaagaaccaaccgatccggatcaagaccactccattgttaaagaaccctagaagatcatcgctttactatgttaacttggttggnattcgtgtcggaaacaaaattntggatattcctacaagtgcactcgcctttaatccggccaccggagccggcaccatctttaantcggggacggtctacacaaggctagtngnaccagcttacgtggcggtgaggaacgagttcaggngacgtgttaagaaccgnaacgnaactttactaggaggtttggcaaatgctnactccggttccgntgggttcccgttgggtaacggttnatttttggccgggattnaacgnaantttgcctcaagaaaacctttttatccaaaagttcggngtanactgc

SEQ ID NO: 132704 - DNA, 495 bp, Arabidopsis thaliana columbia
  unsure (1)..(495): unsure at all n locations
caattaatcagtttcgtgtgtttggagaagaagaagaacagatcaaatacgaggagagatctctaaagagatttatcgtttcaaatttgttcacgttgagaagtttaatttagattaaacaacaaaaagatgggttactggaattccaaggttgtnccaaaattcaagaagttattcgagaaaaatagtgctaagaaggctgctgctgctgaagctaccaagacctttgatgaatctaaggaaacaatcaacaaggaaattnaggagaaaaagncaggactccaaccaaaggtcgtggaaacctatgaagncacgtctgcagaagtcaaggctttggtgagagaccctaaggtggctggnttnaaggaaaactcagcggctgttcagaagtaccccgggggngcttntcaaaattgaattcccgggtcaaagcggtnagttaggttcgctngcttcgnngctggctntttcgaggcccgtacgtnanntttgngc

SEQ ID NO: 132705 - DNA, 512 bp, Arabidopsis thaliana columbia
  unsure (1)..(512): unsure at all n locations
tataagtaagagcacatagtagaccagaaaaaatcatcaaatccatctcccactcttctagcatcttgaagcttaaatctnagccgtccgatcatgccgatcagaaacatcgccattggccgtccagatgaagccacccgtcccgatgccttaaaggcggcgttggctgagttcatttcaactttnatctttgtcgtcgccggttcaggctctggcatggntttcaacaagctcactgaaaacggagccaccactccttctggtctcgtagctgctgcagtggctcatgcctttggactcttcgtcgntgtctcagttggtgncaacatctntggtgggcacgttaaccctgccgtcaattttcggtgctttcattggtggtaacatcaatntcctccgtggtatcctntactggattgnttagttttttgggtccgtcgncggttgccttaatcccttaaattngcaccggtgggttggntnnncggctttttgggtntttcttgnntatc

SEQ ID NO: 132706 - DNA, 237 bp, Arabidopsis thaliana columbia
  unsure (1)..(237): unsure at all n locations
atacaacccggccacttggatgctggaagtagctcccttgcggccgagttaaagcttggagttgactttnctgagctatataaggcttcanccttatgccaggggancaaggcgttggtgcaaganctaagcgtgcctccccaaggngcgnctganctntactttgccacanagttttcacagancacatgggggcaattcaaatcatgtctatggaagcagtggtggcnttatttg

SEQ ID NO: 132707 - DNA, 499 bp, Arabidopsis thaliana columbia
  unsure (1)..(499): unsure at all n locations
aaaccgcaaaaactttacattcttaacaattncaaccctatgggcttacttnatcatctctgggatgatactntcgctggnccacggncagcgaacggccttngcaagcttcgtaaacaccataccntcagtttccgacctagctccggcaatggtacgccgtgttttgctaaaaactgaaccgcttaatcaaactctttaaaacgnaacttaaaattagtaaacatgcactgaagtatttgaatctgttgatcgttctgattccttaattgattagatcgttgatttgatgtatttttctngatctggattttaatggatgtgattngatcaatcggaagctggnagtgcgagatcgtacgggtgaggattcgctaccngaagaagcagtgaaagtttcacgcgtatccatggtaataaaccaccggggtaccaacgggagtcagnnccagtttggctgncggtnaaatcgggggataactttttttcgcggtgnttc

SEQ ID NO: 132708 - DNA, 498 bp, Arabidopsis thaliana columbia
  unsure (1)..(498): unsure at all n locations
ggaaaacaaattgaaacttcctctctctcttctctctctaaaaaatctttcagagaagaggggaagctttgtnttttgtttcgccggttggatatcattccaacgcttatctgtcccgatttagtcgggtcttatgtctagcatctctggctttttnagtagtgttggctggctcttgcccggcagcgttgtttccatgagcgtcgttggccggatttggtttgtatccaacgttgttttgttttcctttcaataatctcatagatcttatgttggtgataatggttaggtgattttccgcttaaagatctttattatccaattcgatcctttgaggttaanattttcaaggaatcaatttagngggtttccacctaaggtgaaggaaaaaaaggagntttccggngnaaanaaaaaaatgcccccnaggnnaaaggntttaaccgggaagcccnnttggttttttaagggganccccgggnaaaaantgtttttttg

SEQ ID NO: 132709 - DNA, 481 bp, Arabidopsis thaliana columbia
  unsure (1)..(481): unsure at all n locations
cttttttgtctagagagagaagcttttatctttcatcgccgttaacagggctattccgttgccgtgttcttgccgtcaacatgattttttcattgccgtagacatggctttccgttgccgtgtttttatgtcgtcgcttttgttaggtgttgtttgtttgcttccaataaaggggaattgtctttcgtctctgtctttacagagttttatgagagatgacacacctatcttatatgtttatagtttatacaagtgttttnatgtttgtgggatttgaagcgaanttaaccatcttatggtgacttagatctatttagaacctttagttggtggcttttctccggatcgtcatgttgggtatacgggttactgaaattcaagggtagnttgcaaataaaattgaggnaaggaagnaattccctcggggtttaanagcctttagccggattcaatgccggngtttnatccgtttcaccacttt

SEQ ID NO: 132710 - DNA, 630 bp, Arabidopsis thaliana columbia
  unsure (1)..(630): unsure at all n locations
gtaaagaagtaacaaaaccaaagcaaaaaatggtgaagatcgaagttggaagtgtgggagactcattcagtgtatcatctcttaaagcttacttgtctgagttcatcgcaactcttctcttcgtattcgcaggcgttggctctgctgttgcgtttgccaaactaacctctgatggagccttggacccagctggtcttgtagcaattgcaattgctcacgcgtttgctcttttcgttggagtttccattgcggctaacatttctggtggtcaccttaacccagccgtgactcttggccttgccatcggcggaaacataacactcatcacaggtttccgccatttgtgttttaaatctaaaatggctaggaaatttcggngcttttctttgattctctttggttctgtatcttgtccactgcaagcaataggcaatggctaggaaaccttgaagggggnatcaagtnggtgttccagnggttcanttaaagcctcttntgagacgncgngnncccnanacccnatncttccagtcnctggcttnaantttaaaggnggttaannngagcnccggaaggtttctnggcccgcnttccgttnggnnaccnggcaaggnagcaaacctttnttag

SEQ ID NO: 132711 - DNA, 407 bp, Arabidopsis thaliana columbia
  unsure (1)..(407): unsure at all n locations
gaaaaagtaaataaaaaagagatggttttnatcaaagagagagagatggagatnccagttattgattttccagagttggatggagagaagagaagcaagaccatgtcacttcttgatcatncatgtaataagtggggattcttcatggttgataatcatggaattgataaagagttgatggagaaagtgaagaagatgattaactctcactatgaggagcatttgaaagagaagttttaccagtcagagatggtcaaggctttgagtgaaggcaaaacctcagatgcagatttnggaaagcagtttnttcatctancattaaacccannttcaaatnntntttnnagttccccaaacnttttcaagggggcccnncgggtaaaaggtattttnaggnttngntttgg

SEQ ID NO: 132712 - DNA, 555 bp, Arabidopsis thaliana columbia
  unsure (1)..(555): unsure at all n locations
cttagccttacgtncgccaacgntncntncctatcctacgctcatctatcgtcactcccacagcgagagctnnctcggaagtttccggttgtactacgatcgatccanattttntcgtagagatctctgattctaaccagacgcgggcgatgtcgaaagctcgtgtgtacaccgaagtcaatgtgattcgacccaaggattattgggattacgagtcactcattgttcaatggggggagcaagatgattatnaggtagtaaggaaggtagggcgtggaaaatatagtgaagttttcgagggtataaatgtgaacagcaaggagaagtgcattatcaaaatcctcaaaccctgttangaaaaagaaggtaaggaggggggttaaaatactttcagaacctattcggtgggncaantattgtcaaanctgctttgatgttnttagggggccaccattcgaaacctccaagcttgntatttnattatgtttcagcncagcctttaaagtttttttccnccggtgcctgttcgcattgtcttcancttngntgtgntgc

SEQ ID NO: 132713 - DNA, 362 bp, Arabidopsis thaliana columbia
  unsure (1)..(362): unsure at all n locations
cctacctttaacttcgaattagggtttatcaggattcantcgcctgctcacttgaatttnttcgcaagctcaaaaagttcccaaatttttnaaggaagatggtgaggccgtatgggattaaagtgaacaagagaaaggagagagaagagaggtatgataaggaagaagatgaagtagaggngcaaccaaagtttgagcaaaaacaaaaggcaagngaaagttcgaagaaagctaaaaaagaaagcacttcaagngcagtggaaggttattnncgggnnggaagtaccttanggaagcaaccttcannnagcanagggnttttttttgggtgggggattcccttttncccctaaaatnctcct

SEQ ID NO: 132714 - DNA, 554 bp, Arabidopsis thaliana columbia
  unsure (1)..(554): unsure at all n locations
acaagtcccatagtttgtttttattggacttctttcctctcatcttctccagcagaaacaaaaaaagctgaaagatgtggttttttggntcgaaaggagcatctggattctcgtctcgttcaactgcagaggaagtcacacatggtgttgatgggactggtctcactgccatagtcacaggagcatcaagtggtataggagtagagacagcgcgtgtcctttcactgcgtggtgtgcatgtggttatggcggtgaggaacactgactctggtgctaaagttaaggaagatattgtcaagcaagtccctggngctaaaactcgatgtcatggagttagatctcaagctcaattgcaatctgtcaggaaatttncgtcttagnacaaatctactggncttncacttaaaccnctttgatcaacaaatnccggggattatggnaatngccctttntgctctttaagggcaacaatcgngctgaaattnnaaccaatatttaggtncattnngggcccnnncngngaagnanccgggcggacgntttttnaccttnac

SEQ ID NO: 132715 - DNA, 568 bp, Arabidopsis thaliana columbia
  unsure (1)..(568): unsure at all n locations
atggaagcttgtacacggagatgtcttcaggccaccggtgaactctggtttattgtgtgtttatgttggtacaggtgttcagatcttcggaatgtcacttgttacaatnatgtttgcnttgcttggcttctnatctccatccaacagaggagggcttatnactgccatggttctcttgtgggttttcatgggcatattcgctggttactcctcgtctcgccttcacaaaatgttcaaaggaaacaagtggaagagaatgaccttgaagactgcattcatgtttcccggtatcctttttgctatcttctttgttctgaatgccctcatttggggagnacagtcatctgggagccataccatttggtacaaatcgtttgcnctcttctgcctctgggttggcatctcaggnccactaagntttcgttggtagntatcttnggtncaagnagccagnaattgaaggtccngtcaaaccaaaacaaggtccngtnggaagtcccgagcagccgtngttaatnaaaccagtttntntttncctattngngnnntntcccgttgtggggngtta

SEQ ID NO: 132716 - DNA, 538 bp, Arabidopsis thaliana columbia
  unsure (1)..(538): unsure at all n locations
caataagaaagaaagaaaaagaaaaccagagatggcgatgacgacagcatctacggtatttntnctaccggccaatgtcacctcggtcgccggcgcttcgtcgtccaggagctccgtgtctttnttgccgatgagaaacgccggttctaggctcgtagtcagggcagccgaagatcctgctccggcttcctcttcttcaaaagattctccggcagctgccgctgntccggatggagctactgccaccaaacccaagccaccaccgattggtcctaagagagggtctaaggtcagctaacctaaaccgtcttaaattccattagcttgtatatatatacgcatangcccaaagttactttatcgntggatgcattcataatcagttaatcgctatgcaaaaatttgtattanttagtgccaaaantttaaatttnaccacaacntnatgttcntnancatggttaaatntaaatttnattgttantgtgtgtgtgncttgtacccnatnttttcgtngtatnaatnngtnctatntttg

SEQ ID NO: 132717 - DNA, 412 bp, Arabidopsis thaliana columbia
  unsure (1)..(412): unsure at all n locations
gagaactacctttttttttttttctctctcttatttttntcccttctctcttcaactcgccgctgcttgtnttcttcgtctccnaccggcgcgtgtgggccaccatggtcacggcgtcggttggttttttnagtttttgtttagttatctagtttcatgtctttgtgtggagagatctgtggattggtttcattttgattccttctctactttttnctctnttnagatctagattttngtngcttaaattttgttgcaggttcttgtttctcctttgcatgagtccnccttggccctaaccgngttggntctaaggcactcattgtcgatgtgatggtgaatccggtttggggggnccnaattttaaggttttcncaaaaaggtttaacaaagnggtncnagggaaanaccc

SEQ ID NO: 132718 - DNA, 482 bp, Arabidopsis thaliana columbia
  unsure (1)..(482): unsure at all n locations
tcaaagccttatttcaatgaagccgggtatgataagcaggtcggaactgcggaaggaganaaaaactcactgggatacaacgagaatactttcttgctaaattgtaaaaccatgatgtatcttatgcggaaaccaccaaaggattttgaagaactcatcaaagntcatttcaganaacgcggatattacattttgaaggcatgtgacgnctncatgaaaggatatctcataggttccctcaccaaagatgcctcggttatcgntgaacgcagcagcgctaaattcaacttcagttgggttttaagcttatgctggctaagntagcacccaaaggttttttctcaagcactttaggcgnggttaggtgctgnactgccaatggatttccagnaatcttncagcagcantaaccacaatcctaanaagggtggcttngttnnaccngnttcgnttgccaattnnncccaaggnaaggntttcgg

SEQ ID NO: 132719 - DNA, 514 bp, Arabidopsis thaliana columbia
  unsure (1)..(514): unsure at all n locations
cntttttncgctccatttttgggttaccattactcagcttccgttttaaatatcacattagatggacgaaagcggaggtgatagtggttcagtggccacacctgttcaacagcgagcacatgaggcatggaggatttaccaacactatcttgacaagactacacctcatgcaaattacagatggattggaactcttgtcgtcgctcttatctactgtttgagggtttactatattcagggtttctacatcatcgcctatggtcttggaatctaccttctcaatctgcttatcgggttcttgtcccctcttgttgatcctgaagctggtgggggtctctgatgggccttctttggcctaattagaggttcngnatgagttcaagnctttcattcgncgtttcccggngttcaaattctggtanccctggcaaaaggttttntgcanagntttncncatnanaanntctgggggtttaaggtccnggnttttggnccantttnntggccnantgga

SEQ ID NO: 132720 - DNA, 615 bp, Arabidopsis thaliana columbia
  unsure (1)..(615): unsure at all n locations
agagtttggagaaaatgagtggtattncttcagccctagagaaagaaaatatccaaacggagtcagaccaaaccgggcagctgtttccggttattggaaagcaaccggtacagacaaagccattcacagcggttcaagtaacgtaggtgtcaagaaagctctagtcttctacaaaggtagacctcctaaaggaatcaaaactgactggttcatgcatgagtatcgtctccatgattcacgtaaagcatcaacgaaacgtaacggttccatgagggtacgtaagcagaggaaacaagtttatagctcttgtatattttattacaacttgtgaaaatgttaattttcctttatattttttncagttagatgaattgggtactgtgtaggggtattccaagaagngagggngcaagtaaagcttcttnaattnagcaanaggggtttcattgnccgnagtccttaattggnggatgaggcaaaaagttttaggttancggngcagnggngangaccttangnaggggtaattgattntnnccgccggttaancttccnanggccgtttncgctngccccattttttttgnaatgggttcaatggncccnntttncatt

SEQ ID NO: 132721 - DNA, 603 bp, Arabidopsis thaliana columbia
  unsure (1)..(603): unsure at all n locations
agcgtacaatnacgnaaaacagagagataaatccgggcattgagattttggagatagagagagagaaaaatcgaaatctattgtctatctcctcaatttggattggatttnctgcatatcatcgctctagctttcgcgggttttggattcgattccttacccttctccaatcgaagtttttggctttgaattggatttgggtttcgttccaaaatcagctctttttgttaatcagatatgcaggaccagctggtgtgtcatggttgtaggaatttattgatgtatcctagaggagcatctaatgtgcgttgtgcgttatgtaacactatcaaacatggttcctcctcctcctccanctcacggccatgggcacacattatatgtgggtggttgtagnaccaattgcttatgtatacgncntnggggcctagtagcgtnagaanncncttgctgtcaaacctacggaccnttgtgcccagngactccaatcaaggtnncccatgntccttccagcaaggttnnnanccaattttgggnatttttggcggccccaattgatccttnnggggnatnancgnaaatcngtgntttcaaattggaaca

SEQ ID NO: 132722 - DNA, 543 bp, Arabidopsis thaliana columbia
  unsure (1)..(543): unsure at all n locations
gttccgtcgccgcttcttcgatttttgacgccgccgcttcttcttcttcctcgcagcaggtaagtcacacaggtaactgaaagatggggcgtgttagaaccaagactgtgaagaaatcttctcgtcaagtcatcgagaagtactactctcgcatgactcttgacttccacactaacaagaaaatccttgaagaggttgccatcatcccttcaaagagactccgcaacaagattgctggattctccacccacttgatgaaacgtatccagaagggaccagtccgtggaatctcactcaagcttcaggaagaggagcgtgaacgccgcatggacttttttttcccgatgnagtctgcccatnaaagacctgatgangatcaaanggttggncaaaagngggctncttgnaggatgntttgctttctnctagggnaatgtcttgacaacttnccggnaatttnttnaagtcngnggcacaanaaaggtttttgggcnccaattnggttgttttcnggnggttggaagggnnccncgaangttnctt

SEQ ID NO: 132723 - DNA, 523 bp, Arabidopsis thaliana columbia
  unsure (1)..(523): unsure at all n locations
gaacactatggctttctnttcatgtctcaaattctatccatttnctatctctcaagctaaaaccttaactcaccattccgtatctntcaagcgaacttnttcttcttctaccatctccttcgcttctcctaacccatcagctctctcctctaccgatgtcaagcttctcgactcactccgtagccagcctgatgattccgccgcacttcgtctctttaatctggcctctaagaagccaaatttntcacctgaacctgctctatacgaagagattctccttcggctaggtcggtctggttcgtttgatgacatgaagaaaattttggaaggcatgaagagttccagatgcgaaatnggtacttctcctttctttgatattaatcgagagtnatgntcagtcggaatttcaagatgaggatttaaagagttgtttaattgggatgattncggaattcggggtaaaaccccgntaccccatttttaaaacccggatggtgaatctncntgntngatgggaaaatgc

SEQ ID NO: 132724 - DNA, 295 bp, Arabidopsis thaliana columbia
  unsure (1)..(295): unsure at all n locations
gactctagaagctttatcatcaaacggtcttttaaactttttgctctctgaaacncttncaccaactccattcaagtctctcgtcgatctcgagccattnccggaaaatnatgtcatcatatcgangaacacantttcggagatatctcatcaagaaccgccaccacagcgacaaccaccagctacgaatcaagggaagnagcggcggaggaggaagcctagggtttgcaaaaacgaggnngaagctgagaatcaacgnatgantcacattgtcgntcggaaganatcgaagang

SEQ ID NO: 132725 - DNA, 489 bp, Arabidopsis thaliana columbia
  unsure (1)..(489): unsure at all n locations
aagcaagcctaaaactggcattattgctggagttgttgctggagttacagttgtnctctttggaatcttgttgtttctgtnctgcaaggataggcataaaggatatagacgtgatgtgtttgtggatgttgcaggtgaagtggacaggagaattgcatttggacagttgaaaaggtttgcatggagagagctccagttagcgacagataacttcagcgaaaagaatgtacttggtcaaggaggctttgggaaagtttacaaaggagtgcttccggataacaccaaagttgctgtgaagagattgacggatttcgaaagtcctggtggagatgctgctttccaaagggaagtagagatgataagtgtagctgttcataggaatctactccgncttatcgggttctgaccncacaaacagacgccttttggtttatccctcatgcagaatctaagnntttcncatcgnctnagngggtccaaagangnggc

SEQ ID NO: 132726 - DNA, 539 bp, Arabidopsis thaliana columbia
  unsure (1)..(539): unsure at all n locations
aaaaaaaacttcaacgccgtttcttcttccattaatctcatctctcaatcaaccaaaagcttcccatctcaaatccctcagtttgattttctaggcaaacaatcatctgccaccatgtttatgaatcggctattcgggaaacccaaacaggagactagtactctccaaacgttagacaagctcaatgagactcttgagatgttagagaagaaggagaatgttcttctcaagaaagctactggagaggttgagaaagctaaggaattctcccgggcgaagancanacgcgcggctatacaatgtttgaaaaggaaaaggttatatgagcaacaaagttgaacagctcgggaattttccagctccgtattcatgatcaaaatgatttatngttagnaagggtgcttaaagcaccancaggngacttttngatgcttttnnnggcnttgagcttcctccaatgaaagctttnnngatagcatcaaacatntnttnttgttncaangccnattggattnggtcnttnaccaaccttngncgna

SEQ ID NO: 132727 - DNA, 477 bp, Arabidopsis thaliana columbia
  unsure (1)..(477): unsure at all n locations
gataaaatcagtgactcttcgttcgtttcatctcccaattgagtttaacgacaccaaattcgtctcacggccttgtttcctggcgagatccttcccggtggttcgttgttcaagcaccagagacgtacctaagcttgaactcttcagccgcggaaaattcgaccggattcttcaagatccgccacttattgaaaaagccgaatccgaactctcagattactgttcgacgcttgaaggtgatgactcttacagttgctggagagcttactttgaactcaaagatctcgaaagagaggagccaaaggttgaaagttgagaattttgattttngcaaaacaaggtggttttaaatcggttaaatcggggggtttanatggnggtnccttcaatgggggaaaggttaccaaaccncggatgggttaccatnttgggggaggnttncnnttngggggnaaggntttttttnnccancnnaat

SEQ ID NO: 132728 - DNA, 562 bp, Arabidopsis thaliana columbia
  unsure (1)..(562): unsure at all n locations
attaacccattcgatggttcggacggtggttgcgggtggatgtacggtacccgtcaaatgggttctaacggaaacgacgacgctttggctacgctcgcagacttggcttcgcctcctcagaaattgaaacctataaggtgtggcgttaagcttccgtcgtcgtcggaggatcgacatcctcttgatattctcgccggaaccctagataggctgccggagatgggttttggctgcttcgaagctcctttgggatcgaagattgctgacgtggaggaaagtggtcaattgactcgtgggttttcaaaggaagaggatgattctntttccntcntctttaaatggnagtttcaagctcgaaatcgcatcttttgggatggctcttttttaagctcctctttttatagcagcgataggactcntntccanacgttcgaanccctcaagggtaaaaaaangnggaaaaaaggtaaaacttgggaattttttgggaaacttttggggantttttaagngcagggangtnanaanatttnttanttttnggaagtgagggggatncnta

SEQ ID NO: 132729 - DNA, 606 bp, Arabidopsis thaliana columbia
  unsure (1)..(606): unsure at all n locations
aacaagtagaaactttaaaacgagagagagagaaagaaatggcgacatcgggaacgtacgtnacggaggttccgttgaaaggttcggcggagaaacactacaagagctggaagagcgagaaccatgtnttcgctgacgccattggccaccacatccaaaatntcgttnttcacgaaggcgaacatgactctcacgggtctatcaggagttgggactacacatatgatggaaagaaggagatgttcaaagagaagagagagatagatgatgagaataaaacattgacgaaaagaggactggatggtcacgtgatggagcatctcaaagtatttgatatcatctacggatttattnccaaatcttgaggatagctncgtcttcaaaaatcactatgntatgggggaagccgcaaccgttgactttccccgacccaagggnttcatgaattcgtcaaagcaaatnggtttttncatttnaggcncgttaccaaagttttccccaaccatnccggcatactntttgtcggtattntttttntngggctttcggtaccattnataagggggctttggggtnttttcctgacctnttggttggantctnntc

SEQ ID NO: 132730 - DNA, 503 bp, Arabidopsis thaliana columbia
  unsure (1)..(503): unsure at all n locations
ataagatttagcttggagaagagcaagtnccgaaaatggaggggcgtcgtgtatagatccaccacccacagccctgatggaagcagacaacggaggccccaattctagtcatgcatccaaacaacgtctgcnttggacgcatganctacatgaacgcttcgttgatgccgttgctcaacttggtggccctgatagagctacacccaaaggcgttcttagagtgatgggtgtacaaggcttaactatatatcatgtcaagagtcacttacagaaatatcgacttgcaaagtatcttccagattcgtcttctgaaggggaaaaaacttgntaggaaagaatctggagatatgctctctgggttngncggctcgtcggggnatgcagatactgngccctcaagtttcagtggnagtncagaaccggttcncgggcaactggagtnnangcagttnaattcggttggggccaggaantcnttngggggtattttggccccncccctc

SEQ ID NO: 132731 - DNA, 459 bp, Arabidopsis thaliana columbia
  unsure (1)..(459): unsure at all n locations
aattttgtctatagctaaaaaaaggttcaattgtaaaaggaatatggagtcttaccaaaaccagtccggagcgcanagnactcaccaacagcttgaccaatttggaaatccatttccagccaccaccggagcctatggaactnccggtggagctccagccgtggctgaaggtggtggtttaagtggcatgcttcaccgttctgggagtagctctagctctagctcggaggatgatggactaggtggaaggaggaagaagaagggaataacggagaagattaaagagaagctgccgggtcatcacggcttcaacaagacttcttctttaggttctacaacgncggcctatgataccggnacgttancacgggaggaaggcattttggggagntcaagagaagtttccgggtggcacaatagttcanttnattaacttntttggnngggcgtacggtntta

SEQ ID NO: 132732 - DNA, 525 bp, Arabidopsis thaliana columbia
  unsure (1)..(525): unsure at all n locations
attgcaaactaggaaaaaatattttattatatgtnctgcttagtttattatgtgtttttattcaaaaatactttttacaataaattatattgagttttggtttttatgataaaacaataaaactaggtttgtttatatatgtgtgggtctagtttagtttcgattttgagatataagataattaanccgaatttnggatttattttgcaggtcttgtttatgtttaggtttaggttgttaaaacatttcggttttaagtgtattaataactttcatgtcttgcaaatgtaatcagcaaaccaagtagcgcatgtgaattgcgggaactgcatgatgctactaatgtatccaatatggggcaagnncagtggaatgtgccgtttgtaactttgtcacatctgttgggggtagtccccttccttatcccaaaangccgggtttaaaccaggcgnaaaccttccaaaatacccncccntttttttttaacaccagaccggttctttannaaggggttttttttngggt

SEQ ID NO: 132733 - DNA, 575 bp, Arabidopsis thaliana columbia
  unsure (1)..(575): unsure at all n locations
cagtgcttgaggcgactgtttgaagagaaaaacccagaacaaggatacaatggcctcaagtacttcttgactatagtggctgtctgcttgaggacgacttacagtgtcgacgaggataatcaatttatatggagaatattagctgggatcttctcagctattgctgccatttnctgtacttactgggacttagtctatgactggggacttctaaacagaacatctaagaacccttggctccgtgataaactccttgtcccgcagaagaaagtatacttcatcgcgatgatcttgaacatcttgctcaggttcgcgtggctgcagaccgtgcttgatttcaatttctccntcatgcacagacagacggtggttgctgttgttgccagtctagagattatccgcccgtgggatatggaatttcnttcaggtagngattngcatttgacaatgttgggagtatcgagcattaaagcggtncattaccgttnacttcggcggggtacggtaaagcaacagtttntnggtntaggctnggtctnnaagcttgtcanccaacggtggggagtgctgctant

SEQ ID NO: 132734 - DNA, 590 bp, Arabidopsis thaliana columbia
  unsure (1)..(590): unsure at all n locations
tntcactttctctcttctctctctctctttcttttttgagtccgtgaaggctaagtctgaaagaatgacgaaggatgagttgacggaggaagagtcgctctccggcaaggactacttagacccaccgcctgtaaagacgttcgaggtgagagagctcaagaagtggtccttctacagagctgtcatcgctgagttcatagctactttnctctttctatacgtnactgttttnacagtcatcggctttaagagccagactgatatcaacgccggcggggagcttgtnccagtntcggcctcctaggcatctnttgggcctttggtggcatgatattcatcctcgtctacttcactgccggcatctctggtggacacatcaatcccgcggtgacgtttgggctatttcctagctagcaaggtatcattgggttagagctgtgtcggacatggtggtcagtgtctcgnagccncttntggagttggtttngtnaaagctttccagtcgncttatacaaccgtacggtngtgggccaacanntntccgcggtaaaatttggggtgggttgtctanntanggacttttcccggga

SEQ ID NO: 132735 - DNA, 588 bp, Arabidopsis thaliana columbia
  unsure (1)..(588): unsure at all n locations
ctctctaaaatttaaaaatgacanggagtcaccggtttagttaccggttacnccttctccttctactaatcttccaaacggcacaacgtttaaccaccgccgatccaaacgacgaagcgtgtttgaaaaacctccggcaaaacttagaagatccggcgagtaatctccgtaactggacaaactccgtcttctcaaatccatgctccggcttcacctcatacctccccggagctagctgtaacaacggaagaatctacaaactctcactcacaaacctctctctccgcggctcaatctcaccgtttctatcaaactgtacaaatctccaatccctaggtctatcatcaaaccagatctccggcgtaatcccaccggaggattcagtatctcgttaacctcggcggtactaaaacctctcatcggatcaatctttccggnggaatnaattcggagnttggtctttgggttacttnaacggaatcggtntcnanggtaagggttttccgggnagtttcgagnaatagggttttnggggggntnnngnggtttatggntggtnaaaatttcgggaagtncggggttttgntc

SEQ ID NO: 132736 - DNA, 573 bp, Arabidopsis thaliana columbia
  unsure (1)..(573): unsure at all n locations
cataaacaaaatatcttcttgctcattattcatcatcaatctactactccgtaaactttgcttcctctgtttgtattagctcagaagagatatgggaagtactccgactgatttacccggtgaggatgtcgccgataacagatccggcgtcggcggtggtatttctgacgtctacggtgaggattccgccaccttggaccagcttgtcaccccttgggttacctctgtcgctagtggctacacattgatgcgtgatccgagatacaacaagggacttgcgtttactgataaagaaagagatgctcattacttaactggtcttcttccccctgtgattttgagtcaggatgttcaggagaggaaggtgatgcacaatctccgtcagtacaactgttcctctgcagcgttanatggccctgatggncttcaaggaaggaccgaggggttgttctcaagnttttnatttnnaacgtgaggngtncttccagttttgacanaccaaaagttggtnngntttccanagtatgggganttnaggagcnnaaggncttanancagttnccgggggggntc

SEQ ID NO: 132737 - DNA, 451 bp, Arabidopsis thaliana columbia
  unsure (1)..(451): unsure at all n locations
ctcccatctaaaaataacccgacccatttacgcgacccaaaccggatcaacccgcaatggataagccaagcttcgtaatccaatccaaagaagcagaatccgccgcgaaacaactcggcgtttccgtcattnagctcctcccgtcgctagtcaaaccagcacaatcctacgctcgaactccgatttcgaaattnaacgtcgcagtcgtcggactcggatcatcaggtcggatcttcttaggcgtcaatgtcgaattnccaaatntccctctccaccactcaatccacggcgaacagttcctnggtnaaccaatnttacanttaanggtggacngtaatcttaaatttttttgggcnggtttncggngggaacaattggggctttttggngtaaattttcccccagnaattnggggggggggccttnaaaataaaaatttttttaccgcgnt

SEQ ID NO: 132738 - DNA, 428 bp, Arabidopsis thaliana columbia
  unsure (1)..(428): unsure at all n locations
aaaccgcaaactcgacataactaacaaacgacgccggagatggccgccacttcaaccgccgctgctgcttcttcaatcatgggtacccgggtggtttccgacattagctccaattcaagccggttcacagcccggttcggattcggaaccaagaaagcatctcccaaaaaggctaagacggttatctcagaccggcctctatggttcccaggcgcaaaatcacccgaatatctcgacggttcacttgtcggggactacggggtttnaatccttttgggttaggtaaaccggcagagtatttccaattngtttttggtttccttgggcccananttttgccaagacntttttcnggggaanttttttnggggacccnntncccggggggggttgggcccccaaaaatnngggngtttttanntaanaaa

SEQ ID NO: 132739 - DNA, 457 bp, Arabidopsis thaliana columbia
  unsure (1)..(457): unsure at all n locations
atcaaaacaagaaagacacaaagatggagatctcaaaaacccttttgctagtgatttctctggtggctgcaacttgtttcttgcaagccaaggcagctggagtttattgtagtaacccttacactcgatgttaccgcaagtacattaggtgtccagaggaatgtccaagcaaaaccgctatgaactccaagaacaaagtttgctacgccgattgcgatagacccacttgcaaatcccaatgccgcatgaggaaaccaaactgcaacagacctggntcagcttgttatggcccgaggttcattggagggagacgggattntggtntacttccatggaaagggcattnaangnttttagcctgggcttttnacttttgcctttaannnaaatgggggggttttttgntaaaaaanccccttttgtgtggccnaaagntttnaaannggtncccagtgtt

SEQ ID NO: 132740 - DNA, 437 bp, Arabidopsis thaliana columbia
  unsure (1)..(437): unsure at all n locations
acaaaactcctctgttttttttnaactttctctgtttcctcttcattcacattcgagagaagtcatgggatattccggcaaacctcaccaccaactcgacggcgagatacgagaatccaccgacggtaaaaaatgggtcatcgccggaattccctcacgttcccctctcaagcagattaacctatctcccggcgtcacagttaccgaaacagaggagcaagatcagtgtcctacgacccctacgggcgggtttccgtcagaattccaagggtcccgccgtgtccagcggggncaaagaagcgtaaaccgtcgttgaaagtccagttangtaccggncattaggggttttttttttncggngggccttngaaancntttttttttaaaaggggtgtttttnaanntttttttaagggntttanccccnnttttntttt

SEQ ID NO: 132741 - DNA, 236 bp, Arabidopsis thaliana columbia
  unsure (1)..(236): unsure at all n locations
acaaatcttaaacgttttactttgtgctgcactactcaacctcaatggccgcctcaacaatggctctctcctcccctgccttcgccggtaaggccgtcaagcttttcccccgggggaatttnaagtcctttggaagcgggccgtgtgacaatgaaggaggnttttngccaagccaaaggggcccattaagnaagcccatnggtacggattttnaccngtgtaaaagtaanttgggg

SEQ ID NO: 132742 - DNA, 314 bp, Arabidopsis thaliana columbia
  unsure (1)..(314): unsure at all n locations
aacataatctcatttctcaagtttaacattttcgagcccctttagaacagtggagaaagatccacacagataaaaaaacgggtgagttttatatcaaatagacggaaatgcccctntcggcgacggcggatacaagcaagacggtgaagcttgagaggtacaatagctacctccggaaggtttcacagcaccaaagttntnaacgntttcttctaaaagttctttttccgngcaacggttntcggtagctctttttccntggccnnaaatntttggcattnaactaccttcaatttttccgttaggcngggccg

SEQ ID NO: 132743 - DNA, 404 bp, Arabidopsis thaliana columbia
  unsure (1)..(404): unsure at all n locations
aacataatctcatttctcaagtttaacattttcgagcccctttagaacagtggagaaagatccacacagataaaaaaacgggtgagttttatatcaaatagacgaaaatgcccctgtcggcgacggcggatacaagcaagacggtgaagctggagaggtacaatagctacctccggaagattcacagcaccaaagttctcaacgcttcttctaaagttcttttccgagcaacgnttntcgtagctcttgtcctcgtcctcatcttcgccatcaactaccctncactctccgatagccgngccgtcgcagcacaccaccttcacccgtcgtaggnttnttatccacccggncntctttcttccntccttcctnntnnnttcctccctctatnggggttggagccc

SEQ ID NO: 132744 - DNA, 408 bp, Arabidopsis thaliana columbia
  unsure (1)..(408): unsure at all n locations
catnaactcaccaaccaatcaactaaccatggattccgagatcgccgtcgactgctctccattgctcaaaatctacaagagtggccgcatcgagcgactcatgggtgaagccaccgtcccaccttcttccgaaccacaaaacggagtcgtttccaaggacgttgtttattctgccgacaacaacctatccgtccgtatttacctcccggagaaagccgccgccgagaccgnctcgaaaattccctctnctcgtttacttccacggtggaggattcatcattggnganagttttttnttcaacttaccacaattttccttaagggggnnttttttttgggtggaactttgtagggggcntntgtttgattaanccgntgggngaaccgggggattcgnttttncggncc

SEQ ID NO: 132745 - DNA, 441 bp, Arabidopsis thaliana columbia
  unsure (1)..(441): unsure at all n locations
tgtgtgtttgtcaattatgactttnatggggctcaaaagaagatgaaagagtgtgaagaggtcattgtgaatnatccattccttggcaagcgagttgaggatggaaacttttcaactgtaccactgagagatgaatttnttgaaaatncccgcctattcgtctttgaaacctattgcaaaattcatcaaaggattgacatgggggtacttgctgaaaaattgaatctgaactatgaggaggccgagagatggattgtgaacctaatccgcacctcaaagcttgatgccangattgattctgagtcagganctgtaatcatggtgcctactcagcccaacggtgcaatgagccagtttggttaaaccccanccaaaggntttttnaagggccgggcntttcaaagttaggtggatcannnnntttnggnccacaacacaggg

SEQ ID NO: 132746 - DNA, 359 bp, Arabidopsis thaliana columbia
  unsure (1)..(359): unsure at all n locations
tggtagatgaacttgagaattgaagacctaaacgaagaaacaaagactctaatctcttcacttccttcagacaaagatttcactgggaaaactatttgcaagtatcaaggatgttggtatactcacaatgttcttcaagctgtcctcaatttccagaaaagcttnaagcctcaagacaccgatatcatcgttgcttcgttccctaaatncggcaccactttngctcaaggcgnttacattcgcactccttcatagatcaaaacagccttctnatgatgntgatcatcccncttcttttctaaataaatccacacggtctttgtaccccancttttntggatngntncnttatttttngg

SEQ ID NO: 132747 - DNA, 216 bp, Arabidopsis thaliana columbia
  unsure (1)..(216): unsure at all n locations
aagaaaacacacacacacacacatgttcttcgttgctgcttcgttgggttaaaaactttttttttgtttctngcttttngcaaagtcaaagataacaaataaataagaaaaatggagaatctaccacctggttatcgtcccaatgtnggtgtttgtntaatcaactcggntaatctggtatttgtagctcctagattggatgtnccnggggnattg

SEQ ID NO: 132748 - DNA, 448 bp, Arabidopsis thaliana columbia
  unsure (1)..(448): unsure at all n locations
atcaattattcaaagcagataaaaaaaaaatggctcaagcagtgacttcgatggctggcttacgtggagcatctcaggctgtccttgaaggaagtttacagatcaacggctcaaaccgtttgancatctcaagagtctcggttgggtctcagagaaccggacttgtgatcagggctcagcagaacgtgtcagtaccagaaagtagtcgccggtcagtgattggnctcgtggcggctggtttagccggtggttcattcgttaaagctgttttcgccgaagctattccgatcaaagttggtggtcctccacttccctttccggtggcctacctgggacanttaactnagncccagcaagggacttttaattggnatttaaagttaggtttttnatanaaccnttttnnccananagntttaanttgggccaaagtttttnttaaggggnc

SEQ ID NO: 132749 - DNA, 342 bp, Arabidopsis thaliana columbia
  unsure (1)..(342): unsure at all n locations
actcaagccgccgggntcttcaactccgccataacaaccgccgcaacctccggcgtcaagaaactccactttttctcaacaacccaccgtcccaaatccctctccttcaccaaaaccgcaatccgcgccgagaaaacagattcctccgccgccgctgctgcagcccccgccacgaaagaagctcccgtgggattcacgccaccgcagctagacccaaacacaccgtctccgatcttcgctggaagaccggtggtcttctacgtaaagcgcaagtggaagngttctacggttatcacgtggaactttaaccgnaangnancagantnttttnaanatnncngt

SEQ ID NO: 132750 - DNA, 418 bp, Arabidopsis thaliana columbia
  unsure (1)..(418): unsure at all n locations
cttctccttcttctcctttcagaaacccagcgaccatcttcttcaccggttatggtgacttcggagggattagcaagcgttgattcttggttatatcgccaaggtttcaacgttgattcatggttgctttctgataccttctctnacgacaacgatttgctcgcaaganttctccataccaccgtnacagcccctcatactctcactccttcctctgctttcttcgattcctccgctgtttctaaccnntcttccactaacacactntcctctaccgtctccgggtggtttctnatncagaaataatcggcggagggagctaaaacgggaacggtaactnggcnttttttaccgangggtaaaagccgccaaagggccggggttngtgntttccaaagaaatttntaagntttttttt

SEQ ID NO: 132751 - DNA, 401 bp, Arabidopsis thaliana columbia
  unsure (1)..(401): unsure at all n locations
acacaacctagcatcatccccgtctgggacagacatcgtctcacttctaacaactttaacttaaacggccaagtggaggggggacaagctcccaaggtagttgattttggagaggcttgctcttctgtggcaacttctccctacacacccagcatcgacatggtatgtnagatcctcaacgtgacatccgaagatattactcagctcaaggagaaagttgcgggggaggtcacgnctctagagattcttgcgggcccacgtctggagagcaaggtnccgggcgttgaagctaagtccagatgggactttnttttttcgggaatgncttntggggnatacnccggcatttttggnggccncccatnnacccggaaggngtacttacggnaaacngcattttt

SEQ ID NO: 132752 - DNA, 413 bp, Arabidopsis thaliana columbia
  unsure (1)..(413): unsure at all n locations
cagaaagccaccaatctatcttaaaactaagttatcatgtgcacnaccatttccatttccatttccaccataaaaccaactgagatctttcaagaaattcttggaagttcttactcaagaaaatnactatttcatacccatgatcaatcaccaacnccagcaccatccccatatgtaggcgataacaactttgatgcaaatgttgtnatggtccnatcagtcctcttatgtgcacttgtttgctcacttggactcaattctataatangatgtgcctttgaggtgctccaatttagtaccatctgaagcttggtgggtgacaactattcctgttcggtttgaccaacacaggnggtaaacgggaaaggcctttttngggtttcnagtcngnaaagtttcnttnntngnctaaa

SEQ ID NO: 132753 - DNA, 418 bp, Arabidopsis thaliana columbia
  unsure (1)..(418): unsure at all n locations
aaaaaaaaaatctntctcaatctctctcagatctgaatccatccatcaccgatctctaatggcggcaccaccagcatcatcctcggcgagggaagagttcgtgtacctcgcaaagctcgcagaganagcggaacgttacgaagaaatggttgaattcatggaaaaagtcgctgaagccgttgacaaagacgaactcaccgtcgaagaacgtaatctcctctccgtcgcttacaaaaacgtaatcggcgctcgtngtgcttcctggagaatcatctctttccattgaacaaaaaggaagggagtcgttggtnacgnttgaccattttnccccggttccgtggatttccaggaggcaaanttcgattntnaggttnttcggnaaattttttnnnggtttttttaaaggtttnttgnaact

SEQ ID NO: 132754 - DNA, 445 bp, Arabidopsis thaliana columbia
  unsure (1)..(445): unsure at all n locations
ccccaacaagacatcttcacccgccggagaaccttgacttcactaataacattcacggtcatcggcggtgctacgtcatcagcattagcacaggagaaatgggggacaaggtcattcataaaggagaaatattttatgccgggactatcacctgaggatgcggcggcgcgtataaaacagacggctgaaggattaagagacatgagggagatgttggaccacatgtcgtggaggtacgttatattctacataagattgaaacaggcttatctgtctcaggatctnaccaacggcatgnacatctttncccggagagtcgccgganttgatttncgttcaggcgggaaaacgngcttttttgaaaaanattgngtngttgggttttttnttttacgggccgcnaaagtttacggngccctttttttantncnggggtggcnnttaa

SEQ ID NO: 132755 - DNA, 454 bp, Arabidopsis thaliana columbia
  unsure (1)..(454): unsure at all n locations
aatgtatccgacaaacttggtctaaaagacccattactgcgccgtctctcttccgctgccgccgtaacaaactcttttctccaagccaacgatctcttccnctcaccatcacagaccctccgccttgaatccctaatctcatctctcccaatctcaccttccccttcttcctcctcctccgccatcaccaccaccacgtggttcaaccgcttcttaacctccgccacagaagacgaagatgatcctcgctggngtctttatttccgaatgtcaaaatccaccttcttcagtctctactctatcctctcccattcttcggttgcttcctttggttgcnacaaatctttccggtttcggttnaagggngnttnnttaanggggtgtttcggtnaaagnnttnngggtttnattccaatttnccaaggtttaaggtncttttttttaanggttgaaa

SEQ ID NO: 132756 - DNA, 324 bp, Arabidopsis thaliana columbia
  unsure (1)..(324): unsure at all n locations
gacatgagtgcttggtgttctgctgttgtgttattgtctttaatacttttgttatctgttcgtgaaaacaacgcttctaattcgattagaggttctcaattctcaacgaaaccttgtgaggagatttacatcgtcggagaaggagagacacttcacaccatcggcgataaatnnggcgacccgtttatcgtggagcgaaaccngcatatccatgatcccgatgatgtctttccaggtcttgttctcaagatcgcacctttttactntcaacaggaaatttgtaagncatataacaaatacggttcttttttcttncncctntnc

SEQ ID NO: 132757 - DNA, 382 bp, Arabidopsis thaliana columbia
  unsure (1)..(382): unsure at all n locations
gttcttgttcggacctaaagatgggtacttgtatttnatgatgggagatggaggaagtaaaggagacccatacaactttgcacagaacaagaaatcattgcttgggaagatcatgagacttgatgttaataatgtncttgatgcaaaancgatgaatgagtttcagctatggggaaactattctataccaaaggacaatccgttttctcaagataagaatctnctgcctgaaatatgggccatgggagtaagaaatccatggcgatgcagttttgattcanaggggccgtcttatttcccttttncngagatnttttggngnggcccattttgaaggaggttngttttggnttncttangggggggaacctttnggtttgga

SEQ ID NO: 132758 - DNA, 420 bp, Arabidopsis thaliana columbia
  unsure (1)..(420): unsure at all n locations
agccaatactgtgataagcaaaggggagacaagagaatcaccggcacatataaggagcacatcggatttaggagcatcacctatcactgatgacngccctttcaatgatcactctaggctacaagaaaatnatgtaaacgaaacacctcacggtttatccaccacgacagcctcagaaatagaacctgagagtagtgaacccgaaatacctggtttaggggttcatgatgagattccagagtcagagcgcaacctaaatncagtggatgacttctcagaaaagagtatggtacatgcttctttgggtcaccacagctntttngggttcctngtaaatggaaattttaagntggggtccactggnacntttttggggtttccccnggtgggaaaanacgccgnagggngcttcanaatttt

SEQ ID NO: 132759 - DNA, 560 bp, Arabidopsis thaliana columbia
  unsure (1)..(560): unsure at all n locations
gtcaatgttcttgtgagatcgaactttctctgggttcgtgcagaagcnttncttttttgagtatcgcgtttaaggcacatcgaagaagagagaccctaatttgatattttnagttctatcgatggcttcgctactagctcgcaggtcgttcagtgctctccgagctcgacatctcgctttttcagggcaaggtttacagggatctcatctctgtgggctacagtcccgtgctatatcttatggaagcaacaaagatgatgaagaagctgagcagcttgctaaagagatctccaaggactggagtactgtctttgaaccggagcaatgnacaacctaatttctcactgaaatggtcaaggggtttgtcaactgaccctcaaagtacttctttgatccaaaagttacaatnaattatcctttttaagaaggggccatttgagccctngtttccgggggtganacggtntttcgaaggnttnccactttggggaangacggttnatttncttnaaaacnttgggggggtattnccnngttaaggaatcaaatnngggcaanng

SEQ ID NO: 132760 - DNA, 405 bp, Arabidopsis thaliana columbia
  unsure (1)..(405): unsure at all n locations
gattcaaccggcgacaaggatgatgatgaacacgttgcaaggagaaaaattatgcttgaagctattgancgcgagtttgaagccgcgacaaaaggccttgaagagttaaagaatgantcagaacaagctgaaaacaagagaaacagtatgttggaagcattcgaacgcgaatttgaagctgctacaaatgcaaaggctaatggngaaaactctgcaaagaatccatcaaccataaagtactncagtgcangaaatcttctggcgggataccaatgctggtttaggaagggnctttcttaaagccttccngatggtggtattgnnggtngnttcaaacaanggttaaaaggttgggtctttcnggccagnccnctggatttcttccnggttttaacaattaggcgg

SEQ ID NO: 132761 - DNA, 427 bp, Arabidopsis thaliana columbia
  unsure (1)..(427): unsure at all n locations
aaagaaacccttccaccttcgaattggcccttccatggcaatgtacatctcgaagacctcaaggtgcgctacagaccgaacactccacttgtgctcaaggggatcactcttgacatcaaaggaggagagaaggttggtgtggttggacggacgggaagcgggaaatcgacattgatccaagtcttgttcaggcttgtagaaccatcaggagggaagataatcatagacgggattgatataagcactctagggctacatgatctcaggtcaagattcgggntcattccgcaagaaccctgtcctctttnnaggganccntgngaaggaacatnggcccgcaangnaattctttttcggggnaattnttgaaggcccttggaacgntttaacctcaagggttttttngtccccagnctttaaaggnnng

SEQ ID NO: 132762 - DNA, 441 bp, Arabidopsis thaliana columbia
  unsure (1)..(441): unsure at all n locations
attttntcttcttcttcttctttctcgttttgagagaaaacaaaaaaattctgaatctacaggtttcacgaaaaggagaagaaaaaaacaatggcggatcagctcaccgacgatcagatctctgagtttaaggaagctttcagcttattcgacaaggatggtgatggttgcattaccaccaaggagctgggtactgtnatgcgttcccttggacaaaacccaaccgaagcagagcttcaagacatgatcaacgaaggggattgctgatggtaacggtaccattgatttcccagagttcttgaaccttatggctcgtaagatgaaggncaccggctntnaggagngctcaaggagcattccgggtttngncaaggnccaaacggttnatttnaganttgggncccccattngtgcaaccttgggggngttcttttgagagng

SEQ ID NO: 132763 - DNA, 411 bp, Arabidopsis thaliana columbia
  unsure (1)..(411): unsure at all n locations
atcagtgattgtntgggcaagcatgattttaatctcttgaagcgtcttgttttgcccaacggttcgattttaaggtgtgagtactatgctctcccaactcgtgaccgtctctttnaggatcctcttcatgatggcaaaaccatgctcaagatttggaacttgaacaagtacactggagttattggagcattcaactgtcaaggaggaggatggtgcagagaaaccagacgtaaccaatgtttctctgaatgcgtcaacacgttaaccgccaccacaagccctaaagacgttgaatgggacagtgggagcagnccaattttccattgcaaacgttgagggtttgcttttggtnctggnttnaatccaaannngnttttttntngctgggcntaaaacgggtgtnttnggnct

SEQ ID NO: 132764 - DNA, 460 bp, Arabidopsis thaliana columbia
  unsure (1)..(460): unsure at all n locations
agttcgatcctggctcaggatgaacgctggcggcatgcttaacacatgcaagtcggacgggaagtggtgtttccagtggcggacgggtgagtaacgcgtaagaacctgcccttgggaggggaacaacagctggaaacggctgctaataccccgtaggctgaggagcaaaaggaggaatccgcccgaggaggggctcgcgtctgattagctagttggtgaggcaatagcttaccaaggcgatgatcagtagctggtccgagaggatgatcagccacactgggactnagacacggcccagacttctacggggaggcagcagttggggaatttttcccgcaattgggcgaaaccttgaccggggcaattncccgttggaggttgaaggcctangggnncctaaantttttttttcccnangaannngcnatttcngtntttnntgggaaaaagaattggntaa

SEQ ID NO: 132765 - DNA, 414 bp, Arabidopsis thaliana columbia
  unsure (1)..(414): unsure at all n locations
aaagtttctataaattgttgaatcaaagcagagaagaagaagaagacgatcatgaatccagattccgattatcctcatctccctaacatcaagatccaccatccttcatctcctcgtcactctcaccaccactcttcctccactccttccgncgntactnctaccccaaaccgccggtgctcggccgtaagattcggagtcggccgttggaccttttccggaggaaagccgttttngnttgtttcgcttggggctgtnggatcaattaaaatccgtcccnggagaacggccgtcggcaattttttccangggtttttncaaaccttccggttnctnttttgggnggcccgattttggggggancccttttcccctttttccaaaaattcctncctnncttccttcccggccggt

SEQ ID NO: 132766 - DNA, 554 bp, Arabidopsis thaliana columbia
  unsure (1)..(554): unsure at all n locations
ccttggtgaactgatcaagaacagagcagaaaccgatgattatagacctaaccctaggagaagattgtttgttatagattggaaatcggaagatttgatcacaattccccttcggttatatgaacctttcatgatccgagcaatcaaatcccgcagcattcctgtggaatacatcgtgttatctgtctgtaaatacgcgaagaaatgggttttcgatacagaaggaagcctttcagggcaaaagagagaagcaattgaagtggttgagaggcttttgccatatcagagggggctaatctcttgtggactcttattcggatccgtaaaacattcaatctggttaggaggttagcnccnnatgtcaaaantgggttcatgnncagaatntgnaagaagctcgccatgggttaatcaactgtttncaaggttttttccccggggttttggggaaaaaccttgggggttttgaaaattttggcnctttnaanccccnnaaagggttttnncttttncnggtttaggccnnaannttttcccttttggagggggaactt

SEQ ID NO: 132767 - DNA, 406 bp, Arabidopsis thaliana columbia
  unsure (1)..(406): unsure at all n locations
taacctaccacatttaccattttgaccctaacctcgtccgcagcaaaatatcttcctctattcgtcgtgctttagaccaaccgttaaactacgctcggntctacctcgccgatctcctcccaatcgccgtccgccgcgtaatctacttcgactccgatctcgtagtcgtcgatgacgtggctaaactctggagaatcgatctacgtcggnacgtcgtcggagctccggagtactgtcacgcgaatttcactaactacttnacttcaagattctggtcgagtcaaggttacaaatcggcggtnnaanggttaggaaancgtngttattttaaacaccgggagttgaattggntgtttnnncttcgggaaaattgggtgnggaaagggggntttcangggtnaaggtt

SEQ ID NO: 132768 - DNA, 480 bp, Arabidopsis thaliana columbia
  unsure (1)..(480): unsure at all n locations
ctccccatctaaaaataacccgacccatttacgcgacccaaaccggatcaacccgcaatggataagccaagcttcgtaatccaatccaaagaagcagaatccgccgcgaaacaactcggcgtttccgtcattcagctcctcccgtcgctagtcaaaccagcacaatcctacgctcgaactccgatttcgaaattcaacgtcgcagtcgtcggactcggatcatcaggtcggatcttcttaggcgtcaatgtcgaattcccaaatntccctcttcaccactcaatccacggcgnacagttnctngtcaccaatctnacactcaacgggtgggacgtcatctnaattttttnggcggtttcgncggaccaatgtgggccattgccngtcaattttcttccaaggaattttggggggggncctgnaattaaaanttcttnttnacggtncaaaaaaattttgnnggttttggtttttngncgg

SEQ ID NO: 132769 - DNA, 566 bp, Arabidopsis thaliana columbia
  unsure (1)..(566): unsure at all n locations
aagaagtgcagtcaagctagccggtggtgctggtatgattctggcgaacacagctgaaagggtgaagaattaaccgccgattcgcatctcgtcccggcgacaatggttggagctaaagctggagatcaaatccgcgactacatcaaaacatcagactctcccactgcaaaaatcagtttcctaggcactttgatcggaccatctcctccttctcccagagtcgccgctttctccagccgtggaccgaatcacttgacaccggttattcttaaaccggacgtgattgctcctggagtcaacattttagccggttggaccggggatggttggtnctacccgatttaggatatcggttccaagacggggttcaaattcaacatccatcttccggtacatcngatgtcgtgnccanaaggtaagggnacttggncngtttttcttcggtaaaagntaatncccgntttgggnaaccttnaggaatnaaaatccggcctttttaaaccaccggttanggntttgnaaaatttngggggnccaatnnggggttttggnacccgtaaaanatt

SEQ ID NO: 132770 - DNA, 351 bp, Arabidopsis thaliana columbia
  unsure (1)..(351): unsure at all n locations
gggaagactgcacagttttatgttaatatggctggtagagtagaaagtaatgctctggatattgttcaagcactggaggatttgggatctggattgggtttcgacggtgctcatnatgttgagcattgtcttgctgattctggtgtcgtcaaggatattattcgtnatacaggagaagcggaggagattcctttcgtttatnctcttccccgtttcccttttaacagaggaaaaanaccagntcctagcttttccgatattggagtagggccnccagatgagcatattcctnttnggcttccgggtgtttccaaaaaccanggtttcttacggngtnagngggnattnatg

SEQ ID NO: 132771 - DNA, 303 bp, Arabidopsis thaliana columbia
  unsure (1)..(303): unsure at all n locations
cgcacactgaaaggttgagcatcgagggtaaaggaggctttgtatccaacatgccaggagatgtccctcgggttaacgggcagctagcggtttctcgtgcttttggagacaaaagcctcaaaacacatctacggtcagatcctgacgttaaagattcatcgatcgatgatcacacagatgttcttgttcttgctagtgacggtctattggaaggtgatggctaaccaagaggcgtttnatatttcgggaagnttcnaagntccctttaaagncagggaaagnncttaaaaacccanggnnttt

SEQ ID NO: 132772 - DNA, 465 bp, Arabidopsis thaliana columbia
  unsure (1)..(465): unsure at all n locations
ctaaccaccaagaatccaaattcatcaagatatatagctgcaagagtcatagcttcagaaacaagagagcaaagctgtaaaatcagtaatctctctagccgtagagaagcaatgcttttggtactcggcgtctcaggaggattatcaatgagctcacttgcggcgtatgcagctggtttacctccagaagataaaccaagactctgtgaagcagaatgcgggaaagagcttgaaaatgttccaatngtaactacagagtcagggcttcagtataagggtattaaagttggtagaggcccgagtccaccggttnggtttcaagtttnctgctaattatggnggcttttggttccntcagggcaaattttcgccagttctttngggaaaggtctttcccctttttnttttcgggngggnttttncccgggggtnnaaaggcctttntnggggnctnttnngttaaaa

SEQ ID NO: 132773 - DNA, 432 bp, Arabidopsis thaliana columbia
  unsure (1)..(432): unsure at all n locations
gtcaagtggtaatcttttgatcccaattccagttcctaatccccctcttgagcactggtcaggtcacgcgtctgttggttccgatatctacttctttggcggatacatggaggagaatgtgcgttcctctagagtcgtgatcctagactgccggtctcacacgttgcgtgaggctccaagcctgcagatggaaaggtcggaccctgctgctagtgttattgatggaaagatttatgtagctggaggtgtcgacggtgatgatgcaagattccttgtaccccgtaagaagttttcggcaanaaagccccaattttggggtnaaaaggccccatcccttttttggggnaaaaanttggggggctttaaaaagggggattttttttngaaaanntttntttgnngngggggaaagganntttttttttnnnnggg

SEQ ID NO: 132774 - DNA, 508 bp, Arabidopsis thaliana columbia
  unsure (1)..(508): unsure at all n locations
tattaatcaaccaatcaataatctctcttccaacttctcttcccatcataaccatttntngaatctgtgaatctngtttnntttttnagcaaggaatggcgacagagcagcaccagcagtgatttcatggacaagatcaggcattgtgtccaaatccggacaaacccagaagaaatctgagatgaaagtttcttacataactggacttaactcatatggtggtctcaaggcacagaacaacaaggttgtctcaatgggatcaccactctgcacagaacagtgttttgctaacgtngtgatgtctctcaaaggaagangaggtaatggaggngccttatccaccacgtgtaacgctgtcggagagattttcaagattgcagcaatcatggaacggtcttactcttgttnggtgttgcagtnggnttcgttctttttcggatcgaaactncttgtttggagggagcttgnagcagggtnaanttnggggtaaaattgctggntcnttnta

SEQ ID NO: 132775 - DNA, 381 bp, Arabidopsis thaliana columbia
  unsure (1)..(381): unsure at all n locations
agtagtagtaatactggtcttgcacttcctcaatctttcatgtcttctgttccgcaagttgcttctgtagatttcaataggagaccagaaaccgggagcagcatgagcatgcttccttcgagtggtggaatctatggttatggaagttttccggtgggcaatacaagtnatggntccaactcctcttactcatccaatctatatggaggattgcctcagtctactactatggaggttcgaatcccagcaaatgcagtgggtaaagtnatgggcagaggaggaggcaacttnggcaancattaggagggttttcagggggccatgnttggaaattntnggttncnaaaaattnccnatngggggtcnggtttnctctaattt

SEQ ID NO: 132776 - DNA, 362 bp, Arabidopsis thaliana columbia
  unsure (1)..(362): unsure at all n locations
aaaactatattcacaggctgccgtgtaccttctccatccaaagatggcaactatagctactggtcttaacattgcaacccagcgtgtnttcgtnaccagcgagaatcggccagtttgtntcgccggtccggtccatttnaacaattcgtggaatcttgggtcaagaacaactaaccggatgatgaaacttcagccgattaaagcagcaccggaaggagggatatcggacgtagtggagaaaagcattaaggaagctcaggagccttttgcggggcnntcctttaantgggagattttntagctccttggacccgggtttaaagccctttngcgcaaattttnnccattttnggncacaagga

SEQ ID NO: 132777 - DNA, 459 bp, Arabidopsis thaliana columbia
  unsure (1)..(459): unsure at all n locations
aaaacaaggtcaaaggctgcgagaaatggctgaagcaaagagagtntccaagattaatgacatggagaatcaactgattagcttgcntttccttttgaagcaagttgaccaggttgaagaggatgatattccaacctttttgtcagacaccggttacgcgtccaggcaagagctagagtctactattacgaaagtnacacagtcgcttagaaaagcaaggggtgagccgaagaatgaaccagctgagtatgaagaaaaccctgattctnttaataatgaaaagtatccacttatgaatgtccccgatgatattcttactcctgagcagcttaagggncaagaagnggnaaattntttctttaaaancaaccagcaggaggggcccgntttcggggcttgnccaaaagncgttattgaggggggnncttcggaaaagggggaangaaatnnattttnggg

SEQ ID NO: 132778 - DNA, 443 bp, Arabidopsis thaliana columbia
  unsure (1)..(443): unsure at all n locations
taacttaaacaaaaccaacaattatcaatcttcaatgacgcatctcaacaaaaaacagaggttagagaataaccataacaatactgtgaacaaccatttcgaagacttacatgacgatctcatcatctctatcctccgcaaactcgctacctccgcttctnctccttccgatttcctcaccgttctctccacatgcaagagattgaatcggttaggattacatcctctggttttatctaaagccggtactcaaaccctagccgtcacggcggagaaatggtcagattcttctcataaattcctcaaaactcttgtgttaatgccggaaacatcgnnggttcgnactttctgggatgntcccgntttactttntaaaaatccanttggggggggggcataatggntaaggggggtgcntttntnncgtcnnttntttggcccgg

SEQ ID NO: 132779 - DNA, 404 bp, Arabidopsis thaliana columbia
  unsure (1)..(404): unsure at all n locations
aaaaccctagtttnanaggcatctccagacaccgaaaatggcggaaggactcgttttgaagggcaccatgcgtgcacacactgacatggtgacggcaatcgccaccccaatcgataacgcagacatcatcgtntcagcttcccgcgacaaatccatcattttntggaaactcaccaaggacgacaaagcctacggtgtagctcagaggcgtctcactggtcactctcacttcgttgaggatgttgttctctcctccgatggacaattcgngntttncggcagctnggacggcgagctccgtntttgggatctttcttctggtgtttcactcgtagattngttggcaaaacaaggncgngttttcgtggcttttaanttggaaacggaaaatgnttttnaattng

SEQ ID NO: 132780 - DNA, 472 bp, Arabidopsis thaliana columbia
  unsure (1)..(472): unsure at all n locations
ccaaaaagaagagatcaaagtttcttcttgaagaaagaaagaaacacaaaagctatggcatattcaactaaactttatcttcctcttaaaacaccatgttttgttccaaagacagtaagagcaaagactttgatgcttcaacagagtcaagttcatgttaaagtcaagaaagccacagtttcacagcctcagccgatcagatactccaccaagaacattgtttttgaagatccgntacaaggggtcatctgttacacagatgntaatggagaggttatatgtgaagggtacgntggagggtcctcgttgtnccacacagnagtccaatggtaggttctttacttcaagganggggtggggnttcttgancctncttncaaagaaggttttcagggggcttnggggtttaacaaagggtggnttaaaggcccgntattttttttgnacaaggggtntttnttntccaatnggg

SEQ ID NO: 132781 - DNA, 433 bp, Arabidopsis thaliana columbia
  unsure (1)..(433): unsure at all n locations
cagaagcgaaacgntcctttatggctgantttcaacggcggtggtgagattttaacgccgtacaaaacggcggagatatcacgaaggacggtggtggtttcgtcgtgtgtnacggttgagcgtgtnactnacgcttggntcgacggttatggattaggggagacaaatcaggagaggaagatgaatctagtggaagacacgtgtcctggttttatatcggacggtntagggagagtcacgtggaccaatgaggcgtataanaagatggctagagaagatattcatattccgatngaggaaggtgtaccngaggatatttagttaccggtaattttcacggtgaaccgtaccggtttagtttattaangaggaggcccntnntaacgtacccagcttttcacatccagagttgggtttncagnacacgntttca

SEQ ID NO: 132782 - DNA, 462 bp, Arabidopsis thaliana columbia
  unsure (1)..(462): unsure at all n locations
tttcacgaccgtggaaccaacttatctgcaacagccgctgtgggaaccataggttacatggcacctgaactaataacaatgggcacgtctatgaaaaccgatgtgtatgcttttggtgcttttnttcttgaagtaatttgtggcaggcgaccagtggaacctgagctaccagtcggaaagcaatatttggtcaagtgggtctatgaatgctggaaagaggcttgcttattcaagaccagagatccaagattgggagtagaattcttacccgaggaagtcgagatgggttctgaaaacttggggtaactctgcacaaaatgctatgnccagattcaaagggccttcggttgggaccaaagtgggngcaaaanccctttancccaagggntttncccnttancnggttttttttgnnggtttattcccngggatnntgggggnttttttgccncnttttttttt

SEQ ID NO: 132783 - DNA, 486 bp, Arabidopsis thaliana columbia
  unsure (1)..(486): unsure at all n locations
gccagangttccattctnatgttgttgttgatttagtatgctaccgtcgctttgggcataacgagatagacgaaccgtcattcacacaaccaaaaatgtacaaggtgatacgcagtcatccctcgtcacttcaaatctaccaggagaagctcttgcaatctggacaggtaacccaagaagatattgataagattcaaaagaaagtaagctctatcctcaatgaagaatatgaggcaagtaaagattatattccacaaaaacgtgactggctggcaagtcactggactggattcaagtctccggagcagatttcttaggnttcgaaaacaccggagttnaggccagaggattttnaaggattgtggggaaaggcaattttnaacctttccctgagnaccttttaagccccaccagggggggtttaaaagngtttttttncacagnngtncnnaaaattttttttnggggnnggggntttttttttng

SEQ ID NO: 132784 - DNA, 358 bp, Arabidopsis thaliana columbia
  unsure (1)..(358): unsure at all n locations
gncacttttnccacaaattgatggataccattttcaaagggaagaagggtaattcanctgttgccaaaaaggttttgttggagcaacttacatcatctccttggaacaatttnnttttcangncttactatggtttagtagttgaaggaaggccatggangctagtgaagcacaaacttggaaaagattaccctactatccagttaaccgcatggaagttctggcctatcgtgggatgggttaattatcagtatgtgcctntccaattccgtgttttgtcaagnagcttcgtcgcctcttgcttggagcatattttntggaccttgaaagcggcgntcnnccgggtgatcaaaaaacg

SEQ ID NO: 132785 - DNA, 538 bp, Arabidopsis thaliana columbia
  unsure (1)..(538): unsure at all n locations
gctaacagttgactccgccgtcaagtatttacagcttgctaataagcttttntctcaagctgagctctaccattttnntgcaagcattttagaacttgtnattccagtttacaagagcaggaaggcttatgggcagttggctaagtgtcacactttacttactaatatatacgagtccattcttgaccaagaatcaaacccaatcccatttattgatgctacatattaccgggtgggattttatggggaaaagtttgggaagttggacaggaaagaatatgtataccgagaaccacgagatgtgcggctaggggatataatgggaaaactgagccatatatatgagtcaaggatggncagcaaccatattctgcacattataccagattcgngggcaagtnaaggcaggagnctttcaggncagggtgtnctttctgcaaatanctgctgttgntcagtnntggangttaggtctttgggnccgaaggggggganntttncnttttacctgnaggtttccggccgggtttttccggtt

SEQ ID NO: 132786 - DNA, 515 bp, Arabidopsis thaliana columbia
  unsure (1)..(515): unsure at all n locations
acgatgctgagcaactgcttgctgacatggaatttaaggattctnacacagatgctgagcgtgacagaaactgcaggttcttcgtatttactcgaaaaggcttgatgagaggaagcggaggaaggaattttttctggaaagaaacttgttgtaccctgatcaatatgagatgagcctttcagcagaggagagaaaaatatataaaanctgtaaagtgtttgcccggttccaatccaaagaagagcacaaggaactgattaagaaagtcattgaagagcaccaaattctcagaagaatcgaggatcttcaggaagctagaactgctggttgcaggacaactttcagacgcaaataggttttttaggaggggaggggaagnagggagcttgaagaaagtattcttcttcgggtttaccncggtgcaccnggnagtntngnccggtaaacnctnaaaagnccagngggttncccgnaatttccatccctttggtcttncctncttcccaaggnacncc

SEQ ID NO: 132787 - DNA, 533 bp, Arabidopsis thaliana columbia
  unsure (1)..(533): unsure at all n locations
ccttggaaaacaacctcgaaattattcccgttttaaataagattgaccttccaggcgctgagccagagaaagttctcagggagattgaggaggttattgggttagattgtagcaaagcgatattctgttcggcaaaggagggaattggtattaccgagattttggatgcaattnttcaaaggatacctgcacctctcgatactgcaggaaagcccttaagagctttaatttttgacagttattatgatccatatcgtggtgtcattgtatactttcgagttatcgatgggaaagtgaagaaaggcgncagaatttttttcatggcaagcggnaagggattatttttgcggatgaagtcggagttctaatctccaaaatcaaattcaaagttggatgaattatattgcgnggtaaggtagggatatatttncggctncntgtaaagatcttttcagttcccccggggtagggggttcnctnacccnattttanctngaangcangaaagncctttnncctggnnccgngganca

SEQ ID NO: 132788 - DNA, 406 bp, Arabidopsis thaliana columbia
  unsure (1)..(406): unsure at all n locations
agcacgacgactctctcgcttccagatttcttgatccgatatttatattccctctgcccttgaaatcaaatctcttctcgaatttgtgctctagaaatnataatctggcaatttgaagatcttgtgggtcacgacacaaacttataagcaagagcttagcattttnatcatctgctgaagaacgtatggnagaaactgttaaagagcgtggtgatggaagtncagagctggttaaatccgtagctgataagcatgccggtctcgtgagaccagttgctaaatatnacnctgcagttaaagatgctatggtgtgtggggaaggaaggtatacngttgtaaaagacgntgacggaggttggaaatggggtntntnccaagcccttccntgnttttggntntggaancg

SEQ ID NO: 132789 - DNA, 562 bp, Arabidopsis thaliana columbia
  unsure (1)..(562): unsure at all n locations
tctctaaacttctctctttctttttttctcaaagcttttttccttctccctaaacgatgaagattttcgtgaagactctcagtggttcgaacttcgagatcgaagtaaaacctgcagatagggtttctnatgttaaaacggctatagaaactgttaaaggtgcagaataccctgctgctaagagattgctgatccaccaaggaaaggttctaaaggatgagaccacattggaagagaacaatgttgttgagaacagtttcattgttatcatgttgtccaagaccaaggcttctccaagtggggcatcaaccgcatctgcaccagcacctagtgtacacagcccacaggcagtagctacanctcagggttctgnttcctactgcctaagttncagttccctcaagtggacttgnaaccggtgaaggtccagtaatggtggtttgggttaanaaanattttttttgnnaagggggattaaacttttttntnggnntctttagggccnctgttnnnaaatttttaattggggggggttttggcccgganaattttntgggnnngc

SEQ ID NO: 132790 - DNA, 464 bp, Arabidopsis thaliana columbia
  unsure (1)..(464): unsure at all n locations
gtgaagctggtagactcgacgagatgctcaagattgtggatgagatgctggatgatgacacggtaagagtgagtnaggaactgcaagagtttgtgaaagaagaactgaggaaaggaggaagagagggagatctggagaaactaatggaagagaaagagagattgaaagcagaggcaaaggcgaaagagttagcagatgcagaagagaagaagaaggctcaaagtattaacatagctgcattaattcctccaaaagcagtggaagaaaagaaagnaaccgcaaaacttctttggggaaaccgaagctggtggtgtttnagaagcccgttgtggtggangatggcttaaaggngtnggaagcaggtggntcccattggtcaggtccccccgtcctgctggtnctnatttttttnccctngaattcnatnngccnttngttncnttctttatcattccacctttttt

SEQ ID NO: 132791 - DNA, 440 bp, Arabidopsis thaliana columbia
  unsure (1)..(440): unsure at all n locations
atctcactctcaccgccttcatttcctcgatctccgtcttcctccttctccgtctgtcgcagagcatcgctcgaattagggtttctnctgagagaagatgagggaaatnattagcattcatatcggacaagccgggatccaagtcggaaattcctgctgggagctttactgtctcgaacatggaatccagcccgacggaatgatgccgagtgatactacagttggtgttgcacacgattgcgttcaatactttctttagcgagactggtgcagggaagcatgttcctagggctgtcttcggttgatcttgagcctactgttatcgncggaagttcgtactggtactttaccggccaatttttccatccannggaagtttatncnttgggaaaaaaaaatcntnnttanaaaattcngnnggggggcattannanttttgg

SEQ ID NO: 132792 - DNA, 438 bp, Arabidopsis thaliana columbia
  unsure (1)..(438): unsure at all n locations
ccggagtcatnggcatcaatttactcctctttaacctactggctcgttaaccacccctacatctccaattttacttggatcgaaggtgaaaccctaggctccaccgtctttttcgtatccgtcgtagtctccgtttacctctccgccacgttcctcctccgatccgccatcgattcactcccatcactcagtccacgtatcctcaaaccgatcacagccgtccacagcctaatcctctgtctcctctccttagtcatggccgtcggttgcactctctcaataacctcatctcangggntttcaagatncgatgggcggggtttctttcaaggggnttttgcttttccgttggcgggtaaaaccttaacggggccngttttttttttngggntaangtttttatccnttnganngnnccncnggatttgggggaaaggt

SEQ ID NO: 132793 - DNA, 358 bp, Arabidopsis thaliana columbia
  unsure (1)..(358): unsure at all n locations
atcganagtctcgctcgatttgccattcaagaacataacaaacaacagaacaaaattnttgagttcaagaagattgtcaaagcaagggagcaggtagttgcaggaacgatgtaccacttaaccctagaagcaaaagaaggtgatcagactaagaattttgaagccaaagtgtgggtgaagccatggatgaacttcaaacagttgcaggagttcaaggaatcatcttcttgaatttcacttgttcaagttaatgntttcaaatnctctgagngtaattaattntattgngtgtaaaanacttttcctnttttggggaaccntaaaaaggttaattttatttcagggaanntttnttctt

SEQ ID NO: 132794 - DNA, 403 bp, Arabidopsis thaliana columbia
  unsure (1)..(403): unsure at all n locations
ctgatctcttccaatttacagccatttcccagctcagatctctgatccggtgagatctctctcaaggaaaaggagttagagcatcatcaagatgaaggcactcattcttgttggaggcttcggcactcgcttgagaccattgactctcagtttcccaaagccccttgttgattttnctaataaacccatgatccttcatcagatagaggctcttaaggcagttggagttgatgaagtggttttggccatcaattatcagccagaggtgatgctgaacttcttgaaggactttnagaccaagctggnaaatcaaaaatcaactttgnccacaagggncccgggcccnctngggnaccccnttgggcccnctgggtttnggngggggganaaaattntttgntgg

SEQ ID NO: 132795 - DNA, 317 bp, Arabidopsis thaliana columbia
  unsure (1)..(317): unsure at all n locations
aaccanaatgtaacagctcacgatcagaataaaaaaattgtaacgcagacgttttgagatatcttcaatggcgaagaaagctgtnttgattggaatcaattaccctggaaccaaggcggantacggggatgcgtcaacgatgtccggagagtgcacaaatctntcgtggatcggtttggattctccgagagaaacatcactgagctgattgatacttgacgagtcttccaccaaacctacaggggaaggaatattcgaaggggcattntttgaatctaggtttnnatccnntaaaacccgggtgntgtccttnttng

SEQ ID NO: 132796 - DNA, 439 bp, Arabidopsis thaliana columbia
  unsure (1)..(439): unsure at all n locations
aacagccaaggtgcattccagtactttggnctcgaagagagccaagttccactcatcatcatccagactgctgacgacaagaaatacctgaaaacaaatgttgaggttgaccagattgaatcatgggtcaaggacttcaaggatggaaaaattgctccccacaaaaaatctcaacctatcccagccgaaaacaacgagccagtgaaggttgttgtttcagacagccttgacgncattgtcttaaactctggnaagaacgttttgcttgaattctatgctccatggtgtgggcactgccaaaagcttgctccaatcttggncggngttncttgtgtcgtaccaaagcgnccccnagtntngtcatagcttaagcttggttgnaancccgaanacgggtttcccaaaaagnatncccttttnttnttaaagggggttcccg

SEQ ID NO: 132797 - DNA, 517 bp, Arabidopsis thaliana columbia
  unsure (1)..(517): unsure at all n locations
ccattctctctactcaaagctcttcttcttcgatcaaaaaacctcgagcttctaacaatggagaccagcatcgcgtgctactcacgtgggatccttcccccaagtgtctcttctcaacgatcctctacattggtctctcctccttcctactccacatcctccagcttcaagcgtctaaaatcgagctcaatcttcggagattcactacgattagcaccaaaatcgcaacttaaagccacaaaagctaagagcaatggtgcttcaactgtgaccaaatgtgaaattggccaaagcttggaagagtttttggcacaagcaacttctgacaagggattgagnacttttgctgatgtgtatgggggnagcattntggacaatagnttttaaagttggaccagtttttncggtgggacaacttttgttaattcccttgggggatgaccaaccgctgttgnattncttctgnnaggtctcttttngggttgaaancncnatnttcaagatnttccttagngtc

SEQ ID NO: 132798 - DNA, 501 bp, Arabidopsis thaliana columbia
  unsure (1)..(501): unsure at all n locations
gaagaatctacagcgccgtatcactctattacgttgccagagacatttgatcttgatgactttnagcttccagacaatgagatctttcagggtaattacgttgatcatcatgttagtacaaaagagcagatcacccttcaggataccatggatggcgttgtatactcaacgtcacaatttggattagatgagcgatttggtgatggcgacacttctcaagctgctttggatcttgatgaggcagtattccaggacaaggatgttattggntccgacgatgagggagttccaggtattgatcacaatgcgtatctggatgcgggcanacccgggntaaaggattcgatggaaggagtctctgaagccatgcccatnggttttnaatgagggcagnttgaagatctttcctttgataatnggtcanccgagnggcttaagctcctnaaacccngggttanttgngggccaaccngtttagttttaaaanaantggnttnggnt

SEQ ID NO: 132799 - DNA, 351 bp, Arabidopsis thaliana columbia
  unsure (1)..(351): unsure at all n locations
gattgataggcctgcttctnctggtgttgcttccaagtnagggaagatgactatnaaaacgactgatatggaaactntgtatganatgggagctaagatgattgaggctttgaacaaggagaaagtgcagagtggtgatgttattgccattgataaagctactgggaagattactaagcttggaagatcgttttcnaggtctcgtgattataatgctatgggtgcgcagaccaagtttgtgcagtgccctgaaaggtgagttgcagaagagggaaagagggttgtaccattgtgtcacntcttcacngnggnttgattnttntccaccagcaaggccnnaaggggtttttt

SEQ ID NO: 132800 - DNA, 462 bp, Arabidopsis thaliana columbia
  unsure (1)..(462): unsure at all n locations
gtattggctaacacttgatttattagcttcagagacacctgaaatcaagagaccttgtagtagtgcagctattagagtgaagaactctaatgaagctgatatagttttcgtgcctttctttgcttcgttgagttacaatcggaaatcgaagctccgtggaaacgaaacaagcagtgatgatagattgttgcaagaaagattagttgagttcttgaaaagtcaagatgagtggaaaagatttgatgggaaagatcatttgatagtagctcaccatccaaacagtttgctctatgcaagaaactttcttngatcagcaattntttgtccttncggatttcggaaggtattcggcctgctatcgccaatctttgnggaaggttatcattncgccttacggtcacggngttaangnnatcnttttnccaccgggnaacttccnttttgnnaggggcccnnnatttg

SEQ ID NO: 132801 - DNA, 432 bp, Arabidopsis thaliana columbia
  unsure (1)..(432): unsure at all n locations
accgtttaactccgatggttcccccgccgtctaatccgcagcaggttcagcagttcctctcctctgccctctcccagcgcggcccatcttcagtcccctacgaagagtccaacaagtggttgatccggcaacatctacttaacctaatctnttcttacccttccttagagcccaaaacggcatcgtttatgcacaacgatggccgctccgtcaacctccttcaagcagatggtacgattccaatgccttttcatggagtcanctataacatacctgtaattatttggctcctngagtcatatcctngnnatccctcctttgggnctattgtgaattcccacccgttggtntggtnataaagggggccttangggaaatntaaanncctttttgggtttggnttttttttcggnanccttanaaattggggtt

SEQ ID NO: 132802 - DNA, 343 bp, Arabidopsis thaliana columbia
  unsure (1)..(343): unsure at all n locations
aaaatttgctctgtccagagctccaaatttaaagaacataaacactacacacaaaacantgaatacgatgttgcttggaaagagacaacgaccaccgatcaacagaaccacaagtttatcggagataaagttcgatctaaaccttcccagcgagtcagagccatcaaatcaacagaggccaaccgttgcgagcccgtacggttccaacggtcaagctgtaacagcagccgttgntcaaaaccgtgggtttttngttcaangggtttttttncttnggttacaccgggggggtncctttgggggcnttttgggggttttttcggngggtnggcattttttnnng

SEQ ID NO: 132803 - DNA, 269 bp, Arabidopsis thaliana columbia
  unsure (1)..(269): unsure at all n locations
tgctaaagtaattgaggaattgaatagcaaggggttggttgaagaaagtnaaggtnctcgtntnatttnccttgaaggcttcgacatcccactcatggttgtaaagagtgatggtggttttaactatncctcaacagatctnactgctctttggtaccggctcaatgaagagaaagctgagtggatcatatatgtnaccgntgttggccagcagcagcactttaatatgtncttcaaagctgccagaaaagcaggttggcttccagcca

SEQ ID NO: 132804 - DNA, 334 bp, Arabidopsis thaliana columbia
  unsure (1)..(334): unsure at all n locations
agtgcgataaagctgcttggagatacgttggtgagaacagagcagacgagaatngagatgacgagagagatagaagcgatgaggatggatacagagatgaagaggacaaagatgattttggaatctcaacaacgaattgtggaagcgtttnctaaaagcttatcagattatacnactacggaggagcaagacaagaagaagaaagctagatagangaatntcgtcgtctttagctgacncctgatcaaaaggcgccataatttaanttattntngtgattttcaaaatttccttagattnttngaatcggaanggcctttttatttaggcttnt

SEQ ID NO: 132805 - DNA, 280 bp, Arabidopsis thaliana columbia
  unsure (1)..(280): unsure at all n locations
gttgtagaacatggtcttngacatctgccttttactgaaaagcaagtgattacnccaaccggatgtgtgtattctggtgtggatttctgtaaacggttatgtggtgtctcggtgattaggagtngtgagagcatggagaatncgttacgagcatnttgcaaaggtatcaagatcgggaagatcctaattcaccgagaaggtgacaatngtcaacagntttttttatgagaaattnccaatgatatctnagagnggcatgtcctattgttggatccnattc

SEQ ID NO: 132806 - DNA, 435 bp, Arabidopsis thaliana columbia
  unsure (1)..(435): unsure at all n locations
gctatggagatctacgaaatgcgacaaatggcttctcttcaagcaatatggttgggtcaggtagttttggtactgtgttcaaggcattgctcccgacggagagcaagattgttgcagtgaaagtnctaaacatgcagagacgtggagctatgaagagctttatggcagaatgtgaatccttgaaagncacaaggcatcgtaatcttgtgaaattactgacagcttgcnctagtactgatttccaaggaaacgnattcagagcgcttatctatgagtacttncccgaattgaagcgtgggtatgtggctgcanccngaggaagtcgaagagatacgtaggnccccacggancctttnacaacttcttgaaaggcttaaaaatttgtcatagncgntggcttcttnttttggctatntttcaatgntcnctgtnaat

SEQ ID NO: 132807 - DNA, 365 bp, Arabidopsis thaliana columbia
  unsure (1)..(365): unsure at all n locations
gacttgatgatggatgatggagggattttaagctgtatgattgattatnaggcaagtnctaagagaatnagggttcgtttcagaaaacgtggttcgataaanatgtttganccgttcttctctttctcggtagacttggagaagctttggaaaggtggtgaagtcatggtgggtttaagctctgctaatgggaactcttccaagccacatttnctccattcatggagcttttgaaatatggcatcttgatccgatatgggtgcaaccagcggcattaggaccaaatnaaggttttnaagccggacggtttnccacgggaaatggaagganggcccgngaaaaatagtgnagtttnatatggngga

SEQ ID NO: 132808 - DNA, 470 bp, Arabidopsis thaliana columbia
  unsure (1)..(470): unsure at all n locations
accaaacgcaaacatcttgctcccacgtcctggcttccctcattacgacgctcgtncngcttacagtggtctcgaggttcgcaagtttnatcttcttcccgagaaagaatgggagattgatcttnaaggtatcgaagccattgcagacgagaaaactgtggctatggttgtaattaaccccaacaatccctgtggaaatgtctactctcacgaccatctcaaaaaggttgcagagacggctaggaagctcgggataatggtgatctcagacgaagtattatgaccgaactatattcggagacaatccatttgttccaatggggaagtttgctttcgatagtcccctgtattgacactagcaggcatatntaaggggntgggnttttccctgggtnggaaaattggctggntcgcccttnantatcccngggggngttttngggcccccaaggntttnaaancctttaana

SEQ ID NO: 132809 - DNA, 548 bp, Arabidopsis thaliana columbia
  unsure (1)..(548): unsure at all n locations
aatttacttccctttgttcagacgtttctttattcttcttccttccttcttctccttcttcttgatcgtgttcagaaatcatattcatcacctctctctctctatgtctctatatttggattctttataacatgtgagatcgatctatttttgatcagagacagagagaagactagaagaagcaaagaatatttcaagaatgatgaagatgaatacaggaacatcgccgtcggtcatcggcggcgggactagtggtaatnagtgggagtctcgacctggaggaatggttgttcaacgtcggacagatcagaactccgatgtgccacgtgtcattcgtgttcgggtaaatacgggncggtttatcacgggntcaacatcaattncccaatnttccttcggngagttaagaagattttntctnacaaagngggctttaccatgagggaataangtttttanaaagcaaaggggggttnaaagtnttcttgaccttggggggaaaacccncaagtttttttaannggccattttngggaacgtcttnaaac

SEQ ID NO: 132810 - DNA, 515 bp, Arabidopsis thaliana columbia
  unsure (1)..(515): unsure at all n locations
tgtgtgggcggtggtggatgtatcaattgatcctgtcagggaaaactctggtggtgccccggtaatccggcgactaccatcaggatgtgtggtgcaggatgtgtctaatggatactctaaggtcacgtgggtggagcatgcagaatacgacgagaaccaaatccaccagctgtacaggccgttgctacggtcaggccttggttttggctctcaaagatggctcgctacacttcagagacagtgcgagtntctcgccatcctcatttcttcctccgttacatctcacggcaacacatgtccgtttcttacacacttgtcattatgcttaacataattaatctttgtcattatgttacaaaacttttgaccnttttacatgcaaaagcagcaattaacgcctggtggtcgnaaaagcattctnnaggttagcncaacggatnaggttcaantnntttncgggatttttggnggcgnnggcccaaattttgggaaggtnncttttggnattttncctc

SEQ ID NO: 132811 - DNA, 438 bp, Arabidopsis thaliana columbia
  unsure (1)..(438): unsure at all n locations
aaatgggaggatttggcttactcaatccccggaatcctcaactttggcctgtttgggattccaatggttggagctgatatttgcggtttctcacatgataccaccgaggaattatgccgtcgatggatccagcttggagctttttacccttttgcaagagaccattcgtcccttggtaccgccagacaagaactatacctctgggattcagttgcttcttctgcaagaaagggttctcggcctcagaatgagacttgctcccacatctctacacattgatgtatgagggtnantgtcagcggaacccaattgggggggccgctcttnttctcatttnctcaaaggcactataacctnttgagattgnnttcccaagttcttgatttggnaaaagcatnantgggtttttccaanngtnaagnaaagggggnnttanaa

SEQ ID NO: 132812 - DNA, 425 bp, Arabidopsis thaliana columbia
  unsure (1)..(425): unsure at all n locations
attgtatatactctctctcagattccctccttgtagctagcttctacctcctcctttcattcatggcgaaaaactaaaaaagacatccatctttctcaaaacatctctcttactctcttcgttttctgactgcaaccttttttcccaatggagcgcgcaaggagacttgcttacagaggaatcgtcaaacgtctcgttaacggcacaaaacgncaccgtaacgctgaaacanctcaccttgttcctcacggtccggcgaggtatgtntcttccctttcccctttcattttccaccccttngatcttgtaaaccanacggggggttttcggggngggcaccannagnncggngttccatcttccgtcgnttgttgttaaacccagnggtacttttccctcgttggtaaaannttttggaacancag

SEQ ID NO: 132813 - DNA, 362 bp, Arabidopsis thaliana columbia
  unsure (1)..(362): unsure at all n locations
gatggtttcntttctaatcgagaagctctccgtggcagattctaacggtgtcgtgttcganctccgggcgctcgcaaagtnagatactgtggcccgagcctgcatagccgaggctggagcnatacccaagctggttcgtnatctagccacagagtgcccgagcnttcanataaacgccgttacgacgatcctaaacctatccatcctggaacagaacaaaacgaggntcatggaaactaacggagctttaaacggcgtcatcgaggttnttcgttcggggtgccacgtgggagggctaaggctaacggagccggggcattttttcagtttnggcgggngtttnggcttccaaaagaagnntt

SEQ ID NO: 132814 - DNA, 255 bp, Arabidopsis thaliana columbia
  unsure (1)..(255): unsure at all n locations
caacaaattgagaaagaaaaaaaggtaaggctgtntgagagagaacccaccaaagcntgcacganagagagaaaaaaaaaagctttgattttttataaaatcccaccactgctctnttaccataccttcattacacatctntttttctctctctcgctctcagttttntgggattntttctttaaaaggggttcttagggtttagtgaagctatagatttcantttcatacatagttaacgtnttganggaatct

SEQ ID NO: 132815 - DNA, 332 bp, Arabidopsis thaliana columbia
  unsure (1)..(332): unsure at all n locations
gatggagcagatcaagaatttttnggagaaaatncctaatcttgaacaactcataatatactacgaatcatcaatcgataatnatttagttagagtatcaagccaacttcaggaggttcctacagtagcttcactcaagtncaagattcangtaatctctgataaccttagcttgtcatccactttgcccatttcctngtngatggaaaatggatttnacctgtagaagaaccttactggtttngtgggattagtaatgcggtcatgcctcggtttaccacttggaagctttatatgggtgncctcatgggntccaaggaatttttnggtnc

SEQ ID NO: 132816 - DNA, 360 bp, Arabidopsis thaliana columbia
  unsure (1)..(360): unsure at all n locations
aatattttggctgttttatcggaagtaatgtctgcnatgtncgcagaggttatgcaaggnaaaccggagtttacagatcatcttacgcataanctcaagcaccatcccggtcagatcgaagccgccgcaattatggaacatatattagacggaagctcttacgttaaagaagctcaacttctccacgaaatggntcctcttcaaaaacctaaacaagatcggtacgctttacgtacgtcaccacaatggcttgggccgcagattgangtgatcagagcggctactaaaatgattgancgtgagatcaactctnttaatggttacccctttnntaggtgttttgggggnncaaggngttna

SEQ ID NO: 132817 - DNA, 392 bp, Arabidopsis thaliana columbia
  unsure (1)..(392): unsure at all n locations
acgatatcacaacatctatttttnttcccaagatatataccttacaagtgtagtgtttaatctttctagatatgatttggtccgcttgacaagtaaccaaaaagctttcttcctttttgtagaaacccacgatggatgaactccacgagacaaggttcttcctccaattatctatgaacactgaaacggcgtcgttcatgtttccactgaacatcacaaccacagaattagccacaaaggaatcgacccttgaacctagcttcacagcaacttacattcatcttccttanatctttcttnttagggnattttnggtcggnacagntttaaagggttcaacttaattttttgttncccggngggnntcccccaaaaaaantttnggggtnang

SEQ ID NO: 132818 - DNA, 416 bp, Arabidopsis thaliana columbia
  unsure (1)..(416): unsure at all n locations
agaagatataaggtctgatgctaccagaactttggtcatgttacacgatcagggcgagcaaatcactaggacgcaccataaagccgttgaaatcgaccatgatctcagtcgtggtgagaaacttcttggaagccttggaggcatgttttcaaagacttggaaaccaaagaagactcgtcctataaatggtcccgtcgtaaccagagatgactcaccaacgagaagagttaaccacttagagaaaagggaaaaactgggactgaactcagcacccagaggacaatcaagaacccgagaaccactccccgaatcanctgatgcttatcagagagtggngatggaaaaagnctaagcangncgntggggntttnagacnttangtnatatnctcggngngntaaagancatggcttttt

SEQ ID NO: 132819 - DNA, 432 bp, Arabidopsis thaliana columbia
  unsure (1)..(432): unsure at all n locations
cactactctcactgtaatcccttagatcttcttttcaaatttnaatggcgtccggtgatgttgagtatcggtgcttcgttggaggtctagcatgggccactgatgacagagctcttgagactgccttcgctcaatacggcgacgttattgattccaagatcattaacgatcgtaagactggaagatcaaggggattcggattcgtcaccttcaaggatgagaaagccatgaaggatgcgattnagggaatgaacggacaagatctcgatggccgtagcatcactgttaacgaggctcagtcacgaggaagnggtggcggcggaggccaccgtggaggtggtagctacggaggtngcgncgttagacggaaggttggaggnggataaacggcngnngnggttantcncaanaggttnttntttnngaatttcg

SEQ ID NO: 132820 - DNA, 424 bp, Arabidopsis thaliana columbia
  unsure (1)..(424): unsure at all n locations
atcatttntttctctcaccaaccaacaagttctcctttctacccatttngtctccttcattttnacgttttctttagatctgtnaataatccatccatggcttggtctagtcactagtggtgttatctctctgtgtggaagaaaaagcaaggttttttnatcacttggattgttttaagatatggcaactttgaacccttttaatttgttggatgatgatgctgaggatccaagccagctcgctgtttccatcgagaagattgataagtccaagaaatctggaccgggtttcgagcttgcttgctaagtnagctcctaaggtttcccttntaagcnactttcctcctggttaaagccggtnaanaaagggccagggggtaattcttcccacgggggtggttganancccntnggnggntttaat

SEQ ID NO: 132821 - DNA, 470 bp, Arabidopsis thaliana columbia
  unsure (1)..(470): unsure at all n locations
atagaactcaatggcgacacacgacttcgatttcactgatccctatggaaataaagatagaaaaagtttgtactcaaaccaagataactatttcaataattggtcttcacttactcaatcagaggaagttgttgaggagctttctattcaacagactaaatacgaccatcggagtctgccttctttgagaactgccgaagccgaggctgctgagtggaatnagttggagagatgggggaaccaagagttgcagcataatggcactcgcattagaggaattataaccttncaaatcagggaacttngcccggtgttttgncatncctctgtaataggggtttcncaattgatggtttgtgggtttcgntttgttnccaaanttttttgaccgggctttttcacttggggcctgggcntaatttggaancatcatgncgggctttcttggttnnncccgnctttttncctna

SEQ ID NO: 132822 - DNA, 309 bp, Arabidopsis thaliana columbia
  unsure (1)..(309): unsure at all n locations
tggctataatgactgtngttttcttctgggccgcatacaaaaccgatttcttcccgagaacattccacgtgaganacttgagaggcagtgaacatgagatgatgtctgctttatacttacaagtcagtattgtnagccaagctcttatcttcgtcactcgatctagaagctggtcttttacagaacgncctggatatttctngctatttgctttctgggtagcacaattgtttgcaacggctattgcngnttangggnattgggnatttgcaaggatcaaagggatnggnttgggatgggcttgggtaa

SEQ ID NO: 132823 - DNA, 413 bp, Arabidopsis thaliana columbia
  unsure (1)..(413): unsure at all n locations
aggaaagtacagcaccgaagtttggctgcagcgcgataaaattnntntaaaggatgccttgaaagtnctactcttggntcaacttaaagcatcgttgggcgctgaatcagattcaagctcttttnacatccgtttgacatacactaaagcatcanacgaggctcagggtgcttctnaaacaacgcatgaaagtaagaggaggaaaacagacgcagagaatggttcaaactgtatttccgagaattcatttgaaaaggtgtatgaaccatgcatcttttcagttcattgcaacaggatgcctatctttttnagtgggnggtacttcaaatactccagaaatgttaggcaatcacggttgggtttatttgatggntgaangnantggggggaagcggcttttntgggggtncctt

SEQ ID NO: 132824 - DNA, 507 bp, Arabidopsis thaliana columbia
  unsure (1)..(507): unsure at all n locations
aataagtggcacagagcaccggatatgcttaggaagcggcatttttttggttgttgtgttataaacaattgtttatatgtagcgggtggggagtgtgaaggaattcaaaggacacttcgctcagctgaggtttatgatccaaacaagaacaggtggagttttattgctgatatgagtacagcaatggtgcctctnatcggtgtggtttatgacaaaaagtggtttctcaagggtcttgggtctcaccaactagtaatgagtgaagcttatgacccagaagttaattcatggagcccggttagtgacgggatggttgctggttggcgtaatccgtgtacttctctaaacggtcgnctttacgggattggattntagggncggttcaaaccnaagggttttnntgaatcccggnttcattggaccaaatcaatgggcagtaagntcattttggaacnngaagtcgntttaagcttnaaccctttntcccntncacaanaagtttttttc

SEQ ID NO: 132825 - DNA, 535 bp, Arabidopsis thaliana columbia
  unsure (1)..(535): unsure at all n locations
cattctcagaccatcatcactaagcagtaagtaagcactataatcgcagaagatagataaaatggaagtagggtttctgggtttgggaatcatgggaaaagccatgtcaatgaatctattgaagaatggattcaaagtcactgtatggaacagaacactctccaagtgtgatgagcttgtggagcatggtgcatcagtatgtgagagtccagctgaagtaatcaagaaatgcaaatacactattgctatgctctctgatccttgtgctgctctttcggttgttttcgataaaggcggtgttttggagcagatatgtgaaggaaaaggttatatcggtatgtcgactgttgatgccagagacttctttgaagntcaatgagggaatcaccgggaagggtggtcggtcgtagaaggtccggtttcaggtagnaaaaagccacttaagntggcacntattnncttcttnttgtncaaggacnntttnggntaatccnacttttatncnttgggannaccnntttttttggnaatttna

SEQ ID NO: 132826 - DNA, 536 bp, Arabidopsis thaliana columbia
  unsure (1)..(536): unsure at all n locations
ccgtgacacctgtcgcgccattggatttgtctctnatgatgttggtcttgatgctgacaaatgcaaagtcctagtcaacattgagcaacagagcccagacattgctcaaggagttcacggtcacttcaccaaatgtcctgaagaaattggagccggtgaccaagggcacatgtttggttatgccactgatgaaacccctgagttaatgcccctgagccatgttcttgccaccaagctcggtgctcgcctaacagaagtcagaaagaatggtacttgcgcctggctaagacctgacggcaaaacccaagtcactgttgagtactacaatgacaagggtgccatggtcccaatccgtgtccacacagtcctcatnttcacccaacacgntggaactttnnccaacggcggaattgccgtnccttaagggnatgtnatnangcagtatccagngagtcctggcgggaaacattttcntnanccttaggcggtttgnattgntggcccattgngngttgtttnccggggaaagtnatgga

SEQ ID NO: 132827 - DNA, 495 bp, Arabidopsis thaliana columbia
  unsure (1)..(495): unsure at all n locations
gtctacgtatacaattgatcttcccccatctccaattcagatttggacagagtaacctgtgatcgtntcggttggggtagaagagatcgaagtgggagcaaaatcatgatgaatcggctattcgggaaacccaagcaggaggctaatnctctccaaactttagacaagcttaacgagacgcttganatgctagagaaaaaggagaaagtactcttgaagaaagctggtgcagaggttgagaaggcaaaagaatactcccgggctaagaacaaacgagcggctatacagtgtttgaaaaggaagaggttatatgagggncaagtcggacagcttnggaatttccagctccgtattcatgatcaaatgnttatnttagaaggtccaaagcaaccaaccgnacctntttnatgcattnagggngtgggcttnttcaattnaggcaatcaggagnancaaattttgttgtttggtaagnccnttggcggtcaatgtgtg

SEQ ID NO: 132828 - DNA, 447 bp, Arabidopsis thaliana columbia
  unsure (1)..(447): unsure at all n locations
aaaaaaaatggctcaagcagtgacttcnatggctggcttacgtggagcatctnaggctgtccttgaaggaagtttacagatcaacggctcaaaccgtttgancatctcaagagtctcggttgggtctcanagaaccggacttgtnatcagggctcagcagaacgtgtcagtaccagaaagtagtcgccggtcagtnattggnctcgtggcggctggtttagccggtggttcattcgttaaagctgttttcgccgaagctattccgatcaaagttggtggtcctccacttccttccggtggcctacctggaacagataacttaggccaagcaagggacttttcattggcattgaaaggtaggttttncnttcaaccantgtcaccancaggaaggttnagttgggcccaangttttgcttnaagggntcatcnccgttaggnaatttt

SEQ ID NO: 132829 - DNA, 515 bp, Arabidopsis thaliana columbia
  unsure (1)..(515): unsure at all n locations
aagcattccattagcttttttgctgtctccagaaaataaatnttcaatctttcgtcggaaaaaagnagnagnagnagnagagctgggtttagttttttcacgagaagcaaagagatcaataagtcagtgagctttttnctcgtttctnacgatggcggttgcgccggcaagagctcgttcagactatgattacctcatcaagcttcttctcatcggcgatanggtgtggggaagagttgtttgttacttcgattctcagatgatactttcactacaagtttcattactaccattggtattgacttcaagataaggactgttgaacttgatgggaagcgtatcaaattgcagatttgggacactgctggtcaagacggttcagaactatcactacagcggattnncagggngccatgggtatatttgcttgtctacgntgtaccggttgngcacctttaacaatttagnncntgatgaggnccatttgcaacatncccagtaatgcancaaatatt

SEQ ID NO: 132830 - DNA, 503 bp, Arabidopsis thaliana columbia
  unsure (1)..(503): unsure at all n locations
gaaaaacaaaatggcttcgatgggtggattacacggtgcatctccggcggttcttgaaggaagcttaaagatcaatggctccagccgtctgaatggctctggaagagtggcggtggctcaaaggtctagacttgtcgtcagagctcagcagagtgaggagacttctcgccggtccgtgatttggcttgttgctgctggtttagctggtggctcgtttgttcaggctgtcctcgccgatgctatttcgatcaaagttggccctcctccagctccttccggtggccttcctgggacagataactcagaccaagcaaganactttgcattggcattnaaagacaaggtttttactttacagccattnncaccaacagaagctgcagtagnggccaagaatttgnaaagggtttctaaatttgangccattttngncngaaagtttggcccttttttaaaanncttttttcnaangnttttantntncggattgcntttaanaaaaa

SEQ ID NO: 132831 - DNA, 528 bp, Arabidopsis thaliana columbia
  unsure (1)..(528): unsure at all n locations
cacagcaacaaacagagaaaatgtgtggcggtgctattatttccgattatncccctctcgtcaccaaggccaagggccgtaaactcacggctgaggaactctggtcagagctcgatgcttccgccgccgacgacttctggggtttctattccacctccaaactccatcccaccaaccaagttaacgtgaaagaggaggcagtnaagaaggagcaggcaacagagccggggaaacggaggaagaggaagaatgtttatagagggatacgtaagcttccatggggaaaatgggcggctgagattcgagatccacgnaaaggtgttagagtttggcttggtacgttcaacacggcggagggaagctgccatggcttataatgttncggccagaanatccttggtgataaagccaagctcacttccagatttgaccatcctcttctctaattntnctnctcgcgtattgcangttancgttaancttccgnnanaagnctttttttntttcaagtnnncggttttntanccg

SEQ ID NO: 132832 - DNA, 439 bp, Arabidopsis thaliana columbia
  unsure (1)..(439): unsure at all n locations
aagacagaagggtcagactacaggctcagttttcccaagtaaggccagttgcaatgcagccgtctgttggtccccgcatgcnagtttatcccccgggtggtcctggtattggacaacaaatgttctatggtcaggcccctcctgccatgattcctccccagcctgggtatggataccaacagcagcttgttcctggaatnanacctggtgggggtcctgtacccagtttcttcatgcctatggttcagccacagcagcagcgtcctggaggaggaagacgtcctgggggaatccaacaanttcccagcagcaaaatccccatgnttgcagcaaccagattgcatncaaaggggggtncggatttttcccggttttccccnaagggnngttggttggtnagtngntnatttttncctcccanattgatnttggggaaaaa

SEQ ID NO: 132833 - DNA, 445 bp, Arabidopsis thaliana columbia
  unsure (1)..(445): unsure at all n locations
cacattgactgtnatctatctgttcatgggaacgagatggaagctagcgaggatgatgatgatgatggccgatacatgaatagagaaggagaactcagttttnattacagaacaactgagcagaaggtagaagcttctnctctctctacaccatgggccacaaagatggatgatacagacctctcgtttcctcgcccttctacaacaagaccagcagcggtaaatgctgatcatagagaaggaatatccagtttcaacccgcgntaagtatttgagcagccattcagctncgnttgttcccagnaaaggaaccttgtggattcaaagggggttttaggcaagggggtttcctcttttaaagcccncggggtttcccccaccccaattgttttaagggntttaaacccgttttcccagnnttnaannccgggggccnaaaannccc

SEQ ID NO: 132834 - DNA, 455 bp, Arabidopsis thaliana columbia
  unsure (1)..(455): unsure at all n locations
agatagcaaaggatctaagaagaatattgatgttgttgctgataatgatgaagcgattgcaagggcgtttaatgtgttcgatgtgaacggagatggttatatttcagcggaggagcttcgtgatgtgttggaacggctagggtttgaggaggaggcaaaggcttgggattgtgggagaatgattcgagttcatgacaagaatcttgatggntttnttgactttgaagaattcaagaacatgatcttacatgtctaatgatggtgatacacatgtgacatgtgtgtgtagtccttttacatgtttgatgtgttatttgcaaattgcaatcactntatgtaaagtatatcctttncttatccgatgtgttgatgtataacctgnctagctttttttacctatgntaaatttantaaactntgngggnattgaaaaaaaaannccnttngnncntnac

SEQ ID NO: 132835 - DNA, 313 bp, Arabidopsis thaliana columbia
  unsure (1)..(313): unsure at all n locations
cagagcaacagggcaaaacagagcactgaagaaaagagagagaaacttaaaaagtctgagatcagtggaagacagagcagtggcgatgagagtgagangaaggacataactgtgaagaaacaaagacaaatcgttgctcaaaatcaagatagcccaatgaaganttacgaaaggagccggtcagagaatcacgagggctcgnagaagagttcttgtgtacaactgaagngatcagagacagngagacctnctnataganttntttctgatgatnagctcgatacaaattcgangtctttnacttgcttagtca

SEQ ID NO: 132836 - DNA, 407 bp, Arabidopsis thaliana columbia
  unsure (1)..(407): unsure at all n locations
ggtttatacacagatgaatagggagaagttgatgaagatggctaataccgtccgcactggcggaaagggtactgtcagaagaaagaagaaggctgtgcacaagaccaatacaactgatgacaagaggcttcaaagcactcttaagagaattggagttaactccattcccgctattgaagaagttaacatctttaaggatgatgttgttattcagttcatcaaccctaaggttcaagcttcaattgcngcaaacacatgggttgttagcggttctcctcagaccanaaaatttgcaaggttatccttccctcagntccatcaagcnaacctttggncccaggcaancatgggccaaccctnnggaggttttggnngnccnatttcccngaaaanngggtttttttngg

SEQ ID NO: 132837 - DNA, 488 bp, Arabidopsis thaliana columbia
  unsure (1)..(488): unsure at all n locations
ctgaaagaagcaatgaatctttcaaggcaagagataacacaattgaaatctgcagttgaagcagcagagacaaggtatcaagaagagtatatacagagcacacagcagaagagcaggaagtgagtctagaagctgaatctgatgacagaagcgaagagcaggaatacgaagatgattgtagcgataagaaagaacaatctcaggacaaaggtgtagaggctgaaactaaggaagaagagaaacaatatccaaattcagagggtgagagtnaaggagaggactcagagtcagaggaagagccgaaatggagagnaacagatgatatggagggttgatgaaggaggaaggaggaggnagaggtttntccatattggnnggttnaagcaggangangggnaaaganggaggtttgttgttaaanaggccaagccccaaccatntctttnggttttggaaaganggnggaggnggatggtgntggttttgng

SEQ ID NO: 132838 - DNA, 570 bp, Arabidopsis thaliana columbia
  unsure (1)..(570): unsure at all n locations
caaacatcagaagccctagagcttgagccgtcgaaaatgtcgaagcgaggacgtggaggaacgtctggtaacaaattcaggatgtcacttggtctgcccgttgcagccacagtgaactgtgcagacaacactggtgctaagaacctttacatcatctctgttaaaggaatcaaaggtcgtctcaatcggttaccttctgcttgtnttggtgacatggttatggccactgtcaagaaaggtaaaccagacctcaggaaaaaggttcttcctgctgtgattgttaggcaacgtaagccatggcgccgaaaggacggtgttttcatgtactttgaaggtaatgctggagtgattntnaaccctaagggngaaattgaaaggttctgcaattactggaccnttttgggaaaagtgttcggtctntggccaaggatttctagtgctgtnancgcatttntnangccatttnnacttttccttggtatgaantgttttaacgaacgggaaagttgggttttagggtttaattggggcggcaatttttttnntnannaattccngttttaggggtgc

SEQ ID NO: 132839 - DNA, 371 bp, Arabidopsis thaliana columbia
  unsure (1)..(371): unsure at all n locations
gaactgcaaacgcggagtacttacgtagtatnaacactagagaacaaacgtaccagagaagctaacggtgatgattcacaacctttagaaggtcaaaggaaatggcaagcttcttctcgttgggctgcagctgctcaatttgcattggctgtgagcctcacttcatctcacaacgncctccaaagccttgaaatcgaagatgataacagtattttgaagaaaacaaaggacgccgtcgtcactctacgcagtgtccttgaagggnaacatgataaagagnttnaagnctctcttaacccaaaggtggcatctctttgaggggcntttggtggncnannttttttncnaaaatggttccnagggggtttccc

SEQ ID NO: 132840 - DNA, 452 bp, Arabidopsis thaliana columbia
  unsure (1)..(452): unsure at all n locations
gaaagagtccaagacatttnatcttcttctctactaacagaagcaatcccgttggagttcatcagatcagagaaagaacaaccagcgatcacaacattccgaggtccaacgccggcgattcccgtcgtcgatctaagcgatcccgacgaagaaagcgtgaggcgtgcggtggtgaaagcnagtnaagaatgggggctattccaagtggttaaccacgggattccgacggagctgatacgacgtttacaagacgtcggaagaaaattcttcgagcttccttcgtcggagaaagaatccgtcgctaaaccggaagattcgaaagacattnaaaggatacgggaaccaaagtttcanaaagttcccgaaggttaaaaaagctttggntnngttcaaatttttncnntcgnantttggnccccnntaatnggggaantttaaagtttttggcctaa

SEQ ID NO: 132841 - DNA, 536 bp, Arabidopsis thaliana columbia
  unsure (1)..(536): unsure at all n locations
ggcgaagatgtcaggtggcttagatatgtcacttgatgatatcatcaaatctaatcgaaaacctactggatctcgcggccgaggaggcattggaggtggcaataacaccggtggtcgcggtggttccggttctaattccggtccgtctcgtcggtttgctaaccgcgtaggagccagaacggcgccgtattcaagggtcagcccattgattttatatctctccctttaccttctcttccttcaagaatcagagaattcctttnagggtttttntgaaatcaaaaaaagctgagatctgttttcgtttctcctttgacggataaaacagccggtttcaacaacaaacaagctcatgatgcgntttggcaaaacggcggttttgcgnctaatncggtctttggcgncggtttttgggnatcantnagcctgctttttttnggnggtgggcccgntttncgggctnggacccaggntttaaatttaaaacttggcctttggggttcccacnggggttnaagggggttttnnntggggta

SEQ ID NO: 132842 - DNA, 413 bp, Arabidopsis thaliana columbia
  unsure (1)..(413): unsure at all n locations
gaagangaagaacagatcaaatacgaggagagatctctaaagagatttatcgtttcaaatttnttcacgttgagaagtttaatttagattaaacaacaaaaagatgggttactggaattccaaggttgttccaaaattcaagaagttattcgagaaaaatagtgctaagaaggctgctgctgctgaagctaccaagacctttgatgaatctaaggaaacaatcaacaaggaaattgaggagaaaaagacagnactccaaccaaaggtcgtgggnacctatnaagccacgtctncagaagtcaaggctttttgtgagngnccctaaggtggcttggtttttaggaaaaaccncagccggnnttttccagaagttccctcggggggnnttgtnaaaattttgnnttcccccccct

SEQ ID NO: 132843 - DNA, 340 bp, Arabidopsis thaliana columbia
  unsure (1)..(340): unsure at all n locations
gttccttggaatgaaatngatncntacaacatacatgacacaagcaggtggaaggttctgaacccaaagtttgtncttcaggtgtatagagattttccagctacaggggattaccaatttggaatagacgtgtggcccgcagttcgtgctgctatggagtacatggaacagtttgatagagacaatgacgatctaatagagaatgatggtttcccagatcagacatatgatacatggactgttcatggcgtgagtncctacttcgggttgcntgtggctggctgctcttcaagctgcagcagcaatggntctccaaattgggtgncaanttntttncnng

SEQ ID NO: 132844 - DNA, 470 bp, Arabidopsis thaliana columbia
  unsure (1)..(470): unsure at all n locations
acaatctcttaggtcatcgcctttactatggtttccgtaccacaatcagaccagacagaaaagcattagctccaattttnatagctagagagaaggggaaaagggctggcttcgaagaggcagtgagacgagtaatgctgaaaacaaacttcggagggcctcacaagcgtgtatctcctgaatcgttttatacaaattcatggcctgaatgtttctgtcagatgaatccgaagaagtctagtgataaatgcccgccaaataatgttatagagattcttgacagccggttagagagtatcagagatccagattcaacttctcagacgnattccacggtcactggattagaccggtaaggntcttaactggtagccttggaccgtttatncctaaagtnttcaacaaagagggcngagaagngggtntttccccnttttcatcattnaggngtaangnnttntaaaaatttg

SEQ ID NO: 132845 - DNA, 476 bp, Arabidopsis thaliana columbia
  unsure (1)..(476): unsure at all n locations
ggcagaactgtgggcgattttnggacccggattctccggcgccgttttcggaaccgggtggtggttttgggtcgacgccnncgtttgcagttccatccaagttcccttcgtccattaccttcccggcatattcgcttctntcggagctttgatgttcaattgcgtcagaaaagaagacattgattactctccttacgacgaaggcgagtggagattgaagctgtggcttttcatagcgtatgtcgtagcatttgtttccttagctgcttctgttggcttgctgattcaagattcggttgtaaagactgggccttcaacttggactggtgtggctggtgtctttcaatgtgtatttgtattgataagtgggtaatgtattggncaacgcactcagagtagcgcacaggacaacttaantccgcttaagttcaaactggcaattnaagtccctcggttnnnacatgnaaacccggnta

SEQ ID NO: 132846 - DNA, 428 bp, Arabidopsis thaliana columbia
  unsure (1)..(428): unsure at all n locations
attctccttctctctcgatatcatctaaatctntctnttgatctcaatttcgcaaaatggctgacaagaagatcagaatcggaatcaacggtttcggaagaatcggtcgtttggttgctagagttgttcttcagagggatgatgttgagctcgtcgctgttaacgatcctttcatcaccaccgagtacatgacatacatgtttaagtatgacagtnttcacggtcagtggaagcaccatgagcttaaggtgaaggatgacaaaactnttctnttcggtgagaagccagtcactgttttcggcatcaggaaccctgaggacatcccatgggggtgaggctggagctgactttgtttgttgagtctactggtgtnttcacttgncaaggcaaggctnntgntncacttaagggntgnncnnaaaaggntt

SEQ ID NO: 132847 - DNA, 465 bp, Arabidopsis thaliana columbia
  unsure (1)..(465): unsure at all n locations
ttgaaacttgagcttcaattacaaagaatggctgcttcaagtgctgtcaccgcaaactacgtcctcaagccacctccattcgcactggatgctttggagccgcatatgagcaaacaaactctggagtttcactggggaaaacatcacagagcttacgtggacaacctcaagaaacaggttcttggaaccgagcttgaaggcaagcccttagagcacattatccacagcacttacaacaatggtgatctcctccctgctttcaacaacgnttgctcaggcgtggaaccacgagttcttctgggagtcaattaaaccaggtggtggaggnaaaccatcaggngnngtttttgctttnctttaaaggngnttcanttccttatngggaggtnttttgaggggtcaaatntttttaagccncntagtttgngctttgttnggcccggttctttttaaatnaaaaantat

SEQ ID NO: 132848 - DNA, 357 bp, Arabidopsis thaliana columbia
  unsure (1)..(357): unsure at all n locations
gcttgcagagttaggaggatgaagctaggaggncaaggccttgaggtatctncncaaggccttgnctgcatggccctctccnctcganacggtgctcccaagccggaaactnacgccatcgctctcctncaccatgctattaactccggtgttactttctttnacacctctnacatgtatggtcctgaaaccaacgagttgctcctcggaaaggctctgaaagatggggtgaaggagaaagtggagcttgcnaccaaatttggattctttatagtagagggggaaattttctnagggtaagaggagatcctnagtatgtaaagggcagcgtnttaaggctagtttaaaagaggctag

SEQ ID NO: 132849 - DNA, 428 bp, Arabidopsis thaliana columbia
  unsure (1)..(428): unsure at all n locations
ccttcactcttcatcttcaaagactgcgcctttnagctcagtgaaaaaggttcgagcttcggaaactatggcagcattccctaaccttaactctgatgctggattgaagaagctcgacgagcatcttctcactcgcagttacattactggataccaggcttcaaaggatgatatcaccgtctttgcagctcttgcaaagcccccaacttcacagtatgtgaacgcttctngttggtacaatcacattgatgccctcttgaggatctctggtgtctctgctgaaggaagcggtgtcattgttgagggntccagcttcctatcaactgngggaggctgttgctacttccccctgcagcttnnttctaagggatcctnngggcttgattgaagnaanttnntgattnntggtttgcccttttncggngggg

SEQ ID NO: 132850 - DNA, 465 bp, Arabidopsis thaliana columbia
  unsure (1)..(465): unsure at all n locations
agaaaaagtagtggatttnntcgcggtgtatcaaaatacagaggcgttgcaaggcatcaccataatgggagatgggaagctagaattggaagggtgtttggtaataaatatctatatcttggaacatacggtatttcattccattatccttactttatagtaatattttnatgaaatgtgtaaattcatactttagtacaatccagttcctagcaaatccaaatcttgaaatttgggattagtataaaatgggagttattctctgtcctcctgttaagtgggactctagtagacggtgacatggtatcatatcctnatacttcacatttaaattgggaatggtttaaaaatggtngggnccaaggagggnncgnttatgcatgattntnggcaacggncacnntttaggtttttttttcttggccaccaccccnggaaattttaggccccccnntgttggccccc

SEQ ID NO: 132851 - DNA, 384 bp, Arabidopsis thaliana columbia
  unsure (1)..(384): unsure at all n locations
ggaaaagcagaaaaatcaggtactgtcttgatttgaatatcctctatggntgttggctaggcttttaactctcactcataatgaattacacttttggacagtattctaagcttttaagtagaatagtgtaagcnataccatgaagtgagacatatcatcacatttttaatttcccactctgcataaagtattataagatttgtnaatatgttgcaatgccaatttggatatnncatgagactaatctgacgagcatggatttaacggaagttggctcatttgtngttgcagcttctggagcctctgnggcancaatggggaatggggtgcaaaagggcaatncttgcnnaggggccatnncggggtccntggtagngcttttaa

SEQ ID NO: 132852 - DNA, 405 bp, Arabidopsis thaliana columbia
  unsure (1)..(405): unsure at all n locations
caatcacgagcaagagctcgaagaactcgagtatttccagaaacacgtagccgaacgtttntgggatttaatcacatctccatctccgcctccttcctcctcctcttccgccgtctctaagccgtctnatccgattctttcgatcccttggttacagaatctnctagatgttttaatgtcctgtnaagcagagttcaaggcggtgttgagcacgacccagatctcgaaatcgccgtctttagaaagggttttgccggaaatgcttgatcggattttaaaggcgttagattttatgtaacgccgtcggttaacggggnttnattccgttagacaagagccgncggtttttcgggggnagctntnaagggggttnaagaaacgngncgntttttttncgggaagggt

SEQ ID NO: 132853 - DNA, 426 bp, Arabidopsis thaliana columbia
  unsure (1)..(426): unsure at all n locations
cttgaaaatataacgcattcgctctgtactcttgaatttaaaacccggcgtgcttcatactattggctgtnacattccctgagtctctacatgccatatgtntgggaatattcacggttgaatgtnacaaacactgtaatgtccaagcgtaagttgaattacatagtgacaaacaagtatgttgatggttggnatgatccacgtcttttnacactttctggtttgagacggaggggtgtgacttcaactgcgattaatgcatttttacgaggcattgggattactagaagtgatggtagcatgatacacgtaagnngtcttgangcatcatattagggggggatttnataaaacagcccctcggaccntnggtggngcttaaanccncttaagggggcanccccnttttgggtcagccaagntttt

SEQ ID NO: 132854 - DNA, 525 bp, Arabidopsis thaliana columbia
  unsure (1)..(525): unsure at all n locations
cctttttttttttttttacggntcggaacttgcattacaatttaaagatatttctttctgatcgattagataaattgtctgtttttnattatagtcgacgtttcttaaagaagaaacacaattagaatagaaaaggcatcatgaattaaaaaagatatacaaccagttacatgttatgaacgctatattatgaagttacaattgtcacaaaaacttggagcaatcttgagagcttgtaacccttctntggacacaacaacaaatcttaaacgttttactttgtgctgcactactcaacctcaatggccgcctcaacaatggctctctcctcccctgccttcgccggtaaggccgtcaagctttnccccggggcatctgaagtccttgggaggcggccgtgtgncaatgagggaggnctnttgccaagccaaagggcccatnagggagnccatgggncgggtntanccgngnaaagnacttgggccnttttttgggggtaccgggttccttccggggggtccctng

SEQ ID NO: 132855 - DNA, 431 bp, Arabidopsis thaliana columbia
  unsure (1)..(431): unsure at all n locations
gaagactccggcggcgaagaagccgcgcaaaaccgaaaaccaccactcatcctccatactttcagatgataaaagaggctttgatggtcctgaaagagaagaacggatcaagcccttatgctatagctaagaagatagaggagaaacacaagtntttacttccagagagtttccgtaaaacactttctctacagcttaaaaactctgttgctaaaggtaagctcgtgaagatcagagcctcttacaagctctcagataccaccaagatgntaacgggggcagcaggccaagaggattaggaggnttttnnaggcaaggnggttaaagggntcncaaangggggcttagggttttttttgncaaaggcccttagnaggcntttttttttttnaancaacncaggaaatggggggggnttttttagggggggg

SEQ ID NO: 132856 - DNA, 469 bp, Arabidopsis thaliana columbia
  unsure (1)..(469): unsure at all n locations
gacaacactgatgctccaacagaacagctctttgaagaagattccaacagggtttttnatgcatatgcctgtnctcagagtcttggacttgtcgttcacaagtatcactgagattccgttgtctatcaagtatttggtggagttgtatcatctgtctatgtcaggaacaaagataagtgtattgccacaggagcttgggaatctnagaaaactgaagcatctggacctacaaagaactcagtttcttcagacgatcccacgagatgccatatgttggctgagcaagctcgaggttctnaacttgtactacagttacgccggttggganctccaganttttggngaggtttaagcagaaganctggtttcgtggcttggaattcttnggaaacctncccnnantgggnnnaattttctttntttggggccccaaaaactttttggggttgggggtttttaaaaaaaattt

SEQ ID NO: 132857 - DNA, 303 bp, Arabidopsis thaliana columbia
  unsure (1)..(303): unsure at all n locations
caaatttaaaacgttttactttgtnctgcactactcaacctcaatggccgcctcaacaatggctctntcctcccctgccttcgccggtaagnccgtcaagctttcccccgcggcatctnaagtccttggaagcggccgtgtgacaatnaggaagactgttgccaagccaaagggcccatcaggcagcccatggtacggntctnaccgtgtcaagtacttggntccattctntggcgaatnaccgagctaccttaccggagagttccccggagacttacgggatgggncaacgccgggnttttt

SEQ ID NO: 132858 - DNA, 291 bp, Arabidopsis thaliana columbia
  unsure (1)..(291): unsure at all n locations
ttgagtttaagaacaaggagccggagagggcaagantnctgcttgcaaaagcaagggaaagaggagggactgaaagggtctggatgaaatcagccattgttgagagagaacttggcaacgtagaggaggagaggagattncttaatgaaggtttgaagcaattcccaacattnttcaagctttggttaatncttggccagctcgaggaacggttcaagcatctagancaggccaggaaagcttatgacactggtttaaagcactntcccccntgntaccctttnggntttt

SEQ ID NO: 132859 - DNA, 494 bp, Arabidopsis thaliana columbia
  unsure (1)..(494): unsure at all n locations
gtgcttggaacttcaatatcgaagatttgaaagaacaagcatctttnctagatgatgatgacattctaacagagagtagggaagaagaagaatcttttggcgaacagttgcataataaggtgaatgacagagggcaagtatctggtagtcaattgctatctgaaaacatgaatggaaaggaaaaagcttcagatactgaggtggtagaacctatctntgaagagaaatccactctcaattcaaccacttcttctgtggaacaaccggcatcaagttcagaacaagacgttccacaggccaagggtaagccagtgagactccagactcatagtggnccactttcatccggtgtcgtgttaatcaattcagactcagagaaggttcatggttatnaaagtctttgggtgacggcactgaaatcatcagtccggnggnacccnncttttgtgggcctttnattttccaatcgngtttagaaanagnctttnagntnt

SEQ ID NO: 132860 - DNA, 486 bp, Arabidopsis thaliana columbia
  unsure (1)..(486): unsure at all n locations
ggaaagaagcacgtggtgaatggacatgaagagaaaaggatgctaggtttaatataaattggaataagaagcagttagtggttgtaaaggaaggaaggaggcaagcaaccaaatctcagagacaattataacagtatagagaaggaagaaagaaaagaaaaagaaaccgttgttgatttagatacagagaagagaagatcatctaacatgggaagntctcctatctctnatgactctggtctcaagaaaggtccttggactcctgatgangatgagaaacttgtcaactatgttcaaaaacatggtcatagtagctggngagcccttcccaaactcgctggtcttaacaggtgtgggaagagttncaggctaagatggacggactacttttnncccgncattcangngggggggttttttccggcgggggccagnctttttttgatnnncccttcagtctttggnncaagtggtnncgtttgngac

SEQ ID NO: 132861 - DNA, 475 bp, Arabidopsis thaliana columbia
  unsure (1)..(475): unsure at all n locations
taaagatagagaaaggaaatcgaattaaaatcttcgtcagattcgagagacgacgacgacgaacttnttgtnctcgattatcatcagcagctcccttcaaaaaccctaactntctgagctcgatcgacaagtgataatggccaacagtaatttnccgcgaagaatcatcaaggaaactcaacgtctgctcagtgaaccggctcccggtataagtncctctccatctgaggntaatatgcggtatttcaacgttatgattcttggtcctacacaatcaccttatgaaggaggagttttcaagttggagctctttttgcctgaaggataccctatgggcagctcccaaaggtttaggtttctcacaaaggtttnccatcctaccattgncaagctttggaggatcttttttggnattttaaggccaattgggccccgncttnaatnnggcaggnntttagttttaagntttttnggt

SEQ ID NO: 132862 - DNA, 384 bp, Arabidopsis thaliana columbia
  unsure (1)..(384): unsure at all n locations
aaaaaaagaaaacacaaaaacaaagattataatggcttcctcaaccatggctttntcctcccctgcnttcgccggaaaggtgtgaagctgcngcatcaaatgtcctcggaagcggccgtgtgaccatnaggaagactgtngccaagccaaagggtccatcaggcagcccatggtacggttctgaccgagtcaagtacttggntccattctccggcgagcccccgagctaccttancggtgagttccccggtgactacggatgggacaccgctggtctatccgnccgacccagagnccttcngccaggaaccgnncgctagaagttatccacagcagatgggccctgcttcgccncacctaggctgcgntttccnccttcgctat

SEQ ID NO: 132863 - DNA, 419 bp, Arabidopsis thaliana columbia
  unsure (1)..(419): unsure at all n locations
gtcattntnaaggatttnacggatagaaacttgattnancctgttgaaatcaaacgcaaagtcgagccaagtagctataagatggccccctttntgcatgcttcattggttctaatctccaaggagatagggcttttnaatatgtatgatataaaggacaagccagtcatgaagaaatcaggaatgcacaaggtatgccttgtggaagggtcgtcaagccagcaagaagcaaaagctaaaaaantggaagatgtagatcatattgaaactgtgttcaatgtttcggagaggtttccggntttcacattcaagtggttctcggagggtaaaccaacgcggaataagtngcctctnttcaaangttccggtttcaaaagctccaaggtgttnctntcttggggtggntggggnggggacct

SEQ ID NO: 132864 - DNA, 357 bp, Arabidopsis thaliana columbia
  unsure (1)..(357): unsure at all n locations
cttacaacaacaaatcttaaacgttttactttgtgctgcactactcaacctcaatggccgcctcaacaatggctctntcctcccctgccttcgccggtaaggccgtcaagctttcccccgcggcatctgaagtccttggaagcggccgtgtgacaatnaggaagactgttgccaagccaaagggcccatcaggcagcccatggtacggntctnaccgtgtcaagtacttggntccattctntggcgaatnaccgagctaccttaccggagagttccccggagactacggatggnacaccgccggactttcagctgaccccgngacattcgnaaggaaccgtgnanttngaagttatt

SEQ ID NO: 132865 - DNA, 480 bp, Arabidopsis thaliana columbia
  unsure (1)..(480): unsure at all n locations
tagagatggaaccagtctattcttggggaaacacgcatcttgacttcgtcgatccggagatctacgacctaatcgagaaggagaaacatcgtcaatgtcgaggaatcgaactcatagcagccgagaatttcacttccgtggccgtcatggaagctctcggaagttgcttaaccaacaaatactcggaaggtatgcctggtaatcgttactacggaggtaccgagttcatcgatgagatagagagtctctgccgctcacggtctctcgaagccttccattgcaatccagagaaatgggggcgttaacgttcagccttactctgggttccccctgcgnaattttntgaagccctacaaccgncttttnttccagncctcaatgatccgtattcangggggctttgattttncccattcaanntnggncanataangnnatgggttacctttaagctctttgtnggnagaanantttcccggg

SEQ ID NO: 132866 - DNA, 364 bp, Arabidopsis thaliana columbia
  unsure (1)..(364): unsure at all n locations
ggaaatgcagccatcataagtnacaaatcgcttccnctggagcncncagtgaagaagttgatccaccttatacnccataccattgctctggctcttggnatatttggcatctgtgcagcctttaagaaccacaatgaaagccatatccctaatctntacagtntccattcctggattggtattggagtcatttctntttatggcttccaggtaaattccatagcgttttgctccttagacaaacattttcccattatacatgtaatcagtttacataggaatcctttnnataagtgtttcatttggttcagctactaaatcaaccttataaatgtttctnagttctctgtatcaaactgnaagg

SEQ ID NO: 132867 - DNA, 433 bp, Arabidopsis thaliana columbia
  unsure (1)..(433): unsure at all n locations
agagaacacctgantggctaaagaaaattttttcnactatcactaagagcgagaggaatggccctgtnttccgtttttcnatggntcttggtgatgcagtttcatatgttaaaaaactaaatattccaagtggagtggttggggcttgtngacttgatttggcatatgancatttcaaggagaaacctcacttatttnagtttgtcccaaatgagagacaggtgaaggctgccaacaaacttctcaagtcaatgccacagaatggtaaaacacaaaaggtggagggtgtccctgttttcggtgctcaaaacctgggcattgctgttgcaactccagatggaattaagtgggtataccccattacttcttttgntaaaggctgtacttgntaacattctgggangggcctnttggtcancatttnccnnanttt

SEQ ID NO: 132868 - DNA, 480 bp, Arabidopsis thaliana columbia
  unsure (1)..(480): unsure at all n locations
aagcttttaacctcagccgttaaatctttctccgatcatgccgaccagaaacatcgccattggtggagtccaagaagaggtctaccaccccaacgcacttagggcggcgctcgctgagtttatctcgactttaatcttcgtcttcgccggatcaggctccggaattgctttcaacaagatcactgacaatggagccaatcccagcgttcggtctctctgccggagtcagatcattaaacgctctcgtnttcgagatcgtnatgaccttcgggctcgtntacaccgtctacgnnacagccgttgatcccaaagaacggtagtntcggaacaatngnaccaatnggcataggtttaatngttggagctaanaatccctcgctggtggagctttaagcggngttccaatgnacccagccgntgnttttggggccancggngtaagnttgangggggccaaacaattgggttttattggggtgg

SEQ ID NO: 132869 - DNA, 204 bp, Arabidopsis thaliana columbia
  unsure (1)..(204): unsure at all n locations
ggtcgtggggtcataggtgtcttggaagctaattttnttgagcctgctcatgataagcaagggttcgagcgcacaacagttttntctagactcgaggcacgtctacttcatangcanaaggannaattggagatctaaatgtcacaaaantggatatgcgnaaaggcaaggcagaaagtctgctaaggatactgaaaaggacac

SEQ ID NO: 132870 - DNA, 302 bp, Arabidopsis thaliana columbia
  unsure (1)..(302): unsure at all n locations
ctctttcaacattggtagggaagcctatcatcaaggtttccccagagaatggtcttgatgttaagatagctggnnctnccttgactgggaatcatccaacaactttatnaccgtcaactttagtactggattggaattgtnagaaatctcggcgaactccatatgaagtcaatgtcaccatcccagtggatggttatnatcctgtncagtttttccttacaaaactctgcgantacaatcaaggtaacgnaggaggntcancgaaaggatgggctatatttggggtttttttccctgcgtat

SEQ ID NO: 132871 - DNA, 367 bp, Arabidopsis thaliana columbia
  unsure (1)..(367): unsure at all n locations
atttcaaaaacattcctatggctgacatggagattgtncttcctgagaaaagaaaccctggactgactccaanggnttgggtcaaatttctaatatctgcagtagttngtcnggtagcggagcttacttcggttgagatgcctaaatcagatccatgggtaattattgccattctctccacagtgcttggttattgtncgaaaacatacttnacgttccagcagaacatggctacgtatcanaacttgataactcagtcaatgtntgataaacaactatgacagcgngagggggaacgctactacatttgtgtgatgatggtgattcagcaagaagtaaaaangnggtaatnatttncttctacata

SEQ ID NO: 132872 - DNA, 211 bp, Arabidopsis thaliana columbia
  unsure (1)..(211): unsure at all n locations
gttgttaagttacaagtctcttcaaaaacacacacacacgtctctcttcacagccaatcatcgatcacagctcgattttcctttattgttccgttggttttcttgagnatttttctttcttgggatcatcaaactngtcggtaaggnaacttcacggacggatcttcaatgntgagctgttcnaatggnaccntcgngatcggaaccgcat

SEQ ID NO: 132873 - DNA, 386 bp, Arabidopsis thaliana columbia
  unsure (1)..(386): unsure at all n locations
atgttactctttgtaaaattcgctgcatcgntcgtnctagattcatggagcgaagcaacagatcgcatctggtggctaagcttatcttcctggaccaactctgtgagatctcaccatacctccctagaagctccctcgaatcacatgtcccgtacaccatcctcaggtcaatctacacccaatactactccaacacaccttccacaccgctctcaacagcatccccgtaccactccccatccgtatcgctcatccacggttctccctccatgaaaaactncaccactccccagcgtggtagtggtagcggcagtagctntanaggtgnccctngntnagggttatttaaaagggttatnattttnattatangggtnaggnncatt

SEQ ID NO: 132874 - DNA, 367 bp, Arabidopsis thaliana columbia
  unsure (1)..(367): unsure at all n locations
ctggcttacgagaactggcataaagctattnantatgacggtaagctgttganttgcttaccagttgccgagaaggaaataaaaagcttactggaaccaaaaatggtctcagcacaaactgctccgaaccatcaacagctgcataaccagaacantaggcaaactgtgcaaggtcatcagantgcgattacctattcaccggtccctcaaccaatagattatcctcagtttgcgcagacanttgcaaccaattattaccctcattcccttgcaacgtacaaggctncaacaggtcgatgggaagctccaatgnttcagggtcatccaatggggagnttggtgtccccagggnttnaggccaggnntt

SEQ ID NO: 132875 - DNA, 538 bp, Arabidopsis thaliana columbia
  unsure (1)..(538): unsure at all n locations
aagtaaagatgataatactgctggggaatggaaacacacagctggaaattggtctggtgatgctaacgataaaggtatccaaactagcgaggactacagattctacgctatatcagctgaattccctgagtttagcaacaaggataagaccttagtcttccaattctctgtcaagcatgagcagaagcttgactgtggtggtggctacatgaagttgctaagtgatgatgttgaccagacgaaattcggaggagacactccttacagcattatgtttgggccagatatttgtggctacagcactanggaagtacatgctatccttacttacaatgggaccaaccattttgnncaaggaggaggtcccatgtgaggcctggtcagcttnctcacgggtacacctttggncnccgtccantgctnntttnagtatttgnnttgnaaatnttgnnaggaaacttggggcntttactttgacggggtcttttcccnacaaaggggttagggtccnaggctnanagcttgggctggggttttc

SEQ ID NO: 132876 - DNA, 454 bp, Arabidopsis thaliana columbia
  unsure (1)..(454): unsure at all n locations
agaaaagaaaagtagagtactatcttcctcttaaaccaaccattcaaaatgttgcgtactatcttcctcttatctctnctctttgctctatccaatgcctctnttcaagatttcngtgtcgcaaacctgaaacgcgctgaaacccctgcgggttacccttgcattcgtcccattcatgtcaaagctacagactttgtnttctctggcttaggcactcctggaaacactacaaacatcatcaacggcgctgtcacaccngctttcgcagctcagttcccgggtctgaacggtctaggnctctttacagctagacttgacttagntcctaaagggngtgtccccatggaacattaccntgggggccttaagggntttttttnccctaaagggtccatnaaccngggggtttttttcnggaaaaggtttttagggggngnntttaaacggggnaggt

SEQ ID NO: 132877 - DNA, 482 bp, Arabidopsis thaliana columbia
  unsure (1)..(482): unsure at all n locations
aagagacggagagtgagagaagagagaaacatttcgagacaaatggccgccgccgctgctcgtcctctcgtcaccatccaaaccttggatggtgcatgtccaccgatcaatcctccaccgtcgtgtcaatgtcaacatgaagcgtcacgcaatcgtctcagctatcgcngcaactgctgttcctgcgcttgtaatggctcgtggtcacaagatcgagaatgttcctgagatgcctcttgttgtnagtnactccgccgaagctgtggagaagaccttagctgcgatcaaggttttgaaacagatcggtgcttatnattgattcttagaaggcaaagaccagcatttgaatccgtcctgggaaaggnaaaattnaggacccgtcgttaanatttttaggaaaggccttggtngttttttgacttanggtntnagnttgtaagggttngaacntctggnntngctttaattnggggtnattttaa

SEQ ID NO: 132878 - DNA, 483 bp, Arabidopsis thaliana columbia
  unsure (1)..(483): unsure at all n locations
gtcagctaagaaggtgagaacgttgcttctccctncagtgaatgtattcaacgctcaacccttagaaaaaagctcaaggaatgcaaagcatattcggcttgataccgatgatgaaacctttgatgcctatcacaataaatcagcagaagaggaacaatctaaagaagatcgaaaacgcaagaagagctctaagagaaataagtcagaagaagaagaagtcaacaatgaggatcacaaaagcaagaagaagaagtctnagagcaacacaaatgtagatcaagttgaaacaaaaaaggaaggnggncataanggggaggcaatcccaagtaacaattgntgatgatgatgatgcttnggaggaacagnaaagggnttctccaagggggactcgttctttnggttgttctnaacnttttnggagatttttttcccggggaatntcccaagggttttaagcggttttttgngnngggnaagcncgcc

SEQ ID NO: 132879 - DNA, 418 bp, Arabidopsis thaliana columbia
  unsure (1)..(418): unsure at all n locations
ccatttttaatgtccaaggagtggggcttaagaacttcaacaaatccgcgaganagctgcttcagcgccttctcaagatcgataatgacaatnaccctgagactttgaacagaatgttcatcatcaatgctggtcctggattccggctcttgtgggctccaattaaaaagttcctcgatccaaaaacgacatcaaagattcatgttcttgggaacaaataccaacccaaattgctcgaagccatagacgctagcgagttgccatatttntttggcggcctttgtacttgtgcagacaaaggtggctgtttgcnatcttgacaaaggcccatgggatgatcctgggcttnntaaagttagttngnnccntnaaggcanttntggcatttcagngnagctttttgcttttnggagagggc

SEQ ID NO: 132880 - DNA, 229 bp, Arabidopsis thaliana columbia
  unsure (1)..(229): unsure at all n locations
cattacagctcagagctaaagctttcgtacaactnacactcctccaaaanttccaagaaagcatcanatcccattntccgcaatcatctctnaatttnaaaaaaaagcagattaaaacagagattagcgagtnagagagagagacaaagatatagagcttctggtgaagcaacagtgaagaaaaggaaagtgaatcgccatggatgatcgctttcncttaagcngcaga

SEQ ID NO: 132881 - DNA, 356 bp, Arabidopsis thaliana columbia
  unsure (1)..(356): unsure at all n locations
aaaactcaaaacaatcaaagaaaaaccctaaaagaaaatntntatatcgaagatgggagttttnaagagaagagtatcgagcagcagaggacttggtggtgttcttagagagcaaagagctaagctttacatcatcaaacgatgtgttgttatnctcctatgttggcaagattnancttggttgattcaagtnttgatactttaatgcttaaccggntcaaagcgatgattgcaacttgcaagaagntacgaaggaggaaccggcttgggttttccttgcaaggggttntgaagggggaacngggtttngtttttccaaggggttggccatccgtngggggnttggaagtttgccc

SEQ ID NO: 132882 - DNA, 476 bp, Arabidopsis thaliana columbia
  unsure (1)..(476): unsure at all n locations
caagcacgaacatcgtcaagatcatattcaaatctggttggccggagcaaggtaattacaaatctccggtgatcaatcgaatcttaaaaatccacaacagttcaaagattctnaccagattcgaagagtatcgtgagttcgtgaaagctaaagccgctcgtagcaacggcggtggaagacggtgggacgatgaacgttgcgtcgccgacggaaacgaacttttacgattttnctgctcgacgtttatgtgtgatttagggcaaaacggtaaatcaaatctntgtggtcatcagtattgtagtatctgtggtatcatcggatctggattctcgccgaagctcgncgggntcgnnacgttgncgncgggttggagaggacacgtggcggttccnnaggngntttaaagaanatttttgggtttttaaatttaaacggggccntttttgnttttcggntttaacgggnncggttcgggt

SEQ ID NO: 132883 - DNA, 396 bp, Arabidopsis thaliana columbia
  unsure (1)..(396): unsure at all n locations
aactgctgcagtggttatggcaagattaacttccttaaaaatggaaacagaggagggatttaatgcaactnggtggctagatcggactctnattcgtntgtnttcaaaatttggtgaatatagaaaggatgatccaacctcgtttacgctgaaaccatatctnacattgtcccctcaattcatgtttaacctgaggcggtcacagtttgtncaggacctcaggcagctttnctggatgtggcttccattgcagctgacaagattctcctattagatgcatatttangtgttgtngtcttccatggaatgnctatatcgcaatggcggaacatggggttatcatcatcagcctgancatgaggcctttgcncagttattgcaagccccnnaagnggg

SEQ ID NO: 132884 - DNA, 488 bp, Arabidopsis thaliana columbia
  unsure (1)..(488): unsure at all n locations
cccacgcntccgttttacttggcttggccactctattgggcctgtnaagntggtgtcctaactggtatctgggtcatagcccacgaatgcggtcaccacgcattcagcgactaccaatggctggatgacacagttggtcttatcttccattccttcctcctcgtcccttacttctcctggaagtatagtcatcgccgtcaccattccaacactggatccctcgaaaganatgaagtatttgtcccaaagcagaaatcagcaatcaagtggtacgggaaatacctcaacaaccctcttggacggatcatgatgttaaccgtccagtttgtcctcgggtggcccttgtacttaggccttaaangttttgggnagcccgtntgacggggtcgtttncattttttccccaaaggtccatttaaantaccggnacggcccagantacctttnnatggggnttttagcctttttttggntnacgnaaggngnta

SEQ ID NO: 132885 - DNA, 339 bp, Arabidopsis thaliana columbia
  unsure (1)..(339): unsure at all n locations
tttcattgtacattcacgcaaggnactnctcggtgggataagccctgctgataaccggagaatcccacctntaaagtatgagtattactatnccctcgtgcgtnanttcccggacttnagattcactattaatggaggcattacttctntttcaaaggtaaacnctgcactgaaggaaggagctcatggagtcatggtaggacgtgcngcatacaacaacccatggcagacgctaggacaagttgacacnggcagtttatggtgtaccaagcagtggccttacacgcggccaggttctttaggaatatcaagtatatgggggattctttttttaggnnc

SEQ ID NO: 132886 - DNA, 462 bp, Arabidopsis thaliana columbia
  unsure (1)..(462): unsure at all n locations
actcgacatcgatccaggagatgtttaggcgtgtaagcgaacagttcacagcgatgttcagaagaaaagctttcttgcattggtacacaggtgaaggaatggacganatggagttcacagaggcagagagcaacatgaatgatttggtatcanagtatcaacagtaccaagacgcaacggctgatgaggaagaagggtatgagtatgaagaagacgaagtggaagtncaggaggagcaataacaacagcttctctgttttctttgattcctttttttttctcgtttgtgtgagtttagtgtcttgttattcatttncccttctggttttcttgtgttgacatttggctatgtgtgatggtgcgttatgnctaagggcttnggaaanatatgtttataagnnttccgggtganattnggntttaagaattntccnnaagttttttnccccaancgttgantcc

SEQ ID NO: 132887 - DNA, 464 bp, Arabidopsis thaliana columbia
  unsure (1)..(464): unsure at all n locations
ccaaaagaaaaacacacacaagacttggcttacaaaacaaacaagtcttcaagaaacttggaaagctaagagctatggctatggagttagagcttgatgatgatgtcttctttgcagacataagcaaacagatctntcttctcatcatggatgaagatgaacacttaaaccctgtttctntctcttcctcctcctcctctctctcattccagggtttgttcagaggaggttaccaaacggctccatatatgtntcaacaagaacagagcaaagggactggtgtgttcatccctaaatcgtctcagcctagaggaaggcctcatcatcatcagaagcaaggtaggtntagttccttnacggcaagcaccaacactttnttcatcaaaacaggcaagggtttccgcaaattcttgggcctcaggnggtctttccccntncaacattcnncaccggggacntgncta

SEQ ID NO: 132888 - DNA, 458 bp, Arabidopsis thaliana columbia
  unsure (1)..(458): unsure at all n locations
cnaatctnatagttttagggggttttctgattccagggattttagctttcttgttggttaagcttattgagaccattcccggtgtagaattcgattacgcctctncgtatttccaaggtttcgtaaccctagtaacgattatctcgattgcnattgcagttaagctctatgtgaattggattcttgcttgggttgttgttgttgttgaatcagcttggggtataacaccgttgaagagaagtaaacgcttggttaaaggaatgaaatgtgcttctttgtcgattatccttcttcttcgcttcaacggaatcgattctcgtttggattagtaccttagccgcctatgctcagctcaacgntaacgggaattggtggggagtcgtggcanatgcttnctttgtggacagatttgtantcacgtctncgtttntaacnttgttnaacgntgganaacnttt

SEQ ID NO: 132889 - DNA, 452 bp, Arabidopsis thaliana columbia
  unsure (1)..(452): unsure at all n locations
tgtgttttgtagcccatgatcttactggccagaagactgtnatggacaagtttacgcggattgaaggtgattacaaggcaatcatccaaaatccaaacccgctgatcccgccaatatttggtaccgatgagtttggatggtgcacagagtggaatccagcaatgtcaaagttaaccggtttgaagcgagaggaagtgattgacaaaatgctcttaggagaagtatttgggacgcagaagtcatgttgtcgtctaaagaatcaagaagcctttntaaaccttgggattgtcctgaacaatgctgtgaccagtcaagatcccagnggaagtntccgttttgcttttcttttacaagnaggtggcaaagtattttgggnggtgcntnttngtgntgnnanaaaagaaancttggccnagggnangttttttggtccaagggngtttttttttccc

SEQ ID NO: 132890 - DNA, 423 bp, Arabidopsis thaliana columbia
  unsure (1)..(423): unsure at all n locations
gcacacagcgaaggaagctccaagctaaagccgatgcagcgttgaccaatcgcggtggaggaaaggcagggctcgccgatagaaccggtaaggagaaaggtggtcacgcaaagtacgagtntcctcactgcaagatcactgtaccggntctaaagacgatgcagatccatcatgaatcgaagcatccaaagctgacttatgaagagccgaggaatcttcatnaggctttagctgctcctgctgaatcatctaagcctaagcctggaatcanaggaagccttaagaagtgaagtgaagatggtttgggattgtntcgaatttcggtttgaaatttttgggnntttttaaaatgggngtttttaatgttggnntttaaactttccgnttngannattcgccctaatgtcctnccggtattttnaa

SEQ ID NO: 132891 - DNA, 380 bp, Arabidopsis thaliana columbia
  unsure (1)..(380): unsure at all n locations
tagcggaggaggaggaggaagtggtggtgtgagctgtcaagactgtgggaatcaagcgaagaaagattgtnctcacatgaggtgtagaacttnttgtaaaanccgtggcttcgagtgtnctactcacgtnagaagcacgtggggtccctnctgctaaacgccgtgaganacaacagcaattagctacggtccagcctcaaactcagctgcctcgcggtgagagcnttcctaaacgccaccgtgaaaatttaccggcaacttcatcgtctcttgtntgcactcgcataccgtctcattcagggctagaagtttggcaatttcccggcggaggtnaagttcatcggcggtgtttanggtncgtnctttntaaancttcaagt

SEQ ID NO: 132892 - DNA, 456 bp, Arabidopsis thaliana columbia
  unsure (1)..(456): unsure at all n locations
ggattcattgcagtcgttattctactcagcactaagatgctcccgtnagatgctttctgtnaatnatagctctaaggntcttgtaagagccattaacaatagattaagtnctttgtcctttcatatcagagaatactactgggtggacataaaaaagatcaatgagatataccgttacaagacagaagagtattccacggatgcgactaacaagttcaacatctatcctgagcaaattcctccatggctcatggactggatacccgagcaaggtgggtatctccttgggaacctacaacctgcacacatggatttnagattcttcacgcttgggacttttggnctattgtttcgtccttggntacaccaangcaggntgaggttttattganctnanttgangctaatgggcggtttnttngggtttcccttttaaggcttttncccggnttaggg

SEQ ID NO: 132893 - DNA, 479 bp, Arabidopsis thaliana columbia
  unsure (1)..(479): unsure at all n locations
agctaagaaaacgaaactaaattaatttnttaatcacccaaaaagaagttcaaacacaatggctttcgctttnaggttcttcacatgcnttgttttaacggtgtgcatagttgcatcantcgatgctgcaatctcatgtggcacagtggcaggtagcttggctccatgtgcaacctatctatcaaaaggtgggttggtgccaccttcatgttgtgcaggagtcaaaactttgaacagtatggctaaaaccacaccagaccgccaacaagcttgcagatgcatccagtccactgcgangagcatttttggtctcaacccaagtttagcctctggcctttcctggaaagtgcggtgttagcattccatatccaatctccatgggnncttactngaacaacntcaggggaaatggnngtttcgncgccgttttgggntangggttggttcccgnggtctngntaaatcggntttttttttng

SEQ ID NO: 132894 - DNA, 426 bp, Arabidopsis thaliana columbia
  unsure (1)..(426): unsure at all n locations
agaaaaaaaagctagagaagtatctcgntctcttcttctgtnagattctnctttcctttganatttgctagtgtaatcgtaacctccgaagacccaagatggctcgtaatgaagagaaagcacagtcgatgctcaacagattcatcacccagaaagaatctgagaagaagaagccaaaagagcgtcgaccttacctcgcatcagaatgtagagatctagctgaagcagacaaatggagacagcaaattttnagagagatcggtagcaaagtagctgagattcagaacgaaggattaggagagcacagacttcgagatctaaccgntgngnttaacaaggtttctcagggngggtntcatttgggagcgncgaatcnttagctaggtgggccncaatttctcggaacnttcggcggangttnncggt

SEQ ID NO: 132895 - DNA, 463 bp, Arabidopsis thaliana columbia
  unsure (1)..(463): unsure at all n locations
tggtgaggcatcatttgtaagtcttgctgccccattcatcgacgataatgccccacatgatcagaaatcagcgtggcttgctgtattctacatgtgcattccgacaggctatgcttttggctacgtatatggtggagtggtggggagtgtccttccttggcgtgcagcattttggggagaagcaatacttatncttccttttnctgttctaggttttgtnatcaaacccttgcatctgaaaggttttgctccanatgatacaggaaagccccggacagataacttaaacgttttgccagttggttatgggttctcagctgttatgaaagatttgaaatttncttttggtagntaaggtttttgtncaaaccattcttggggatattgcttacaaccttnttttaggnggcnantccatattnggggncnaagntggnataacatttcaagntggaacccgcng

SEQ ID NO: 132896 - DNA, 279 bp, Arabidopsis thaliana columbia
  unsure (1)..(279): unsure at all n locations
agagaagataaagnatggtagcaatgggtctgttgcagataactcttaccatctttacaaggaagatgtggcgttattncatcaaattgggtttaatgcatacagattctcaatctcatggncgnggatctnncctcgngggaatcgnaaaggnggaatcaaccaggctggtattgactattacaacaacttgatcaatgaacttttgtccaaaggaattaagccttttncaaccatgttccattgggncacaccacaagcccttgaagatgcttatgg

SEQ ID NO: 132897 - DNA, 514 bp, Arabidopsis thaliana columbia
  unsure (1)..(514): unsure at all n locations
gggaaactcatccggcttctggaaatttccgttttatccgattcgttctcacgagatgatggctcgttaccacaggagatcgatgatcttgtgcttagttctgctctcattaagcatatcgccgagccaaggcttcctagggacagaggaaaagatcaaatctgctgtcttttactcaccaaaacttgtgatgaatccaggatcagttgcaaatccttacttattcgacatcgatttcccaagaggtcatatcggcctcaaagctttcgatgctgaagtggttgacgaagcgggcaaacccgttccttctacaaggggacctattttcaccattngattgtcggggccatactatgtacgnaaaagnttccaaggtttccccagggggggaattnttcagggaattaangggtttttcccggggnggncncnttaaaggaaaattttttttnccagcagngattttttttttttggaaaaaaaangggggnttnccggggtnttanccncgnna

SEQ ID NO: 132898 - DNA, 426 bp, Arabidopsis thaliana columbia
  unsure (1)..(426): unsure at all n locations
aatacttatcgcaggaggtaagagtaagaagaccaaaaggactgctcctaagtccgatgatgtctacctaaagcttctngtcaagctttaccggtttttggtgaggagatctaacagcaacttcaatgctgtnattctaaagaggcttttnatgagcaaagtcaacaaagctcctctttcactctctaggcttgtagagttcatgactggcaaggatgacaagattgcngtgttggttggaactatcactgatgatttgagagttcatgagnttcctgccatgaaggttactgccttgagggttactnagagggctagggcttagatttgagaaaaccttggtnggngggtgcttaanccctttnncccanntttctttttagggggncccctttgggnccngaccaaagtttttntttaaggggg

SEQ ID NO: 132899 - DNA, 331 bp, Arabidopsis thaliana columbia
  unsure (1)..(331): unsure at all n locations
tcgataactgccatctacacggtggtgacaaaaacaacggaggaggaaaagattcaaganttggaaaggtgaggataaggctctctactctcgaggctgatcgantctacacacattcatatcctcttttggtgctacatcctagtggagtcaagaaaatgggagagattcacttagcggtgaggtttacttgcncttcattgctcaacatgatgtatatgtattcnatgcctctnttacctaagatgcactacctccatcccctcacggttnggccagcnccggtaancttaagggcatcaaggaanctcaannttntttngggccaagg

SEQ ID NO: 132900 - DNA, 386 bp, Arabidopsis thaliana columbia
  unsure (1)..(386): unsure at all n locations
taaaaaacttaagtnatgantactaactctnattccatggcacaggacaatgaagagattacaaaactagaagctccatcaacaaacaagacgaacaccttattgagccaatcacatgcggtagttaatcatggtgataatggtcagatcaacgggaagaagacgaaggaaattcacagagtaaaacgagcttcagacaaaaaggtgtcgtctaaaagagtctcaagaacttggaaaatccctaagtatccaaagangcagcctaaatcagntcaagaacatccgggtttcattctngnttatatgcagcccacttcacacccgnctcatcataattgnacctcttaattgnccatgnaattanctccccttgcntnancaatttt

SEQ ID NO: 132901 - DNA, 490 bp, Arabidopsis thaliana columbia
  unsure (1)..(490): unsure at all n locations
tcgtgaaagtttcgaaggccatttnntttggacgaccatcggcgttaaggagagagcttagatctcgtgccgtcgtgcgacgttgttttccggcttgatcaaaatggggttgtcattcggaaagttgttcagcaggctctttgcgaagaaagagatgcgtattctnatggttggtctcgatgctgctggtaagacgactatcctctacaagctcaaacttggagagatcgtcaccactattccaaccattgggttcaacgttgagactgttgaatacaagaacatcagcttcaccgtgtgggatgttgggggtcaagacaagatccgtccattgtggagacattacttnccagaacacacagggncttatctttgttgtggncagcaatgnttcgtanccgtnttttttaaggccaggggcggngttnacaggnttcttgaatagggttnatttngggggtccagtntcnttntnttnctaacaagaaag

SEQ ID NO: 132902 - DNA, 449 bp, Arabidopsis thaliana columbia
  unsure (1)..(449): unsure at all n locations
tcaatcttggctcacagaagtgctgaacagaggaaagtcatcaggcaagcataccatgaaacctacggggangaccttcctcaagactctnncccaaggagctctctaacgacttcgagagagctntcttgttgtggactcttgancccggtgagcgtgatgctttattggctaatgaagctacaaaaagatggacttcaagcaaccaagtgcttatggaagttgcttgcacaaggacatcaacgcagctgctncacgctaggcaagcttaccatgctcgctacaagaagtctcttgangaggacgttgctcaccacactaccggtgacttcagaaagcttttgggtctctcttgntacctcatccaggtccgaaggagattatgttcatcatcacattngnntttagcacgatgtttngcttcnnccctcccagaatctccaaggnnc

SEQ ID NO: 132903 - DNA, 457 bp, Arabidopsis thaliana columbia
  unsure (1)..(457): unsure at all n locations
caaatggcggcgaaagtaattacatttatggcggttatggtggttactgcctttacggccaacgccaaaatccccggagtttacaccggtggtccttggatcaatgctcacgccaccttctacggtgaagctnacgcttccggcactatgggtggtgcgtgtgggtacgggaatttntatagccaaggttacggagtgaacacggcggctttaagcactgccttattcaacaatggtttgagttgtggctcttgctttnagcttaagtgtatcaatgatccaggatggtgtcttcctggaaacccatcaattntnatnaccgccactaatttntgccctcctaactttaatcaagctagcggcaatggtggttggtgtaacctcctcgtnngcactttntctcgtatgctatgtttnttccatcggtaagataaggntggnatcgcccgnttttntg

SEQ ID NO: 132904 - DNA, 408 bp, Arabidopsis thaliana columbia
  unsure (1)..(408): unsure at all n locations
ggaagatagctttaancattttaaaagtaaggatagtnctcgcaggcttccaagaacgagggactcgactgaagaatgtatgtaactncttaaaagatcagaaatgttaggagatgaaagcaaagacatgtataatgctacaaggggtgaatcgttggtgaagaagtcagggagtggagaggattggtttactgcttcgggtaatcgtcctgggaaaccggaaatcaactacgggngaatgtcatttnatgacagcattttnacatctcaaggttctgataagagcaagaaacaaganttcnttgatgattctttcatggtccattcatcatcgnttgctgctgntgatctttatnactctcggtgggggccanccatggctgctgntattnttttgcccctncngtg

SEQ ID NO: 132905 - DNA, 511 bp, Arabidopsis thaliana columbia
  unsure (1)..(511): unsure at all n locations
anctcccaaatgttgtagctgtgaaagattagagcattgcggaacacagtatgtaatgcttgcagatttncgatggctatgtcgagaatgtatggacagcgcgattatggattctaatgaatgccaacctttgcactttgaaatccgtgaattctttgagggcttacacatgaagattgaggaagaatttcctgtttatttggtggagaaaaatgctctgaataaagctgagaaggaagagaagattgacaaacagggggatcagtgtctgatggtagtcagaggtatttccctatctgaagagcagattgtcacaagtgtctcacaaggagtaaggaggatgttgaataagcaggtacctagatacggttccagaggctcaaaggggttttncgcaagtccgngggtnactgcaattntnaancttaatatgggnctttcctaggttcctcncagggttntntctttggcccntnagnntgntccattctttntnttaggctaattgntg

SEQ ID NO: 132906 - DNA, 581 bp, Arabidopsis thaliana columbia
  unsure (1)..(581): unsure at all n locations
agagctctcaaacaaaacagccttttacataagaacaaacacccccaaaaactgcaaaaaaaagagagagatcattaatccatcttcaagatgtctcttcctgaaactaaatctgatgatatccttcttgatgcttgggacttccaaggccgtcccgccgatcgctcaaaaaccggcggctgggccagcgccgccatgattctttgtattgaggccgtggagaggctgacgacgttaggtatcggagttaatctggtgacgtatttgacgggaactatgcatttaggcaatgcaactgcggctaacaccgttaccaatttcntcggaacttctttcaatgctcttgtctcctcggtgggtttcattggccgnttacctttttttngggnaggttncctaaacggttttgctaatatttcnggcggaattccaagcccacggggtttttcaaatcttnaaccttttttaacaattaatcccgggggntttggnccnccaaggtggaattcnacaaaaggnggttttanttgggacaangaaagtgggntnnaantggggggcctttnntntggcntntacct

SEQ ID NO: 132907 - DNA, 490 bp, Arabidopsis thaliana columbia
  unsure (1)..(490): unsure at all n locations
agcaagctcgatggacagcctgaactcttcattagattggttcctgacaaggctaataagacgctctcaattattgacagtggtattggcatgaccaaagcagatttggtgaacaacttgggaaccattgcnaggtctggaacaaaagagtttatggaggcgcttcaagctggagctgatgtaagcatgataggacaatttggtgtgggtttctactctncttatcttgttgcagagaaggttgttgtcactacaaagcacaatgatgatgaacaatacgtttggnagtctcaagctggtggttccttcactgtcactagggatgtggatggggaccacncccgtagnggnnctaagatcanccncttccttaaggacggtcagcttgttacttttgtnggggnggggctcaaanactttnntgagnaggacctccctgtcatnaattaccccctctacctttttggccgnganacacccccgngggggt

SEQ ID NO: 132908 - DNA, 378 bp, Arabidopsis thaliana columbia
  unsure (1)..(378): unsure at all n locations
caaaacaatggcgccgagagcagagaagaagcccgcggagaagaaaccagccgccgagaaaccagtagaggagaaatcaaaagccgagaaagctccggcggagaagaaaccaaaagccggcaagaaactcccgaagaagccggggccggcggcgataagaagangaagatgaagangaagagtgtggaaacttacaagatctacatcttcaaggttctgaaacaagttcatccagatattggtatttnaagcaaggctatgggtattatgaacagtttcatcagcggccatcttncgtgaattttggcatcgggaattctttcaaaagctngncntagggttttaccaaggnngnccgnncggtttnctttntcgggg

SEQ ID NO: 132909 - DNA, 414 bp, Arabidopsis thaliana columbia
  unsure (1)..(414): unsure at all n locations
ggctgttgtagagagcatggaaaagcaaccaaagtcaccacaatcagatagtaggtctggagaaatcatgtgtgcagttgaaaccaaaccatcggagtcttcagttgacgaaagtnctattgatgaaacaaacgttgtaacaacatccgatgttttacctgtngtagctcgatcactggaagantttccgcaaccttctgaaccaaaagaggggatttcaatggaagtaatctctgaaagcntgatgattcccacagaagctactggtcctggtaatgtaacagtaattgatgaagttntgaccgnggaaacgaaagcttgngaccaccgngaangangatggaaggngaagnggnggtggaaagtaaaccaaaggggttaccgaattctgatgttttntttntcggaactngg

SEQ ID NO: 132910 - DNA, 518 bp, Arabidopsis thaliana columbia
  unsure (1)..(518): unsure at all n locations
cacctctttataggtttcagaaacctggaggaagccctataactcggatttcccaagtcgtggttgcttcgttccggaaatcgtctgtcaaagtccctgaagacgccacacttctgtatgaaactcaagacaagaactctgctattgctggaagtagaaaaatcgagcataccgatgattgccagtatcttgacaaagccgctgttatctcagaagaagaatcgaaatccggagattattccaactcgtggggactatgcacggttacgcaagtcgaagaactcaagattctgatccgaaatgttcccaatnctgggcttctggtatcattttctcagctgnatacgnacaaaatgtccacaatgtttttttnaancaaggccgngccatnaactgcaaaattgggtcattccagtttcttcttnagnactcgggcaattggcncagnaagggtancatntgggtgcgttttnggccggtnatcgtccttngaagaatttnnaggggnggnaagggtt

SEQ ID NO: 132911 - DNA, 529 bp, Arabidopsis thaliana columbia
  unsure (1)..(529): unsure at all n locations
tataatctagaaaaaaaaagagaagagagaagagagaaatgtcgagagctttgtnagtcgtttgtttcttgctcgccatatccttcgtctgtncacgtnctcgtnaggtgccgggagagtctgatgagggaaagacgacgggacatgacgatacaacaacaatgcccatgcatgcaaaagcagctgatcagttaccaccaaagagcgtcggcgacaaaaaatgcatcggaggagttgctggagtcggtggattcgccggagttggtggtgttgccggcgtgggaggtctagggatgccactcatcggtggtcttngcgggatcggtaagtatggtggcataggccggtgcaacctggaatcggttggttttcatagttttaggcggttgttttggcggtnttagggttggancctggtttnaggcgggtttaaggttggtntttgccggnttgttttttgtaaacccccgtgggtatttccggtttaangnggntnagnnnncccgaanggttggtttttggttgannt

SEQ ID NO: 132912 - DNA, 362 bp, Arabidopsis thaliana columbia
  unsure (1)..(362): unsure at all n locations
ggaatccgaagttgcagctttggatgctaaaggtaaaatatttnancagtcaattggttattgctcgaaaggaatacagcaattgtttgaagcaactncttacaagancgttttccacgatctgagcaatgtcctctgggatggtctgtacctcggggaagtnccttcctcaaggattganccgtttntncaagagctcgaacggtgccttgagattatctcctcatcggttcatgacagagtccgaaccanagtcatttcggacatcatgagagcttctttcgacgggttcttattggtcctccttgcaggtggnccatcgngtggcttcacaattnaaggctctnctgcngtagaagagg

SEQ ID NO: 132913 - DNA, 516 bp, Arabidopsis thaliana columbia
  unsure (1)..(516): unsure at all n locations
catgttttcaatcgtcgagcacgtcgttctattcaagctcaacgacgacgacgttnactccggcaagatcaactccatggtcaacggaatcaacgaactagtcaatctcgaccaagtgcttcacctctactgcggttcaatccaccgccttatcacgaccaccgcctccnacttcactcacgtccttcatagccgttacagatccaaagaagatctcaacgcttacgctatacatcccgatcacgttcgtnttgtcaaggaatcagaatcgattcgcgaagatatcatggccgttnattggntcgccgaacaagctccggaagccctagcaccgcctcttggttcaattggtaaaatcacggnttttaaattgaaaggnatntcatggaagaaggcgaattggggnttttggagtnatnaaggggaattttaaggatttntccaatttcttttggggaaacttttttccgggggggtttaanttcnttnttggtcgnttcgattttggggtttggg

SEQ ID NO: 132914 - DNA, 485 bp, Arabidopsis thaliana columbia
  unsure (1)..(485): unsure at all n locations
caacactacaaagaagaaacacactatctctctctctctctcaatacatctttcctcacttctnatcagtgtgatcacgtagagtgccttgaaggagaagaaagaaacaaaaagaaataaaaatgggataccttctagaagaaaccttaagctctaactctaaaaccccaattgtnatcgatgatgataacgagttgggtttgatggccgtgagactagccaatgctgctgcctttccgatggttctcaaagccgccctcgagctcggtgtctttnacactctctatgctgaagcctctcgcagcgactcgttcctttcaccatctgaaatagnggggtaagntnnccaacttcaacctggtaaccctgngggtccggtttttttggcccgantttttggnnaccggaaaggatttnttggggnaagttnggnaaggtnttaaaaaggaaagggttaaggggtttnaaaggggaggnccanttta

SEQ ID NO: 132915 - DNA, 513 bp, Arabidopsis thaliana columbia
  unsure (1)..(513): unsure at all n locations
aaaaaaaaaatctctctcaatctctctcagatctgaatccatccatcaccgatctctaatggcggcaccaccagcatcatcctcggcgagggaagagttcgtgtacctcgcaaagctcgcagaganagcggaacgttacgaagaaatggttgaattcatggaaaaagtcgctgaagccgttgacaaagacgaactcaccgtcgaagaacgtaatctcctctccgtcgcttacaaaaacgtaatcggcgctcgtngtgcttcctggagaatcatctcttccattgaacaaaaagaagagagtcgtggtaacgatgaccatgtgaccacgatccgtgattacagaagcaagatcgnatctnagttatcgaaaatctgtgacggtattcttaagcttcttgatactagacttgttcctgcttctgctaattggngttctaagggttttancttaanatgagggggntttnataggntttggctngttaagcttgnaaggngaaantctctncattc

SEQ ID NO: 132916 - DNA, 516 bp, Arabidopsis thaliana columbia
  unsure (1)..(516): unsure at all n locations
actctncttcatcttcttcctctgacgatcattttcagaagaatctgattccgatcaaaattgcagaagaagatgtctcgccaatcgttttctctactgaagaatcttngtagcatcgcttccggttccaaaatccagacccgatccgtgacttacatgcccagacccggtgacggaaaaccaagaccagtgacgttaatccccggagacggagttggtccgttggtaacaaacgcggttcaacaagtgatggaagcgatgcacgntccggtttacttcgaaccgttcgaagttcatggagatatgaagagtttacctgaaggattgttggaaatcgattaagangacaaagtttgtttgaaaggtggtcttaagactcccgtcggtggtggtgtgagctctctcaatgttnatctgaggaaggagcttgatcnctttgcttccttgggcaactgttcaaatttcctgggtnagttctggcaatngatttnntatttttngntaagggncactntc

SEQ ID NO: 132917 - DNA, 437 bp, Arabidopsis thaliana columbia
  unsure (1)..(437): unsure at all n locations
agaacttttncctctcaaacgtataattttncttcaggttttgatggagaggacatagcaagctaagaaagagaaaagagagagagagtgttacctgaaggaagagacttgagctcatctccggtgacacgtctcggtggataatgttgccggtaaaacacctgaaagatcccattcatacatccaatctgtttattcagatttggattctcatccgacaagttatacaaaagcttcgccgacatcttcttcttctacttctttgtcttcttaactctggcctcagaagaggaagtagtagaagaagangaagtngngacaggnggacaaagaaganccccngcattaagncaaaggtaaagctacttntgnanggttatgtgcagncanggaattagggtttcnctgtgtatgtcctcctttggagggttccttna

SEQ ID NO: 132918 - DNA, 477 bp, Arabidopsis thaliana columbia
  unsure (1)..(477): unsure at all n locations
gtgcttcgatgcatgtnaatttgacactaagggaagccatagcatctgaactgttggatgtgnaaggttgtnctctcgaaaacaaagcaagggccttatctgcttaggaaacttgatatcgatggttatgccagcagacctgatcagtggaaatcaagacaagaagctaagcaatcaacatataacgnatttngctctgcatttgggtccaacaaatcaaattttccaaagaacacctttgtctctgacgcatctnaggatgcagctcaggaaataggagtaaagnatacaaggaaagngnttgaccatcatcctacttccgggtttaagcgtcaccgnggaaaacatgcaaagggtaagggtgaacccttttgcaggtgaaaaaagtccgaaccggggnggttaaacttgtgggnaccagtttcccaaanttgttggagcaaaancctttcttttttggggggtgcttggaannga

SEQ ID NO: 132919 - DNA, 465 bp, Arabidopsis thaliana columbia
  unsure (1)..(465): unsure at all n locations
tgcagctctcggntctctccatcagactttagggtcagccattaattcacagagtgaggttcactcgctttctggaaactggtctgcctctggtaattcatgtgtgccacggtggagattatccaacaggaacagcaactacaggctcgtgttacgtgctaaggccgctaaatcttcgacaacaaccataagtgatggttcatctgatgctagtgtgtcagacgggaagaaaacagttcgacggataactttcccgaaagaagtggaggcactggttcacgagatgtgtgatgnaactnaggttgctgtgctgcaaacttaaggttggagatttcgagatgaancctaaaaacggaagtttggngcagccacaaaccccatttcccgtggcgggntatattttcaactntangggctccctantncttttaaccntttgnnnaaannttntttttttngggtcct

SEQ ID NO: 132920 - DNA, 413 bp, Arabidopsis thaliana columbia
  unsure (1)..(413): unsure at all n locations
aaatttttgaatatctggaagcttaccaaaaggaaaataaacttaatcacatgcccattattctntgcgggtgactggaatggaagcaaacgcgggcatgtctacaaatttttnagatctcaagggtttattttcatcatacgatgatgctcatcagtatacccgncagtgatgctcataggtggggttagccacagaaanccacaggggaaatattttccggngttgatttcatatgggctctgtaacccctaggtgattcaaggaaanccattttgnaccaagttgggttggaggtgntttcaagcattttccaaggttcaccttcanaaaagtttccntagccggggccgntgnctttanctttttttttggggcaaaaaatcnccgggggtttcnttancctcctttgg

SEQ ID NO: 132921 - DNA, 393 bp, Arabidopsis thaliana columbia
  unsure (1)..(393): unsure at all n locations
gttgtntcttgaggntcctcaaggatgtagtcactttacactcacacgtgttaattggaccggtagtgttggtggtcatcctcacacgtacgatgcctctnagatctcgccgcagctgattcactctctgcggagatctaattcgagtttagactatttcttcgccagaaaattcacgccggagtcattgcaaccncttatggagattgcagatgctgtgatctttagggattgaattcggtgaaagtaaatnaggtttcanatatcatcataaggaaggtttaggaagaagcttcttgttngcgctcgaaggaagagtggctaaataaaagntggacctctnnggggggccgtttaaaaatcccccggnnttttaaaangcnttttggggnc

SEQ ID NO: 132922 - DNA, 403 bp, Arabidopsis thaliana columbia
  unsure (1)..(403): unsure at all n locations
atcganttagggtttctntagaatccagtttttaataggaacaatgtcaattncggtggttgatagcagtctctgccatccnactgcntcgttnccgtnatccatggttcattctaatcgattctcgaagagaatatcagggaacgggaattgggttcgcnaaagnagaagactttatgtnaaatcgagtaactcagaaggtaaaaaggaggaagcagcacagaaatcgagcagtaataatacatctngcttctngtctttcctctgtccattgcttaaagctttctctggaggtgatccttctcaacagcggnatcatgctctcgagggttgcaacttcttcattggcatcttttgcaagncttccatgggggttctcgggtntcaactgggggtntagtta

SEQ ID NO: 132923 - DNA, 533 bp, Arabidopsis thaliana columbia
  unsure (1)..(533): unsure at all n locations
tntgtntnttgtaaagcagtggacagagacgacgatgagtacgatgaagccaagccggagcgacgaaatatccgacccggaacagcagatcaagaacgcgaaccagatcagagctgatttcgattccttggctcccaaacgacccactaaacccactcgaagcgaaccgggacttcctggttctttctctgcttccgacaaaatcaccgaccatcctgaagctgacaaattccaatctntccagtcacaaactcatggtaaagttctaggtgagggagattcatctgcagttcaagatgagttcctggaaacagagtattactcaaatntcaccgncatttgataagcaacatcacacggccggaagtgggtttataaatttggtgaagggaggcaaacggtnaagnattccgaggccgtaaccgccgcggnaattcggngncggnggggaaaaaangggtttnaggagnaattncggggcggccggnttgtttcttcggcgggggnggtttnattnggattttgntaacgga

SEQ ID NO: 132924 - DNA, 512 bp, Arabidopsis thaliana columbia
  unsure (1)..(512): unsure at all n locations
agtggaggacttaggacaaaacaagctggaagaggatcttgccgnggaagttagtctttgtncaaatccatttncctcttaaagaattttgaaattncactgttgcaagtnaaaaagtttgtccttgttggagcttaaagaagagagaagagaaagagaaaagctatgggagttttactaagagaagctttaaggtctatgtgtgttaataatcaatggtcttatgctgttttctggaaaattggctgtcaaaattctagcttgttgatttgggaggaatgttacaatgaaaccgaatcgagctcgaatcctagaagactttntggccttggtgttgatacacaaggggatggaaagtncngttgcttacaaaccggatgatgttgacaatcgatcattttgggtaggtgaaggnctagtttggccgagctgcatttacttggcatcatcaatnggttntgnctacagttttaacccgggtgtnatccccccggggtataatgggtntttgc

SEQ ID NO: 132925 - DNA, 379 bp, Arabidopsis thaliana columbia
  unsure (1)..(379): unsure at all n locations
aaaggctgtttttatcggacataagcaatccaagctcgcccatgtnggtnatggatganctctctnactccttcacaangcagaagcttcgtttgtncacgttgtctgagctgagagtnattacgcataattcntctagaagtaacatgttgggggaaggagggtttgggccggtttacaaagggtttattgatgataaggttaaaccgggtatcgaagcccaaccggttgctgtaaaggctcttnatcttnatggccatcaaggccatagagaatggctggtaacattcntttctcttnatgtatgtttttttctacattcaaaggctttcctattcacaaagggnccaattttaattaccggnggccgnctcggtta

SEQ ID NO: 132926 - DNA, 376 bp, Arabidopsis thaliana columbia
  unsure (1)..(376): unsure at all n locations
gtaaaggaaaccatgcagatccactgcttctccctgctcctgctgcttctnttctgagagatgtgagaagaacatcagttgtttgggaccaagaagcaggtagatntatatcanttcctgcaacaacatctgagccaagaaccagattctcctcacagaaccagccaattcctagctcacacatgggtaacantcagaatccaagncccgttggtcatccgcctcaagattcttcatctggaagggttccacctnctacgcagcagcagcanggtgagngnctgaatgtatacaaggtgaatcaattttcttttggagggccccctnagtaaaatatccccaaattagnggnttgggcntnaaggacaacgnttgg

SEQ ID NO: 132927 - DNA, 448 bp, Arabidopsis thaliana columbia
  unsure (1)..(448): unsure at all n locations
ctgttttgtaagaaacctgagtggctcaaaacctgggggaagattganctaaaggatgcttatagaaaaagtaaagaggatattaagaatgagaaagcttgggtaattgatagtgaaaganctagacttggtaatgaatccaactcacagtctgcaaagtatgtnctatctacaagagaagattataaagcgccattagtagcagactcttttnttaataggacttggaggttgatagaccatggtctatctctaccggccattctaccaaggttccaatttataagggctacttgccaccagatttntctggtgtatattcaaaatnntgttattggngttcaaaaagcctgnccnctctcatnatggtttgtttgaggtccactgntacaagcatttgggcccgttaatgctgctcgggntcttgnatcaaaantccgggnttggg

SEQ ID NO: 132928 - DNA, 528 bp, Arabidopsis thaliana columbia
  unsure (1)..(528): unsure at all n locations
aaaactgttttagccgtctgcttaacggtatctgtgtttgctgcgtttgtcgcttcgtggatcggtttcgtcttctatttgaggcataagaaggttaaagaggttcttgaagaatgggagattcaatatggacctcataggtttncttataaggagcttttcaatgccacaaagggtttcaaggagaaacaacttcttggtaaaggaggctttggtcaagtctataaaggaacacttccgggttctgatgcagagatcgctgtgaagggaccttctcatgattcaagacaagggatgagcgagtttctagccgagatatcgaccattggngtctccagacatccaaatttagtcaggcttttaggtactgtaggcataaagggnatctcttacttggtgtatggctntatgncnnattggaagcnttgacaagtntctaaacccgtngcgnggattaagaccggttnacttggaacatntaaaggagggggccntncgggtnttncgnccagggttntagncnggagg

SEQ ID NO: 132929 - DNA, 518 bp, Arabidopsis thaliana columbia
  unsure (1)..(518): unsure at all n locations
caaacggcagggcaacagccaccgtnatggtcgagacaggcaccgggatatcaacagcagcaatcttggtctcagcaatcggggtggtcaagtccttcaggtcatcagcaatcatggactaatcagacagctggccagcagcaaccttgggctaatcagacgcctggtcagcagcaacagtgggctaatcaaacgcctggtcagcagcaacaattggctaatcagatgcctggccagcagcaacagtgggctaatcaaacgnctggncagcagcaacaatgggctaatcagaataatggtcaccagcaaccgtgggctaatcagancactggtcatcagcaatcatgggctaatcagactccttgccagcagcaaccatgggntaatcagncaaccggncagcaacaagggtgggganttaggcaacccggcagaacagattgggttaccaggcagttgcanagtnaggtggcaggcaacnagtggntnttaggagttgcctagagtnngngttattc

SEQ ID NO: 132930 - DNA, 435 bp, Arabidopsis thaliana columbia
  unsure (1)..(435): unsure at all n locations
catattcgtagacgcatctggnctgancaaaatctgagantnttcatcgatcgcgaaataaacacactggtcaacaaaatctgcaataatnaggaatggaatcagagttaatatttcatgaaggtggatgtcattgtgggaaaatcaaatggagagttaaagcagcaagaagtgtgattgcttggngctgcaactgctcagattgttcaatgagaggcaatgttcactttattgtnccttcaagcaactttgagcttcttgatgactcaaaggacttcattactaccttncactttttgggtctcacacgggccaaacatacccttctgcaaggtttttttggggatccacatcggtttnattatccccggagggttttancccctgttnggtggccgntngccaccagntnaagnaggggtcaaagntcggggg

SEQ ID NO: 132931 - DNA, 355 bp, Arabidopsis thaliana columbia
  unsure (1)..(355): unsure at all n locations
accagcagggtattgggtaaataagattaggacatcattcaaaggaggntcatcgtcgagcaaatcattagatgaaggaagtacttcgggttcgagaaagaacggttcgaagcatagtaagantctnaaagcagaggatgctaataagantggtgaaggaggaggagttcaagctgagagtgggaggaaagtaatggttgttgtggacacaacttcacaaactaagantgcncttcaatgggctttaacacattgttttcaagatgaaggtaatatcactnttctccattgtcacaagaacaccccgtnggncaggctnttgnttgggccaccanagggagggnaactcaanggc

SEQ ID NO: 132932 - DNA, 451 bp, Arabidopsis thaliana columbia
  unsure (1)..(451): unsure at all n locations
gacggaggaagattatnaagggaatcgtcgaagctcttcggttttaacattgccggtgttctccagctgttgttgccggtaatttatcgccggagaatattgtcatcgacgtcaccgatgaaccaaggctttgtntcggtcttccgggcttactttgcatggatgctgcttacatggccccagaaacgagagagcacaaggagatgacaagtagaagtgacatctatggttttggaatcctcctccttcatctcctcaccggtaaatgttcctccagtaatgaggncatcgaatctggagttaacggaagtttggtcaagtgggctagatattcgtattcgaattgccatnatcgacacgggggatcggctcatcccnttgnnacatcagngncatcagncgcgnggtttttccatgtatnnaacctggtttnaatttncgncattnancc

SEQ ID NO: 132933 - DNA, 383 bp, Arabidopsis thaliana columbia
  unsure (1)..(383): unsure at all n locations
agcaaaaggagttacaacaagtgagaaacaagatcattaactcttagcctcacagaaaattaaacaaggctaaggataatgatccacatctcattatgactaaaacataaagattgattcaaagcagaatctcaaggcagtttcttggagagagaccagacacgtgttgctaattagtgtttcanttgtgaagaggatttggncctgtgtgaactaatctnttgtngtctttataaacttcatctctgttttttncttctcgacgttgacccgtgaacggcactntagctttgggagcttgtaacggcggccatttngtggaaatgaccagccttttttnggtaggtgnaagggtagtnttcaggggcanaaagnnnctnttg

SEQ ID NO: 132934 - DNA, 366 bp, Arabidopsis thaliana columbia
  unsure (1)..(366): unsure at all n locations
aaatttcttttcgaaaaantcgatatccatggnttctngcagtctcgtatcacagtgaatccaggagcttagattatnatagatcataggcattgattctcctntcctaagaatctcgttgcacatactcaaatatggaattnacggaggcttacaagcaaacaggtccttgtggtttctccccaaactctcgtnacgtcgccgtcgccaatnattatngtctcgtgatccgtgatacgttttcgtttcaggttgtgcaattgttttnttgctttagataaaanaagctacatagaatgggctcttgattccaaagtacattctttntggtctttntaaaaaacccgctgattcaaggcttgngtc

SEQ ID NO: 132935 - DNA, 372 bp, Arabidopsis thaliana columbia
  unsure (1)..(372): unsure at all n locations
acttcgtaaggttcagagaaaggaacctgatagggctctataccaggtactcgaggaaaagggagagagtnttgctcctggaacattgctgggaacctcacacacatacgttattaagactggtactcaagaaaagacgggagccaaaagggttgatttnctgagagggcagaagacagacagagtngatgtcagcttacagccagangagctngatgctatggaaaatnttttacctgccaagtatgaggaggcaagagaagaggagaaatttcgcaataagccagtggacttnagtgacatggtcgtncgngnattttcagcaggatagttnggtngtggnaatncattgccaagggcaggggaggagga

SEQ ID NO: 132936 - DNA, 434 bp, Arabidopsis thaliana columbia
  unsure (1)..(434): unsure at all n locations
ctggcacganagagttcatgattagcttaagctccttcatcttcttctccaattcccgggtttttcnttcttcctccgataaccggaaaattcacctctatcgaatttcccaagcatcttgatccaccaagttcatcttaaaattnntcctcttttnctcaattgaagaaggtgaagcagccaacaagttacngcaactntttccacgattttgnctttttnnaagattcccgccgtcgggagttttctcggtgagatcatttcgctccgacggaaaattcaagttgcatatctnatcggagattgaaaagtgttggttcacgcagtatcgattcgtttgtttttaatgccagatctgntatatnacttcaccgaggnttcaggaactctttncttagggtgaatttagcttgagntttagcntccgaatttaa

SEQ ID NO: 132937 - DNA, 412 bp, Arabidopsis thaliana columbia
  unsure (1)..(412): unsure at all n locations
aatgtccgtntcgtctatttnctctctctcgacgnctgtaaatnaactccggcgattgatcacnccgtcttctttgtaacacagccggagaaaaatcgaaagtttcgtttttttcttctccttcgtagctaattcgccgtcgattttataattcggcagccatgagctcggttttncagggttttacgaagtcacttgctatgacctttgtatcggagattggtgacangacgtttttcgctgcagcaattttggctatgcggttatcctaggagacttgtgttggctgggttgtttatcgggntctnaattgtaatnnactaaccccctctgctactcttgggatggggctgctcccnaaatcttaatcttttcgcaaaatggggctcattnacataancaaacatnggng

SEQ ID NO: 132938 - DNA, 310 bp, Arabidopsis thaliana columbia
  unsure (1)..(310): unsure at all n locations
aaagaaacagagaggaagatgaaggaggagatgaaaagagagaagagagctaaagatgtncttnaagaggtttgtaatganctaactaaaggaatcggagatgataagaaggagatggagaaagagagagagatgatgcatatagctgatgttttnagggaagagagagttcaaatnaagcttacggaggcgaagtttganttcgnggataaanacnccgccgtggagcgcctnangaaggagctccggcgggttttggatggtgaagaaggaaaanggtcgtcggagattcgtaggattttggacggtg

SEQ ID NO: 132939 - DNA, 457 bp, Arabidopsis thaliana columbia
  unsure (1)..(457): unsure at all n locations
gagcttaacggagaatccctgaatccgattactgcgattnacattttcccgatgacttccactctaatctcctcaaacctctcttcctctttcttcccaacccaaaatatccaccgaattcgaatcccgacgacttcaattcccggaagtttcaacattcgcgcacgccgttcaaaaatcgtcgccaaatctctcgatcttnctcttcttccttttagcatgagcgaggttatcaccatgaatcctcaccttaaccttccttagctgatttttggatttgagaaatntnttacacaggttctttgtaccaacggagagtaaaactttgcatttatatgnagctaggtacttagnttttactcggagggncctatggaaggngaaagnaggantatngtttgtncaanttcaattctagatccctattttcgnttaagggggnnttaaaaaaanggnt

SEQ ID NO: 132940 - DNA, 406 bp, Arabidopsis thaliana columbia
  unsure (1)..(406): unsure at all n locations
aacaaaaactccaaagactccatcgaacaaaaccttcagagagaatcaaacagcttaagggcagtttcttagttaaaagtaaccaagtttacatggttgagctagacattcagataccatcagcatacgatccatttgcagaagctaaagattcagatgcaccaggagctaaagagaacattcacattcgaatccagcagaggaatgggaaaaagagcttgacgnctgttcaagggcttaaggaagagtaccagctacgngagggattctcaagggattttgaaggnaagnttttctncttgcaacgggtaacgnttgttgcaaggncaaagganctnaggcaaaggttccatnccagctttcaaaggtgntccaaagggagggaangtgtnnncagtttctttgg

SEQ ID NO: 132941 - DNA, 208 bp, Arabidopsis thaliana columbia
  unsure (1)..(208): unsure at all n locations
aacaaagccatcaagagaagaaagccttttcttggattcacatatatataagaatatttntccaaatcaaacatgtctcctagcanccggtcgagacaagcaagctcatcatcaagaattagcgatgaccagatcactgatctcatctcaaagctccganagtccattccggngattcgncagaaccgncgtcccancanggtatcag

SEQ ID NO: 132942 - DNA, 442 bp, Arabidopsis thaliana columbia
  unsure (1)..(442): unsure at all n locations
aaaaggcggaacaacaaaagaaaccctagcttccctttgtacctctctctgttccaaaccatgtcgaagagaaagaccaaagagccaaaggttgagaatgtnactcttggaccagctgttcgtgaaggagagcaagtntttggagttgttcacgtctttncttcattcaacgacactttcattcacgtgactgatttgtntggacgggaaacacttgttcgcatcactggtggaatgaaggtgaaagccgacagagatgagtcctcaccttatgctgctatgcttgcgggcacaagatgttgctcagcgntgcaaggaacttggaatnactgccatacatgtgaaactcccgtgcccattngtgggnacaaagaccaaggcccccctnngnaccctggntgcttaagnntttctnttaagnggcccctttncccgttctttg

SEQ ID NO: 132943 - DNA, 358 bp, Arabidopsis thaliana columbia
  unsure (1)..(358): unsure at all n locations
gttgcttcgattcgtgctgttgataccaatnatttcntttgtaaagagtgggtggaggaaccgaccttgcttgtaactagattcgagtacgcaaatctnttccatactgtnacagattggtatagtgcctatntttcgtctagagtcaccggtttgcctaatcgacctcacgttgttttcgttgacggacactgcacgacgcagctagaagaaacatggacagcttttgttttccggaatcanatacgcaaagaacttcaccaaaccggttctgtttccgccacgngattcttttcaccattgggntacgaaancgntctcttttaaaggnttnccnggtgnaattagactacaaggg

SEQ ID NO: 132944 - DNA, 476 bp, Arabidopsis thaliana columbia
  unsure (1)..(476): unsure at all n locations
ggcttatccttgtctgtcaaattcctncaaaaaccctcgcctctctcagacagtaagaggaacatatttccttaatgtattgttccgtataatcttacaagacatcctggttggtgttgcagagaagagtgtttcaaagtttcttcctttttcgttttcctggtctgaatgagctcccaatgccttctttagatattgctactatccaaccttcatttcaagctcatcttgttccattgggggctcagagtattatccatgctaaaagtctacctaaatccatggagacagtcttgtttctccaagaatttgaaatttttacacgggtcatagtcaatgtcccgcagnnggaaaaggtcttatttactgcagtggnccactccttgaaacccaagtntttcgggtncaaaaagnaaancggnnggggnctntttcttttngtctnntngcttntttcngaaatccntcaaaatgga

SEQ ID NO: 132945 - DNA, 427 bp, Arabidopsis thaliana columbia
  unsure (1)..(427): unsure at all n locations
ctctcttatctctctcaaatcttctagagagagaagggcttagtttttntnccgccatccggtgaatccggcaaagccatctggttgttaaaccagcttcagtccaacagcctccggctattatagaggaggttggttggcttttcactggcggtgttggctccctcagcaacgtcggccagttttctntccggcaacgatggctccgtagcaccgtttggctggctcctcttgtatgcggcatgttttcggctttctatgcgatggtgtccgccttttgtctctggtcaatttccaccgtcannatttccggggggtttttggccagttaatgtacccngtgtnaggnccccngtttaatntggtgtcccggttttaanntcnaaaaaaaattcccantggggaatnttgtggggnganaaaaagt

SEQ ID NO: 132946 - DNA, 401 bp, Arabidopsis thaliana columbia
  unsure (1)..(401): unsure at all n locations
aaatctctaaacacatatacagaagaaagcagaaactaaagtaagaaaaaacaaacaaacaaaaagtatggggaactgtttagtaatggagaagaaagtgataaagataatgagaaatgatgggaaagtagttgantacagaggacctatganggttcatcacatcctcacccaattntntcctcactactctctctttgactctntcaccaacaattgtcatcttcatccccaagccaagcttctctgtggtcgtctctactatctattgccccaggagnctacctcaatcaagcacatgaagaagncgnttgnagaaagtcaggtttgcaanttcctgcaggtggtnaaaggangnccacggtggtaggttggttttaaccaagnttntggtgtcanac

SEQ ID NO: 132947 - DNA, 426 bp, Arabidopsis thaliana columbia
  unsure (1)..(426): unsure at all n locations
ccacagtcaataacaccaatgacagcggttgcaaagctgattgatgggtatcttgctgaagttgctcctgatgtcaatcttaagcttccaaagttccaagctttagctgcttctattcctgaatacgccagactcttagatgacggactctatcgtgcaatagacatttatctaaagcatcatccatggttggcggaaacagaaagagagaatctntgccggttgttagattgtnagaaactctctttagaagcttgtacacatgcggcgcagancgagagattancgctaagaataatcgtccangtgctcttctttgagcagctacagctcagaacctctgtagcngggatgcttcctgggtntcagncaaacctcggttggnnggatcaaagacagttnaganncggnnggttatttngggng

SEQ ID NO: 132948 - DNA, 513 bp, Arabidopsis thaliana columbia
  unsure (1)..(513): unsure at all n locations
cagaacaaggagcttttntccgacaaggagaagcttaacaagttcctcagctggaggattcagctacaagagaagtgtgtnagagctattgatttcagcaaccctgaagcgaagtcttcgtttgttttcgtcagcgacttcaggaacgctccaggacttggtaaaagagccttgtggcaattcatcagacgcgctgttaaacaattcgaggacaattatcctgaattcgccgctaaagagctattcatcaatgtcccatggtggtacattccatactacaaaacattcggttctatcatcacatccccaaggnctaggagcangatggtccttgctgggtccatccaaatttgccgatactattttcaaaatacataggctcctgnancaagtttccgtttaaatacgggtgggncttnngcaaangntactnccttttgacccggaggaacccttnacggtnggccattgnttnaaccngggancaaatttncactttttgattttcctcnt

SEQ ID NO: 132949 - DNA, 437 bp, Arabidopsis thaliana columbia
  unsure (1)..(437): unsure at all n locations
acttcgtgtncttcttcatcttcttcttctttcccacgactcttcgccgccaaatcccaaatctataaagctccagttttatccttctccactcctaaacgccgtcgtcctcgtcctcgccggaaccggaaatctaatggctcatcctacgaccacaccgacggcaatcttctttctatctccacttcctctccctccggagccgacgaccaaagtctcagcttaaccctagacgttcaccgtatttaaactctagctaattaccgcttncaatngtttctcgattncagcaaagaangagtttttccgactttgcaaaacactaatcntcactcgacggntaaancggagagtcggtttgtcttagtggaaaaaaatcatcttatggnaattttnttgggngggtgttggttattacnaggngntncngtantttt

SEQ ID NO: 132950 - DNA, 449 bp, Arabidopsis thaliana columbia
  unsure (1)..(449): unsure at all n locations
ctttgatgcaggttatgaggactatctaggattctaatgcacaaccccagggatcagcgcccacgngataagaaattacacaaacacggcctgtaactacgacatgaaacatccttcaaactttaatgcaccatctatagcagtttctcatctagtggggacccagacagtaacaaggaaagttactaatgtagcagaggtagangaaacatacacaatancagcaaggatgcagccgtctattgccatcgaagtgaacccaccagcgatgacactcngtccaggngctactagaaccttctcagtcactatgaccntgagatcgngttttttnggagtgtacagctttngggggcggntaaaggttaaaagggttngccccatggggcattaaggncaagggttcccggttgggtgggctcnttggggcatcngnggtnnaaacaaaa

SEQ ID NO: 132951 - DNA, 341 bp, Arabidopsis thaliana columbia
  unsure (1)..(341): unsure at all n locations
acaaaaccagagaaaaagacctgtctgtttttttaagaagtctttatatttttttttttgtcggagaatcttataagcatggcttcaggaggntcaaagtcggcagctttcatgcttctaatgctgaatcttggtctctatttcgtcatcaccatcatcgcttctngggctgttaatnacggcatcgagagaactcgcgagtctgcgtcgacactgtnacttccggcgaagatattcccgatatacttcccggtggggaacatggcgaccggttttttcgtaatattcacgttaatngncggcgtcgtcgggaatggccacattnanttnaaccggngnna

SEQ ID NO: 132952 - DNA, 618 bp, Arabidopsis thaliana columbia
  unsure (1)..(618): unsure at all n locations
cttcagcaatcacactctctctttgttcgagtaccaacaatggcccttcaagctgcttctttggtctcctctgctttctctgttcgcaaagatgcgaagttgaatgcttcttcatcatctttcaaggactcgagtctttttggtgcctccattaccgaccaaatcaaatccgaacatggntcttcctcgttaagattcaagagagaacagagcttaaggaatctagcaattcgagcccaaaccgctgcgacttcaagccctacagttacaaaatccgtggacggcaagaaaacgttgaggaaaggaaatgtggtggtcactggagcctcgtctgggttaggtctagccacggctaaagctctagctgtgacagggaaatggaacgtggtaatggcgtgcagnggcttccttaaagccggagagcttgcttaaatccgtagggnntggctaaaggcaggcttnaacagttgntgcatttggnntttaggcctcngttgggncagcggtgnggccaggtttgtttgntnattttctgggggnncagtggncggctnttcganggtttttggtcttgaaatgtgcgggttttttttccccggnccagnntnannggggcct

SEQ ID NO: 132953 - DNA, 385 bp, Arabidopsis thaliana columbia
  unsure (1)..(385): unsure at all n locations
attgagaaaggagagaagttcagggtctatgttgtggttccaatgtggccagaaggtctcccagagagtggatcagtgcaagcnatattagactggcagaggaggaccatggagatgatgtacaaggatgtnattcaggctctcagggcccagggtcttgaggaagatccaagaaactatctgacattctnctgtnttggaaaccgtgaggtcaagaaagatggagagtatgagcctnctgagaaaccagaccccgacactgattacatgagggcgcaagaagcancgcncgttttcattgtttttacngnccacaccaaaaatgattgatcnnttttacgggtggtatacanttantcnattgggtcttcttaancatcatccc

SEQ ID NO: 132954 - DNA, 453 bp, Arabidopsis thaliana columbia
  unsure (1)..(453): unsure at all n locations
tggttctggaatggacatgagaagcaaagccaggnctctacctggaccagtgactgacccttcgcagctaccaaagtggaactatgatggttcaagcacaggccaagctcctggtgaagacagtgaagtcatcttataccctcaagccatattcaaggntcctttccgtagaggaaacaacattcttgtnatgtgcgatgcgtacactcccgcgggtgaaccaatcccgactaacaaaagacacgctgcggctaaggtctttagcaaccctgatgttgcagctgaagtnccatggtatggtattggagcaagattacactttactnccagaaagttgttgaagtgggcctgtnggtttnggcctatttgggtggttatccccgggncccttnanggggnccgnnacttttttggngggtttttttgggggnnggccaaaatttntttttgngg

SEQ ID NO: 132955 - DNA, 492 bp, Arabidopsis thaliana columbia
  unsure (1)..(492): unsure at all n locations
gagattgtaagaaaggctaaacagcctccagtgcttcacggtgttcctgattttcctgaagtttataatttcattgggagtgtctttgatcctgaaacgagaggccatgtggaaaagctcaaggaaatggatcctataaatttcgaaactgttctgttattgatgagaaacctcacagttaacttatcaaaccctgatttagaatccacttcggattgtaatgatgctgcagaggaaagtcctcttatcatatgacaacgtgacgaccgngctcccaagcgttgtttcccttgtcaagaactcaacaagcggcaaatcagcataacaaaaatntgagccatcagctagcaagtttactcattgggttcccatggttaanaaactttgggtgttatangcanntggganacaatcgngtcaactggaacatcatgtgggattntgtnaaagggccttnttgttttnggggggncataagctaagttttaagng

SEQ ID NO: 132956 - DNA, 467 bp, Arabidopsis thaliana columbia
  unsure (1)..(467): unsure at all n locations
caaggaaatctcaagatatctnattttggcctcagtgcattacctgaacaaggagttaccatcctaaagacaacatgtggaactcccaattacgttgctcctgaggttctcagtcacaagggttacaatggtgccgttgcagatatttggtcctgtggggtcatcctttatgttcttatggcaggatatcttccatttgatgaaatggatctaccaactttatatagtaagatcgacaaagctgagttctcttgcccctcatattttnccctgggggcaaagtccttgnttaatagaattttggntccaaatccagaaactcggnttacaattncaggaatcaggcaagatgagtggnttctaaaggattacactcctgtacaacttancgnttncgggcatgtaanctgggttgatnttntgccngcttttaatgntccggggggcaaacatntgnnccagggtgg

SEQ ID NO: 132957 - DNA, 486 bp, Arabidopsis thaliana columbia
  unsure (1)..(486): unsure at all n locations
agcaccttcagttccgtacaacaatggctctccaagctgcctattctnttcttccttctaccatttcaatccaaaaagagggcaaattcaatgcttctntaaaggagacgactttnactggttcttcattttcaaaccatcttagagctgaaaagatatccaccctgttgaccatcaaggaacagagaagacagaaaccgcgattttccaccggtattcgtgcacagacagttacagccacgccgccggcaaacgaagcatcgccggagcaaaagaagactnagagaaaaggcactgccagtgatcactggagcttcngtctggtttaggtttagctacggcaaagctttagnagncacagggaaatggcatgtnatcatggctttgcaggaactttntcaaaggccgngaagncagcggatntttttggaatntccagggaggttcnncagtggttnatcttgancttncttcgtttnaagcgtg

SEQ ID NO: 132958 - DNA, 579 bp, Arabidopsis thaliana columbia
  unsure (1)..(579): unsure at all n locations
aaagcatatagttaatccgatgagaacttatgtcaaactctctgctgttctcatgggttcacatggtttaaccaaaggntctttggcttatctcaattatccagctcaaatcatgttcaaatccaccaaggtgttaccggtgatgataatgggagcgtttatacccggtcttagaagaaaatacccagtccatgaatacatttcagcgttcttgcttgtncttggtttgatcctattcacattagccgatgcgcaaatgtctccaaatttcagtatgattgggattatgatgataaccggtgcattgatcatggatgctttnttgggtaatctgcaagangctatcttcacaatgaatcctgnggcaactcagatgggantggctttntgctnaaacagtttntttggnttaccgttcttggttcggtcccatgggtttaacccggagagggttttcggtgcggtggccttncggnttgacaacancccgaatntgantggggngcttgantttnaggccntggcccaattatngggcaaggttccggttntnggtnattggcctttttgggcggcaaa

SEQ ID NO: 132959 - DNA, 542 bp, Arabidopsis thaliana columbia
  unsure (1)..(542): unsure at all n locations
aattttcattttcagctctcttcacactacaaacctcttaatctggtgattttaatgggtccaagttgaaagtgttgaccttttgtnagaaaaagatggattttgtctcaagagatagaatcagcagtctaccaaatcctgtagtatcccacatcttgtctttccttcccacaaaagaagcagcttctacttcggtcctctccaaaaaatggcgttatttgtttgcgtatgtaacaaatcttgactttgatgactcggactatcaggatggtaaaccaaaaagcgatgttgaacttagtagaagttttatggaatttgtgggcagagtcttggctttgcaaggggaatggttccgtaaataaattctctctagggtgtagtnattatgatgttgatcttgctcgtgncactggttgggtatttgaatgtgttaggccgcggtgtntcanagcttgntttnagnatcttgggggatcccttcctncgggggnttttttggnaancncctgttnggcngaaatnaggnccgcaatgncntnctt

SEQ ID NO: 132960 - DNA, 583 bp, Arabidopsis thaliana columbia
  unsure (1)..(583): unsure at all n locations
caaaggacctcatccaatatttgangcaccaatgcccggctcacctttacgccacatcaatttcaactccttccgcgacacaaatcatatcggcgataaaggttatccttggagaggatggttcaaacagaggggcacaaaagttagcaagaataagggagaacagcaactttttcagggctgagttgcagaagatggggtttgaagttcttggagacaatgattcaccagtcatgccaataatgctttacaatccagcaaaaattccagcattctcaaggggatgtttgcgggaaaacttngcggtggtggtcgtcggnttcccagctacaaccctatttgctagccagggctcggnatttgcaatatcccgatctcactcaagggnaaggtcttntaaaagncctacagggttntaagcaaaggaaggtgnccttncccggggtcaaaanttttccnggaggtncaaaaaagnaaggagttggggaaaattggctccaattggttaaccccntagggancagnttttttccaggggtttttggtngcaattgctggagggccaatntttnggnnngctttt

SEQ ID NO: 132961 - DNA, 566 bp, Arabidopsis thaliana columbia
  unsure (1)..(566): unsure at all n locations
taaaagagcttaatcctcctctcgcgatctttctcggcatccaaaaatgtctctagttgcgaacgaggagtttcagcatattctgcgtgtgctcaatactaatgtcgatgggaagcaaaaaattatgtttgctttgacctcaatcaagggtattggaaggcgattggctaacattgtgtgcaaganggctgatgttgacatgaacaagagggctggagaactaagtnctgctgagattgataacctcatgacaatcgttgctaaccctcgccagttcaagatcccagactggtttcttaacagacaaaaggattacaaggatgggnaatactnccaagttgtttncaaatgctcttgacatgaagttgaggagatgatcttnagcgnctcaagnaaggtcagaaaccatcgtgggtcttaggnactacttgggnctccgtgtcgtggcagacaccaaancaccggccgcgtngaaanttttgggttccagaagggtaaaagngttttccttggtcatggtttnttngttttttgattgtgnttttcanaggggtgtnanngtttnt

SEQ ID NO: 132962 - DNA, 380 bp, Arabidopsis thaliana columbia
  unsure (1)..(380): unsure at all n locations
acaacaacaaatcttaaacgtttnactttgtnctgcactactcaacctcaatggccgcctcaacaatggctctntcctcccctgcnttcgccggtaaggccgtcaagctttcccccgcggcatctnaagtccttggaagcggccgtgtgacaatnaggaagactgttgccaagccaaagggcccatcaggcagcccatggtacggttctaaccgtntcaagtacttggntccattctttggcgaatnaccgagctaccttaccggagagttccccggagactacgggatgggacaccgncggantttaaagctgaccccgngaaattcgnaaggaaccgtgaactnggaagttatccncaggaaggtggggccatgtttg

SEQ ID NO: 132963 - DNA, 404 bp, Arabidopsis thaliana columbia
  unsure (1)..(404): unsure at all n locations
ggcaaagaatctnctgaacccagtaatttgtgtnatactactaaaaaccagccagcaccctctnttgatggaactaaggccaatgttgaacatgaagcgacagagacccctttncgtgttcaggcagaaaaggagccaattcgtcctacagccccaggnacaaatgataatacatccagggttcgatcttctgttgatagaaaaaggaaacagggaactgtgataaatgaagaggatagtggtgtaggtgttagtggaagggacattaatctaacaaaatctgtcgntacaaaagngnccatgnagccaaaggatgaaggaggagaggaagaggntggngnaaaatccaaaaaagcatctnacgttcatttaaacattcggttacctgntggtnggtngccttt

SEQ ID NO: 132964 - DNA, 527 bp, Arabidopsis thaliana columbia
  unsure (1)..(527): unsure at all n locations
gagagaaaaaaatataaagctaccaaagagaaaatggtgacactaacaccatcttctgctagtaccccaaaaacatcttttgatttcatgaagaataacaacagtcacagtctctatgtttctccttcttcttacttgagcagcaaggaagatgctcttgtcacgaccaagaagctcatggaaccaagcaaaacactaaacatgagcattaatccaaaacaagaggagtttggtgatgagaagaaaatggtgaagaaagctcctgaagatccagagattggtgtgtttggagctgagaagtacttcaatggngacatgggttcagaccaaggttctagtgttctgtctctgacaaacccagnagtttgagagnaccgtcggtcgnctngaagcagagcncgaggaaatcttcttggtctccgagtgtccgggctnnatcaagctgggattagtcagggggtnttnttntngancaaccttggnggtngntnaaacanttccttcagggnaagngggccngtattggc

SEQ ID NO: 132965 - DNA, 373 bp, Arabidopsis thaliana columbia
  unsure (1)..(373): unsure at all n locations
ggaatgctttaccgcacaaagctgaaggagtcataccaaactntgcttangccttgccacagaacagcaaggcttttnaaccaccttacgctgtccactattcagcccttaaaactgcttttnccaattatcttcagcctcagactcctgataccgtattgggggaggctccagctcctgctgcaggttcttctggtttattgccaccaaacacacccggttttaaaagtaatgctgctcggtttaaagaggngccgcctatattacctccggatgattccagagttaagagnnatatggggggttatcttgggntttanttgnttttcaaaagntttgacancggcggagntttttcaaggncacccctatg

SEQ ID NO: 132966 - DNA, 208 bp, Arabidopsis thaliana columbia
  unsure (1)..(208): unsure at all n locations
tttttttttttttcngtcttaaatataatnatgtcactctctcaagccttgagttgagggatttgttttnaattttaatttctnataaacactatacgtatacatgtatgtgtatcacatatacatatgcttccacttattttaataagtaagcntccattacatctttccnctttctggcttagtatcattcttngtggtgtncttt

SEQ ID NO: 132967 - DNA, 567 bp, Arabidopsis thaliana columbia
  unsure (1)..(567): unsure at all n locations
agaacacggtgaagagaagaggcgagagagagagagagagggaaaaggaagacgatgatgatttctcggagacccgtttcaagtccgggtcgggtagagaaatatccaccgcctttnatggggtttttaagaagtaagagcaacggcggaagtacaagcaggagtagaagtcgaagcagaggaaggtcacgcgctagtcctcttttcgttcgccggaataaatccncggcggcggtggctcaagaaccgtcgtctccgaagttacttgcatgggtcaagtccgggtcaaccgatcgaagcccaaaattaaacccgaatctcgagataacccgacccgacgacgatntnagtggctccgaaacgcgtcgttttataacaaattnngccgggaaaatcaaaacgntgacggtttngnctaaatggngnctcttttcgttttcgtgtgttttcggattttaaggggaaaatttncnngagnatttgtcatcggcaacgggttagnagggaatcaaggggaatcntggggagaaatttgaatccnaatattttttccggnctctcnctntc

SEQ ID NO: 132968 - DNA, 495 bp, Arabidopsis thaliana columbia
  unsure (1)..(495): unsure at all n locations
aaaaccatgagaggtctcgcggcttgtnacagtgaacacgccattaaagtatcanatacatattgttcaggtccatcgaatcattcctatatatctccgacattacctccttcaatccccgacacagtaaccaccacttataaatcatatctcccttcttccgacaaacccgtctctgtttcactcacctggtcggataatctcaccgtcgtcatctcaacgccgccgaaatcatactctgtttcactcagaaaacctaaaggntcaagaaagttgacttcttcctccggttcactcaacggcgagatcctatgggatctatcggaagcagagtacggaaacaacgggcctgaaccaataaggagnttcttnggtcggcgtcgttgtaaaattccgggggttaccctcggagtcggngnggttnncccggggggggcangtnntnatggcgntggtggggggtntnaaaaaggggnggtttntggantttttggt

SEQ ID NO: 132969 - DNA, 591 bp, Arabidopsis thaliana columbia
  unsure (1)..(591): unsure at all n locations
gataagtagagacttaatggaagttggaggtgaagctctcaagacaaacatcactaccttaggtcctcttgtcctacctttntccgagcagcttctntnctttnctgctttgctccgccgaacattctcacctgctgccaaaacgtccacaaccacttccttctctacttccgccaccgcaaaaaccaatggaatcaagtcttcctcttccgatctgtccaagccatacatcccggactacaagctcgccttcgagcatttttgcttccacgcggcaagcaaagtagtgcttgaaggagcttcaaaagaatctagggtttgagtgaagaggatatggaggcttctaggatgacacttcacaggttttggaaaacacttnttgcagtgggatctggtatgagtttgnttacatggggggccaggnaagtnttcgtaggnggcgntagggtttggnagatcgtttcgggtctgggtttaagggnacaagtntggtttgnagnaattagggaggttaagagccacccgggcaatctttggggggtnataancgtaccnggnccctaaaatnatnttaaaaacaagaggncttgc

SEQ ID NO: 132970 - DNA, 403 bp, Arabidopsis thaliana columbia
  unsure (1)..(403): unsure at all n locations
cctgantctaacttggttgctaaatcattacaagtnagtcctttcatggatatgcttggnaattggaaaatnagagctaatgaacctggagatgatttanctgtctccattgcatctnaacatcctcatttnggtaactatttctntgcgacattaaaggcgaaaaggatacccctatcgcgggtgtntgatcccgntgttttnttctggttgatgcctcataaggttgcgatatggntctattggcatgcacttcaactctggtggaagagtgtacctttnattcaacacccgggatactcgaacccatcatacagggaggatgcagcggaacgggntcaagaaccttcggttgccccgggttagatggggctnattctgntaaaacccaccaattttgaat

SEQ ID NO: 132971 - DNA, 401 bp, Arabidopsis thaliana columbia
  unsure (1)..(401): unsure at all n locations
caaaatgaacctgtggcaccntcatctntnaggattgctttaagtaatttntatccagatagtagtttctnccaagaggctcagatgaacgatgcttcanaagtactggctgtaatctttgactgcnttcatcgctcatttnctcaaagttcaagcgtgtctnatgtggattcctcagacagcaactgtactggttcatgggactgtgccaatcgcacatgtattgcccattctttgtttggaatggatattttnaagcaactgaattgctacagctgtgggctggagtccaggcatttaangtacacttcctttttccataacatcaacggtagtgnccctacggaccatgaagggttacatgcgnctgaaaattcatttntgncttnttaaccttgtcg

SEQ ID NO: 132972 - DNA, 527 bp, Arabidopsis thaliana columbia
  unsure (1)..(527): unsure at all n locations
ggaaggtttaaattctcaagtcattgtnatgatcgtggcgttatcggcagtaatgctggtcatgcttgttttactctnctncttcgtcatgtacaagaagagactgggacaagaagagactcttgaagactgggaaatcgatcatcctcgcagattganatacagagacctctacgtagccacggatggattcaaaaagactggaatcatcggaaccggaggatttggaaccgttttcaaaggaaaactgccgaattcggatcccatcgcagtgaagaagataattccaagtagcaggcaaggtgttcgagaatttttcgcagagatcganagtttggggaactaaggcataagaatctgggtgaacctccaaggatggtgcaacaccaaaaacggtctctttnttgatttccggttacaatccccancgggagntttggctnttttgntctcactntncccgggaagancggccccgttttttngtgaccgtcnttttnaanntccgtaaaggnatcnggntggtt

SEQ ID NO: 132973 - DNA, 477 bp, Arabidopsis thaliana columbia
  unsure (1)..(477): unsure at all n locations
aaaaatcatcgttgatgcttgcttacgaggttaacgctgttggtccaattctagtgatgaagcatatgtggcctctccttaaggctggtggaggtagtggaacagatagagaagttgctgttgtagccaatttaagcgctcganttggatccattggagataaccgacttggtggttggcactcttacagggcttcaaaatccgcactcaatcaactgacaaaaaatgtatcggttgagttaggtaggaggaaagatcctgtggcatgcattctactacatccaggcacagtagacactgatctctctcggccgtttcaaaggaatnttcctgacgggaaaacttttcacaagngagtactctgttcagaagttactgcacatcatcancaatncttanggaacaaggcagcggaaagtnntttcctttggngttgncnngggntaccctnggggnttncttnnangggttttttgg

SEQ ID NO: 132974 - DNA, 533 bp, Arabidopsis thaliana columbia
  unsure (1)..(533): unsure at all n locations
agaatgantcagaacaagctgaaaacaagagaaacagtatgttggaagcattcgaacgcgaatttnaagctgctacaaatgcaaaggctaatggagaaaactctgcaaagaatccatcaaccataagtactacagtgcagaaatcttctggcggatacaatgctggtttagaaggtcttctaaagcctgcagatggtgtatgtggttgtttcaacaaggataaagatggtcttcaggcagacactgattctncgattaacatagcggagatactcgcagaagantccaaattacagggctcagggacctctcggctcaccacatcattgnacaatcttgttgatactcataggaaagaaacggtcctcaaaggttgggctcagtccttnggntcatcttcatcaggtactttntnccncaagcggttcagcgggtncatcaggngggcttngggggcttnanggaaccccttnggatggcttcggggntttgnggccgtnntttttnaaccccccgttttcggtggggttttg

SEQ ID NO: 132975 - DNA, 456 bp, Arabidopsis thaliana columbia
  unsure (1)..(456): unsure at all n locations
gaaagaatcagttttgaaaagcaaataactaatcaccggaagatgattatnacggcgggagttccaccggagaagcttaagaagtgtctatatacaattaatattggaagcaatgattatctcaacaactatttcatgccggctccctacactaccaatgaaaatttcagtttcgatgaatatgctgatttnntcattcaaagttatcgctcttatttgangtcattgtacgtcttaggagcaaggaaggtagcggtctttggggtgagtaagcttgggtgcacgcngcggatgatcgcctcccatggtggaggtaaaggctgcgctactgaagtgnacaaagctgtcgnacctttcaacaaggaactttaaagntccncatctctgaattcaccaggatccngngttngttgnccangcttaggtccncccttttttggnccttttcagnngccg

SEQ ID NO: 132976 - DNA, 230 bp, Arabidopsis thaliana columbia
  unsure (1)..(230): unsure at all n locations
gacgacttcaacatcaaaggntcaaaagaagaagagctttgcnntaacagatgcaatnatgaacagttttaatagtttagagagcatggtgagaatcaaggaggctgaaacaagaatntnccagaagaaagcagacgaggccagaatagaggcagagagtttcaagagaatnatagaaatgaagacggagaagatggaggnggagtacacagagaaactagcgcgtctnt

SEQ ID NO: 132977 - DNA, 328 bp, Arabidopsis thaliana columbia
  unsure (1)..(328): unsure at all n locations
cttttatccaagaacggcggagatgcggcaaaacagagcttctcctctgcctcgttcaaccgctaacgccgccaattccagcgtctaaatcggttnacgagacattaatggttgacgagaaaaaatcagaggatgagtcacacccgcncgttttctgcacgccgcgttttggattgagcgtttacaacgctgcgatgtncacgtggcatcgcgttgcgttttccagaggaggagcaagatcccccttttttttngagtgcgtccgtgntttaagaaggccgggnagnatttttctnaancgggcnggtttggatncccncgaangttt

SEQ ID NO: 132978 - DNA, 406 bp, Arabidopsis thaliana columbia
  unsure (1)..(406): unsure at all n locations
cttggtatcggtattgcttgtntaaagaatctagatttaagtttacatgcnatgccaaatgttgatcagattcaagctttgattcaacactatggtcctacactagtcttccatcctggtgaaactnacttaccttctnctgtttcgtggttcttcaaaaatggtgcagttctctncgaaaagggaaatccaatcgaggaacctatcgatgaaaatggttcgaatttccctcaaggaggaagcaatgacaagcagttttggattgatttgccgtgtgatgatccaccaaagnggatttccgtcaaagcggggggaancctttnaaagncccggaaacttttccattccannttaaagccttgccccttgggggggaccgttcnnggnttcntttgtttttnggggg

SEQ ID NO: 132979 - DNA, 504 bp, Arabidopsis thaliana columbia
  unsure (1)..(504): unsure at all n locations
ccaaaaattacccaggtttttgtgtttgaaactcgaagattgttgcggattcctgaaagattaaggcttttagctccaagtttccaagagtgctgtgaatcagctcccactctgtctctgcatattgcaagacaccgggtttgtttcagaagtttgtttctncttgtctcatgatcactagttttcagcaatggggtatgtaaacgtggagaagagatgggtttttcctcttgtcatcacatctctcgtctgcggttttnttcttgcaacttctttcaacatgggnctagtctcttcccttccgnacaatcaacggggnntttctttccatcaaaacctttcccggtctnggtcaaggancccaaacgggggntttnatttttccaaggggcttaaaagtttgcttaggcnaaancccggggtttttgccnnaatgnagggnaaaggttnccccggttttgaaaaaccttgntttccgggggctaaaaagggggtttnnggaaa

SEQ ID NO: 132980 - DNA, 513 bp, Arabidopsis thaliana columbia
  unsure (1)..(513): unsure at all n locations
atcattttcgtctctgggtgtttctctgaagggtttgatcagtaagaactctccgaccagtgtttccatttccaaggttccaacttgggagaagaagcagatctcaaatcggaactctttcaagctgaattgcgtgatggagaaaagtgtcgatggtcaaactcattctaccgttaacaataccactgatagcttaaatagttcgttaagcttaaataacttctttttattggatcatattgatgataatcataaagttagcgtcttttttattgattgatggtgtttcaatgtttttccagctatgaatatcaaaggaggagctagcgnctctacattattggtggacttgggtaataaatttgnanccccttggatgcaatgnggactccggtttttcccaacctggntacttttaagggagccttntccnnttnaaaatgggncccttnggttaacaaggggggggaaccntncnggggnttcttggaanccccttgggnggttncaagg

SEQ ID NO: 132981 - DNA, 464 bp, Arabidopsis thaliana columbia
  unsure (1)..(464): unsure at all n locations
aggaatatagattgtggcggctgaaaaatcggagcctctgaaaatnatgatatcaggagctcctgcttctggtaaaggtacacaatgcgagctgattactcacaaatatggtttggtgcatatctctnctggagatttgctgagggctgaaatcgcttctggaagtgaaaatggaagacgtgctaaagaacatatggngaaaggacaattggtccctgatgaaatagttgtaatgatggtaaaagatcgtttatcacagacagattcagagcaaaaaggatggcttttggatggatatccaaggagtgcatcacaggcaacagctctcaaggggttttngattccagccctgacctttttcatttncccncggattnattnttcaaccaganttnctgaaatngtttaattcttggnaaatncagnctttaaaatcccgggcaacttgntnatnaaacctnggg

SEQ ID NO: 132982 - DNA, 545 bp, Arabidopsis thaliana columbia
  unsure (1)..(545): unsure at all n locations
gttgttcatgaacttcactggagaaggcgctgaggctcttaaatcaaagtaccgtgaagttgctacatccaacaagggacagggtcttagcttccttctaggtgatgctgagaacagccaaggtgcattccagtactttggactcgaagagagccaagttccactcatcatcatccagactgctgacgacaagaaatacctgaaaacaaatgttgaggttgaccagattgaatcatgggtcaaggacttcaaggatggaaaaattgctccccacaaaaaatctcaacctatcccagccgaaaacaacgagccagtgaaggttgttgtttcagacagccttgacggcattgtcttaaactctggaaagaacgntttgcttgaattctatgctccatggtgtngncactgccaaaanttgctccaatcttgncggagttctgtgtggtcccaagnggcccagttnggnatagntagttggtnancgaanngttccaaagnncctttnnttnagggtccgcccttnttaatagggngganttggttgc

SEQ ID NO: 132983 - DNA, 477 bp, Arabidopsis thaliana columbia
  unsure (1)..(477): unsure at all n locations
gnaactctaacctagagaaccaatgcacccacaggtacaagatttatatagaaggatgggcatggtcagtgagtgagaaatatataatggcatgtnattcaatgacattgtacgtgagacctatgtnctatgattttnacgtacgaggaatgatgccattacaacattactggccaatcagagacacctctaagtgtacttccctcaaattcgccgtacattgggggaatactcatttggaccaggcgagtaagataggagaagaagggagtaggtttattagagaggaagtgaaaatggaatatgtgtatgactacatgttccatttgatgaacgagtatgcaaaacctttttaaagtttaaacccagaggtttccgtggggagccncggnggttaccgccggntattnatnggccttcnncggcgncggggncggttggnganattncattgnggggcnttttggttaaattncc

SEQ ID NO: 132984 - DNA, 592 bp, Arabidopsis thaliana columbia
  unsure (1)..(592): unsure at all n locations
gtgcttcggtaataattgatatgtgggtggaattatacggtaaaggtagtagtatcttgtatatgtancttgaagaccttgcctcccagaatctacttaaacttgtncctctcgggtatgttatttatgtttcaaatctatatctttgcaccttcttgccatctaccattagtggaacttatttatttctttatcagcacaaatgagcacgaagacggtttctacaatgacttcttagtgactcaacatgatatccttagggagttggctatctgtcaaagcgaatttaaggaaaacttagaaagaaaaaggctaaatctggagatactagaggatacatttccagactggtgtttgaatacctattaatgcccnccttttattggcctatctcctaccggggtaattcttttgggggcttcctttttctgnaaattaaaccttaatnggtntaccaaacccctgcngtttccnaggaaanatgccttcncnaaaaccanggnttggccncncttttnctacagngnntttgncccnaccgaaatggttggaattgggttccccnatttttgggnttaggccaaacccctca

SEQ ID NO: 132985 - DNA, 501 bp, Arabidopsis thaliana columbia
  unsure (1)..(501): unsure at all n locations
gtttgcttccatagcgttcttggccatattcaacttgccgggtcagtatttcacggaggggtcgcatgtgggacaagccaatattgcagggagaaccggattccgcgtgtcctgtctttnaaacgcgacatctctgtttatatcgttagcggttgtggtagttcaaataactttggtggcgtgggacacacgggcgcagaagaaagttgtgtctgtagtgaataagctaatgtgggcagcttgtncttgcacattcggagcatttttggcgattgcatttncggttgtttgaaaggggaactcntggatggcgattaccataaccgttcctttgagcacccgttctttggtagggacaattgggaaagttatgtttnnattttcggngttttcgtcaaccgnttttagggtgcggnaaacgattcncangngaangatttagggagaggngngttgntaagccggtttncaactggnctttactntnaacaatttatcccc

SEQ ID NO: 132986 - DNA, 297 bp, Arabidopsis thaliana columbia
  unsure (1)..(297): unsure at all n locations
agaacggagagggagagagagataactttntcctcttttaaaatttcaaaagtnatccaaattccaggttctggcgtcttgaggagttgcttaaganatggcgtcatggacttcatcccagttcctgtatgaagaaaccaagccatggggtattcagttcttggaaaagtttaagcggtcaggaagnctctccttcaagcaataccaagcccttgttttcattttgaccnttgtcggctacatcggcctccatngttgccnnaaagcccataggattttcaaggggaccnntttntt

SEQ ID NO: 132987 - DNA, 416 bp, Arabidopsis thaliana columbia
  unsure (1)..(416): unsure at all n locations
cttcactcttcatcttcaaagactgcgcctttnagctcagtgaaaaaggttcgagcttcggaaactatggcagcattccctaaccttaactctnatgctggattgaagaagctcgacgagcatcttctcactcgcagttacattactggataccaggcttcaaaggatgatatcaccgtctttgcagctcttgcaaagcccccaacttcacagtatgtgaacgcttctcgttggtacaatcacattgatgccctcttgaggatctcttggtgtctctngttgaaggaagcggtgtcattgttgagggntcagctcctatcactgaggaggctgttnctantcccccctgcagcttgattntaaggnatgcttcgggttnttnaaggaangntgnttgnttantgtttgaccctttt

SEQ ID NO: 132988 - DNA, 612 bp, Arabidopsis thaliana columbia
  unsure (1)..(612): unsure at all n locations
catcatcatcatcatcatctcttggtgacagaagaaaagagttgaggaacagagaaaatggcagcacaagcacttgtntcttcttcacttacctcctctgttcagacagctagacagatatttggctcaaaaccagttgcgtctgcctcacagaagaagagttcctttgttgttaaagctgctgcaactccacctgtcaagcaaggagcaaacagaccattgtggtttgcatcatcgcagagtctctcttacttggatggcagcttacctggtgactatggattcgaccctcttggcctttcagacccagaaggtactggaggattcattgagccaagatggctagcatacgggngaggtcaatcaacgggacgggttcgccatgttgggtgcaacttggagctattgcncctnanattctaggaaaggcttggnttnattcccagaagaggcttncntttccctgggtcccaaaccggtgtnttccccagcaagggcaatcantttttggaagcaatttcaaacntttttnttggggttggcnttatgggnttcctttgacccgggtacaggcttgtaacccgggttttnggaaaaantttnttgggtttc

SEQ ID NO: 132989 - DNA, 519 bp, Arabidopsis thaliana columbia
  unsure (1)..(519): unsure at all n locations
gaagcgcacacacacataacatatttntttcactacccaaagagatggcgacatcgggaacatatgtgacggaggttccattgaaaggttcggcggataaacactacaagcggtggagagatgagaaccacctcttccccgatgccatcggccaccacatccaaggtgtcactgtccacgacggtgaatgggactctcatgaagccatcaagatttggaactatacatgcggtaaaaatacatttatatggaatccaaagaatggtgctaacttaatgaatgaaacaaatatgtacgcatatatgtgcagatgggaaaccggaagtgttcanggaaaggnaagagatagacggtgngnaatatggtgataacgttcagaggnctngaaggtcacgtcatgggnagcttaaagtgttgtccnctatatcagtttagccaaagttccngtgntntcgtttnaaggncnaattttttggggaggaccnntgttnccttnccttggactcatnaggtcccaaa

SEQ ID NO: 132990 - DNA, 487 bp, Arabidopsis thaliana columbia
  unsure (1)..(487): unsure at all n locations
ggaactgcgagagatgaaaggaggcatcaacatcttgcacaatcttannaatagagagagacaaatcaaggatattgaagcatcctttgaggcatgcaagtntcgaccagttcatgccaccaataaaaacttgcagccggttgaagttctaccactgttgccatattttnataggtacgatgagcagtttgtggtagcgaattttgatggtgctcctatagctgattctnaattctttggcaagttggacccttcaattcgtgatgcacatgagtcacgggccattttgaaaaggtatgtggtggctggttcagacactgccaatccagaaaaatttcctngcgtacatggttccttccttgggatgagttgtcttaaggatatccatggttgaaaacggnggaatntntttcactttgggttcgggaataccnttngggatgttcaaccccaatnnaacgntcctnggacanccctggnntcattt

SEQ ID NO: 132991 - DNA, 434 bp, Arabidopsis thaliana columbia
  unsure (1)..(434): unsure at all n locations
taaaagagagagaagagaacgagagaatcattgagaaacgaaacaacaatggccgtctcatcattccagtgccctaccatcttctcctcctcctcaatctccggctttcaatnccgttntgatccagatctcgtcggttctcccgtcggtggatcatctcgccgtcgtgtccatgcctccgccgggatttnttcctcattcaccggggacgctggattatcctccaggatcttaagatttcctcctaatttcgtccgtcagctgagcattaaagcccgtagaaactttagcaacatcggtgttgnacagatcgtggcggctaangtggtccacaacccantccttcngggttaaccttngggnggtcggtgggnttgttgcttacctncgacttgaaatttgcgggtttnttncgncgggattttnagtnggga

SEQ ID NO: 132992 - DNA, 559 bp, Arabidopsis thaliana columbia
  unsure (1)..(559): unsure at all n locations
gccttcagttgctggtttccttttgcaaaaggaactggactacctagttggtgctgtttcaaacccaaagagaccatttgcagccatagtgggtggttccaaagtctcatccaagattggagttattgaatcgcttctggagaagtgtgatattctncttcttggtggtggaatgatcttcacattctacaaggcacagggtctttcagttggttcgtcccttgttgaagaagncaagncttgaattggctacagaactccttgccaaagctaaggccaaaggagtctctcttttgttgccaacagatgttgtagttgctgacaagtttgctcctgatgccaacagcaagattntgcctgcatcaggcatttnagggccggttggatgggcctgggcattggnccagacttctttcaaaactttaacgnnntctggcaaacacaacagtnatttggatggcccttnggngtttcggatggaaanttnggtgacaaggggttnggtnacttnggnttagtaaaagggtncccgtaangggggggnctttgcccngtggaa

SEQ ID NO: 132993 - DNA, 358 bp, Arabidopsis thaliana columbia
  unsure (1)..(358): unsure at all n locations
gggctacgcagcagattgttgggttcggggctgcttgtnagttggctatgaaggagatggagtatgatgagaagtggattaaggggttacaggagaggttnctgaatggggttagagagaagcttgatggtgttgtggtgaatggttcaatggatagtcgatatgtagggaatttaaatttntcgtttgcttatgttgaaggagagagtttnttgatgggattaaaggaagttncagtgtctagtggaagtccttgtactagtncgagttttngagccntcttatgtnttganagctttgggntgtggatnaagacatggctcacacttcgattaaggttttggatttngtaggnttt

SEQ ID NO: 132994 - DNA, 535 bp, Arabidopsis thaliana columbia
  unsure (1)..(535): unsure at all n locations
gcgaacggctaggacttctcactttcaccgtttcacggcgaacaccatcgacggcgaagttaggattcgtnctttactcgtacatgaggtctctnagattgtnagacgctaatgaatctnaaggataataatcagtcaggagaagttggtcgtactctggtggaatttatggaagtagccatcacaatgattgtatacctcaaaggtttttacccatctncggcatttgaaaggaggagatatatgaatgtggtggtgcaaagagcaaggcatcctgaggtacgcggctatattcactctgctgcttctggacttcttccttttattgaaaaggggtcttgttgagagagtagcagtccgtgtttttcagcgnngggtaatgttccnttagnggggttcattttcaaggtcacaattaaacccgttttnccttctttagnagaaagggggcaacctgggtttcnccttaggcccttttaanaagnttccgccaaaaaccctntnaaacctttcccaaatttngtnggggancgtc

SEQ ID NO: 132995 - DNA, 488 bp, Arabidopsis thaliana columbia
  unsure (1)..(488): unsure at all n locations
gcttcttcacacgctcaagctcaccgatcgattcttccaatgctcttctaattcgtaagtaattttccagatccaacctttctcagattcgctctttcccgagaaaatttgaagaaacagagattcatcattttctcttcctctcaaaaatcagatctgcaaaactctcagatcactcatgggtttgatttcaaaccctacccgtttgattctcgtcgccaccatcttcttcctcgtttcttcaatctccggtcaggattctgtcgttgagaacaatgagagacaagaatctgaaggatctggtaaagagctttggtcgtcggtgggaatggttggtactgaacggaatttggaggttgntacttgttgtaggcaatnattnggtgctccttgggttttgaantcttgggccttnnntggtaacttgtncccagggggnttttaaatgcnttttgttttnggngttcntngggggntaactnnnancc

SEQ ID NO: 132996 - DNA, 555 bp, Arabidopsis thaliana columbia
  unsure (1)..(555): unsure at all n locations
cttcactgcaattcacaagcaaccttcaaactaaaactcgagagacaagaaatcctcagaatctttaacttaatggcgctcgaggctcttacatcaccaagattagcttctccgattcctcctttgttcgaagattcttcagtcttccatggagtcgagcactggacaaagggtaagcgatctaagagatcaagatccgatttccaccaccaaaacctcactgaggaagagtatctagctttttgcctcatgcttctcgctcgcgacaaccgtcagcctcctcctcctccggcggtggagaagttgagctacaagtgtagcgtctgcngcaagacgttcttcttcttaccaagntctcggtggtcacaaagncaagccaccgtaagnacctttttcacaggntttttttcgncgggggnngatgttnatttaaacccttttggggggaaaaccanatccgncggganttttngnaggngggaatnnaaangtntncacctttttaaaaaagtttttccttccggaaaagtttnggggaaaaagggtccccntttt

SEQ ID NO: 132997 - DNA, 341 bp, Arabidopsis thaliana columbia
  unsure (1)..(341): unsure at all n locations
cacaaacgcttattgtgttgctaagtatngtcaaaaangggtgagaaccagaaccattcttgacacattaagtcctagatggaacgagcagtacacatgggaagtatatnatccttntactgtcatnactctcggagttttcgataatagtcatttgggttctgcacaatccggaactgcagattctagagatgcaagantcggaaaggttcgaataaggttntctacactagaggctcacaagatctacacacattcatttcctctnnttgttcttcaaccgcacggcctcaagnaaacggggtgncctacaaatatctgtcccgttttacggnccctnt

SEQ ID NO: 132998 - DNA, 570 bp, Arabidopsis thaliana columbia
  unsure (1)..(570): unsure at all n locations
gtttttggttccatgaggatgactcaagctgttgtaccacacatggtgtctaagaaaaagggaaagattgtcaacgttggaagtatcactgttatggcacctggtccatgggctggtgtctatacagctaccaaagctgctattcatgctcttaccgatactctgaggttggagcttcgtccgtttgggattgatgtcatcaatgttgtcccgggaggaataagaacaaacatagcaaactcagctgtggcaactttcaacaaaatgcctgagctgaaactatacaagccttatgaagaagctatcagagnaagggcgtttatatcacagagggatgaatccaactcctgcagnaacatttgccagagncactgtagccgcagtgctgnaggaggatcnacccgctttggtcttggcaaggcaggtattcaaccctaatggggagtcatgtatcatatgccctaatggncaaaggttttttccagaaggaggttttattaagagnggtaanaggttggggtnagaagatntccctaaccggttaaaantttnaatgtatgacnttanntc

SEQ ID NO: 132999 - DNA, 569 bp, Arabidopsis thaliana columbia
  unsure (1)..(569): unsure at all n locations
cagagacgacgagagaaacaatggcggagtctgcgatccgaaccatcgtcgaatcaattcactcatcgccgacgcaagccgtcgtgtatctctccggcggtgcctctcagtctttaggttggttaatgtcagttcctggagcttcgaacacacttctcgaagccgtggttccgtattccatgatctctatggttcaattactcggcagggttccgaaccaacactgtagccaatcaatggcgaatgaaatggctttgttagcttataatcgtgctcttaagctttctaagccaggatgtgcggttnttggtgttggttttactggaacgttagcaacttctcgtccaaagcgtggggatcaaaaggtcctttttgtcggtaagagcttccaaccggatatggggaacttcaagtnnctctaacaaagggnaaaccgagccgagaggaagnaggtaaagtggaagccctganctgttcagnttttggntagggatccaagttttttaganattnctntggttactnttctaggggtannggcttaacccnttgnagagggctgnnantgc

SEQ ID NO: 133000 - DNA, 427 bp, Arabidopsis thaliana columbia
  unsure (1)..(427): unsure at all n locations
caaatnatggggtatagaagangctacgcaatcacatttgtagcccttgtggcggctctatggagcgtaacaaaagcacagccgagcagttcatgcgtganacactgaccactctctctccgtgcctcagctacatcaccggaaactcaaccactccctcacagccttnctgttctcggctcgactctntcatcaaatcttcgccgcagtgcatctgctcagccgtcaacagtccgatcccaaacatcggccttaacattaaccgcacacaggccttgcagctccccaatgnctgcaacattcagacgcctcccctnacacaatgcaacggggccactnggtccaacagcacagcttccngnaccctnaccgncggganaagaccccaagatgttgacaantanaccncaaccttatttgccgggtt

SEQ ID NO: 133001 - DNA, 376 bp, Arabidopsis thaliana columbia
  unsure (1)..(376): unsure at all n locations
tatcaggaagcctatgaagccgatgagaagctttnctcgtactggaaaacccgtaggaagacccagaaagaatgcggtgtcagtgggagcttctggacgacaagatggtgactatggagaactgaagaagaagtttganttgtttcaagcgagagctaaggatattgtaattgttttgaaatccgagataggaggaagtggaaatcaagcagtggttcaagccatacaggacctggaagggatcgcagagacaacaaacggnccaangcacatggaagaagtncancttccagacggagggtncacctttgaatccnggncccngttngcaagaggggtnantgggtcagnccagttagctagttggcanatgcaa

SEQ ID NO: 133002 - DNA, 278 bp, Arabidopsis thaliana columbia
  unsure (1)..(278): unsure at all n locations
aaagagcgaaaaggtgctctatttaatgaatggaagtnctcagaagcaggtgtggctgancagtctgagcctatggttcanaaacatgtnccatcagagcaagatcaaagctcaatnctaaaagtnatctncagccaaagagatcggttccnagcacgattacgggaaacagaagaggaaataaggcgattaaaagagaagataggttttntcacagacgaattggagaagaccaaagcagncaacgtcaaactctatgggnaaatccgttatgtcca

SEQ ID NO: 133003 - DNA, 420 bp, Arabidopsis thaliana columbia
  unsure (1)..(420): unsure at all n locations
agaatctattccgacgaatcttttcgggttgattttttggtctttaatttgaagggtttaggtgtggtttcgaagatnatggtagcgaatagtttcgatctatggcaaaaggatgttttttcctctgcagctgaggaggttcaagaatctcctgatataatggaatctccgtataggttgtggtttaaagagaagagagacggtcgagtatccgtagaatcagacgagctctgcaaagaactccaagctgctttgagcactgctaaatggcagttggaagagtttnanagggcagtnagcttaagccatngaaattttcgagatgacactaccttaactaggcattaaacagtttgttnnccgcntttgaaaaaccnagctttntnaagtgggatnnacctctcccntnngtcggttaag

SEQ ID NO: 133004 - DNA, 405 bp, Arabidopsis thaliana columbia
  unsure (1)..(405): unsure at all n locations
aagagattgtntgagattaaggcattgttttgtnatacatcagcttaagctatatcatcatcaaaacatgaagaatgctccatgtaaagagaggacaaggttgcagatattaaagaaaagtncttggtggttcttttgggaataaaagaattagattgantggctacatgaagaaaggagatgtgtcacacgttttggcacacttncttaagagttatgtcacagaaactcattcggatacattagaacgtgtgagtgaatcaaagaaacagtgnagagcatgcagcataactcatagaagagaagctgagctttacaaangacaaagtggncatcctttttttnagttncnggtgangctatgttcaagggcnggttggnctttagggtattgtagnctcaant

SEQ ID NO: 133005 - DNA, 365 bp, Arabidopsis thaliana columbia
  unsure (1)..(365): unsure at all n locations
ctacnccaactcctgatgctaagatggttaaagaagggcaagttgttatnagagctcggaatcttaaagtcggtgctantttnatcccgccgaaatcattccgngcncggagattctacttcagcaacgaggagaatggtttgctacatgtncccaagggagaagctcaaaatccacaagctgctatgttttctgatcctaacatggccatggatatgatgaagaaaaatctttctatgattattcctcagacactcacttttgcatgggtcaacttcttcttctctgggatttttttgcagccaaantcccattttcccncttgncttcanaggnttcnagntcaattgtttacagaaatgggg

SEQ ID NO: 133006 - DNA, 407 bp, Arabidopsis thaliana columbia
  unsure (1)..(407): unsure at all n locations
cacggctagtcacagcatctatgcgtctnancttctagatatattggntccanatgggaagtttgtatcgcaacgtttttaccgggattcatgcattctttcagatggtatttataccaaggatttaaccgttttgggtcttgatctagcaaaagtggctatagttgacaactgtccacagattgcaaataaacaatgggatccctattaaaagttggtatgatgatccaactgatgatggtctgattacattacttcccttcttagagacattggctgatgccaacngatgttcgtcctgtcatttgncaagagattcggtaaccaaggantaagaaatctnttccnntttgttttcccactattatcttnggatntgcagntttctgggatttccttttaancag

SEQ ID NO: 133007 - DNA, 276 bp, Arabidopsis thaliana columbia
  unsure (1)..(276): unsure at all n locations
gaaaccacttctngtctccaagacgaaacagttttntnctccttattccctgactcatccctctcctccgccgctcttcagtcacttcacttagaaatcatagatttngtttctccgtttacttntccttacatatggcagcacgagcctttctctctctcaatcgntctctcttcctctngtgcttgtaccaatactgctatacctcatctccacgggnagctcaagtacggngacaatctngaagacgaatggttcgctgtgttttaactnttt

SEQ ID NO: 133008 - DNA, 397 bp, Arabidopsis thaliana columbia
  unsure (1)..(397): unsure at all n locations
tgtacatgaatcttgtgactatattgttgttcaaatagtttttaaagctttgtttttgctacatttgatatccttaaaacctgaagcaaaattagtaaaaaaactcaaatcaaatgacattatacaacaacacaattttagcacattgattcagatttcnctcttgtncgcaatctgagctcgaacaatctgctttctccattcgtgaattggtacagcaggaaagcctccaaaatctcctggttcagtgatgtttctagtaacacaactattagctgcaagtngnaccttggatacaatggaggcatggtctcggacagcagctcgtcctcctnaaggcnccatagtcaccnantcgttacttgnncccagcgntgnctctttgnnccccaagnga

SEQ ID NO: 133009 - DNA, 402 bp, Arabidopsis thaliana columbia
  unsure (1)..(402): unsure at all n locations
caaagcagaacatgattcacctatggggtgccattaagcaaccgantgttttnttccccaccttatttatatnctaatggcaagccacaccacactcagattctncaatgttttacttcacaacgaacaaactcggttttaccccggagtttctgggacgagttaaacttgtnacctcaattgcntcattgcttggngtaggactgtacaatggattcctgaagactgttccattgagaaaaatctttntggtgacgncaattttnggcacgggtcttgggatgactcaggttatcctcgtgtcaggttttancagccagttggggattagcgccgaatggttttctataggaggctcttttantcctaacagccttgctcaggnttcattnatgnncgggt

SEQ ID NO: 133010 - DNA, 437 bp, Arabidopsis thaliana columbia
  unsure (1)..(437): unsure at all n locations
cccgagtntgtttctttaccttgtgtcaaagttatgtatctagatatggttaagtttgccaacgatttggctttcgaaatgctcatctctggctgcccagttctcgaaagcttaactataaagaggagtgcttgtnacaatgtagattatttacgtgtgtnctctcagtctctattgagtttcacccttgttggccactgtaacgaggatatggttaaagagcaagtagttgcaatagatgctcccaggcttgaggatctcaagctttattgtcatgaaactgcaagtttcataataaagantccggcttccccttgttaagnatgggacaatnggcatttatggtttaacttgtcttccggaccagaagttttgaccccnaaatnntccntcccaaagggggaattntggttccngnaatttntncctnggggtcc

SEQ ID NO: 133011 - DNA, 342 bp, Arabidopsis thaliana columbia
  unsure (1)..(342): unsure at all n locations
agatccactcatgtctagtatcttgggcgatcttctccttgacactaatttcaactcagcttcaaaggtccagcaaccaagtatgcaatcgcagattcaacaaccccaagctgttctgcagcagcctncttcttgtgtggaattgcgcccacttgataggacagtatcctcaaacagcaacaacaatagcaacagtaataatgcagcagcagcagctangggtcgtatgcnttggacgccttgaacttcatgaggtttttntttgncgctgttaaaccagntcggtggcagtaattgaagcannctccnaaagggtgtcctngaagcntttnaaagtncgga

SEQ ID NO: 133012 - DNA, 337 bp, Arabidopsis thaliana columbia
  unsure (1)..(337): unsure at all n locations
gttagtgttcgtgtgttctctaaaggaaaatcctgaagaaaccaattgtaacttgtacactgggaaaatataagttttcctgaggagtaaaagaggggaaaaagagaatgagaatagtcgggttaacgggaggcatagcgtttgggatgagtacagtgtctaacctcttcaaggctagtggcattcccgttgttnacgctnattgttngttgctcgagatgtattnaagaaaggaagcggtggatggaaaanagtcgtttcagcttttnggtnaggngattctncttcctagtggagaaagtggntcggccaaaanctcgggcaaganttgtggtnc

SEQ ID NO: 133013 - DNA, 329 bp, Arabidopsis thaliana columbia
  unsure (1)..(329): unsure at all n locations
actaaatcaattaaagaggtttctncttatagaaatnaatttntctnattcttccttgtcttctgcttcattcatccatttccagtgctcagctaaccccaactttctatgacaatacatgtccaagcgtctttaccatcgtacgggataccatagtaaacgagctaagatcggntcctcgtatcgctgcaagnatccttcgtcttcacttccacgactgtttcgtcaatggctgtgatgcatcgntcctgttagacaacacaacatccctttcgaacagaggaaagatgcnggctccaaaanggcaaactnnggctcgnnggattttc

SEQ ID NO: 133014 - DNA, 302 bp, Arabidopsis thaliana columbia
  unsure (1)..(302): unsure at all n locations
attaatatgaaacgcaaaaagaatttttcntcctctctctcttgccatgttttctccgatggcgaaaggagatgagatacgtcttgatcatcatcattcggcggtggcttatnacnccggtggtctccgttcacagtcttccgtcttcgttaaacaggagaagtaataaaatctcagtattcctttcctttttgttttatgatctnctaaagcttgtngatctttgtncnactgatttggatttnagatcttaatagtttatctcgaatctggntatttatnttnattgggtnttatgtttt

SEQ ID NO: 133015 - DNA, 438 bp, Arabidopsis thaliana columbia
  unsure (1)..(438): unsure at all n locations
agagcagaagtgagcaagatctctatcaccacactaatggccagatgtgaattcattttgagtagatttttaatcgacgaaaataatctaggcaaccgtccaatcccaacagctagacttgaagagattatctttacccnccaagaactttaccgcctcagcattcatcctgaggttgcatctgtncttccgttgcaacnctacctgaaaaacgttctacgcgaagataaccgtgacacccgtgcacacctacttgtcctttttccctctctgtgcgagattgtgttatcaagggaaatncgggtnagagagcttggtgcaaattttagnttcgtgcagttgctacggaactagggcctagaaaaggttagtntattccagttgatggcaattgnttggggnatnttttttagcngttttnaggtnttannatnagnt

SEQ ID NO: 133016 - DNA, 402 bp, Arabidopsis thaliana columbia
  unsure (1)..(402): unsure at all n locations
ctggcaatgccaacgtctcaaaagcaataatgagaccttaacttcaaatactttttttacttttggattatcgaatcagcttcaagaagaaccctttgtttatttttcagctctctagtattttctcatgcttagtttccttcttttaatcactatggtgactagaactctagaagtaaccatgggaataagnnaaagtaaaaatctcaaatttgcctaatttgtcaaataaaacccctaaatgacattctttgagtcgtaaactcataaaagtcaaagtgnaacttatatatacangtnattatgtgtcttcattcccnattgnaacccnaaaatccctganttcaataaactcgggttncggnatttttnggtttatttttgncnnttttttaaatntca

SEQ ID NO: 133017 - DNA, 387 bp, Arabidopsis thaliana columbia
  unsure (1)..(387): unsure at all n locations
gtgatgttgagtatcggtgcttcgttggaggtctagcatgggccactgatgacagagctcttgagactgccttcgctcaatacggcgacgttattgattccaaggtctgtnacacgccgagatcggactccgagtgatatcgatgatctcatcctcgacggatctgttccgatcttgtgtttctctgtnacttgattcgattactctgttacnattctcgtnctttgtnactactactactactactgtaacttgtatttncccaaatcggtacgttcatcttcctgcttctgtnagcccggagatcgatcggattttttttgtantttggtatatntggttgtngatctaaanncttttgttcantttttgttggnttgtttttgc

SEQ ID NO: 133018 - DNA, 376 bp, Arabidopsis thaliana columbia
  unsure (1)..(376): unsure at all n locations
tcaacagcatcaatgcaaccaggactagtttacgagactactgaaactnactacctgaacttnctctgttactatggatataacgtaaccacaataaaggctatgtcaaaagcttttccagagaatttnacttgccctgcagattccaacttagacttgatctccaccatcaattacccgtcaattggaatctntggattcaaaggaaatggtagcaagacagttacaagancagtgaccaatgttggtgaggacggtgaggcggtttacacagtcagcgtgganacaccaccagggtttaacattcaagtgacgccngaaaaactcccantttncaaaagntggtgagnggttgncatnccaggtggtagtgnnt

SEQ ID NO: 133019 - DNA, 506 bp, Arabidopsis thaliana columbia
  unsure (1)..(506): unsure at all n locations
tgagaaggtgcaagtcgctcacaagagaagaaatcgacactttttggaaaacgaagaagaagaatgaagaagaagaacatgttcaagccttttccaagttggtaactcaggttaaaaccaaactttaaatttatttatttcttatttcccaaggaaagagacaatatttctactatcagtgatcttagtgaaaatcagagttcgactttaaaatttaccaaaaattattaaaatgatctaaaaaaggctttgaaattntttgcaggaaggtgcacaaagccaagcggaagagaagaagagtgtagatgatctttttgaggaccaaagcaagagtagtggatggtaatttttttttttntgcaaaaaccaatctcgtaacctaagtcctttaaggggtatttgnanntgntaacctnntgngggttggccaggtnggggaaaaccnncttggggggcctttanttanccccngggggaaagnggnncgcccgcccaccttcgggnng

SEQ ID NO: 133020 - DNA, 469 bp, Arabidopsis thaliana columbia
  unsure (1)..(469): unsure at all n locations
ctgcttggtccatcagcattcttccagattgtagaaacgttgttttcaacactgcgacggttgctgcaaagacatcacatgtgcaaatggtgccatctggttccatattgtactcggttgctagatacgatgaagatattgctacttatggaaaccctgggacaatcacagctcgtggattgttggagcaggttaatgttacacgagatacaactgattacctgtggtacacaaccagtgtggatattaaggcatcagaatcattcttgcgtggaggaaaatggccaactcttacagtgggttctgcagggcatgctgttcatgtgtttgtcaatggncattttacggntctgcctttnggaccaggggaaacagnagttttcatttaggtccccaggcaatttcggggnggggcttacaaatcggactctgggtttannattgggttcccgattttgncccattttgg

SEQ ID NO: 133021 - DNA, 455 bp, Arabidopsis thaliana columbia
  unsure (1)..(455): unsure at all n locations
caaatttacaatctcttcatctttcttcattagatcacaaaacttcactataacctaacatggcaacgagtcatcctgatccaaccacctctngccacgtggcagtaatcggagccggagccgctggactcgtagctgctcgtnagctacgtcgtgaaggccactcagtagtcgtcttagagcgcgggagccaaatcggaggcgtgtgggcttacacctctcaagtcgaaccagacccgcttagcctcgaccngacccgacccgtcgtccactcaagcctctacagatccctacggtaccaacatccctcgagaatgcatgggnttnaccgactttcccttttgggnccgaccacacgngggtcaaggggtccgaggagncatccggttntantgnggtnttgnttacctgngngattttttaaanattcggtatnggggaattgttaggttnga

SEQ ID NO: 133022 - DNA, 454 bp, Arabidopsis thaliana columbia
  unsure (1)..(454): unsure at all n locations
gactatccctcttaacaagattgaggactttggtgtacattgcaaacagtactactcattggacatcacttatttcaagtcatctctcgatagtcaccttctggntctcctttggaacaagtactgggtgaacactctttcttcttccccactgttgggcaatggagactatgttgccgggcaaatatcagacttggctgagaagctcgagcaagcggagagtcagctcgctaactcccggtatggaggaattgcgccaccggtcaccaaaggaggaaagaggatgagcctcaactcgcggagataactcggggtagtgcaaagataactntcgagcaggtcctggctaatgtcacaggttttcaaaggcatnttgttaattccgttcgtaatccanaagtttttgcggntatngtccaggcccntnttaacgggagtggntttttttttttta

SEQ ID NO: 133023 - DNA, 406 bp, Arabidopsis thaliana columbia
  unsure (1)..(406): unsure at all n locations
agaccaaagtcgagtgagtgctttcatcttcttcttaagcatctatggccgcgtctntaacatctnttccgaccggtttttgtnttagccatggtgatgaatgtngcaaccgttcacctaccaaatnaccatttccaggccatcatcctctggctgggaggaggaagggtcactngctccattacgaacgtagtacagtgaggagattggttgtnacggcggcgacggagggatctaaaaaatctaaagaaagtgaaccgncttgggcgaatcctgactcagatgagccacctccttgggctagnaacgaaggtcgttcttctacgtcccaacgagagctttnagggttnccttncctttgtttatcttnctagcttccgcggttaantccattnnctgctaattg

SEQ ID NO: 133024 - DNA, 333 bp, Arabidopsis thaliana columbia
  unsure (1)..(333): unsure at all n locations
gtgggatcaaccaatgcggactccttcccctcagctggctgcgcctcttgcccctattcagcaatcaaactcatccacatatgtttccgactatggagcagaggcagaagatggctccggttttaaagactttnagttcaaatcagtgtacgtnaggaatttnccttccgacatatctgcttctnaaatagaggaagagtttaagaacttcggtacaatcaagcctgatggtgtgttcctcagaacccgcaaggntgttatgggcgtatgtnatgcattttttgagttttaggncaatgacttncgcttgagaatgcngnttnaggnttntcc

SEQ ID NO: 133025 - DNA, 355 bp, Arabidopsis thaliana columbia
  unsure (1)..(355): unsure at all n locations
taatcttgcggggcttaatccaattcctcaactaagtccaccaccacaatctataacgccactaaaaggaaaaggcaagtcatcacatgttttgccaataataattgcagtggttggttctgcagttgcgctangttttttgttcttgttgttgtcctcgttgttatgaagagaaagaagaagagcaacgagtctagtgtagataccacgagcaagccttctanggncctcgtcatnggggtccncttttgaacgggcaaggttcttcnaaaatncaaaatctgcctcatctnttccatcagatctnttgccgncggtttntccatctcngggaatcaaaatnccgccncaaaat

SEQ ID NO: 133026 - DNA, 469 bp, Arabidopsis thaliana columbia
  unsure (1)..(469): unsure at all n locations
cttgaaagagcaatggagacaacccgataacttgcagaagacagatgatccanacattatgatatatggcagagacgagctgttgagtcgtttgcaatttnaggctcaagagattgtcaaagtaaggaattctagagcagcatccgtatcatcacagtcatggactggtgaatatcaacgtgatcaagccgtggttggatttnttgggtacccaaatgttggaaagagttctacaatcaatgcattggtgggtcagaagcgaacaggtgtcacctctaccccaggnaaaacaaagcatttccagactttnatcatctctgatgagcttatgctatgcgattgccctggtttagtcttcccttcggtctcaaagctcaagntatgaaatnattgcttctggngtnctttccgttnaccnggtgacggggaccgtgaagtattcaggtggtggttacaaggtccccgccgt

SEQ ID NO: 133027 - DNA, 459 bp, Arabidopsis thaliana columbia
  unsure (1)..(459): unsure at all n locations
agcccatccgaaaatacgatacttggcaagaacaaagccgcgccaatccaaaagcccaaactgagatggcactgcttcaatccaatcttcgtcttcatcatcatcatctccattaaagctgcttaagaatgcgcagctcactctaggtctgantctcagatcctcctcctnctcttctcttccattcacctgcaactcccgcttctgctctcctcctcctccttcttcgtcctttagactctacaaacgattccatttccttaaancatgctcttccctaaagcaaaccaaggaagaagaagcaacagtctcttccatctaccggtccgnctccttcagagtcttccggtggttcttcnaattctaaaattcactaatngatggnaaaacggcggaggntgnntgntaaagtntgagaggcgattgatgatggnggatcggaaaggtnatncttgtatt

SEQ ID NO: 133028 - DNA, 451 bp, Arabidopsis thaliana columbia
  unsure (1)..(451): unsure at all n locations
tcaagaaaaaacaacaatcatgacaaaacaatgtcaagctctctttctactcctctccgtctcctacctcttctcctcagacctcacggctgccaccgtcaccgcggccggaacttctacaaaagcactaaacttcattcaatcttcttgcaaagttacaacgtaccaatccctgtgcgtggacacgctctcggtctacgcaaatacgatccaaacaagccctcgacgcctcgtggatgcagctatcgccgtgagtctgaaacaagcgctgtccacgaagctcttcatctcacacctgaggaagagccagttccaaacccttgcagacttgccgaccaacanccgnaacatacactncagntgcgcagtgttctgtcgaagnanctccaagaggtggtgaatttgtaacaagttggncccgattgcttgttttacacaaacaatgntggat

SEQ ID NO: 133029 - DNA, 489 bp, Arabidopsis thaliana columbia
  unsure (1)..(489): unsure at all n locations
tggaagagatacaacaacaaacgcagaaggaagaacaaaagcaccgtgaagaagaagaggaggaagaggaaggtccgcctccgggatgggaatctncagttnttcctcctccaatcgtcaccatcaccgccgccgtaaaccccaatcccaccaccgtagaaattcccgaaaaggcccaaatggtatgtggatcttgcaggcgtttgctttcttatctaagaggatccaaacatgttaagtgctcctcttgtcagactgttaatctcgttcttgaagctaaccaggttggtcaggtgaattgcaacaattgcaaactgctacttgatgtatccttatggngctccagctgttagatgttccctcctgcaaattntntcacagggtaatcaggtggtatgtntttcacaggntgggttttttttgctccattgnccaaaatcanaactttggaannngttngtaanantttttnnggntcccngggaaagg

SEQ ID NO: 133030 - DNA, 507 bp, Arabidopsis thaliana columbia
  unsure (1)..(507): unsure at all n locations
gactctcgtgatcatcgcctgaaaaaaatttgagataatggccagaaagtncttcgtcggaggcaactggaaatgtaacggaactnctgaggaggtgaagaagattgtnaacactcttaatgaagctcaggttccttcacaggatgttgtagaggttgtggttagccctccatatgttttttttcccctggttaagagcacattgaggtctgacttttttnttgcggcacaaaactgttgggttaagaaaggaggtgctttcactggtgaagtgagtgcggagatgcttgtaaacttggatattcccatgggntatcccttggtcactctgaaaagnagggcaatcccttanttgnatcaagcgagttcntcgggagcaaaggttgcctattgcactttctcaaagggtttgaaaagtgattnctttgtgttttggttanncccttttaggnagcggggnagcttngatccnnccccttggnatntttttggnttccccaaaaccaa

SEQ ID NO: 133031 - DNA, 320 bp, Arabidopsis thaliana columbia
gagggaatcgttgttcctgatccggttcaagcactctgttccagatggggacaagacaagttttcatacggttcttactcatatgttgcggtcggatcatcaggagatgattacgatattttagccgagagtgtcggtgacggaagagtgttctttgcaggtgaagctactaacagacaatatccagctacaatgcacggagccttcttaagtggaatgagagaagcagcaaacatacttagagttgctagaagaagagcgtcatcatcggctttaaatcctaaccagacctgcatcgacaaagaagaaagaggtagacg

SEQ ID NO: 133032 - DNA, 320 bp, Arabidopsis thaliana columbia
  unsure (1)..(320): unsure at all n locations
tttttctttttttttttcaactgtttcttagtatgactcttctcttgttgatcttcacctccttcttcttcattgtcttctgttttcggtttctcttcatttagagcctcgcttgaagcagacgaaatcgatgacgagttaggagtcgccggtgggtttatcaacaaatgatccgaacacaaagactccacctttgacgtcactaattgctctgacggtggagcttgaatgatacttgaagacagtttcgccgatggtttgcgntttcggtttncgggttgagaccgtttnggaggaagggaagggaatnagggnggaaa

SEQ ID NO: 133033 - DNA, 320 bp, Arabidopsis thaliana columbia
  unsure (1)..(320): unsure at all n locations
ttttttagaacaaaacgacgtagttgttaattcgccggtccaatatttatccaggnaaaaggaagaaaatgtgtaaaattacatttaaaaccctagactaactctgagaaaaccgccgccgttttgcattaaacaaaaaggttaagcaacttggtcgtttctcctcctccgttaccgtacacatcacccttgtcacaaaacgccgtcgtagtcgtcgtcgtcccggagtcctctgagttcatcgacggtgttactgatcgccgccgtgtagaagaaggtgttgtttgcttaatggggaaaattagggntgagagattaga

SEQ ID NO: 133034 - DNA, 201 bp, Arabidopsis thaliana columbia
  unsure (1)..(201): unsure at all n locations
ttttttttaacattgcaaactacacgttttccaaaatgtagttgtcatggagatacgtataacaaaagaggttttcgaaaagtaacaaaaaaaaaaaaaatctaattacaagantaagcgcttcacaagaaaggcgcagtcaggngattgtttcaagngacgcagaaagatgctgtctagnctgcagaaatacccaaagct

SEQ ID NO: 133035 - DNA, 257 bp, Arabidopsis thaliana columbia
  unsure (1)..(257): unsure at all n locations
ttttttttttaataaaatatttggaataggtagcaaagtttnaccacacatagctccttaaactcagacacttagcagtgacatatcatcaccacttaaactccttaaaacaacaacacactaaacagttcataaacacggaagtcacaaagcagctggtcattaattgacattaagatgggggaaaccccaaaacaccaaatcatcaagccgntcattggtcggggaattcccaccatgaaccaacaaaccttcct

SEQ ID NO: 133036 - DNA, 306 bp, Arabidopsis thaliana columbia
gagggagcttaagaggtttaaaatagctggtgaaccgtttacgaaagagttctttgctcttttcgatttggtttacaagcaacaggttatgatgcttgaggagcttcataagttaaagagaaaactcgataagaggcttaggaatatcaaaacatggcgaagggtatcgaatatggtgtttgtgactgcgtttgtctctgtgcttatcttctctgttgttgcagccgctgtggctgcaccgcctgttgtggcggctatagctggtgcattggctgttcctgtaggttctgttgggaaatggtgcaa

SEQ ID NO: 133037 - DNA, 306 bp, Arabidopsis thaliana columbia
  unsure (1)..(306): unsure at all n locations
gagaacctctttcctgctcaaggagatgttgctctctggatttcacccaaatcacattacgnttgctagcattctccctctttttgctcgggtgggaaacctgcaacatgggaaagagtttcactgctacatcctgagacgccaaagctacaaggactgtttaatcctgtggaactcccttgtcgatatgtatgcaaaatccggtgaaatcatagctgcaaagcgngtatttgattcgatgaggaagagggacaaagtgacatacacttctttgatcgatggatatggcaggctgggtaaaggaga

SEQ ID NO: 133038 - DNA, 267 bp, Arabidopsis thaliana columbia
  unsure (1)..(267): unsure at all n locations
aaatgaagcacatcgggtccacatgggacagcgcaagttagactcaagattcgtaccatccacgactgagtgaagtaggacgaaagcaaccaatctaactaaactagatagaataatgtttcaactaattaaactataaaccttgttcgttctgaactatctcctttcttcgacgttcactgggttggcgtgactggcttaaactctctgaaacctgctattatatcaaccgntggactaactatctcttacatatctctatatagg

SEQ ID NO: 133039 - DNA, 480 bp, Arabidopsis thaliana columbia
tttttttttattaccttcccagtgaggtccattgcataggaaagaatgaagctcacgtggcttatgcttgtccctaccttcctttattttttcctgatggtgcttatgggtggaagactgacctgagtcatccttgtcaccactgtgtcccctttccttctctcgccccccttttccttttttcctgggaaacaaaaatactgaatttgctcgtcactcggtctcatacttcggtcttatgctttcaggacttgtgcatttccatcgtttactggatcggtggactacctcatggattgggtctttggcatgacagattcttttgataggaacgcccaagcgaagaaaggaaaagaagtaaggccaagtcaagggaattaaacgggcagtagactaaggatcaaacattatagataatctattctatataggggtatgtaagagatagttagttcatcggttgatatatagcaggtttca

SEQ ID NO: 133040 - DNA, 209 bp, Arabidopsis thaliana columbia
tttttttttaaggcaaaatgatcctttaaatttaatatacaagtttggttagaaatggactcccaacaaaactcaaatatacaatctaagtcctcactcctcggtgggtcttcaaatttagaaatagaagttgatacacacacacacatacataaaggtaaaaagtaaaaaagttgcaataaaactgccactagagaaggcaacattac

SEQ ID NO: 133041 - DNA, 421 bp, Arabidopsis thaliana columbia
  unsure (1)..(421): unsure at all n locations
aggagatgtacgaggagaaaatcaaacgattgaaccttagacatgtggcattccgtacaatgtggctcgcagctgaagattacccattgcttttaggttctgcagatcttggtgtctgcttacacacttcctcgtcgggtttagaccttcccatgaaggttgttgatatgtttggatgtggcctcccagtttgctcggtttcctactcatgcattcaagaactcgttaaagatgggaagaacggacttttgttttcatcttcatcagaattagcagatcaattattgattctcttcaagggttttccagggaactgtgatgcactaatgtcgcttaaagcgggtgcaatgggagactggttcttcggggtcgatggggtacagagtgggaagattntgcaaaacctttaatcactcagtcg

SEQ ID NO: 133042 - DNA, 543 bp, Arabidopsis thaliana columbia
  unsure (1)..(543): unsure at all n locations
ggcgaagatgaagtacaatccaagagtgacctcttctcgcaggaagaacaggaaggctcatttcacagcttcctccagcgagaggcgtgtnataatnagctctcctctctccaccgatcttcgtcagaagtacaatgtcagatccatgccgatccgtaaagacgacgaggttcagatcgttcgtggtacttacaagggacgtgaaggcaaagttgttcaggtttaccgtcgcaagtgggtgattcacatcgagaggattaccagagagaaggtgaatggaaccaccgtgaacgttgggattcagccgtcgaaagttgtgataacgaagcttcgtcttgataaagataggnaatcgcttttggagaggaaggctaagggacgtgcactncttgncaaggaggagggtnctaaggtttnttcttaggntnttttcagaccgtngttaanttggccgaaaaanaanctttttaaaggttntccttttgggttttnaaccctttaattcagtttgtnttgntttcaggnctttggctacagnttttc

SEQ ID NO: 133043 - DNA, 547 bp, Arabidopsis thaliana columbia
  unsure (1)..(547): unsure at all n locations
gaaagatggcttctngggtggtgaggactagtatgagacttcgaaggagggatggtgtgactcaaaacgaacaccagggagatcaacaagtggctgaccaagctccaacggtgcctcanattgtggctactcctcctaggatcaatgtggttgctattgaagatgatgatgatgttgttgaatcaactgcttctncttttnctcaggctaaaaacaaatcgagaagtgcacgcagaggatcacaagtagttgatgtggagtcagctggtgctaatagatccacaaggcgtcgctctgatcaaactagtgttgactcagttgagcttaacaagccgagaaagtccaaggctgtggctcctcctgtagagggaccaaaatttagctgtccaatctgtctgtgtccattactcagnaggtttcaacggaatgtggncatattttctncaaaaagtgataaaggatgcgtatccctccaagctaaatncccncatttgggaaaaaccctttaaggccttttcggggttccttcaacncnggtgattntntt

SEQ ID NO: 133044 - DNA, 439 bp, Arabidopsis thaliana columbia
  unsure (1)..(439): unsure at all n locations
tntcttactcgtgccagccactcgcatttntccagatttaattatccttcctcgaaacaagtagatccacgattcgttgctgcgatcggngttattatcgtnagctctctcgtttctgtnctgtnagcttagctaagatgacgaagaactacccaaccgtnagcnaagattacaagaaggctgttgagaagtgcaggaggaagctcagaggtttgatcgctgagaagaactgtgcacccatcatggtccgactcgcatggcactctgctggaactttcgattgtaaatcaaggactggaggtccattcggaacaatgaggtttgacgctgagcaagttcattggngccaacagtgggtatccnaattgntctnaaggtttttgggccccatttaggggggcaattcccttaccatntttttngctgntttccaananga

SEQ ID NO: 133045 - DNA, 491 bp, Arabidopsis thaliana columbia
  unsure (1)..(491): unsure at all n locations
cagcaacgacgttaaattctctgtttacgaccaacgaaacttcaccaactacggcacgattcaccccggcggtgctgactcgttcaagaaatattcacaaaacggtaacgcagtaaccgactctttccggcgatacagccgagacgccgccggtcacgaagataaattcacaggctacgctgataacagcaacgtcgtcgaggaaaaattcaattcttacggcacatcagccaccggcggctccggcgattttaaaaactatcaatccggtgttaacaatccgacggctcgtttcaaggcgtattccgacgnaggaaatggccgtgctcagacgttttaaaacctattactnacggaggccaaattccggacccggtcaannnttttaccattncgggaaaaaacggtaacgggggctccaaanggggttntttttttnanggggggtncccctaancnaatcgggtctngnttttaaaaatcggggnnag

SEQ ID NO: 133046 - DNA, 482 bp, Arabidopsis thaliana columbia
  unsure (1)..(482): unsure at all n locations
gaaccactattcagatactattggcaatcactacttggtatatgctttggttatgaaacagatatgcaaatnattccctttatcccgggtgacagtagaggggcagaacaaagatgggtctagtgtacaatatgatcaaatctgcaatgctctcttaccacaaggtctcaacccactctctgttccgccaaaagagctcgcagcctcattagggtacatggtgcagcttctgaatcttgttgtccataagctctcagtgcctgcacttcataacttgggtttcgcgggttcttgttcaagaatatggggacgagattctttattgggactcttatccatcttntccaagcaatgggggatccccttttgtaccatccatgntcactactcatttgaagggaaagttcatggcgggtnggggttcaaccnattttgggggnacctcggtggaaacaggttggangtttngagngggtttcnna

SEQ ID NO: 133047 - DNA, 478 bp, Arabidopsis thaliana columbia
  unsure (1)..(478): unsure at all n locations
aatcttcccactggatatgtcagcctctgacatttctaggctgaatctccgaattgaggcctatattacaagagaagacaagaagcccgagacaactgatgaccacagacttcttcaaacaaaatggtttaaaccgcagcctctagactctcctatctcacctgttcttggaccaaacaacttcctctggctcggagttgtgatcttatcatcattcgtcatgtttctcttgntcatagggatcgtcacacgttactatatataccctgttgaccataatacaggntccatctacaaatttntcatatagggggcttttngggcatgttttttagggaagtgcgngcattttcaactttttccagtgtaggtttttttttggnngaagaaacaggccaaagaaggggntnanggggtcaaggatnngggtcaaagggggggggtttaannaaccccctttttttnccnggntantgga

SEQ ID NO: 133048 - DNA, 530 bp, Arabidopsis thaliana columbia
  unsure (1)..(530): unsure at all n locations
cacaaaatctgccaacagtttttgtctcattcccgatcagatctcaacgacgacgagccatggcttcaactttcagcggcgatgaaactgctcctttcttcggattccttggcgctgccgccgctctcgttttctcctgtatgggagcagcgtacgggacagcgaagagcggggttggtgtagcgtcgatgggtgtgatgagaccagagcttgtnatgaaatcgattgttcctgttgttatggctggaagttttaggtatttatgggtttgatcattgctgttatcatcagtaccggaatcaacccctaaggccaagtcttacctatctattcgatggctaatgctcaatctctcttccggtcttgcttntgggcctnnttggtcttncgccggnatgggctatttggaatttcggcgangccngntgttaagagcgaattnancaacaancnaagttgttttnggaataattctaaattccaacttttgtgaagaattnccnttacggnctaatttttgaataacccnc

SEQ ID NO: 133049 - DNA, 502 bp, Arabidopsis thaliana columbia
  unsure (1)..(502): unsure at all n locations
aaaatggagttcttatcgaaggttgtcgatgagacacttcgagtcataacattctcactcactgcttttngagaggcaaagactgacgttgaaatgaatggctatttgatcccaaaaggttggaaggttttgacatggtttagggatgtccacatcgaccctgaagtctttccagatccaagaaaatttgatcctgctagatgggataatggtttcgtaccaaaagctggtgcgttccttccttttggtgctggaagncatctatgcccgggaaatgatctggctaagctcgagatttcaattttnnttcatcatttcctcctcaaaatatcaggtgaacggngcaaccccgaatgtcccagtggatgtatntggcctcataccagaccaaccngttaattgcttggcaaggatttaggttttcagtaaaacaatggttttaaactcnncgntaaggtntnngtggaatgccgtaaggttggttntcagttataggggtnta

SEQ ID NO: 133050 - DNA, 525 bp, Arabidopsis thaliana columbia
  unsure (1)..(525): unsure at all n locations
tgtgcatctagaaaacgccactgtccgggctgctgctgtttccacacttgcaaagtttgggtttatggttgaatccttgaagccccggattactgttctattgaagcgttgcatctatgacagtnatgatgaggtgcgttcctagtcttagtctagaaaagcattgctgtttctgtatgtctgtttgttttgagtcgttgcatcatcaaacatgcatgcatgtgtttgcctctgtaaacattttcggatgcatgcaatcaagtngtttgatgattccttccttgctcatgagtcagacatctttttatcttaaggtccgtgatagggcaacactatatttgaggtgttcttgggtggtgatggtactgttgacactgtaaagngggcaaggatttccnattttggtccccnggnggtccccctaggcaaacatgggancnagtcttaaggattttnnggccccctnaaggaggttttgnnncaacnccgaccnaaggngggnaaatttanncccntttcagtgtc

SEQ ID NO: 133051 - DNA, 532 bp, Arabidopsis thaliana columbia
  unsure (1)..(532): unsure at all n locations
tgctaatttaactccaaactggttctttccgttatacccactcgacagcaaagcattcaatgtctactttgtcgaccacaacacttcagtaatgctatcctatgtcaagaaacccggcgtcacctttgtttaccatccggatttggctgagaacaactcgacagggaaaaagataactccgcttgaacagctagaaccatttccagaagatgagagattcgatttccttgcttggtttgaggaaacngcgaaatacgcagactttgtagtccttaagatgaacacaaaccaagtggaaatgaagttcctaactgttttactggaaacaggagtcatatgctacgtggatgagcttttcctccgntgttncaaccacaagtnagactgcatcaacatgcttcaaactctgagagncanaggtgtgtttgtncacaatggtgggaggcttaccaatgtaaacttaatcttggctcgcctnggctntntnggngttcgngctgnttgcnagtgaagncatnncttctgggttcat

SEQ ID NO: 133052 - DNA, 532 bp, Arabidopsis thaliana columbia
  unsure (1)..(532): unsure at all n locations
caaacttcgccttagcgcaagaccgagctcctcacgggttggcttatgagaccccagtggcattttcaccttctgcatttnacttctttcacacacaaccagaaaacccggatcccactttcaacccttgctcggaatccggctgctcacctcttcccgttgctgcaaaggtccaaggagcttctgcgaaagacaggaaagcgatatagtatcaatttcaactggtacangaagcggaatagangaacatggtgtggttggaatcatctttggacttgcgtttgcggtgatgatgtgaaccattatagatcattttagcaagactttgagtttgaatgtgtgcatttttcttcactttttttcttgaagcagagtattcaagtgntcaagnctttatcgccaaaggctgtgttttaaggggtaagttttnggcccaacctttttaaaacttttggggggcccaatttaggtaaaagngtgnanatangggcntttnaggtggntttnatcntttagaaanagggttttntac

SEQ ID NO: 133053 - DNA, 490 bp, Arabidopsis thaliana columbia
  unsure (1)..(490): unsure at all n locations
caaaccaatatcaaaagaaaccaaaagcaatctttcaaaaatgatttcagatagatcatttggatatggtacaagtaaagcagcccagcatatagctgcaaagaatacggcacctgtatatttctatgaatttggctacagtggtaattattcttacgtagcttttttcgatccnaaatcatattcccggggttcaagcccgactcatggcgatgaaaccagctatgtattaaaaatggatggtttctacgtttacgacaatgangaagatagaaagatgatcaaaactatgggttaatattttgggcaactttttntccaaatctgggngtnccagatacctgaaaatttcaggaattttgggtacccggtttctaaggntctagcagatcctttcaggttcactaaggtttctcaacaacaaacatttttnngccngggggcantttnaccccgggntttntnattttgggggnggnttccccnaatt

SEQ ID NO: 133054 - DNA, 544 bp, Arabidopsis thaliana columbia
  unsure (1)..(544): unsure at all n locations
agaaaaagaaataatgtattcagaggaaaagaaaagcagaaattatggttcaatctttgtctactgcttctnctgtttcgtactcattgtggaggttgcaagattcgcaaaaccttatatcaaccttcaaaacctaattgagacggaagcagtagtagaagaaggtttcatggcggtggggaactcagggaatcttccgtgtggctcgtcaaaacctagctctgcctctgttcgtgctcatgatgaacagaagctctcgcaagcagtaacaacagatacgagaactcgtcctccaaattcgtacttcgtgaagttccagtctttttgtcactatggcaaagcaggtcaaaggnaaacggtggcaagtatgagtcacgtcctttttccgtcggtgggtacaattggtccgtacgnggttgacttccatttcaaaaatgttgggaaccntncctttncattgnggtntacanttttttttttaaagggttnanttttnnactggggtttgaccaccccncttntttngaaagtttaccttttcctc

SEQ ID NO: 133055 - DNA, 380 bp, Arabidopsis thaliana columbia
  unsure (1)..(380): unsure at all n locations
taagatccacacactctctctnatatctttccggcgaaaactttccgatcaccgacaaaaaaaaaatggttgcagacgcaaacggttcatcaagctcattcaacttcctaatctacggtaaaaccggatggttcggtggtttactcggtaaactntgcgaatntnaaggaatcttttacacttacggctccggtcgtnttcaagatcgtnaatcgatcgtggccgncatcgaatctntgaacctagccacgtgttcacgccgctggagtcaccggtcgtcctaatgntgatttgggcggatttcacaaagtnnngcggttcgtcctaatttggcgggaccctacttttngtggaaattttcaanggggaangacttttct

SEQ ID NO: 133056 - DNA, 544 bp, Arabidopsis thaliana columbia
  unsure (1)..(544): unsure at all n locations
ctcagacttcatcaaatcgtttctctgcttccgatccgaaatttgcggcggagaaaagaagataacatcaacaaaaaaatgatttctctattcatctcaaacttttcaaacttatcaaacttatctccgacatttgataacatgaacatgaacatcccatcgaagaagatcgtaccggtaccgacaccgagtgagaaagttgtctctttggtatctcgaaccggacgagatctgcaacgttacaacaccgcagggtatcgtcaagtcgtcggatgtgtaccatatagntacaaggaacacggaggaggaggaattgaagtgctttttgataagtgcacagnaggaaggggaagggatgtttttnccnaaagggggtttggggnnttntggatccattggaggaggcncttttaggggggccggttttagaagcttgtttnccgggcaacttttanggtcccctttgggaatgggattcaaaagngaaangcctnctttgttcttgnngggccaantttcctttntttttggncngtttggnttc

SEQ ID NO: 133057 - DNA, 551 bp, Arabidopsis thaliana columbia
  unsure (1)..(551): unsure at all n locations
atgcaacctgactgggatatgttccatagtctacacccaactgcagagtaccatgctgcagcgcgtgcagtgggtggatgcgcaatctatgtcagtnataagccaggcaaccacaactttnatctattgaggaagctggttcttcctgatggttcagttcttcgggctaagctcccgggtaggcctacccgtnactgcttattcgctgatccagctagagatggaatcagcttgctcaagatctggaacatgaataagtttactggtattgttggtgtattcaattgtcaaggtgctggttggtgcaaggaaacgaagaaggaccagatccatgatacttctnctggnacactcacgggttcaatccgtgcggatgatgctgatctaatctctcaagtggctngtgagntttgagtngnggttcaataggcttatncatcagaccaggtgaggtgnaagcttcctaaggngnttaattccttaccctaaagcctnatntnnctttccatcttctttaggatcctgaaattggtgncatggctttgattttc

SEQ ID NO: 133058 - DNA, 504 bp, Arabidopsis thaliana columbia
  unsure (1)..(504): unsure at all n locations
attaagaatcacggaaattctacaagccatcaaccagaactggttttgaataactttacaacgcgtttagggaatcgtgttgggagattttttcaatcactcttccntccggntcctaatttccgtggtaggagagttgtaacattccacaaccagcgtgactttatatttttcagacatcaccgttacatatttgagacaaaggaaagcaagagtgataaaggaaaagaagagacaataaaacctcgtcttcaggaatgcggtcctcgattcacgnttaagctagttactctacagcattgganctttttgccaccaaagggggggaattttgaatggggttcataagcctgaantggccacgggcaggagaagggttctttttanaaattccggctgttntccgggtttcancaagttttgtgtttntttttgcattncnnatttnccccccccccccccaaattntttttttaaaaacccccattttttttaaaaaggngt

SEQ ID NO: 133059 - DNA, 559 bp, Arabidopsis thaliana columbia
  unsure (1)..(559): unsure at all n locations
ccttcaacatcaaacatcacatttnttcctcttttctctcttttttctcagtcttcaaagagtttcttagtaacccaaatcaatggcaggtatcaaagttttcggacacccagcttccattgccaccaggagagtcctcatcgccctccacgagaaaaacctcgactttgagctcgttcatgtcgaactcaaagacggtgagcacaagaaggagcctttcctctcccgcaacccttttggtcaggttccagcctttgaagatggagacctcaagctcttcgaatcaagagcgattactcagtacatagctcaccgatatgaaaaccaagggaccaaccttcttccaaaaccgncttcaaggacatatctcaagtacggaatcatgggcattgggatgcaagtaggaggtnaccagttngncccagtgggtttaaaagnttgnttttgacaaatttttaagnccttttcgggtttncccncaaannngcgttttttaaaaggggggtttttttgcaagggnctttntntttgggggtagggttaggggttagnttttttt

SEQ ID NO: 133060 - DNA, 552 bp, Arabidopsis thaliana columbia
  unsure (1)..(552): unsure at all n locations
gccgtgtnatgctttacgtctgggtctgcttcatcaccagtggacttttccgtttgcaattacgaattcgagctgtttcgattcgatttagaggccaaatgtcctccttctctgtatccaactcctcctattgaggtagatggagactcactagacaggctaatggcttcacaacatggaaatgcttatatgtctgtactctttnatgcttcctggtgcccattctnacgtgctgtgcgccctaagtttgatatgttgagttccatgtttcctcaaatacaacacctagctgtggagcattctcaagcactgccatctgtcttttctaggtatggtatccatagcttaccttcaatcctgatggtnaatcaaacttttaaatgctcggtaccatggtcgnaaggtnctttatatccccggattgngttttttgaggggnaacaggctccaanctnnccagtnatgtggnttaaggggacccacaggtaaatnccggnatggactttgtcaaatggttcnaagggggcactttttggggntttaaaaagncgc

SEQ ID NO: 133061 - DNA, 514 bp, Arabidopsis thaliana columbia
  unsure (1)..(514): unsure at all n locations
gtaaattggntccagtgtgaaccttgcgccgactgtnaccaacagtccgacccggtttttaacccgacttcgtcttccacatacaaatctctcacttgctctgctccacagtgctctcttctcgaaacctccgcttgtcggtcaaacaaatgtctctaccaagttagttacggagacggatctttcaccgtcggtaactcgctaccgatacggtgacgtttggtaactctggtaaaataaacaacgtcgctttgggttgtggtcacgncaacgaaggtctctttaccggagcagccggtttactcggtttaggcggtggtgttttatcgntaaccaatcaaatgaaagcganggcgttttcttactgcctcgttgancgtgantcggggaagncccaagncttgatttcaactcgggccaactcggtgncgganngganggggccgttttcggaacaaaagtnggcattttncttggngggctagtggttaacgccgggggnaaagngnctcnt

SEQ ID NO: 133062 - DNA, 517 bp, Arabidopsis thaliana columbia
  unsure (1)..(517): unsure at all n locations
aatgattttactcaatcatctccatgttgtgagaatcttgttctgattntacatgaaagctttgctcgtaataatttcaacaaattcgttgactctacaaccaaaaccctcatgtgctaactttcaagtaagtatatgtagttttttgctcgaaataacaaaaaaaaataagaacaaaacatcatcttgtgtttgatccaattcttgaatcttgaaacattcttttgagctctctataactatttaaaaaatggcggatggatacgggaaccatgctcctgaaaaccttcaggggaaatatcaagcaatggttgtttgttgtattcttggaattggntccctcttttcttgggataggnatgctcactatcgcaggttacttctatcaagtttnccgggttacanccttcaagggggttcacacttntttncccccattgccctggnacaacatgntttnggnnnccggggtnggaanccgnctngganggttcttccgggtaaccntttcgggtct

SEQ ID NO: 133063 - DNA, 463 bp, Arabidopsis thaliana columbia
  unsure (1)..(463): unsure at all n locations
gggtaccaaatcactgccatgggaaatagaactgtcatcgtcgataacaatacctggaacaacactcacattgctaccgttggacgtgccatgtnttcttatgaagatgatgcgtatgacatcatgaggtcacttgatgtgaactatgtattggtcgtctttggtggtgttactggttattcttcagatgttatcaacaagttcttgtggatggtgaggattggaggtggagtattcccagtgatcaaagaacctgattaccttgtgaatggtgaattccgtgtagncaaaggtgcatcaccgaagatgcttgaactgtctcatgtncaagttatgctnttacaaggttcgggggngctttcccnaagattcgggaaagccccccgggtttttttagccaaagggtnngggnnttgggnnnaagttttaaantttttncccttttggngggggtttnaaaana

SEQ ID NO: 133064 - DNA, 605 bp, Arabidopsis thaliana columbia
  unsure (1)..(605): unsure at all n locations
gtcactcactctgtaaagtataaaccctaaaaatcgaatctttccgattagccgatccctccaccggaaaatcggaagaagcgtaaatggcggatgttgaagatcgtgcggcgaaggggatctctgactacgatcaaggtggtgtaaagacgacggaactggaaaggaagattgaggatatggagaacaagaatcaggagctcacgagagagaatcgtgaattgaaggagaggttagagaggcttacgggagaaattgaagagatgaaagacgtagaagcggagatgaatcagagattcggagagatggagaaagagatccgaggagtacgaggaagagaaagaaggctttggaagctattttcctactagagctntggagctttnnaaacttnaaggttgtcgaatctttcaatnaccggttcctgatccaactttccctttaaaccgggggggggattnaaanaccggccggaaaanaattttgnccggaccctttaaagaaaancccttttnnccgggngaanntntttgnaaaancccttttaagggggnttttttaaaaaaaggnaaccccttnggggttttaanantttttttttgngc

SEQ ID NO: 133065 - DNA, 561 bp, Arabidopsis thaliana columbia
  unsure (1)..(561): unsure at all n locations
ggaaagttcacgtttttcaaatcttctccggagaaatcagattacttgattcttcaaacaatggatgtgattaagacgcaacagatttcagcaaggacgatcgagaaagtggttgttcatccactagtcttgcttagtatcgtcgaccattacaatcgcgtcgctaaggattcaagcaagcgtgtcgtcggtgttcttctcgggagcagctctcgtggtgttgttgatgtcaccaacagctatgcagtgccctttgaggaggatgacaaagacccaagcatctggtttcttgaccacaactatcatgagtcaatgttccacatgttcaagaggattaatgccaaggagcatgttgtaggttggtacagcacaggncctaaacttcgggagaatgnttttgncgtccatgcggttgttcaatggtaatnttccaatccagtgtttggcaatattgatgnccacccaaagancttgggatccccccaaaaaggttctttnaagtgggggggnaaggggattntcnctnaaagncnnaagtttnntnncggggntnnanaatgc

SEQ ID NO: 133066 - DNA, 550 bp, Arabidopsis thaliana columbia
  unsure (1)..(550): unsure at all n locations
ctcacaaacgagaggccggttaggaggaaattacaaaaatntcctcctacggcagactcgacgagcatgagcaagcgaaacttgaggcaagtcggaagacaaagaagagaattgccatcatcgctatatcttccatcgttctcgtctgcattgtcgtcggagccgtcgttggaaccacagctcgcgataacagcaagaaaccaccgacggagaataacggagagccaatatcagtctccgtgaaagccctgtgcgacgtgacattncacaaagaaaaatgtttcgagacccttggntcggctccaaacgcgagccgatcaagcccagaggagcttttcaagtacgccgtcaaagtcaccatcacggagctctcgaaagttctcgacggattnttcaacggggacacatggntancggcacgtaacagaattggggcttncntgngnttatncgggttgccgttgnnaacttaacgaacaattanggngtcctttaagncntttncggtttaggngggggtntntccntggacgtccaaaaacgtttttta

SEQ ID NO: 133067 - DNA, 553 bp, Arabidopsis thaliana columbia
  unsure (1)..(553): unsure at all n locations
tcaaaacaaaagagaagaggagatacagtgagaagaaccagcaaaacaaaacanttgcaactactcatgaacacgacgtcttaactaatgatggaagancagaagcccgcgattctaatttcggtgagggaagaagtgggcaaggatgtttccatgagaataaccagcaaacgaaagtttcgtctactgaaagatgcgagcaggaaatccctaggaccaataaaagagtgtcactcggttctggattaggggaggggcgatatcgggagggaagacatattgaaaagaatcagcataccgaaactnttaaaactgaaactcatgggaaggaagtttctaagggntaggaagaggaaagcggggaaanaggagttgaaagagattggggattnagttctattttggcggggattaaggcaggcattcccagcttgttttgggaattatnatgtggcctcaataaggagcncctggttntncnnatttncnagtgggggaancttnttnnccttttnattncggggtttnaacaattttccgccccaattttttt

SEQ ID NO: 133068 - DNA, 567 bp, Arabidopsis thaliana columbia
  unsure (1)..(567): unsure at all n locations
ctcaatctagctctcttctctatctttctctaaatcatgggtcttcctgaagatttcatcaccgagcttcagattccaggttacatattaaagatactttacgtcatcggtttctttagagacatggtcgatgctctttgtccttacattggtctacctagttttctagaccacaacgagacctctggacccgatccgacccgacacgctctctctacgtcagcgagtcttgctaacgagttgatcccggtggttcggttctcggatcttccgaccgatccggaagattgttgtacggtttgtttgtcagattttnagtccgacgataaggttaggcagctacccaagtgtggacacgtgtttcatcatcattgtttagaccgttggatcgttgactacaacaagatgaaatgtccggtttntcggnaccggtttttaccgaaaggaaaagtncacgaaatgtgattgggggtctngtcaaaattggttngtntgaagnggaagnccaccnaantggaggtttaatcnttncgnagaatnttntgattaatcccganaaccnttttc

SEQ ID NO: 133069 - DNA, 578 bp, Arabidopsis thaliana columbia
  unsure (1)..(578): unsure at all n locations
agttcgagttcgaggtctcctccgctacatatttcccgcgttntatcagttgaaactgttcctttaagcccatcattcacctggaacgatgtttttnagaacagtcgaaaagaatacgtgcctcanaactcctccgatctcaccggatttctcgagaaagtcgaccgctgtaatcgtggattagagaagttaggtgagttcattccatttgttatagaggaacaaatcgttggttatattcacaagggatttacaaagtacttgagggactttaatgatatctttacattttcacaatatggtggccatgtaacgcttaacatgatgcttgacaagcctgaagaaagnaccagagcagttgcacatgtgntcaaaatattgggtaacaaaggnatcatccctgggggttcggaatgagcttatcctgtgaggccatcggtttaattntcctnccttttttctntagnggggtctnntnccccctaattttggttnaagggttccggaattcatntaattgggnttttgnaaggggtggccaaaaattnntttggttgggtnaanaggcttgcaanttc

SEQ ID NO: 133070 - DNA, 576 bp, Arabidopsis thaliana columbia
  unsure (1)..(576): unsure at all n locations
cattccaaatgatagccatgttgaagaagactacaaaactagcaaaagcaaaacactttaaaattatttctccaagtagcgttaattagtagatgccaaatattacataaatacgtacccatattagaatcattagatgacatttcaaattgtaaactcaatatatgtgacctattccttaaaataattatttcggtatttatttatttaaaaataatgggacatgtatatttcctttatgagttttttactatcagatcttgtattgttattagttattgtaataacgttatgataaaagacttatttaagcctagtcacctaatgtgtatttgttattacctattttaaatcatttttccttttaaaatgccaatnnatnggtggntaaaaatatcaaggtcctgaaattgtnatancgtgtgtttagngcataaantagggtncttgncctccttgttggaaattttntttttggccnggaattgggtttnaatggccccntantttaataaagcccttgggaantaaaannaaatgccttggggnnccctcccgggtcccccctttaatttc

SEQ ID NO: 133071 - DNA, 592 bp, Arabidopsis thaliana columbia
  unsure (1)..(592): unsure at all n locations
cacatcataactagatctgatcattatccaacaacttttgttcaagctgactcttcttctttcaaacaagtcgttcagatgctcaccggaagctcctccccaagatctccagactctccgcgtcctccgacgactccttccggcaagggtaattttgtgattccaccgatcaaaaccgcacaaccgaagaaacattctggtaacaaactttacgagagaagatcacacggcggatttaacaacaacctcaagaacagtctcatgattaatacactcatgatcggtggtggtggcgccggaagtccaagattctcgccgagaaatcaggagattttgtcggctagctgtctttgatttncccaaggtttgcacttaanaagtccccgtgacggccggttaaaagcaagggganccaacgggaacggagggngntccttttnggcaaantttttggcatttttcgggggaagannngggtttntgaagnaaagggtttttccttaaccggnttccgttttaacncgggggtttttngnccgantttttcctnttccggggnttttccggantttccgggnttnagctaaagntc

SEQ ID NO: 133072 - DNA, 592 bp, Arabidopsis thaliana columbia
  unsure (1)..(592): unsure at all n locations
aaccaaaacatgtaatgtaataaactcatcaaaaacagagctctgtttatcttttcttccgtcattcgaatggctgatcagattgagatccagagaatgaaccaagatcttcaagaaccattggctgagatcatgccaagtgttttaacggcaatgtcgtatctcttgcaaagagtatcggagaccaacgacaacctgagccagaaacagaagccctcaagcttcactggagtaaccaaaccttccatttccatcagaagctatctcgaacggntctttgaatacgcgaattgtagctactcgtgttacatcgtcgcatatatatatttggntcggttcgtgaagaagcagccatttttgccctatcaattcttttaaatgtccataggnttataatcacaagtgtcttgggctctgctaaattccatgggtgnctttgagtnncaacaatgntttttttgcaaaagttggggggtaagncagggnnggaatgaccatncttggngttgcttctttgtcggattggggttnggtaacggacccgtttnctttaaaaacnttgtgnttttcaaagngggtgngttttntattt

SEQ ID NO: 133073 - DNA, 552 bp, Arabidopsis thaliana columbia
  unsure (1)..(552): unsure at all n locations
ccaactctcaagattccaatttnnttcttcctcaccgaacccacttttccttcgacctaggattcanattctnagtatgaccatgaacaagtcgccgtctttagtggtggttgcggctactactgcggcagagaagcagaagaagaggtatcctggagaatcaaagggttttgtggaggagatgaggtttgtggctatnagacttcatactaaagatcaagctaaggaaggtgagaaagagactaaatctattgaggaacgtcctgttgctaaatgggaacctactgttgaaggttacttgaggtttcttgtggatagtaaattggtttatgatactcttgaactgattattcaagactccaatttnccaacttatgccgagttcaagnacacgggggctttgaaagagncggnggaatttatccacggnttttggggtggtcaaggaccaaggttcgggnttccagaccacagtcctggtaaanaattcccatttttaagggttgcaggaaggccccaagatntttgcnctttnaaaantttttngccnna

SEQ ID NO: 133074 - DNA, 550 bp, Arabidopsis thaliana columbia
  unsure (1)..(550): unsure at all n locations
actccattcccaaggaactggnatcccaaatnatgagcaagttttgcaggagtacatcaggctacaagaccctaaattcttctgtgggttgcataggtcaataaaacgcgagggtctaaccttgccccaggatgagatctcagaggctgtgtgggatttcaagactcttggtgcttggagatcaaagtatgaaaataaaagagaagcagatgatgggttgcagaaattagactcacaaacatgattgtntaccattacctcctttatttggtgtatctggtacaaggntcatgataaaccagagactgagagttatagcggagaatttcatcgctattcttttttaatccccttcttcggaaggngaccctgattctgggatctggttccttacccaacaaatccattgaccttggccggtggtttngcaaaggtgtnctttnangntcttncccttttggaggttcctttaaggncccgtncatnggctttgttttannccggaaggttcncaaaggggggcctaaaaacgggtttttccgnttaantt

SEQ ID NO: 133075 - DNA, 550 bp, Arabidopsis thaliana columbia
  unsure (1)..(550): unsure at all n locations
gggattggtgcgtttaatgcttctaataggacgacggttctaatgaacgcnccgtttacgctggtncactttgccacttacgaggctgctaagaagggattgatggagttttcgccggatagaattagtgatgaggaaggttggttggttcacgctaccgctggagctgctgctggtggattggcagctgctgtnactacgccgcttgatgttgtcaagacgcagttgcaatgtcagggtgtgtgtggatgtaaccgcttcactagtagttctattagccatgtacttagaacgntagtagaaaaagatggatacagaggacttctaaggggatggctcccgagnatgctcttccatgctcctgcagcagcaatctgttggtccccttattgaaggggttaannctttctttcaagncttnaatgtcggttcaaacactncctaaaaaaggcaaagggtaggcntttnaaacntttngggcccnctttctaatttgnttgaaanaaaggttcnagggttctttgaggcaatttaggttnaattncccgtg

SEQ ID NO: 133076 - DNA, 552 bp, Arabidopsis thaliana columbia
  unsure (1)..(552): unsure at all n locations
ctcgtagactcttacagtgattaactcaggctgctaagggagatggcaacggcgatggcggaggatacgagcttcgagggagaccaactagcttccatgactactgatgacatcggtagagcttctcgtctcttagccaacgagattcgcatcctcaaggaagnatcgcagaggacaaaccttgatttggaatcagtgaaggagaaaataaaggagaaccaggagaagattaagcttaacaaacagcttccttacttagttggcaatatcgttgagattcttgagatgagtccagaggatgatgcagaggaagatggagcgaatatcgatctggactctcagaggaagggaaagtntgtcgttctaaaaacatcaactcgtcagaccatcttcctccctgttgttggacttgttgatcccnggatacattgaagcctggggcttagtttgngttaacaaagtagttccttgattctggtactttacctctngnattgtcaagggtaaanaattggggtgcgnaaacctnttaggttcaatntnttggggnta

SEQ ID NO: 133077 - DNA, 308 bp, Arabidopsis thaliana columbia
gagatccaatcactagttccagacgtgacgagaatgatatgagttcaagtctatatagattagagattgtgggaatagagcttctctccctctatggagcagagtcttctataagtttgcaagattttcaagatgctgaaccagacatcctagtgcactctacttctgcaatcatcgagcgcttcaacaacagggggattaactccagcattgcacttaaagctctctgcaaaaagaagggtcttcatgcagaggaagctaacctgatcagtgttgatagtcttggtatggatgtgagagttttcgca

SEQ ID NO: 133078 - DNA, 308 bp, Arabidopsis thaliana columbia
ttttttagaattaaactaggtgactgatctattgattattcagtgaaccgtttcatagaccaagtctgtcacatggtaaaacatgtttccagattaacgttaaagaacaataaaacattgcaaatgttgcttaagaagtagtattatgtccctattgtcttgaaaaacatccctcccttgtctcatcaaccaactcttcacgtcctatttttaaaatcgattgattctttaaggatccagcttataatttctccaagcctcagggcaactaataacattaggtaaagattatcctttagctgttcata

SEQ ID NO: 133079 - DNA, 308 bp, Arabidopsis thaliana columbia
gaggatcagaagaaacctctttcctgctcgtaaggtattgtatggaatatatctctggctttatccaggtaacctgctctgcaataaagatcaaccatacaagaatagtgttcaaagcgaaggcgtataccaaacacatgctccatcttcgtaaacaaccagtgtccttcacgcactaaattggaatggctgcaagcttgataaaactgcaaccatagttacatgatcaggtttgataccggatctgtccatatccttgaaccatgccaatgcgacttctcctttacccagcctgccatatccatcga

SEQ ID NO: 133080 - DNA, 308 bp, Arabidopsis thaliana columbia
  unsure (1)..(308): unsure at all n locations
ttttttgaatctgaaactgttcactttttgtttagtgattgttgattgtcacatcaaacaacttacaaaggatcactttgattcaggtacaaagtcatttccatcaaaagaaccaaaaaaaaaagaagcaatcacaaagataagtagtaaatcactcatcggacaattgatcccaaacattgacgntgagccacccttcaatggctgcagcctcaagttgttcttcaggacctgccttctcccatttgggctcaatcgnatccagctgggccaaatcagancacaatactctgtgcgntaatnctctt

SEQ ID NO: 133081 - DNA, 618 bp, Arabidopsis thaliana columbia
  unsure (1)..(618): unsure at all n locations
atcggaggtatggaaagggaccggttccaccggaaacatcggcggcggcggatgataattcgtcttggaacgagactgatgtcaccgccatggtctccgctctcagccgtgtcatagagaatccgacagacccgccggtcaaacaagagcttgataaatcggatcaacatcaaccagaccaagatcaaccaagaagaagacactatagaggcgtaaggcagagaccatggggtaaatgggcggcagaaatccgcgntcccaaggaagcagccccgtgtttggctcgggnctttngagacgggcanaaggaagcttgttttggctatgacccgagcttgccctcaaattttaaaggnanccaagggttaaactttgacctttcccttaacngggtccaanggcctttcttcccccaaaaaccttttttttattggacccagggggggttttgggnttccntttgacttaaccttncttcttgncctgggccnncttttaaattttttataatttttngggccattgnttttntnccgggganttttaattagggtagtttttttggggnaaatnnggtgtttttntttaagggggttttanaaaccttttaaggggttt

SEQ ID NO: 133082 - DNA, 585 bp, Arabidopsis thaliana columbia
  unsure (1)..(585): unsure at all n locations
cctttggtggcaaacacaacgacagatagagagaaacgatggcgtcgaactcgcttatgagctgtggcatagccgccgtgtacccttcgcttctntcttcttccaagtctaaattcgtatccgccggagttccactcccaaacgccgggaatgttggtcgtatcagaatggctgctcactggatgcctggcgagccacgaccagcttaccttgacggttctgctcctggtgactttgggtttgacccacttggacttggagaagttccagcgaaccttgagagatacaaagagtcagagctcatccactgtagatnggctatgctcgctgttcctggggattttngtaccagaagcattaggntatggnaacttggggtaaaggctcaggaattggcagaacttccangggggnaagccactttactttgggaacccatncccgtggggaattttcccaaaattttggccatttagttttagccattnaatttttttggncccanaagttttggaaanccccttaaaaaaagtcccggggggttttcccttggaattaagcccaangtntgggttaattangnnc

SEQ ID NO: 133083 - DNA, 533 bp, Arabidopsis thaliana columbia
  unsure (1)..(533): unsure at all n locations
gattaagtttaatgattatcatatatgagctggccattttctgtatccaaagttataaactttatggaattagatcactaacatttggttccttatatttattcagatgtcttgaagaaggagctgaagatttcttattgaagcctgtgaaattagctgatgtgaagagattaagagattctttaatgaaagctgaggaaagagcttttaagaatattatgcacaagagagagcttgaagctaatgatatctactcgcagctaaaacgcgcaaagatctgagtttatcagattccacgtacgatatgttctttaaaagctcaaagattcacacacatgcatgtcctgattctttcggcttacaatttttgngncattacggcttcttttgctgatagnnccaagnctgatcaagagtgncaagatgggttttataaggnagaatgtaaattgtaggcttggtnnttggggggggngggtcattttttttcctncatgggggntgaaatgnggntgtntttgngtaccantgaa

SEQ ID NO: 133084 - DNA, 520 bp, Arabidopsis thaliana columbia
  unsure (1)..(520): unsure at all n locations
tgatgataactctgatattgtcgccacagataccattaaaaacactgtttatgtgaaagccaaggaatgtggagatcggctctcggtggaggaatttgccatacttattgggaaacacttttgctcattttatccacaggtttttactgctatcgtgaatatcattgagaagccctgggagcgtgtctccatcgatggaaaaccacatttacatggttttaagcttgggtcagagaaccatactacagaggcaagagtagaaaagtctggtgcattaaacttaacttccggtattggaggactagctctactgaagncaacccagtcaggatttgagaggtttgtcagagncaaatacaccattctgcctgaaactcgtgagcgaattctggccacagaggtaatgcatcttggaggnctcgtatgagtcagttcaagattccaccaaaggctntactttagcggagtcatgncgtaagaagtctntggncttctttggcccngactgggtgangcctna

SEQ ID NO: 133085 - DNA, 513 bp, Arabidopsis thaliana columbia
  unsure (1)..(513): unsure at all n locations
ctcaaagtcaagcaaaaaaaacgaaacaatggatgcgttctcttccttcttcgattctcaacctggtagcagaagctggagctatgattctnttaaaaacttccgtcagatttctccagccgttcagaatcatcttaaacgggtttatttgaccttatgttgtgctcttgtggcgtctgcctttggagcttacctccatgtgctctggaatatcggcggtattcttacaacgattggatgtattggaactatgatttggctcctttcatgtcctccttatgaacaccaaaaaaggctttctcttctgtttgtgtctgctgttcttgaaggtgcttctgttggccccttgatcaaagtggcaattgatgttgacccaagcatccttatcactgcaattgttgggactgcgntangtttgcctgttctcagcagcagaatntagcaagngnagggaggatcttaccttgnggctnttnactggttgcatgcaagtgncnattncntnaacttggc

SEQ ID NO: 133086 - DNA, 399 bp, Arabidopsis thaliana columbia
  unsure (1)..(399): unsure at all n locations
gggccgaaaatgagaaaggaatattcgatgaggtcataaaaggcgaaattnattttntaagtaagccatggccttctatatctgaaagcgcgaaagatcttgttaggaagatgctaaccaaagacccgaagagacgaatcacggctgcacaggttcttgaacatccttggatcaaagggggagaagcaccagacaagcctattgatagcnctgtgttatcccgcatgaagcaattccgagcaatgaccaagcttaagaagctagctctaaaggttatcgcggnggtctntcagaagggggggnttaaaggnnttaaacccttgtttncggattttaggttnccngccaaaaggggggncaattccctttttngaggncctcnaaacttgggttaccttg

SEQ ID NO: 133087 - DNA, 435 bp, Arabidopsis thaliana columbia
  unsure (1)..(435): unsure at all n locations
ggcacttatcatatatatggtcgtcaacttacccatggaagcatggtaactaatcccgagacagttgagggaatgcttggaagcctaggtgatttacttatgcttttgaatgtttcatctgctgagggtgttttgttaacaacgtatggcaagttgaaccacctcttggaaaacacagattaaagattgtagagtttatttcagtcttgctcactgtcggtagtgaagcagcagagaagggagtaattccgccttngggccggtggaaaggagtgtttggccttgttcctttgnngaanccctncaaccaaattttttttgaatcanccattttggnggaattgaaaatttccctcaatggtattggggggcaaaaaaaccnttcaaccttgnttgnccctnttttnnagggggggnccaancnttntttggggg

SEQ ID NO: 133088 - DNA, 569 bp, Arabidopsis thaliana columbia
  unsure (1)..(569): unsure at all n locations
ctaacacagaaagaaaaaaaacagttcctgttctattagattgttttctaaattgtctgaaaatcatggaagtaacttcccaatctaccctccctccagggttcagatttcatcctaccgacgaagaactcatcgtttactatcttcgaaaccagaccatgtctaaaccatgccctgtctccatcatcccagaagttgatatctacaaattcgacccatggcaattacccgagaaaacagagtttggagaaaatgagtggtatttcttcagccctagagnaagaaaatatccaaacggagtcagaccaaaccgggcagctgtttccggttattgggaagcaaccggtacagncaaagccattcacagcggttcaagtaacgtaggtntcaaggaagctctngtcttctncaaaggtgncctcctaaggntcaaaactgcttgntcatgcatgggtntggctccatggtnacgnaagnntacgganggacggtcctgggtngtgatggnctttntggtttcagagggggnagaagtntattnagggtntgcgggctttgggtngcaatgc

SEQ ID NO: 133089 - DNA, 564 bp, Arabidopsis thaliana columbia
  unsure (1)..(564): unsure at all n locations
aggaacacaacaatggagtttcgtggagatgccaaccagaggattgctaggatttcagctcatctcactcctcagatggaggccaagaactctgtaatcggacgggaaaactgcagagctaaaggtggtaatccaggattcaaagtagcaattcttggagctgcaggtggaattggacaatctttatctttgctgatgaagatgaaccctcttgtctctttacttcatctctacgatgttgtcaatgctcctggcgtcactgctgacgtcagcataatggacactggagctgttgtccgcgggttcttgggagcgaanagctttgaggacgcgctaacgggtatggatcttgtgatcataccagccggtataccgaggaaaccagggatgacccgcgatgatctgtttaaaacaatgctnggatttttaaaacactatgtgaaggtnngcaaaatgttgnccaatntattgtaacttntcagaaccctgtgactttctgcccattccgtgaggttaagaaantgantntnccnagagnctgggtctaccntntntgccaaatta

SEQ ID NO: 133090 - DNA, 489 bp, Arabidopsis thaliana columbia
  unsure (1)..(489): unsure at all n locations
accaaaaaaaaagaaaacacaaaaacaaagattataatggcttcctcaaccatggctttgtcctcccctgccttcgccggaaaggctgtgaagctgccgcatcanatgtcctcggaagcggccgtgtgaccatgaggaagactgtcgccaagccaaagggtccatcaggcagcccatggtacggntctgaccgagtcaagtacttgggtccattctccggcgaggcccngagctacccttaccggtgaggttccccggtgactncgggatgggncaacggttngtctatccgccgacccagagnccttttgccaggaacccgtgagctagaaagtttnttccccagcaagattggggccaatgttngggaggccctagggnttcggtttttccctggggctaatttggnttgggaacggggggtaaggtttncgnagnaagncggtttttgtttaaaggcccggtttaaaanatttttttaanggncng

SEQ ID NO: 133091 - DNA, 409 bp, Arabidopsis thaliana columbia
  unsure (1)..(409): unsure at all n locations
tttttgttgtgtctaaattcacaaagtcatcttctggcttttgcgcaccgaacagaacagtcagtttaatgggttcgccggataagcaacatcgccgccacgtcgccgccgaatttntccatagcgcggtaacctcaatctcttcctcaatcattcctctcttccctcccaaaacggcgccgtctcgtgtatgcctcccacttagattctcggtatcagacgatgtctcgtcccctttcgaatcgacggtcaagagcacatcatccgcgtccttcttccggccttaattcaacgggtaggntatcaatcnnttcannttcnantgggaacggnggttgggcctgcttttnggtngggcaaagggntttaggaatgggtgncccttancttgggncttgggcntaaatgg

SEQ ID NO: 133092 - DNA, 503 bp, Arabidopsis thaliana columbia
  unsure (1)..(503): unsure at all n locations
aaaggatttagttcgagcttatggtggtagattcgcagctaagctcgcgcatctagtggagatggaggtcaaacatagatgcaaccaggtattagagctcggttttcctctcggtggactcgcaaagctttttgctcaggagtgggaaggtgatgttacagttgtaatgcctgctactcttgctcagtactcgaagattatacaaaatccgactcatgtcgagcttcagaaagcggctaaccaaggaagaagatgcacttgggagaagctctcagccataaaatcaaacctncggggatcgagcttgcgcttgaatgattctgtagctatttcttaancatatgngggaggctcaagaaaagttcggggagggccggcactgccangtttcgncttnatcacggnttttgcttnaacccccagattaattgntttnaggangatcccntctttggaccgtcctttccangngggccttaanagntcnntggtgnctttgtnct

SEQ ID NO: 133093 - DNA, 599 bp, Arabidopsis thaliana columbia
  unsure (1)..(599): unsure at all n locations
ctttgatcaaaccagagagccgtcagggagagcaaaacaaagatcggagaagatgaagacgattctttcttccgaaacgatggacatccccgacagtgttaccatcaaggttcacgctaaagtgatcgaagtcgaaggacctcgcgggaagcttgttcgcgatttcaagcatctcaacctcgatttccagctgatcaaggatccagagactggaaagaagaagcttaagatcgattcgtggtttggaacacgcaaaaccagcgcctccatcagaaccgctcttagccacgtcgataacttgatctccggtgttaccagaggtttccgttacaagatgaggttcgtgtacgnccattttcccatcaacggctccatcggcggtgacgggaaagtcttatcgagatccgtaacttcctttgcgagaagaaggtnaggnaaggtagagatgtttgatggtgtaccattgtttcgatctttgaaggtaaggnttagattntnctttccggaacgtnttcngcttttnaaggngtngtttttnaacngaatttncgnaagagnggntnaggagtccttccggttttttttnggaaanaancntc

SEQ ID NO: 133094 - DNA, 562 bp, Arabidopsis thaliana columbia
  unsure (1)..(562): unsure at all n locations
cattacagtctgatttgagctaagttctctcatcataaactctccttggagaatcatggctatttcaaaagctcttatcgcttctnttctcatatctctncttgttctccaactcgtccaggctgatgtcgaaaactcacagaagaaaaatggttacgcaaagaagatcgattgtgggagtncgtgtgtagcacggttgcaggctttcgaggaggccgaggctgtgtcacagagcgtgcgggacttgctgctacaggtgcaactgtgtgcctccgggtacgtacggaaactacggcaagtgccagtgctacgctagcctcaccanccacggtgaccgncgcaagtgcccataaggagnaacaaagctcttaattgctgcggataatnggacgatgtcgtttttgttagtatttactttggggatatatgtgntccnataataaacgggaccgnccgtttcgttntagtntaganntgnttatnatggtcaattggtttacttcaagtttctggtttnattgttttcaaattgaaacntcggntatgatnttcaattaaaagt

SEQ ID NO: 133095 - DNA, 409 bp, Arabidopsis thaliana columbia
  unsure (1)..(409): unsure at all n locations
ctcccagtttgcagatccaaggtccgaccntgaattctggaacaaatggcatgagttcgaggtccagcacgggaacgaagatacctacagagaaatgctccgtatcaagcgaagtgtttccgcaagctatagtcagactcatttnattctaccagagaacatgatgcaaaaggacaagctgcttgatgtggaagacgcaaaaggcgagctgaagagagccggtttaccctgaagacgnaatggcggctctggagaggcagtttttgtntncaacntaccccacagngccagaaaaagttggcgggagnaanagttnggnttttaagcgcaggagtcatcttacagtccggttgaggattnaggggggaacccagttacaggggattgnggagncatcggctttccnntt

SEQ ID NO: 133096 - DNA, 593 bp, Arabidopsis thaliana columbia
  unsure (1)..(593): unsure at all n locations
ctatatatttngcatttnttctcctcaacgctctcataaaaagtagtactcgtgtcttactcgtgccagccactcgcatttntccagatttnattatccttcctcgaaacaagagcttagctaagatgacgaagaactacccaaccgtgagcgaagattacaagaaggctgttgagaagtgcaggaggaagctcagaggtttgatcgctgagaagaactgtgcacccatcatggtccgactcgcatggcactctgctggaactttcgattgtnaatcaaggactggaggtccattcggaacaatgaggtttgacgctgagcaagctcaatggagccaacaagtggtatccacatttgctcttagggttgtttggaccccatcaagggggcaattccctanccatctcttttgctgatttccatcaantttgctggtgtttttngccgttaagtnacttgtggcctgaaattccttcccccttggaggggggcaagcccaacanctcagagggnggttcctntgtnccaagggtttaccntttaggttntttcnagagtgggtntttnaaagatttggtttttggccaactttt

SEQ ID NO: 133097 - DNA, 558 bp, Arabidopsis thaliana columbia
  unsure (1)..(558): unsure at all n locations
cagatagctcctatttatctagcatcgtgcgagaaacagggattaggcttattagagctgttgttctacaggcagcctgttcaagagaatcagatgcttattaagagcctagagatttgccgtctctatgaactcagtaatgtcagtgctaaactaatgaagatttctggagtgcatcattggaaacatgggaggaaaggctcagggattttctggctccagcaagctcgggacgaaaattgtctcagcgtgattgctcaacagctgtttgattctgttggaaaatcattgtctgatgaaagtctcaagcaatgggaaggcctagtcgagttgctgggttcggnatcacagatctcttggtggtctcgattttcttcacaaagtntaggaggatttcaagagntcccttnaaggtaagccatggttggaaaacttttggatgcagctcntgaagccntnggngngccttttntcncnaatgaagggccctttnnctnctaancgttctgggttcccttctnatatnatnaagctttnatgcccacgtcntttaattna

SEQ ID NO: 133098 - DNA, 480 bp, Arabidopsis thaliana columbia
  unsure (1)..(480): unsure at all n locations
caaaatcctcttattctacatcaaaccaagaagttataaaagatggaaagaatttctgatcatgctaatgataatcgcatctacgatgaatttgagccactctcaaattggaaaactgaacaaggattcgaagctctcactatttaccttccagggtttaagnaaagagcagcttaagggtgcaagtaaaccaccacgggggaaggctgagagtgatngggagatcgtccagcaaggngccaacaaaattggttccgttttccgcaaaagnggtttcctanttccggccaaaacattggncggtggattccggtttttgcccaaatttcgganggnggnaaaatttncggttttgangggtttccttannancccggggccaattgggnaaacaaaccctttaacnttttttggtcaaggcccaaaaaaaccttcttccaagttccttaanggaaaccccaaccttttcnttgccccgna

SEQ ID NO: 133099 - DNA, 385 bp, Arabidopsis thaliana columbia
  unsure (1)..(385): unsure at all n locations
agagtctattgatttacatgacagctttgaccagattggcctcgctcagaagatcgagaaacacgaacttnttgaaatgagacgtgtggctgcttatatctacaagaaagcgggcagatggaagcaatcaattgcattatcaaagaaagacaacatgtacaaggactgtatggaaacggcttcacaatcaggcggacatgaacttgcaggacaactacttggtgtattttcatttnanagggcaaaaagggattctttnctacaatggcctccttggtatggtatggccttaatccgncccagncngnnggnttttaggacctttnccttgggtccaccaatattgnttgggctttttccctttcccggatttnccncccngttt

SEQ ID NO: 133100 - DNA, 564 bp, Arabidopsis thaliana columbia
  unsure (1)..(564): unsure at all n locations
ggcgtttttnacgaaaatggagcaaccaatgtcgccgggaacgaagtcggtggatctccgagaatgcatggaatcacttctccgttttagtctgagatctcatttaaacgaatctgttccaagtttcgatcttgacctgaccagagatttttgtcttcatctccttggggaagctacagattcaacagaaaaatctgcggtgtacaagcttctagcaacggctttgtctgaatgtctagcttccgagggtgataaaaattctaacttggaaaaatacagcaaactgattcatggcttgggatatgacttaataaatatgttgaaggaggtgaactttgagcttcatgtccaagagccttacttcacccaattgaaagatggtttgaaaactgttgaaggagatgtgcagtgggggctacatgggattagtcagggnttttcttttgtcaataatgcttcctcttnagtcagncggnaccgtatactcatcnagaatctnagtggngnttccagtctccngggtaagttganaggtcagttccaacttttctaggggaantacgt

SEQ ID NO: 133101 - DNA, 528 bp, Arabidopsis thaliana columbia
  unsure (1)..(528): unsure at all n locations
agcaatgtaaccactgtagcattaccggcatggcttcagcagtataagaaggagaatcaaaatagtcacactgattcanattctattaaggaacttgtggtgaagtggaactcaatctgtgattcaatccacaaaagaccatctctaaaaacactcacactctcttctcctacttcttccttttctggttccactcaaccttcaatcagtactcttcatcatcttcaaaccaacggtgattggcccgtgatcgagacaaacacgcatcgtcatcattctgttgtccatgagacatctcacttaagactgttcattncagaacatgncagcgagcaaaaggctgagctagtctgttcgnatcctaattctncaatgnacctctgaagcctcttcaagcgntgaatggngttggncatgcntttcaaggtttaaggggtgattcagnaacttgnactttttggntnncttggaagaaggncntggaaaggtttgncccgggttgcaaangttttaattcaggnaggcgtc

SEQ ID NO: 133102 - DNA, 508 bp, Arabidopsis thaliana columbia
  unsure (1)..(508): unsure at all n locations
gtgagacgtcgttgttcttgcaacttcccgacgagatcctggtgaactgcttggnacgtntctntaaatcgtcttaccgttcactctccctcgtctgcaaaacctttcgttctctcctccactctcaacccctctactccgcgcgatatcaactcggaaccacggagatctgctgcctttatctctgtctacggtttgtnaccgctacggaaccagtctcacgctggtttactctcagtaggagaagtggaagtnttttggttccttctgatcattctntcccatattcaaattcaaccgtaacgatgggttcgaaaatatatggtgaacatatgggtgacgnttttggtccgtcttcagctatatggntatatgactgttttactcgntcgtggggcgntntcccaacatgaaggtgagagggnaaacggctccgaatgtttttttggtacaagnttntgaatgggnggatttncnttggggataattggtcnaatntcgtgnaagc

SEQ ID NO: 133103 - DNA, 547 bp, Arabidopsis thaliana columbia
  unsure (1)..(547): unsure at all n locations
cttcgntctcgcacgacgttcgtaagtnccgattcgcattaccatcagaagatcaacagcttggtttacccgtggggaagcacgttttcgtttgcgccaacataaacgacaaactctgtctcagagcttatactcccaccagcgccatcgacgcggttggtcatatcgacctcgtcgtcaaagtttacttcaaagacgttcatccaaggtttcccaatggtggactcatgtctcaacacttagactcgttaccaatcgggtcaatgatagatatcaaaggtccactagggcacatcgagtacaaaggcaaaggcaacttcctggtcagcggcaaacctaagtttgccaaggaactagcaatgctcgccggaggacaggatcactcctatctnccagntcattcaatctntattgngtgtccagaggccggaaccggntgttttggttncggaacaggnccnggttgcattttttttgggaggnttaaggntggttntaacatnaggggggtaaantttgancgcgttnatngaaagnaggttggttc

SEQ ID NO: 133104 - DNA, 523 bp, Arabidopsis thaliana columbia
  unsure (1)..(523): unsure at all n locations
ttgagtgaaaatatttttttttaaatggttgtggtgaacaaaacgaatctnttattgcttctnctctctctatgtctcaccctcgacctctcctccgcacaactccgccgtaacttctacgccggaagttgtcctaacgtcgaacaaatcgttagaaacgccgtacagaaaaaagtccaacaaactttcaccaccattcccgccactctacgnctctatttccatgattgtttcgtcaatgggtgtgatgcatcagtgatgatagcgtcaacaaataataataaggcggagaaggatcatgagggaaatttatcgttggccggagatggattcgncaacgtcattaaagctaaagaagctctcgatgccgtccaaattgtcgtacaaaggttcatgcggtggtattctacggtggcncttgtgacggcgtaaattttngggtgncncaatacggcgnggatttggagnttgatggctttataacagggtnggtcgnggagttcgatccnccgcggttaatatt

SEQ ID NO: 133105 - DNA, 497 bp, Arabidopsis thaliana columbia
  unsure (1)..(497): unsure at all n locations
aaaacaaaaaaaaagcagcagcgaattttnatttctntcctcccagaaccctaaacccattccccaattcgntcgagaaactcgacaatcgaagaatttatcaggaaattttgttttttttattccgattgagttttctccgaacaactacttagctgaataatggctacgccaatgattgcaggtgctgctgtagctgctgctgctgttgctggtagatatggtatattggcttggcaagctttcaaggcaagacctcgtgttcctagaatgcgcaggttttatgaaggtggtttccaaagttctatgacccgccgagaagcttgctctcattctttggtgttagggagagtgttntggcagataaggtgaaggaagctcacccggngagtgatgggttcaaatcacccagacgnttggggnagncactntnttgcttcnaaggtcaatnngccaagntttgntncttggaaaatccncaacagnggtnttccttt

SEQ ID NO: 133106 - DNA, 401 bp, Arabidopsis thaliana columbia
  unsure (1)..(401): unsure at all n locations
gtaagtttagtcttgaagcttagtggattagttttnatctcgaaccataggctatgtnatgcggctcacgcctttnttttnatatgtaatcatataatgagtctgaacnttcccactatcatgcttactcatcccgtcccatgtcgtttgttggacgatgcatcacaaccctcttggaattgttggctaaaacngcttcggcctgctctatcaaccctcttctcaagccccatgaatccggtttatctctgtnatttgattagaagattatctgtgctttggncttgtaatcttttgttgccgattgcattatgnttattccnctaaggngatacccttcccctgaaaccttactcctctaagggnttatccncttttgaaatttnancccggggnaaagt

SEQ ID NO: 133107 - DNA, 543 bp, Arabidopsis thaliana columbia
  unsure (1)..(543): unsure at all n locations
cattccaggaggaagcggaaaagacttgagaatcgggaaagtgagaatccggctctctacccttgaagctgaccgtatctacactcattcatatccgctactcgtctttcatccttctgggatcaagaagacaggtgaaatacagttagctgtgcggttcacttgcctatctctcatcaacatgcttcatatgtattctcagccattactacccaaaatgcattacatccatccgttatcggttctccagctggacagcctgagacaccaggcgatgaacattgtctcggcaaggctgaaccgcgcagagccgcctcttngcaaagagatttttggagtacatgctcgatgttgactnccatatnttggngcattgaggaggngtaaagctaacttcttcagaatcatggattgttcttaggngggctnatttcttttggaaaanggtttttncagatcttnaactggggaaccnntnacccaattttnattnangtcctttcatacctagtnttacccgnntaanccccancggttttttcc

SEQ ID NO: 133108 - DNA, 305 bp, Arabidopsis thaliana columbia
  unsure (1)..(305): unsure at all n locations
cgcatttaaatttgtttctctgcttcactcttttgatttctttctacttctttttttcacacagatcttaagatactacaactgcgaccatggagcttccatctccttacagctcaagaaaggaggaatcaactgttcctccgagagagggccgagtcaagntcatgatcttttcggtgatctaggtcaagatccggaaacctcgattggaaccgnttccanggggagggccngattcaaggaaaaatantcncggggngnatcttagtcgggtccaggggnacnaggaccanttttgggcnggg

SEQ ID NO: 133109 - DNA, 359 bp, Arabidopsis thaliana columbia
  unsure (1)..(359): unsure at all n locations
ttctccgatcagatccaatttcaatccttctccgtcagattatctcctcggccacgatgtctctccgccgcactatcctcgatctccaccgtcaaacccagagagccactctntcaaagtctctacctttctcgatgagtcacatctcctccgcatccgncaccgncgccgtgagaaacccactgggaagagacctcttttcaatccccttcgcacaaggccagaaactgaaaccagnttcaaccaatnttggtaacggtcggttcgatttcggcttcaatttggggaatttggactnaacaagggnaggcaaaatttttgggggnaaattggntttttntgggggntacannttaant

SEQ ID NO: 133110 - DNA, 599 bp, Arabidopsis thaliana columbia
  unsure (1)..(599): unsure at all n locations
catcatcatctcttggtgacagaagaaaagagttgaggaacagagaaaatggcagcacaagcacttgtgtcttcttcacttacctcctctgttcagacagctagacagatatttggctcaaaaccagttgcgtctgcctcacagaagaagagttcctttgttgttaaagctgctgcaactccacctgtcaagcaaggagccaacagaccattgtggtttgcttcatcgcagagtctctcttacttggatggcagcttacctggtgactatggattcgaccctcttggtctttcagacccagaaggtactggaggattcattgagccaagatggctagcatacggagagntcatcaacggacgggttcgccatgttggggtgcaacttgagctattgctcctgaggttttagggaaggctggttgattccagcagagcttgnttccttgggtccaaancggtgtgattccaccagaagggcatacactncttggagcaatncacactnttttntntcggatngcnttatngggttcctnnggncttgngtaaggcttgaaaccaggcttttggaaannnttttggtagnaggttcccttt

SEQ ID NO: 133111 - DNA, 413 bp, Arabidopsis thaliana columbia
  unsure (1)..(413): unsure at all n locations
ctttttttcttgttcttcctcttcttcgattctcctcttcgacgtctcttgttactgtgcgccgtcttagccttacgtncgccaacggntncntcctatcctacgctcatctatcgtcactcccacagcgagagcttcttcggaagtttccggttgtactacgatcgatccagattttntcgtagagatctctgatttctaaccagacgggggcgatgtcgaaagctcgtgtgtacaaccgaagtcaattgtgatttcgaccccangntttatttggggtttacggggtcaactcaatttgttcaattgggggggangcaaagattgnattattganggtnggtaaaggaaaggtaagggccgttggaaaaaanattaagtngaaggtttttcngaggggntttaaatttnga

SEQ ID NO: 133112 - DNA, 368 bp, Arabidopsis thaliana columbia
  unsure (1)..(368): unsure at all n locations
acacagcataaaagtagctctattgacttttttncttcctccaaactctttttacgtcaagcaatggaggatcttgatccaacctacatccaagcaccagagcatagatcagattcgaatttcatccctaaccaaccagaagaaatacccgtgattgatctctcgnggctcgatgacccccgaagatgtccaaaacggttatctcagaggtccgggtgatgctttttgaaaaaatggggnntttttnaaggtgcttaaatcaatgggtgtgcccttncttaccggaaaggnaacggtttgngggaggncttttnaangatngtttttcgnnttttgcccttttgggaggggggagggttaaaagggtt

SEQ ID NO: 133113 - DNA, 511 bp, Arabidopsis thaliana columbia
  unsure (1)..(511): unsure at all n locations
gcagtggtgcactaatagttgtaggctcatatgtcccgaaaacaacaaagcaggttgaagaacnncaatcacaacataaccagaatttaaggagcatcgagatctctgtagaaaaagttgctctcaagtcatctgaagtgagagatgaagaaatcagaagagcagttgagatggccgatgctttccttcgggctggcagggagactctaattatgagcagtcgtgaactcatcacgggaaaaacatcttcggaaagtnttgatattaacagcaaagtgagctccgctcttggttgaagtagtgagccagatatcgnccagaccctcgttatattcttgctaagggtgggaattacgncatcaggcaccagcaaccgnaagcccttaaagcacggcgnnancttnttnatttgggcaaagcccttcctggggttnccntattggaagtttgggncccnnaaagttgggnatncnnggggtcccctcaatttttttccccgggaattttggac

SEQ ID NO: 133114 - DNA, 558 bp, Arabidopsis thaliana columbia
  unsure (1)..(558): unsure at all n locations
cacgtcgcgggtagctggttgtaaaggtatagaatatagttccccaactctttcctctgctatcagcaatcttacaccagctttcaccttcatccttgccatctncttcaggttccactttctcctaaactgggtgattccactcttaaccatacaaaagatatgattttcagacagtaacagtcaatatgaaatgatatcgttgtctgtgaattatggagtagttgtataagtatgngaaatgttggatagatatgaggtttgtttgtaactcttaactttggtgactttgttcctgcttcctggggtgactngtnaaaggattggaccaagttattgttaagnaggtnttcaaactcagggctaaaanncatttngcaccaattaggtttcntatannctggggngcnctnggttaattgttcctgtattaaagggcccaaaaactttctttttttgctgcatcggttnccttcatttcgggggcaaagttnggtaaatttgggggccttttccnnnggcttccaggtttttcccttttttcaagcctnggttant

SEQ ID NO: 133115 - DNA, 506 bp, Arabidopsis thaliana columbia
  unsure (1)..(506): unsure at all n locations
acggtgttctgattgccaaagcaaaatttcccctcttttgtagcgttggttgcatggaaatatccatggatggtcaaaatgccttgatagggatgaactcatgttccaactcggattattcgagtagtaatgatacatcgaaagatagcaaagaaattgaaagactggatgttccatctccttcaattngcttcctcaacttatacacactacaggtattccatgtgctaaagcttggtcaaggccaggatataaccgcactggctctgaacgttgacaacacggacctcttagtttccacagaaggtaaacaattggtaatcttcactggttccggctttaagnttaaaaggtgggtggntccaatgcttgaagctcgggtngggattngggnaaaggatcaancnccctggttcagattgnnggaacctncggnaagggaaatctcaagnttgaaaccccggggnggnnaaanggttttnaanccgggggantttttaaaccag

SEQ ID NO: 133116 - DNA, 444 bp, Arabidopsis thaliana columbia
  unsure (1)..(444): unsure at all n locations
gattttaaaccgccatggcttctncttcgctctctaatctaatgctcgcnattcatgagaagaagacgagctccgttnatctctaccgtcctctccgcaactacgttactttnacctactctaagcgcgaggctcagcttatagacgacgatctcgagaccttgaagcagctccgatccgatatagaacgcgtttccnatccttctccagctgctcggcgagaccttctaatctcctatnacaaagttctttgtcttgtggagacgcgatttccaatttcccctgacaaggatcatgtcaacggcggtctcttttcgtatggtacgatggtttcaagcaaaagcataaagntacttaggagnacattcatttggggaaagcagntntnctattaaatctggggctagtnnagccanntttggcctgggaannccgaccccgtga

SEQ ID NO: 133117 - DNA, 443 bp, Arabidopsis thaliana columbia
  unsure (1)..(443): unsure at all n locations
gggatgtgtcagttcatcctgaatctggtgagaagttttgacacgcacaagcaacctaagagtgagcttggagatctggtggaaagcatccatataattgtaggccttatggaaaaccttcaagggcgtggaactttgagggtatgtaactggtttcaaaaaaatcaaggaaagcaagaaagaaaaaacccaagggaaataaggaggccacagtgcataaactgtctgaaaatcatccaagtacttcaaacggagctagcacagcaaaaagcataccgatggttgattcaacagtttcaacagaggntnggcccattggatgtgccncccattaaccngggggattggaccttggggctttaacttgnttggaaccttaaccaaattgcccagccccgngggcnaattaattgngggtnnnnantcttntttggggganntnt

SEQ ID NO: 133118 - DNA, 552 bp, Arabidopsis thaliana columbia
  unsure (1)..(552): unsure at all n locations
accaaacgaaacnccgatcttntccgttctcgtgttttcctctctggcttttattgctgggattgggaatttntnaccgctctcttgcttttaagttgctgattctttttccttcgactttctatttccaatctttcttcttctctttgtgtattagattatnttaagttttatttttctgtggtaaaataaaaaaagttcgccggagatgacggctgtaacggcggcgcaaagatcagttccggcgccgtttttaagcaaaacgtatcagctagttgatgatcatagcacagacgacgtcgtttcatggaacgaagaaggaacagcttttgtcgtgtggaaaacagcagagtttgctaaagatcttcttcctcaatacttcaagcataataaattcctcaggttcattcggcagtcaacactttcgggttcggaaaactgtnccgggtaaanggggttttcaancggtntttccgggnggcggggnggccttttcggcancgggggaaacggnttcttncgggggaattttttttggccccctggcaattt

SEQ ID NO: 133119 - DNA, 577 bp, Arabidopsis thaliana columbia
  unsure (1)..(577): unsure at all n locations
cgctttgagtcgtatcngctctcttcttaatccgccgtctctcactttttcgccggcgtggttagatcgtacaaagctcagagagaatgttgggaatcttgaggcaaagagccatcgatggagcttcgactcttaggaggacgcgattcgcattggtttctgctaggagctatgcagctggtgcaaaagagatgacagtcagagatgctctaaattctgcaattgatgaggaaatgtctgctgatcctaaagtatttgtcatgggtgaagaggttggccaatatcaaggtgcctacaagatcactaaaggccttttggagaaatatggtcctnagagagtttacggtanccctattacctgaggctggatttacctggaattggagttggtgctgcctatgctngcttaaaagccccttgtngnatttatgacggttaaccttctctntgcaggnaattgaccaaatcatcaattcccntgcaaagcaaatacatgctncttggcaanaaaatgaccnnggnttgggnccatggcttctctggtgggcaanatcnaggcnttagggggatccnantc

SEQ ID NO: 133120 - DNA, 505 bp, Arabidopsis thaliana columbia
  unsure (1)..(505): unsure at all n locations
agagaagacgatcagggagagaggatactgaaaaaaggagaaggacaagaacagatgatgagagatactctagaggaagacatgagaggtctacttcaccgtcagataggagtcacaggagtagtaggcgttcacctgaaagagctattgcctcaaggcatgatgaggggtctaatgcaagagggggcagcgaggagccaaatntcgaggaagattcagtcgcgagaatntgagcagttgaagaggctctggcagcgaagaaaaaggaagaaccatcatttgagctatcaggggaacttgctgaagaaactaacagatacagaggtatcacactcctcttcaatgagnccccagaggctagaaaaccccagcgaacgnttgggnctgtatgttttaaggatggtgancccctgaatnngccctntnccttaccgccaaanttgtnccnctttgncgngaaaaagntttccgcattctncggtccccnttttnagaanagattttt

SEQ ID NO: 133121 - DNA, 516 bp, Arabidopsis thaliana columbia
  unsure (1)..(516): unsure at all n locations
aggcctcatcttcaaagagtgagtttgaggaattggaagctaagcctacaatggcagttatggatggtcctcttgaaccatcatcaacngctagggatgcccctnatgatcctncttttntnaacttctttagctcaacgatgaatcttgggaacactgcgagtgggtcagcaagtggaccttaccaatcatcagcgattcctcaccaacctcaccagcctcaccaacccaccattgctcctcctgtagcggcagagcacctccacagatacaatcaccaccggctctacaatcctcctctcctctgatgactctntttgacaacaaccctgaagttatcagcagcaacttcaacattcacacagatttggtgacggcgnctttttttggcccccncggattgntgggacagcacacctanttctngggnattntgccactgntctccttttaatcctataatggggnaccanaggggaattgnctcggggtcagctttncacccaattacncana

SEQ ID NO: 133122 - DNA, 551 bp, Arabidopsis thaliana columbia
  unsure (1)..(551): unsure at all n locations
ctctctctctctctctctcgatcggataatatttnanctttgtggttggaggatctgagttagtcatgttcatgatcgattggttctatggcgttctcgcttcgtnagggttatggcagaaagaggctaagatcttgtttctgggactcgataatnctggtaaaaccactctgcttcacatgttgaaagacgagagattggtacagcatcagcctacgcagcatccaacttctgaagaactcagcattgggaaaatcaagtttaaggcttttaatttgggtggtcaccagattgctcgcagggtctggaaggattactatgctaaggtggacgctgtggtctacctagttgatgcttacggcaaagagagttttcagnatcaaaaaaggacttgatgcacttctctcagacgnatccctgccagcgttcattcctcattcttgggacaaggtnggcatnccgntgctgnatcaaggcgggctcgtacattnggcttncaantncttcaggaagggaagggtcacggttncgtgccttggggtnttttcant

SEQ ID NO: 133123 - DNA, 537 bp, Arabidopsis thaliana columbia
  unsure (1)..(537): unsure at all n locations
ctttacacttgaaataagtttttncctttcttggtaataaaaatatcctttnngtttctncttctccacacttctagaagtnctagattttncctagctaacgtaccagaaaaaaggaagccaagcctagaaacactataaagataagacacaaaggaagtctgagaattgtgagtaaaaatgtgtttggaagttgtgtatcatgaagagaagacggagcttggtcggcaacaagcaccagggatgtgtccttattgcggcggaaaagtatcggcggtggatatagagacgaagtggttgttctgtttcttaccactttgtttcaaggtcaaacgcaaatactcatgttcttcgtgcgagcgtcatctcgtcttgtattattgangaacacgtagagagattcggaatttaagtaaggggaaanccaancaggagnttnanggaaagnacnagggggaactnaaaaggttgtttaccccttcattatttggtgntncccccattntnggtttcagttccctnggctctnttctaaac

SEQ ID NO: 133124 - DNA, 568 bp, Arabidopsis thaliana columbia
  unsure (1)..(568): unsure at all n locations
gacaagtgtatcggagaccctgaagcagatgtggagaacccagttcttaaagcagagcaggagtcacagataggcaaaggttcccgtggagacgtgactatacncccaactcttgtcgtgaacaacagacaatacagaggtaaattggaaaagggggcagtncttaaggctatgtgttcgggttttcaagagtcaacggaaccagctatctgtnttactgaagatttggaaactaatgaatgtttggaaaacaacggtggatnctggcaagacaaagctgccaacattactgcatgcagggatacttttaggggaagattgtntgagtnccctactgttcaaggtgttaaattccgttggtgaccggttacactcactgcaaagcctctggagcttttgcattgtggtatcaacaatggnggttctggnganatcccaggtggttcacttactctgttggnngntggncatcaaagggttcaatcccccttnggtcaagggcgttgggtagaccttaaggtttggcggtcaaaaaaacggttccctccccggtnattaaccctngggt

SEQ ID NO: 133125 - DNA, 303 bp, Arabidopsis thaliana columbia
  unsure (1)..(303): unsure at all n locations
gaatattgantcaccatcatcatcatcacttganatgaagaagaagttggaaattnaccaaaaatttacgagtcaaaacgaagaaaacaccaaaaaggaagaggagaagaagaaagagaccaacaataacantctttntaacatgangcataagaggacgagttcacacgtntgggactttgggagcactctntacgnctcgttcgagctcaactngttcaaacgtcaactcgactcagccatctttgcttcctccgccagaactatgtccatgttttaccnccctgnccggcggtttccctt

SEQ ID NO: 133126 - DNA, 452 bp, Arabidopsis thaliana columbia
  unsure (1)..(452): unsure at all n locations
gggtgatatattattggntcgatcaaattcagntgtgatgacgaaatatgtgagctcgagggataacttgaggattctnatgaatctnctaagagagtcaagcaagagtatccaaatagaagcattccatgtctttaagctgtttgcagcgaaccaanacaagcctgcggatatagtcaacattctggtggccaacagaagcaagcttctgagattgttggctgatttgaaaccagacaaagagggtgagaggtttgaagcaggcaaaagtcaggttttgaggaggaatcgcagcccttngaccctcgngatctttgctttggacccaaccttaatgcaatttcatccctttcctttcccctttttaaaacccctcgggnaaaggccattttttgnanggatcnttggttgnttttttttacaanttngggtancccaatnttccctntnaa

SEQ ID NO: 133127 - DNA, 409 bp, Arabidopsis thaliana columbia
  unsure (1)..(409): unsure at all n locations
ggaagctcctatagagttcccaagggacattacaatggaagagactgaaccaaccagactcaacccaaacaggagatatgaggntcagatggttccaagcattacttcttctttgatcagacctnaagaagacgaagagtcgtctcttaatttgagaaattcagtaggagatagcagagcagaggttccaaggaacatggttaacaccaaccaagctcagcagcggagagcagaacccggcttcaaaccaaagtcactgctatnnattccagaatttaatatcaggatttttgcagagngcactgaaagncctnaacagcggnatttttcnagcagcggaagggnggagnaaaggaagcggtnggcattagttccccnnagtggtttccaggggtacttagancaangt

SEQ ID NO: 133128 - DNA, 410 bp, Arabidopsis thaliana columbia
  unsure (1)..(410): unsure at all n locations
cacaggttcactggatttctnctcaacagagcctggagttcgtgtaagaaactttcctcatgtcgatggaaattacgctttgcacgtttacgtacctgtttgtatacctccactgccaaagaaggagattgtatgttttttaaagaaggttgcatcagttgttcctcatcttcatttggtagaggctgatgtgccactcagcatttctatgcaaggatgatcagaagtttgagcgtgccttggggagagagttccacataagcttaggaaggaaacgttccactacgngttcaatcangntttaacctccggtgattttctaatgccttcggcaaaangcntttcangtttgccagnangnggntactttggctnaggntttccaaataaangtngggaaagtcttttnt

SEQ ID NO: 133129 - DNA, 457 bp, Arabidopsis thaliana columbia
  unsure (1)..(457): unsure at all n locations
ttctctttctgcaatggcgagattagtgcgtgtggctagatcctcctccctctttggctttggtaaccgtttctactctacttcagccgaagctagccacgcgtcgtcgccttcgccgtttcttcacggcggcggantagcagggttgctccgaaagatagaaatgttcagtgggtgtttttgggatgtcctggtgttggaaaaggaacttacgctagagactatcaaccccttctcgggcggtccctcaacatcggcaacggggnttcttcgtnccgtaaaaggaggctttcaatncttctgggncctttnttttcaaaaagnttattcggnggattntaaaatnaaggggaaaattgggttcttantggntccatttnagncnttattntcccaaaagcttttagggcttgtnaaggtagaggtnaatcaaggggttttacccttaagggtttcc

SEQ ID NO: 133130 - DNA, 489 bp, Arabidopsis thaliana columbia
  unsure (1)..(489): unsure at all n locations
cgacaacgaaccagggaacaagaaccgtcgtggtcgaaaacgaagaccttggcggcaggtcatgtacggttctaggggggccatgtttgggagcggggggtacgaggtgggatcaaagagacaaagaatgatgcaatcaaatccctacttggcagttggcactggacctaccagctttccaccttttggctatnccggcggattcccagtcgttcgcctcaggggtcttcccttcaactgcgctgacattnacatcttcgagttctttgcgggcctcaacattntcgatgtcctgctcgtcagcaaaaacggtaaattctctggggaggcctttttggtgtttnccgngcctatgcaagtcgagattgccttncaaangggccagacacaatattggggaggagatacgtggaagttttccggtgctnttaagaaggnctncttcaaatngggngggcttcctnangnagggnccgtnttatattnngg

SEQ ID NO: 133131 - DNA, 457 bp, Arabidopsis thaliana columbia
  unsure (1)..(457): unsure at all n locations
attgtagtttcgtttacaggatggtgcttgtnatgtttaggagggagttgagttttgaacagacgctgtgtctctgggaagtgatgtgggctgatcaagctgccattagagctggagttgggaagtcgccatggagcagaatccggcaacaagcaccgccaacggatgatttgttgctctatgcaatcgcggcgttagtactacgtaggaaactgatcatacagaaatacagtagtatggatgagatttgtggangagtgtaatagcatggctggtcanccttaatgtctggaagcttccttgattgatgncccatcaaccttnntccgtgacgntttcacggcaaagntttgaaaacttttttntcaattacaagnggtttttnttngaagaaggcggtccaaagcccngaaattnangggttccccttcanaaaagncccttganctggtttggt

SEQ ID NO: 133132 - DNA, 589 bp, Arabidopsis thaliana columbia
  unsure (1)..(589): unsure at all n locations
gtaaaatggagcaagaacattaaaatttcagaccccatggaagaaggatgcaggcttggtcctgtagttagcaaaggacagtacgagaagatattgaagtttatctcaacggccaagagtgaaggagcaacgatcttgcatggtggttcccgacctgagcatctggaaaagggcttcttcattgaaccaaccatcataactgatgtaaccacttcaatgcaaatatggagagaagaagttttcgggcctgttctttgngtgaaaacatttgccagtnaggacgaggcaattgagctagcaaatgactctcattacgggnctagggagcttgcagtgatatcttaattgncacagnaaggatgtgnccgtataagncgaggccttttaaggctgggnttgtctgggttaacctgctcgcagcctttcttttacccaaagncccatggggttggtgtcaaaacgganggggttttgccgggaactttgggnattgggccttganaccanctttaggttttaggaagtacctttttaatttnaacgnnccctggggtggcaaattccccctagaattnatnatttnttgggc

SEQ ID NO: 133133 - DNA, 406 bp, Arabidopsis thaliana columbia
  unsure (1)..(406): unsure at all n locations
aaaaggataaagagaagagttaaatgtttttaattctctcttttacaatcttgtgggttaaaagtgaaaactcatcctctgtatttncaaactcttatctctacgtgtgcacaaacctcaccattagatgataagtagaagacaaaacttacagccaaataggcaaacttatctctctctccaaaacatttggtccatacgataaagcaagaagaagaattaaganttagagcaagaagaagaagaagtagaggatgaagcatgaaatgatggacctccagcttaggtgcattacccncntctttcttccttttgcnttncctcntgggaattatngtggcncaggcctnaggcccnggtntctttggaaaatnnggtcccccttctttcacnagcacatcncctg

SEQ ID NO: 133134 - DNA, 566 bp, Arabidopsis thaliana columbia
  unsure (1)..(566): unsure at all n locations
agatgatccagaaaacggggctccagctgcagtgccagtnccattacccgatatggttttgccaccttcatttgatagtgataactcagcttaccgataccgatatctggaacccacttcacaacncctaaccaggccagtgttggatacccatggttgggaccatgactgtggatatgacggcgtcaatgcagaacacagtcttgctctagctagccggttccctgccacagctactgtccaagtcaccaaggacaagaaagagttcaacattcatctggactcctctgtgtctgctaagcacgggnagaatngatccaccatggcaagggttcgatattcagaatgtagggcaagcagctggcaatatgtggtcagagggggaaccnaattcaagaattttgaggaggacaaggcaaactnttggaggggtcagtgncatttttgggngnganatngccacttggggcaaanngggggccaattgccttggggaaaggtttgtcttttgggannctgggcaatngnnaaaggggnttggctttgngnnccttgggtagttgggg

SEQ ID NO: 133135 - DNA, 547 bp, Arabidopsis thaliana columbia
  unsure (1)..(547): unsure at all n locations
tctgaactcatctttcaatctctcttgattccaatccattcttcttcaagtgccgggttctcgggtcggatcttctaagtctagctagggataatggctactgtcactactcatgcctcggcctcgattttccgaccttgtacttcaaagccaagattcctcaccggttcttccggtaggttgaaccgcgacttgtcgtttacatcgatcggttcatcggccaaaacgtcgtcgttcaaggttgaagctaagaaaggagaatggttgcccggtttggcatcgctgattatcncaccggcagtcttgccggtgaccaatgggtttgncccnnttgggtttagcagaggatccagagaactttaaatgggtncgtccaggcagagctggtcaacggnngattgggntattnctcggtgtcgctgggatgcttttnccggaagtttnaccaagatcggataaaaatnttcccaagtgacgatcttggaaangagattttaangtgtgnattttggntcggtnaattgttatagtggcaacgngaaaangc

SEQ ID NO: 133136 - DNA, 551 bp, Arabidopsis thaliana columbia
  unsure (1)..(551): unsure at all n locations
ataatntccccaatttctcagagagactcaaaatcaccaccaccaccaaatcgccgccatgtttaaacaagcttctcgtctcctctcccgatctgtcgccgccgcatcttccaaatcggtgacgactcgtgccttttcaacggaacttccatcgacgctcgattccactttcgtcgaggcatggaagaaagtcgcaccgaatatggacccaccgcagactccttctgctttcatgaaacctcgtccttccactccttcttctatcccgacgaagctcaccgtcaattttgtcctcccttacacatctgagcttaccgggaaagaggtcgacatggtcatcattcccgcatcaacaggncaaatgggtgtnttgcccggacangtttccanaatttgctggntaaaanctnggataatgtccgtcatgangganttacggtgagaaanacttttnagcagtggtttnattctcacgaaattcgtggtgnaaaattnggtgaagtntccgttacnaatttcctagcaagncaaagggtngtngtcaaaacttt

SEQ ID NO: 133137 - DNA, 536 bp, Arabidopsis thaliana columbia
  unsure (1)..(536): unsure at all n locations
agtaatcttgattacacggtttggctcactggaaagactttcagagtcggtgacactctagagttcgtatatggtctttcacactcggtgtccgtggtggataaagcnggctacgataactgcgacagtagcggagcacacagaactttgccgatggagacactaagatcgatnttaccacagttggaacaatgcacttcctttgccctacttttggtcactgcaagaacggcatgaaactngccgttcctgtcctcgncgccgctccatctccttcgactccttcttcggctccctncactccttcgactcctttcttncccgccctccactccgtctacccctttctttggccccctncccttccttnggcttcttnttcatngntcccccctnagttctttgccttcatctgantttccggcgnccaatggaangcggattaagaggnattacgcttcgcagttcattgcggcttggtgtttcaaangggaattagggggaatngctatgatattggaacgtgnattatgnng

SEQ ID NO: 133138 - DNA, 552 bp, Arabidopsis thaliana columbia
  unsure (1)..(552): unsure at all n locations
accntccagcgccgcttggttctntctctcctctgtnctctcttcccttatcttcttcttatacccttcgaccaacgaagaaccctagaaatcgattaacaagatgaatagggaaaagttgatgaagatggctaacactgtccgcactggcggaaaggggacagtaagaagaaagaagaaggctgttcacaagaccactacaaccgatgacaagaggctccagagcactcttaagagagttggagtcaattccattcccgccattgaagaagttaacatttttaaggatgatgtagtcattcagttcattaaccctaaagttcaagcttcaattgctgctaacacatgggttgtgagtggtacaccaccagncggaaaaattgcaaggcattcttcctcaggttntcagccacttnggccngntaccttnggcaacctgaggaggtttgaggggaattccngaacaaggtccngggcaggtgtttnccngaacantcctgggggggccgttntnntgtgcccnnctttttggnggggngntttggccctttt

SEQ ID NO: 133139 - DNA, 312 bp, Arabidopsis thaliana columbia
  unsure (1)..(312): unsure at all n locations
aaaagacgggatcgtcccntcagaagaaagacaaataccttaccgatcaggagttagattttnttgttgccatcttgggtttgctggtaaatttggttgaaagagacggagtgaacagatcacggcttgcttcagcgagtgttcctattacaaacccagaaggagttgcaagaaagtgaccaggaaatnattcctttactaatgttcanncttnttcaccaatcaanggtccagcagnggccaaggagggggcaactaccttcaccttangttgtngagggaggcttttttttgggaaggnggaaaggaaag

SEQ ID NO: 133140 - DNA, 562 bp, Arabidopsis thaliana columbia
  unsure (1)..(562): unsure at all n locations
cgactcgtgccttttcaacggaacttccatcgacgctcgattccactttcgtcgaggcatggaagaaagtcgcaccgaatatggacccaccgcagactccttctgctttcatgaaacctcgtccttccactccttcttctatcccgacgaagctcaccgtcaattttgtcctcccttacacatctgagcttaccgggaaagaggtcgacatggtcatcattcccgcatcaacaggacaaatgggtgtcttgcccggacacgttccaacaattgctgagctaaaacctggnatcatgtccgtccatgaaggcactnaccgtgaaggaatactttcttgagcagtggttttgcaattcctccacggaaattccgtcgntgncaataattcgcgggtggaagctnttccgnttgaccaaattgaccctagccaantccaaaagggttaggttaggtccaacagaaacttngttttgcacaanaggttttnagaagcagngganaagttggtnttaagtnaaaggccttaangagttttnggtnaagaggtnttnttnttnttntc

SEQ ID NO: 133141 - DNA, 534 bp, Arabidopsis thaliana columbia
  unsure (1)..(534): unsure at all n locations
tcttgactcgaccatcgtttctctaatctccgcaactatggcttcatttacgaaaacggttttnatccctattgcgcacggtacggagcctctagaagcggtggcgatgattaccgtgttgcgtcgaggtggtgctgacgtgacggtggcgtctgttgagactcaggttggcgttgatgcttgtcatggcatcaagatggtcgctgatactcttctctctgatattaccgactctgttttcgaccttattgtgctccccggaggctttcccggtggcgagactcttaaaaactgtaaatctttagaggacatggtcaagnaacaagactctgatggccgacttaacgcagctatatgttgtgctcctgccttggtctttgtacttngggtctactagaaggcaaagaagcaacgggttaccctgtttttattggggaacttncggtacttttnaacttncttttnggcaagngtcaaattatggagatagtnccagngtggcnagnccncatnaatntcntacgtttgggagta

SEQ ID NO: 133142 - DNA, 578 bp, Arabidopsis thaliana columbia
  unsure (1)..(578): unsure at all n locations
caacaaacagagaaaatgtgtggcggtgctattatttccgattatgcccctctcgtcaccaaggccaagggccgtaaactcacggctgaggaactctggtcagagctcgatgcttccgccgccgacgacttctggggtttctattccacctccaaactccatcccaccaaccaagttaacgtgaaagaggaggcagtgaagaaggagcaggcaacagagccggggaaacggaggaagaggaagaatgtttatagagggatacgtaagcntccatggggaaaatgggcggctgagattcgaggtcccacgnaaaaggtgtttagagntttggtttggtacggttcaacaacggcgggnggaaagctnccattggnttattnatgtttccgggccaagnagatcccctggtgnttaaagccaagnttaaactttcccagatnttgaaccatcctcctcctcctaatttatactccttccgccgtnattggcacggtnaanccnttaagcttcgnggaagaaggnttcggtttttttaaggttangcggttagtaaccggttcccgtgggttntgggtttc

SEQ ID NO: 133143 - DNA, 539 bp, Arabidopsis thaliana columbia
  unsure (1)..(539): unsure at all n locations
ggaaaatcgtcgagagagagagagagagagagaatgtcgtatcttcttccacatctgcactccggttgggctgttgatcagtcgattctggccgaggaagagcgtctcgtcgtcattcgtttcggccatgactgggatgagacctgtatgcagatggatgaggtgcttgcgtctgttgctgagacgattaagaactttgcagtcatttatctggtggacatcactgaggttccagacttcaacaccatgtacgagctgtacgatccttctacggtcatgttcttcttcaggaacaagcacatcatgatcgatcttggaactggtaacaacaacaagatcaactgggctctcaaggacaagcaggagttcattgatatcattgagactgtctaccgtggtgcaaagaagggtcgtgggttggtgatttctccaaagattctcccccaataccgtacttaatggggttccaacatntctggttgtaaaacnttnggctggnntctggcactgaaatccggactggtnattaaaatgttgtc

SEQ ID NO: 133144 - DNA, 587 bp, Arabidopsis thaliana columbia
  unsure (1)..(587): unsure at all n locations
ccacaaactccatagctagctagagagtaaaaagaacaaagatgtcgaaagaagtgagcgaagaaggcaaaacccaccatggaaaagactacgtggatcctccaccagctcctcttctcgacatgggtgagctcaaatcctggtctttctacagagctctcatcgctgagttcatcgctacactcctcttcctctacgtcaccgtcgctactgtcatcggccacaagaagcaaaccggtccttgtgacggcgttggtttacttggtatcgcttgggctttcggtggtatgatcttcgtcctcgtctactgcaccgccggtatctctggtggtcacattaacccagctgtgactttcgggtctgttctttngnccgtaaggtctctttgggtgcgagctntttggtacatggttagcncagtgtctttngnngcattttttggtgtggggnttcggtgaaagntttcattgaaaactccttacaaaantntttggtggggggggtnaaaccgaggttacgggtntaagaaaggacctcnttnggngnttgntntttgactttggccttnttaaacgttttttnaanta

SEQ ID NO: 133145 - DNA, 583 bp, Arabidopsis thaliana columbia
  unsure (1)..(583): unsure at all n locations
gaagcaaccattactagcggtgaaatgccacctaatcttggtcaagccttcaagaaccatatgagtgagatgtttgcataccatgcaaccatgatgtcaaacacacttggaacttcaactgttgtcttcaccagaaccggtttcatggccatattgttaagtcactatcgtccttccggcacaatctatgccttcaaaatgagaaaaaaatacaacaaagattagctttgtatcaaggtgtatgccccatatatatggngttcacagatgatgcagaagaaacttttgctaatgctttggctacattactgaaacaaggaatggtgaagaagggagaggaaatagcaatcgtacagagcggtacacagncaatctggcgntctcaatcggcacataacatccaagtccgcaaggtttaaaggttcttttaaggtggggtgntttaatatgtgggcctcgttttnggtaanattttcggttnatgctccctccncttgacctttcacacttgtggttntgncctctctcagttntttcacgnttgggtttggctntggcatacngtttnnccattggcantttc

SEQ ID NO: 133146 - DNA, 360 bp, Arabidopsis thaliana columbia
  unsure (1)..(360): unsure at all n locations
gttgatatgcagatcaaactngtnccgggaaattcagccgggaccgttaccaccttctacttgaagtctcaaggattaacatgggacgagatagatttcgagtttttggggaatgttagtggagatccatacattgttcacactaatgtttacactcaaggcaagggtgatagagagcaacaaattctacctctggttcgatccaacaggcgcggttccacaaattactctatttntatgggaatccgagtcacatagtggttccnntatttgattgaggaacccnaattaggngggatttcaagggacctttggaaggaatttgggttttggcttnttnccaaagnnncccaancccnt

SEQ ID NO: 133147 - DNA, 597 bp, Arabidopsis thaliana columbia
  unsure (1)..(597): unsure at all n locations
cctctntcagtacacttcttttcatacctcaagagactaaaactagtttgaggagatttagaggagtgtttggttctttggataacaatatcccaaactgaaaatggctaagtcatatggagctatcttcctcttgaccctcattgtcctcttcatgcttcaaaccatggttatggcctcaagtggatctaatgtgaagtggagccagaaacgttatggaccaggaagcctgaaacgtacccaatgcccatcggaatgtgataggaggtgtaaaaagncacagtaccacaaggcttgcattacgttctgcaacaaatgctgcaggaagtgtctctgtgtgcctccgggttactatggggacaaacaaagtttgctcctgctacaacaactggaaacctcaagagggtggnccaaaaatgccctgaaaaaatttcccttcggtnccctttttttnataaaanttttcaactttanctaaatttccctttgnncaatggtttaccnnctttnttcccaatnttgnaatgtntgcncccctttnggttttttctaacccaaaaaattggggngccntggttgntttnctgaaaaaaaaac

SEQ ID NO: 133148 - DNA, 567 bp, Arabidopsis thaliana columbia
  unsure (1)..(567): unsure at all n locations
aattggaatgagtacaatctaaatcccttaacgaggatccattggagggcaagtntggtgccagcagccgcggtaattccagctccaatagcgtatatttaagttgttgcagttaaaaagctcgtagttgaaccttgggatgggtcggccggtccgcctttggtgtgcattggtcggcttgtcccttcggtcggcgatacgctcctggtcttaattggccgggtcgtgcctccggcgctgttactttgaagaaattagagtgctcaaagcaagcctacggtcttggatacattagcatgnggataacatcataggatttcgatccctattgtgttgggcctttcgggatcgnagtaaattgatttaacaaggggncagtccggggggggaattccgtattttcaaaagtnaagagggtgaaaattctttnggnttttnttgaaagaccgnncaacctttnggaaaanaattttttncccaaaggangttttttccattnaannnaaggaccgaaaatttngggggccnttaaaagccggccaaantacccgccctnggttttaaccc

SEQ ID NO: 133149 - DNA, 351 bp, Arabidopsis thaliana columbia
  unsure (1)..(351): unsure at all n locations
ggcaataccaagcacatattcgtggcctgaatgcttacgagcggcataagaagttcttgaaagactacgttcgattttatgggaaggataagcctgcagaagttaagttaccggttaaaactgatcaggacacactacgagaaggatacaggtttatacgttctgaagaagatgatttggatccctcttgggagcaaagactngtgaaacgntactatgataagctttttaaagaatacngtatagctgacatgtcaaggtacaagactggtaagatgggtttaagatngngnacngnaaaggaagtaatnacnngggaagggcagtttatntttgggngcnaacattgtg

SEQ ID NO: 133150 - DNA, 484 bp, Arabidopsis thaliana columbia
  unsure (1)..(484): unsure at all n locations
gatttcaagaacacaaaaacagagttaaaactctcatctctcccaaaaaagatgcctttaagcaacaatgtaattggttgcataaacttcatcaccgtcctcctctccattccggtcatcggcgccggaatctggctagccataggaacagtaaactcatgcgtcaagcttcttcaatggccagtaataatcctcggagtcttaatcctcttagtgggtctcgctggtttcattggagggttttggagaatcacatggcttcttgttgtttacttaatccgccatgcttattctcatttgtactttttggggtttgccctttgttcgggatttattntacattgggttaaccatnaagnagggctctgggtcatcccagaacccaaagtaggaggcttaanctttnagntatnaggccttccaaagnattttcncntngggttggntnacggnaggaaggggttcangnggntcctnnttaaat

SEQ ID NO: 133151 - DNA, 437 bp, Arabidopsis thaliana columbia
  unsure (1)..(437): unsure at all n locations
aacacaaaaccacaaagctttaaacttccaaaagaatacaacaaacaatcaaagcttaatctatccaacaatgtcgaagattatttccctngtggtggcgatgatcgcagtgctagctttgccgattcgtggtcaacaacaacctctaagccaatgtactccatcaatgatgaccaccgtgagtccttgtatgggcttcataaccaacagtagcagcaatggaacttngccgtcgtctgatttgtngtaacttcgctgaggtctttgaccaccggaggaatgggatgtctttgcctaaattgtcactggggacttgttncntttcaatantccccatttaaccggaacaaccggttggnttaatttccccgtnggttttaaacatggcntgggggtcccttttttaaatgnccaaggccanttnttggntccnngnt

SEQ ID NO: 133152 - DNA, 500 bp, Arabidopsis thaliana columbia
  unsure (1)..(500): unsure at all n locations
aggaaagaagcagtattgttgtgattggacttagtattcacacagctcctgttgagatgcgtgagaagcttgctatacctgaagctgaatggccaagagctattgctgaattgtgtggtttgaatcatattgaagaagctgctgtncttagtacttgtaaccgtatggagatttatgttttagctttatctcagcatcgtggagttaaagaagttactgaatggatgtcaaagacgagtgggatcccagtttcagagatttgtcaacacccgttttctgttgtacaacaaggatgctacacagcatatatttgaangtctcagcttggtcttgactctcttgtcctaggagaaggtcagatccttgcacaggtgaaacaagttgtgaaagttggtcaaggagtaatggctttgggaggnatatcagcgggctgtttaacacggggtacctgttggnagcgggtngancagggcaatatncctctgggcggtnggtagtgc

SEQ ID NO: 133153 - DNA, 307 bp, Arabidopsis thaliana columbia
  unsure (1)..(307): unsure at all n locations
cttcttttggagttcttccttctntntcattcaataaaatnccactattttttnacacgacagaattnccgaaaaacgttgctgaggtttacctgttaaccatctttaaaggtcttaagcatcgccttgctgctggtgcgaagatacctcacattaatttnntcatttccattcaagagaaggaaattaggactcctgaaggagagaagacaattgaccttacaggaagggtcggncaggaaattggtgcattgtttnagaaaggttagatatacccatatcatnaggaanggnttcaaggatttaa

SEQ ID NO: 133154 - DNA, 573 bp, Arabidopsis thaliana columbia
  unsure (1)..(573): unsure at all n locations
agagggtttcgttgtgccctcgagtcagctgttttntggtaggctcttacaggaagagatgtcaactatcaaaagctacttgagggagtacagatcttcttgggtggttacaggttgttccataatggcagatacttggaccaacacagagggcaagaaaatnatcagtttcttggtctcgtgccctcgtggtgtctacttccactcctcgattgatgccactgatatagtagaagatgctttaagccttttcaagtgtctagacaaactagttgacgncattggcgaggaaaatgtggtgcaggttattacacaggacactgctatctttagaagtgctggaaaattacttgaagagnngngaaagaatttgtattggnctccttgtgcaatacattgcacagnactggtcttgaagncttctcaaagctagnatttnccccgagtgcttagngaagcccaagatcacaaggttcattncaatcaaacatggntnttaancttntgaggccggttcncacagggctggccttttggccccagnatcgcncggtccgggcncctttaaagtta

SEQ ID NO: 133155 - DNA, 564 bp, Arabidopsis thaliana columbia
  unsure (1)..(564): unsure at all n locations
aaaatcatctgcaggaagtgaatcgtcaaaaccgagtttggaggatctgtcttgaggagttttttttttggttgagaaatggcttcgaaaaggatcttgaaagagctcaaggatctccagaaggntcctccaacttcctgcagtgctggcccagttgctgaagacatgtttcattggcaagctacaataatgggtccatctgatagtccttattcaggcggtgtcnttctcgtaaccattcacttccctccggattatcctttcaaaccaccaaaggttgcattcaggncaaaagtgttccaccctaatgtcaacagcaatggaagcatttgccttgacattttgaaagnacaatggngtccctgcactnaccatatcggagggtttgctttcgntatggtccatttgttaacgggcccaaacccagatggtncnttnggtccagggattgtcacatgtcaaaaccggtngggaaaggntggggctcntcgggaggtgggcttgaaattgaatggggtaaagttttnccttnnccccaaggttggttttngggggggggnnntc

SEQ ID NO: 133156 - DNA, 545 bp, Arabidopsis thaliana columbia
  unsure (1)..(545): unsure at all n locations
gagctaactacccaacctgtgaagctacccccattctntctcaacgttttcgttttgaaatggcgaggaagaagatcagagagtatgactcaaagaggttggtgaaggaacatttcaaaaggctttctggcaaagagcttcctatcagatccgttcagattaatgaaacaactgatctaaatgagctagttgaaaaggaaccttggctctcgtctgagaagctggtggtgaaacctgacatgttgtttggaaagcntggcaagagtggtttggttgccttgaaattagattttcctgatgttgccacttttnttaaagaacgtttggggaaagaggtagagatgagtngatgcaaaggncccntaacaaccattcatagttggaccntttttttcccacaatgaggggnattatcncatgntggctcggtcggcttggttcagcanagctttttntnngtttgggggattaggtnggggggccttggcaaggnaggcaattttttcccncaggggtccctgnaccnaaaatggccccttttngna

SEQ ID NO: 133157 - DNA, 555 bp, Arabidopsis thaliana columbia
  unsure (1)..(555): unsure at all n locations
tttttatcaatcacctagtcacttaggtgtaataaaactatatataatcagaaaattccaagttaaaaacaaaaggatataagtattacaacaatttaagctgtccatttccttttgtctcaacatgaagagaaggtcacacactctctactaaatttaagtacatgataatttagctttcttcaccatcatcggtgatgaattttccattaccaggattaatggcagcgaagaagaagaaagcaacgtttaagaggacaagtggttcgatatcttgaattggtataccggtctcaatgttgagttgagctaatgctnctttcccggtaataatctctccctatcagtggaaatgctattnccaactgtgncaatctttcctacggataactcgttcggcnttcgggnacccaaaacaatngncccttgtnctttgaggccgggggcantcgggcgtttttnccgggggggatacgggtttttttgggcccgtggggggncgcgcgggntttccnntttttccgngggtcaatggtccacagggtacaaggtntg

SEQ ID NO: 133158 - DNA, 357 bp, Arabidopsis thaliana columbia
  unsure (1)..(357): unsure at all n locations
ccgtgtaacatgtccgtnacacancctcaggatggacttgtttcanaggaattacctggtgctggaanntctgaggagaagagcggaagaaagaagaaagcaacaacgacaaaaatnctggagaggatgacgaagccgttggacaagaaactacagatacacctgaaaatggacattcgacagtaggtgaagtggaaaccacatcacatgagacttgtnatgagaaaaatggagaacgacaaggaggcaagtnctggggagattacagcgntaatgnaatcgggcaaattgaagttacaagttgaagacgcaactttntgttactgangtnttacattgnggctaaaggatttcggg

SEQ ID NO: 133159 - DNA, 413 bp, Arabidopsis thaliana columbia
  unsure (1)..(413): unsure at all n locations
tcttgacgggaaaacctccggcgagatttgtgagaacagacgcagaagtaatgggaagtttggggaataattgtctacagggatgtccagggaaagctaagatgtgtgctccatcgcagaaaccattttacatttgtaagcaagcttatggtggaaaaccaaagtcttagttttgtcggtgtcggtgactttttgtgtcagtgattttntaaaataatgcttttagtcatgagtttactctatagtcttggagaaatactaatatctatattcatcgagatcttcgtatgtacacaaataaatttacaaaaattgggacggnacttatagtatttattttgttgtattgtgtgtttttatatattnattgagntttaaatttaaaanaaaaannannnnnnccnttnngcttt

SEQ ID NO: 133160 - DNA, 439 bp, Arabidopsis thaliana columbia
  unsure (1)..(439): unsure at all n locations
ctgttttccaggcgcttctacgagatgcttgtatcaatgatggtgaatnactttctacttttcttaaccgtctattcaacacactgagctggaccatcactgaatttnctgtctcggtgcgagaaatgcaagaaaagtatcaggtaatggagtttcagcaaaggaaatgttgtgtgatatttgagctttcaagcaatctcgcaagggtcttagaattctgcacttacgcaatgccacaagcatttnttgctgggactgncacgaatcttcgtaggctcactgagttgattcttttcatcttgaatcacatgtcctcagcagtagatgacgngttcttttatctgtcacttagncgggcagggncaaccttcagagnaaagttttncctagggatcttnttagctccctttngttnggataaacntnatnnctttngggg

SEQ ID NO: 133161 - DNA, 386 bp, Arabidopsis thaliana columbia
  unsure (1)..(386): unsure at all n locations
ctctctaccaacaggggtttttggatgatcaatttactgagttgaaaaagctacaagatgatggaagtcctgattttgtgtctgaagtgctttcanttttctttgaagattgtgtgaagnttatcagtaacatggctagagctttggacacgacaggaactntagattttagtcaggtaggtgctagtgtgcatcaattgaagggtagtagctcaagtnttggtgccaagagggtcaaaactttgtgtgttagcttcaaggaatgttgtgaagctaagnacnacgnagggtaagcgagttatggttttctcttgggnctcattggttgagnaataatagnctcangttatgttacagntgtgtnagnatgttttcagcaagtnggt

SEQ ID NO: 133162 - DNA, 382 bp, Arabidopsis thaliana columbia
  unsure (1)..(382): unsure at all n locations
agtttnttttaaagtagttgaagataattcagtctgaagacaaacggtgtgtaagtnaagaagaaaaataaggaagaagaagaagcagcagcaatggtggagaagtcaggaggagaagtcaatttcccaaaactggagaaaccaacaggcaagaaacagacagcgacggttgttgtgggagttttggcggtgggatggttggcgatagagctcgtntttaagccattnttcaagaagctgagctcctccaaggacaaatccgattcccgacgntgccaccgtnccttccccgtngggcggcctnaaatatggtgagttngaattttacaaaggccttttcggggnacaccgnttttttnagctcnnattttttttttgnaaa

SEQ ID NO: 133163 - DNA, 441 bp, Arabidopsis thaliana columbia
  unsure (1)..(441): unsure at all n locations
gaatcttacattcttgaatacgtcaagaaaatggttcctttggtcagaaacgctctctccactctnttgtcttctcgtgatgaatcggattcagttcatgtcgccggattagttcttgatttcttctgtgtccctttgatcgatgtcggaaacgagtttaatctcccttcttacatcttcttgacgngtagcgcaagtttcttgggtatgatgaagtatcttctggagagaaaccncgaaaccaaaccggaacttaaccggagctctgacgngggaacaatatcagttcctggttttnttaacnccgttccggttaaagtttttccaccgggttttttcacgnctgngtnttacgnagcttgggccgaaatggcggaaagntcccctaagccaaggggtattttgggnaatcatttnaancnctgnacgtacccttttaaa

SEQ ID NO: 133164 - DNA, 477 bp, Arabidopsis thaliana columbia
  unsure (1)..(477): unsure at all n locations
catcattttcgtcggatcaatcaccaagagatggcgtcgagaaactccgtcaccggattcgcgttgttcagttttgtattcgccgtcatcttatctctcgccggcgctcaatccctggctccagctcctgctcccaccagcgatggaacatcgatagatcaagggatagcgtatttgctaatggtggtggcgttagtgctgacttacctaattcatcctcttgatgcttcttcttcctactccttcttctaatctctctctctctttcttctgtttttttttatntctttgcaacttcttattagtttcttcaatttgccttttttcttcttcttgtggtaaaattttcaagggntaattcatcatcangttcccgnttnnattctggggnttgantgattnanganaanccnactgttnncccttttggtaatccntccnaatnaaattaatccnctccccaaaaattgggaaagg

SEQ ID NO: 133165 - DNA, 302 bp, Arabidopsis thaliana columbia
  unsure (1)..(302): unsure at all n locations
gtgactctatccagtgttagagataagaaacttgcagtgttatttnagccatgtagtgcatctaccgtnaagatatggattagtcgcaagattgancccaatgcagtntcgtggaggaaggttttnttagcggttnatatgaaatcactcactggttttaagtttgacattaacgctgcaagtttntttnttgacgngaagaaaaaggtcgccatggttctggataaagacaggttcagttataaatttncncgcaacatagcttacatcattgggaagaaaggggtacttccgaaaaantg

SEQ ID NO: 133166 - DNA, 363 bp, Arabidopsis thaliana columbia
  unsure (1)..(363): unsure at all n locations
ctccgccttctggaacgcctgcttgcctttnatccgaaagatcgtgcatcagctgaagatgcactagctgatccatatttnagtggtttgtcaaattcagagcgtgaaccaacaacacagccaatttcaaagcttgaatttgactttgagagaaagaagttagttaaagatgatntcagagaattaatttacccgagagatattggaatatccatcctcagatgtttggaggaatacctngtnggtgggtgatccagcttagcttttttgtacccaagtgggggttaggcccgattttaaaaaggcaaattttncncaatcnttggaagnaaatncanaggttnaacccagggggcaagcaag

SEQ ID NO: 133167 - DNA, 390 bp, Arabidopsis thaliana columbia
  unsure (1)..(390): unsure at all n locations
ctggttttncctcatctatacaagtataaaaaggttcttggatttggagtaaactaaagatcatataaaatggaacaaggagatcatcagcagcataagaaagaagaagaagctttgccaccgggtttcagatttcatccgacggatgaggagctaatctcatattacttggttaataagattgccgatcaaaacttcaccgggaaagcaatcgctgacgttgatcttaacaagtccgagccatgggagcttcctgagaaggcgaaaatnggaggaaaagaatggtacttttttngcctccgggaccgnaagtacccgncgggngtntggacgnatagggcgccggnttcagggtattngnaacccncngggaaaggcaaaggggtnttc

SEQ ID NO: 133168 - DNA, 362 bp, Arabidopsis thaliana columbia
  unsure (1)..(362): unsure at all n locations
cttctttatgtcggcaaaactnctggttatcatagcagaactcaggaagagattcatgaactactcctaaattttcctgaagctggtgccactgttgtaaggcttaaaggtggagatcctctggtctttggacggggcggcgaagaaatggactttctgcaacagcaagggattcgagttcaagttataccagggataactgcggcgtcggggatagcagcagagttggggattccactaacacatcgaggtgttgcaactagtgtaaggtttctnactggtcattcaaaggaaaggngggccagnccccttttttttttttccaanananttnnaantttncccccgggttaaaanaattt

SEQ ID NO: 133169 - DNA, 493 bp, Arabidopsis thaliana columbia
  unsure (1)..(493): unsure at all n locations
aaaaagaaaaaaaaaatcaaaggagcttccttttttcgctctcgtctccgtttacccttttgggattttnccctaaacctttttctctctttgtataatcaaatcctctttatctttcattgtttcgcgtgaattagctctgcaaaggctcttcattcttctcgcttggattcctctgcacaaaagaaaaaagaccatggatgatcttcatggaagaaatggtcgaatgcacattggtgtagcgcaaaatccaatgcatgtgcagtatgaagatcacggtttgcaccatatcgacaatgnaaacggtatgatggatgacccatgctgatggtnggatggatgaaggagttgagncagacattccttttnccctgggaactcagctgataatcgtggtnagttntagccctggatttaaaatggggtccattttcaatntcctcccgggcaatttttttttnaccctttttncntaaaggtcanntnntttttt

SEQ ID NO: 133170 - DNA, 510 bp, Arabidopsis thaliana columbia
  unsure (1)..(510): unsure at all n locations
atgagcgattgaggaaagagatgacaaagcttaaaggattgtatgcgaatatctacacattaatggcgaatttcacaccgggtcaagaagattgtncgcatttnttacctgaagggaaacctttagatcttttaccggagagacaagagatgagtgaagccattatggcttctgaaatagagacagggattggtctgaaacttggtgaggatttgactccaaggttgtttggggtttctattggggtcaagcgagctagaagagaagaagaattgggtgctgcagaggaagaagatgatgatagacgngaagcttcttccccaagagggagaacaaagttctgattgttaaggcaganccaattngaggggataactccggtaaccctaatgggtcgtgggtttnanctcgggaaatnaaaacnctttncngtttaaaggcatttttaatttcaagnaacttttcnnntccccctttcatngnaagccatttcntttnccggcggganta

SEQ ID NO: 133171 - DNA, 406 bp, Arabidopsis thaliana columbia
  unsure (1)..(406): unsure at all n locations
atttgttcgtgaggttaactttgactttagtcaacggtacgaagcctggtgagaatacggttttagcgactttcattgggatgtatttaggccggtcggataagctgttgaccgtnatgaaccgggatttcccggagttgaagctgaagaaaaccgattntaccgagatgagatggatcgattcggttctgttttgggacgattatccggttggtacaccgacttctgtgctactaaatccgctagtcgcaaaaaagttgttcatgaaacgaaaatcggactacgtgaagcgtctnattttcgagaacccgatctcngtttgatactcaagaaatttgtagaggttnngaaagttaaaatnaatttggatccgcattnnggnannnatggtgaaaccccnngttnt

SEQ ID NO: 133172 - DNA, 414 bp, Arabidopsis thaliana columbia
  unsure (1)..(414): unsure at all n locations
ggaacgacagtncgagaaggagaaagagaaagagaaagagcgcaagaggntaaaggaaatccgctatgaggaagaagaggaagaagacgatgatgattcaagaagaagatggcatagggctgcattagatgagagaagaagacgacaactaagagaaaaggaggatgacttagctgatagattgaaagaagaggaagaggttnctnaggcgaagaggagttccgaggagcaaaatttncagcaacagcaattagatgccttaagaatcctatcgggacaggcagctatttgaagcggnaacgggttcaagacatcacctntttnaaattatcncaaggggaactttccaaaactttnggtgaattntcccnatttgcncccttccagcanattttttttggaaaanngttcctt

SEQ ID NO: 133173 - DNA, 548 bp, Arabidopsis thaliana columbia
  unsure (1)..(548): unsure at all n locations
atgctggattgaagaagctcgacgagcatcttctcactcgcagttacattactggataccaggcttcaaaggatgatatcaccgtctttgcagctcttgcaaagcccccaacttcacagtatgtgaacgcttctcgttggtacaatcacattgatgccctcttgaggatctctggtgtctctnctgaaggaagcggtgtcattgttgagggatcagctcctatcactgaggaggctgttgctactccccctgcagctgattctaaggatgctgcggctgatgaagaagatgatgatgatgttgaccntttcggagaggagaccccnagagggaaagaaagcttcttnagagagagcaacttcttcaaggnatcttcaaaagaaggaggaatcttggaagtccncagtttttgattgntttaaacccggggggtttttnnggcnttcaatnagnaanttttgggaaccttttaaggcccttcaaaatggaaggtttttttttgggggcatnaaagntttncccatttgtttgggtnaaanagttcantt

SEQ ID NO: 133174 - DNA, 535 bp, Arabidopsis thaliana columbia
  unsure (1)..(535): unsure at all n locations
agttaaacaaagattacgattatggccacatcagctatccaacaatcctccttcgccggccaaacggctctcaagccctccagcgacctcatccaaaaggtgggcgtcttgggcggtggccgtntgaccatgcgtcgtaccgtcaagtctactccccaaagcatttggtatggaccagaccgtcccaagtacttgggaccattctcggagaacacaccgtcttacttaactggngaataccccggagactacggttgggacaacgctggactctcggctgacccggagancattcgctaagaaccgtgagcttgaaggtaattccacaagcagatgggctattgttggggtgctnttcggatgcaacattncctgangattntttccaaggaaccgggtgttaaaattccggagaagccgttttggntcaaaggaaggctcttaaggttttttttaaaaaggngggntttnttaacctnggggaaccctaanctttnatncncgngnaaaagaattttggccatttttgggnngt

SEQ ID NO: 133175 - DNA, 334 bp, Arabidopsis thaliana columbia
  unsure (1)..(334): unsure at all n locations
gnaaaaaaacattctaaactagtttttttggtacttctgnctctaaaacctctcccttctctctaaaagtagatctagatctcagtttgcgttgcctggctctggtggcttccatagcgccggagttatgcctctnttgctctgctgtaaagtttatgttgcttttgcttagnttatgtgcgtttgtggtgtagggattttcgaatggnncttagatggcttatgntgtttttgtgggttggnctctgatgctaatagcgcctctanatccggtcanntttttagccttncttctcggttaagccttttaccagggctttggtgggntgctttt

SEQ ID NO: 133176 - DNA, 526 bp, Arabidopsis thaliana columbia
  unsure (1)..(526): unsure at all n locations
ccgcgaccatgcaaatttagggtcttcgttttgtttgatgggcgcgaatatctcgggaggttcaccggagtttgaccggaacgatgacgtttactcgaggaaactcagattggtggatttacctgagaattgtgtagcgttgattatgacacggcttgatccacctgagatttgccggcttgctcgtctcaacaggatgttccgtcgcgcttcctcagctgatttcatttgggaatcaaagttgcctgcgaattatcgtgttattncacacaaggtgttcgatgaaattactctgacggaattaataaaggaagatctttatgcaaagcttagccagcctaatctcttcgacgntggcacaaaggaattntggntagntaaggacacgggtcgnctttgtttacctatttcttcaaaaggcctaaggggttacctgganttntgnccggngaaccttggggcaaatccccanctgntgnatccngggtccagtcaactgnttattgtcaanagnaattgggggttc

SEQ ID NO: 133177 - DNA, 483 bp, Arabidopsis thaliana columbia
  unsure (1)..(483): unsure at all n locations
aagattctttctgcgttaagcgatttggggattccgatacacaggagaagaagactgatgagtcatcatcatcagcaaagtgtggattttnagaaatgggcacgacggaggttgttgcaaacggcaggtttaaagcctgatgtgacggtggcgggtgatggaaccggtgatgtgttgactgtgaatnaagcggtggctaaggtgccgaagaagagttttaagatgtttgtgatttatgtgaagagtggaacttatgttnagaatgttgtgatggataagagtaaatggaacgttatgatttaccggtgacggcaaaagggaagnccnttaatttccggcagccaagaanctttcntcgacgggnctccctacttacggaaacggcggccggtttnctattacaaagcaaaagggttttttaattnaaggggtattttggntcaataaancnccccggggnncagcaaaanncccaannttttg

SEQ ID NO: 133178 - DNA, 489 bp, Arabidopsis thaliana columbia
  unsure (1)..(489): unsure at all n locations
caaacngccacaacaaaacctgtttctgatcaaagaaccgccatgaattcccaaggagagacgatgaagtcactacgccgccatctttgttgatgatcctctctctggcatttgccattgaccaatacacttgaggggttaagctgttaacagataaaaccatatctcctgatttgatctcaagggcataagtcatgttgctcgaagaaggactgctagtgagcttcatgccttctttgaaagcttgattcgtgatcagagtatctgtcggatgatcaaaactctcccagatcgaagttccgtcaacggnaacaacaacgggattcccgggagtcacgnagctcgattcttgaagcgtttttgcctgaattatccaatctccaaacctcagttccttccatcancacatttccggttggcatnggacacaaacttnttngganttggaanangggaagctttnttcgggggccantcagtttgnngtta

SEQ ID NO: 133179 - DNA, 398 bp, Arabidopsis thaliana columbia
  unsure (1)..(398): unsure at all n locations
gagggaatcatccctccttttgacccttttttttaccaatgagattggtagtaacaaagatgagagaaatggagaagaatcaggaggatcttcaagtgatggtgaaaatacagggaaacgcgttcgggtctcagatgaaagatgaagagaaagttgaaggggtatgancgnaattggagtacagntaaaaggtatgantataaacgcaggntcttaaggntggngcaagctctcctgtatccactttnaaccaatgctttcgtaaaataggggggnangggaagggcctttaaagcttgggggaaattggnggtttgtnncttttatccattccttttnaattcctggtttcanaataatttttgggggaaaaaaaaatccccgaaaaattaaccatt

SEQ ID NO: 133180 - DNA, 202 bp, Arabidopsis thaliana columbia
  unsure (1)..(202): unsure at all n locations
gtgagaatcttcgagaaaacctctccttctngtttaanctctttaactatccctaaccctaattntccgattaanctcctccgcgtcgccgtcctcgactcgcctgttcattccactnagtcttctcctccccgagtngccgccattntggtccccaagcaccgagaatccgattggntcttctccactgagtccggtcaat

SEQ ID NO: 133181 - DNA, 444 bp, Arabidopsis thaliana columbia
  unsure (1)..(444): unsure at all n locations
tataattcttcgactccgtgggataagttttctaaaaaatcgaagaaagatcgatggctctagatatctgcgagaaggttgccgtcggtgctcctgatgttctcggcgactgtccgtttagccaacgtgttcttctgacacttgaggagaagaagcttccctacaagacccatctgattaacgtctccgacaaaccccaatggttcttagacattagtccagaggggaaagttccggtggtgaagcttgatggcaaatgggtggctgatttctgacggnaatttttggnncttctttnaagnggaaattatccanagnctttcttcttcaaagacctncttcctgaaattttcctttctgtaaggggtnccaaaaaanctttttgggtggctttttgttganctttntttnaaaggggcaaaannacnggtaatttnacgggat

SEQ ID NO: 133182 - DNA, 532 bp, Arabidopsis thaliana columbia
  unsure (1)..(532): unsure at all n locations
tgatcgaaagtatgtggctaaggttttagttaggggtgtggactgtgacattgctttgctttccgtagaaagcgaggatttctggaaaggagctgaaccactacggctgggccatttaccccgccttcaggattcagttactgtcgtgggatatcctcttggaggagatacaatctctgttacaaaaggggttgtatcacgtatagaggtaacatcttacgctcatggatcatccgacttgcttggaattcaaatcgacggctgctataaatcccaggggaatagtgggtggcccctgcatttcaaacgncccanggggggaatggtatttggaggtagcaattcccngggtttacaagatncccgaaggaaaacttgaaaaanaatttgggntaattgtgnatttcccnnnaaacccgttggtttccncaacnttttttgnccttgtttattnagnggggaccgggaaantncaaattggggttaccccttnccctttgggggaatttcttcangaaanttnggaaaatcc

SEQ ID NO: 133183 - DNA, 370 bp, Arabidopsis thaliana columbia
  unsure (1)..(370): unsure at all n locations
gcaaacgaagcacactacacagagattctggatgaagaacaaatccacatgaaattcgattctaacatttntcctatttaattcgaatttnaaattgccatttctnagattccggggaaagaaaaaaaaacctagaaaagtgttttntccgttttccaatcatccatgagtccggacaataaactgcttccgaagcggatcatccttgtacggcacggtgaatcggaagggaatctcgacacggcggcgtatacaacggcgncggatcataagnnccagttaccggattccggtttgcttcaggcgcaggaagccggagcttcgtntcacggttttaancnttncnaatccttnttaaccggggtggggg

SEQ ID NO: 133184 - DNA, 487 bp, Arabidopsis thaliana columbia
  unsure (1)..(487): unsure at all n locations
ctttattcaaaagatgagtggttatatcgaagttgttaaagaattgccaaaagatattgcatcaaaagaaccattcaaagtagactgcagcaaaaggaagggtcaatttgattacattgaaagtgttcttccatcgttgttggaacatcattacatttcctttacaccagcaatgagccaacgcagggacaggtatcccgaatatgcaagagctactctctgtcaagcctgttattcagctatacggcttactagttccttggagaagaaggccatcgagctttttnatgctattcccaaacccttctttgtcggnttcaccctcagnntttgaacctgacatggtagcgtncagcccattgggatacccaaacctttttccttnanctttnggttgccttnnaggctgctcgtnctnataggagncttggcttggggcctngcnnanacatgggggaagggggnaaattcccctgctcctattnaa

SEQ ID NO: 133185 - DNA, 429 bp, Arabidopsis thaliana columbia
  unsure (1)..(429): unsure at all n locations
agacttggtgcataacgacgagccttgtaacacggatggtgaacatgaaattaaattgtnattcccattcatgaaagatactcgtnctgaggcatcaactgcaaagaacgttactggaattctactcttcactggttctgtattctcttacgcctacttgaacgtgaaagaaccagtttcacaagctattgctgatattaaggctgacattattagaagtctgcaaagtagattggncattatctgtgatgagtccgngcaggntctcaatccaactgatgtgggggncaattgaaaatgcagacggggttttcgggaaattccccattttccaaanctttttcccccaattccccntttaaaaagnggggccntttccgggttttccccngggggggttttttttnccgggggttncccnggtttttt

SEQ ID NO: 133186 - DNA, 454 bp, Arabidopsis thaliana columbia
  unsure (1)..(454): unsure at all n locations
gataaatactctatgtttctttgaaggatatagcaaaggaagaacatatgaaaacttctggcctgagatgctgaagctgaaggattggcctccttcagacaagtttgaaaaccttttacctcgtcactgcgatgagttcatttccgcattaccatttcaagaatacagcgatcctagatcaggaattctcaacattgctacaaaacttcctgaaggacttcttaaaccagatcttggtccaaaaacttatgttgcatatgggacttcagatgagctcggtagaggagattcagtcacttaagcttcactgtgatatgtcagatgctgttaatattctggntgcatacctgctgangtaacactaagtgngggggcaaaggtnttcaaattncagntttgaaancggnacnttngnaacngtttngaagggnttnaggggnaantggttttgggg

SEQ ID NO: 133187 - DNA, 417 bp, Arabidopsis thaliana columbia
  unsure (1)..(417): unsure at all n locations
gggacagtgaaatggcgactgaagatgtgcaagatcccagaatcgctaagattgcctctnccattagagtcatccccgacttccctaaaccaggaatcatgtttcaggacataacgacgcttctnctcgacactgaggcctttaaggatactattgctttgtttgttgatagatacaaagataaaggcatatctnttgttgcaggtaacaactcgtatggttctgtttggtacnccaatcgattaacagcttgtggatttagtttcttttggcctttttagatactgagtgctttagcttaaactgaaaagttgaaatgaattgggtggatggattttnggntcccgccnaaanngatggttgtggnaaatncaggtgtttaagcnannnggttcaattttnggccccccatttgcg

SEQ ID NO: 133188 - DNA, 371 bp, Arabidopsis thaliana columbia
  unsure (1)..(371): unsure at all n locations
agtaattacaatggaacacagaaaggtaagagggaacggcatagacattcacgtagcaatccaaggtccctccgatggtcctatagtcctcctcctccatggtttccctgagctttggtactcatggcgccaccagatccctggactcgccgctcgtggctaccgtgccgtcgctcctgacctacgtggttacggtgactccnatgctcccgctgagatctcttcctacacatgcttcaacatcgttgggtgacttaatcggcgtcanatccggnttaaacggctcaaagggtganaagggctttttgggttgacaaaaaanttgggggngntntaaagnnttggganttnaagctnttttccggcccaat

SEQ ID NO: 133189 - DNA, 496 bp, Arabidopsis thaliana columbia
  unsure (1)..(496): unsure at all n locations
ggacaaacagtttttaattactagaaatgtaccttgtctacggagagctgcttctntggcagaggattatnaagctgctggaggtgaagtnttggttgatgatgaagataatnatggttggctggctacacatgggaaaccgaaagataaaggcaaggaagaggataacttaccatccatggatgccttggatataaacgagaaaaatactatccaatcaatacctacgtattttggaggtgaggaggatgatgatattccagacatggaggagttcgatgaggctgacaatntggtagnaaatnatccggcaactttttcagtcaacttatcttggtggctcatggacctgatgncggtaanaattttcccnanctcggccatttgttcttaggctaacggttgtaaaggtttccnaancccccggggtttgggtnccccgtttttttnggcccagggtnttttnaaacccgccttttnatnggggtttttcccc

SEQ ID NO: 133190 - DNA, 446 bp, Arabidopsis thaliana columbia
  unsure (1)..(446): unsure at all n locations
tcaaagctttacgttacacatgagagagcttctnctcttcgaagatttgcaaggaattcttcatcgtgtgagaaaagaaatncaagcntcgttcgtttggttgtttcaacaagttttctctgctactcctactttaatggtctctgtnatnatccttctngctaatttnacggtttactctattgagagcaactctgctttagccgccgccgtaagtcccccgacaaccctctctttcagcttcgaaacgacggcggagataagtgaactcaagaaacggatcagaaattcgattcntcaatgggttaaagacggtctctgtttcttctcccttanggggaaaacaactttttgtccggtnggtggcggccgggaacaatntttcccccggccggtacaaaanngggaccanattggtggttgggtnctntccagttttngaaaat

SEQ ID NO: 133191 - DNA, 555 bp, Arabidopsis thaliana columbia
  unsure (1)..(555): unsure at all n locations
agaagataaagggaatcagaagaatggtggagatgaacctcctagaaagaagacgtgtacggaagaagcaaatcctttagcaaaagtaaacgaaaatncagagaagtctattgataagttgattgaagctgaactaaaagaacttggagacaagagtaagagacggttcatgaagttagatccgggttgcaacggtctggtcttcatccaaatgaaaaagagagatggtgacccaagtcccaaagaaattgtacagcatgctatgacttctgctgctgcaacaaaaaagcatatgtcaaggttcntccttaagacttntaccaattgaagtgtcgtgttanccttcagagggaggaaatttccangggccatcaagcccgtttntaggacagtactttccccnattgnggcccgaattcccgggaaatttgctgtgtttgtnttgggncnngtctttncacagggnttttttagggttgnaattatttacnngggtcggcaattnttttcctngccccttacaaagtttnttttnggcaaacccggggttncggc

SEQ ID NO: 133192 - DNA, 456 bp, Arabidopsis thaliana columbia
  unsure (1)..(456): unsure at all n locations
gagaatacgctcttcttctcgccgtccggtggttatccggctacatgtccggcgtcttccgtttttntcaacggtgatggccggctttcgtctagcaccgactggcttcctaagtagcggtggctagcttttgcccggcatcgaccggctaacctagcggccatggccggattctgtttttnctttaatttttcaattatgtttttaatttgctaataatctcatcggatctacgattagggatgttgatctgccatatccacggtggttcttctttgtctctgtccctttgaggtttaantccgatccggaatnaggttcttnancncttnaaggtaaaattcggganccntttcctttngaaaccntgggnttaaaagattgatttnaaagggntttcaaccttttttttaaggaaaaaaggntttttttgggcggtnnaaagggccccaaagg

SEQ ID NO: 133193 - DNA, 391 bp, Arabidopsis thaliana columbia
  unsure (1)..(391): unsure at all n locations
cacatataactatggtgttagctcatatgatattggaactggctttgggcattttgccatttcaactcaagatgtttccaaactggttgagaacgtccgtgccaagggtggaaatgtgactagggaacctggtccagtcaaaggtggaggcagtgtcattgcgtttgtnaaggaccctgatggctacacttttgagctcatccagagaggtccaactcctgaacctttctgccaagtcatgcttcgtgttggtgatctcgaccgtgccatcaaattctatgaaaagggccctcgggatgagactntttgagaaagatttgagngnccctngngtaaaaagtncanccctnggganttttgggggnttttcctnaaagaatnncgggnccgg

SEQ ID NO: 133194 - DNA, 599 bp, Arabidopsis thaliana columbia
  unsure (1)..(599): unsure at all n locations
ggcgagtatagtgaaatcggacggacaggatcgaatctttggagagaggagactgagtgtcnggactggctaaacacgaaagctagaaacagtgttgtgtacgttaacttcgggagtataactgttttgagcgcaaaacagcttgtggagtttgcatggggtttggctgcaacggggaaagagtttttntgggtgatccggccggatttagtagccggggatgaggcaatggttccaccggagtttttaacggctacggcggaccggaggatgttggcaagttggtgtcctcaagagaaagtcctttctcatcccggccattggagggttctttgacgcattncgggtggaactcgancggttggaaagtctatgcggtggnagttccaatggtgtttttggccgtttttttcagggcaaacaaacctaattgnaagnttttctcgttaccggattggnaggtttggattttaaattngttggggattttaagagngaaaagggtttagncggtggtaagggngttattgnttaaaggnaaggaaaaatttttgnnaaaagccgaaaatttccgcctttcgattaaccncgggcannta

SEQ ID NO: 133195 - DNA, 598 bp, Arabidopsis thaliana columbia
  unsure (1)..(598): unsure at all n locations
cgccgaagtggcgctggcaacatttttattaagaatttggacgagtccatcgaccacaaagcactgcatgatactttttcatcgtttggaaacattgtgtcgtgcaaggtagctgtcgattcttcaggccagtcaaaaggctatgggtttgtgcaatacgccaatgaagaatctgcccagaaagctatagagaaactgaacggcatgttgctcaatgacaagcaagtntatgtgggtcctttcctgaggagacaagaaagagactccactgctaacaaaacgaaattcaccaatgtgtatgtgaagaatctcgcggaaagtactaccgatgatgactttgaaggatgctttttggcgagtattggnaaagntaaccaagtgcttgtcggtgatgnaagatggagaaggggagtcccaaggggttttgggttttgtcaacttttgaaaaatncttgatgatgcttctagggcttttggggcnctcaattgggcncaatttttnttgtaaggngtggattttngnggnccccgagnagccanngggggacaggttangggccctttttaccgattttagggntcaaccagtntagttnna

SEQ ID NO: 133196 - DNA, 614 bp, Arabidopsis thaliana columbia
  unsure (1)..(614): unsure at all n locations
catctcacaaactcatcaaacctctttntcatctcatcttcaagccatctccgatcatcatcagacaatggcagcagctatggcaacagcaaccaagtgcatgtntctaaacccatctcctcctaaactccaaaaccaaaccaaatccaaaccattcatctccctaccaaccccaccaaaaccaaacgtctctctcgccgtcacaagcaccgccctagccggagccgtcttctcttccctcagctactctgagccagctttagccatccaacagatcgctcagctcgctgcagcaaacggcagtngcgncaaccgtggcttagctcttctccttcccatcgtcccagccatttgcatggggtcctttacaaacatcctncaggccagctatttaaccagggtaaacaaggtgcggtgagnagtaaagggtattggttggttgggntnagggatttggtggngggcntttcagnggtaaggggtttttgnttcaacctccgggggggtttntnttttgggaanaagggngggtttttgttnaggnagagggggcagtttttttggttttttaaaccggnntntttgggttttnaaaatttnagcagtttaccagc

SEQ ID NO: 133197 - DNA, 293 bp, Arabidopsis thaliana columbia
agcgtgaattccaaggagagatcttctattcggcatccacgtaaacataaatcagaaatcgtgagtacatcctgagatcaggagatgaaattgttgatattactaatcttgaggagtatatatcccttgtcgttgatgctactgtcaagagaggagtcactcggcagatcgaagccttcagatctggattcaatcaggtgtttgacataacatctctacaaatattcaccccttctgagctggactatttgctgtgttggtcggtagagagttgtggggaggtggagactctt

SEQ ID NO: 133198 - DNA, 359 bp, Arabidopsis thaliana columbia
gatacgaggtatatggcgaatggtaagtactattacgaccttgacgatgacagaaaccacggccgtttctaccagaatcattactacaactacaagcccaccggttacaatgagaagaagtccaacttcaagaatccatacgattccaaccaacagtccgagatgttggggaagagcaaggagatcagatcactccatgagcatcaccgcatgaaacaataataagtatctgcttttgtattctcgatttttgtttcaagtggtttaatcatcagtcaaaagtataattttaatttgcatataaaatttggaaaaaaaaaaatatatatattatatggcgatgcttgttaaaaaaaaaa

SEQ ID NO: 133199 - DNA, 220 bp, Arabidopsis thaliana columbia
ttttttttttataaaagattggacattttattagaactatctaacgatgacctaactttagtaaaaaaaactacaactttagaacaagctgtgaataaagcagagtacagaccatgagaaattaagcttttttggttatagcttccaagctctgtacttacaatagatgagggaaataactaagcacattcttaacgtattagagtttcttcgtattccc

SEQ ID NO: 133200 - DNA, 263 bp, Arabidopsis thaliana columbia
gtcttatgggggttttctcgatccttccatttgctgtgatgggtttgatttcgattccgaagctacagccttcgaggtggcttgtgatggacttagggaatgtgaactggggtttgtatcttaacacgcttttctggaatctaaactattgggacgcgatcagtacactagctggtgaagttgaaaaccccaaccatacacttccaaaggctttgttttatggtgtgatcttagttgcttgttcttacatcttccctctttaa

SEQ ID NO: 133201 - DNA, 375 bp, Arabidopsis thaliana columbia
acggagacaccagccaagaagaaggataagaaagagaagaaaaagaagaataaggactgagggagagaaaccgattttgagaaatctcttgagtgtaagattaataactgtttttgttgaattgcattttatctagaggaataggtgttttaagatgaaacttaaattttctgaaatcgtcattttgaatgatggattcatatttaaatccttttcacccgaactttatttttgttctagccttccagactctagattattaattttggactcttttttcaatttatagtttgtagttgtacaattacttcttgcatgattttcatatctggaagaggaaagaattgaagaaaataatatatctgaaaaaaaaaa

SEQ ID NO: 133202 - DNA, 342 bp, Arabidopsis thaliana columbia
ttttttttttctgaattttataagtttaatttcttttttaacttgattatattttcttaagacttgagagcaataatattaccaacatgccaaaacttactaatgttgttgtctcggcatagtctgatcttccaaaaacactaactttagtgtcgcattccagagatgatgtccaatatgtgcgattgacaaaagaggaagagacctatgggttctttaagttgagacccaaactgctttaaggtcagctcccagtattgcatctcaacgtgtcgctctacctcggtctaacgcagatctgatgcgagatcgacacactcagtctgatgtcatactgcgtga

SEQ ID NO: 133203 - DNA, 202 bp, Arabidopsis thaliana columbia
atgcctcggttgtgtgctcggatagacaaagtgttggttcctgagttcaagttgtggattacgtggattgacccgcttcaggataataaagataactctatccccattgcttgtggaatctttcaaggtgggggtttcagagggaagagaacgatcacttaagattttcttgtcagatgttttcacttaactcgcaacaata

SEQ ID NO: 133204 - DNA, 206 bp, Arabidopsis thaliana columbia
ttttttttttaacaaaaggaagaattatgaattaatattctgacttccttaaaatgttaaaacacaacagtctcgaaaactaagaaacatcattgaaacaacactaacaacactatttaaaattctgaccaaagaaaaaaccgaagaaaattaagcctaaagccgaagtagatagcgttgcttcggtcctactttccaagcgagcg

SEQ ID NO: 133205 - DNA, 222 bp, Arabidopsis thaliana columbia
ttttttttttattcatgtatcaatagaataaagaaagagttgttagtaacaacttgttacaaacaaacaaaaacgtaagatacaatgaagtatccacaacactattgtgccatcaagaacttcaaaagatgacaaaataaaaccctttcacactatcaccaacccagagaaaattcacaatgaagtcaaatccacaaacacttctctgaaccctccaaagaa

SEQ ID NO: 133206 - DNA, 249 bp, Arabidopsis thaliana columbia
ttttttttttgaagaagctactttgcttaaatttccaatgcttttcagatactttgatcgtgtgatatactaattacaacccaattaactgagttcacaaataaagataagagtctgaaaaagacagacaaacaaacaaaaaaatgcaccaggaacaagagaattatgatcatttacgtacaaataaacggagaatataataacaagtgtctcttatatctcgtctggtcggctatggcgtgtgtggcc

SEQ ID NO: 133207 - DNA, 204 bp, Arabidopsis thaliana columbia
ttttttttttgaggagttaaaagagaaatagcgtagatgtatatcaatctcaatacatctgatagtgaacaagatattcggtttaggaaaaatcacatatcgcttaggcctcatttcacacactacaactttcattagagcgtccctctcctatcaaaattaacgagcacttttccacggaaaaatggagtttctcattaggcg

SEQ ID NO: 133208 - DNA, 267 bp, Arabidopsis thaliana columbia
acgagctcgtgccggacacatttgctcaagacagaacgcacaatctcatcgtgcgactccgccacaatgtcatcaggactggactgcggaacataagtatctcctactcgagaatctctttacccgatgttgccaaaaagctgaggctcaactctgaaaaccctgtggctgatgcggaaagcatcgtggcaaaggccatacgcgacggagctatcgatgctacaatcgatcacaaaacggatgcatggtctccaaagaaactgggga

SEQ ID NO: 133209 - DNA, 206 bp, Arabidopsis thaliana columbia
ttttttttttccaagagaaccgggccccacatacacagaaatagaagacagataacccttggcctacagcataaatgcaatcacgatacaagaagagtgggatgacagagcaaagaataagcccccacccatgaacccgataagcaattagacctccttcattggcccccggtccccccattggctccccgcgtcgccggaacttt

SEQ ID NO: 133210 - DNA, 208 bp, Arabidopsis thaliana columbia
ttttttttttggacctttaataggaaagtttaagatgttaatgaaatagaaccttaacaaagaaaaaaaaaaaatttacgtatctatatttcagtggtagcctcacgcaaaccagatcgtccggcttttttccaccatttaatactgggacacgctttaattgtaagaggtatagcccttatgcttccttaaataagaaactaaagat

SEQ ID NO: 133211 - DNA, 209 bp, Arabidopsis thaliana columbia
ctagcattgtccatgtgcgatattgttgacatatatggtttcactgttgttgatcctggatacacagagtggacgcgttacttttccacgccaaggaaagggcacaacccacttcaaggaagggcatactaccaacttctagagtgtcttggtgtacagataacttgttaaaaccataattctactttgctctaacgttaaacgttttt

SEQ ID NO: 133212 - DNA, 215 bp, Arabidopsis thaliana columbia
ttttttttttaattttttgagaaacaaaagatcttcttgataatgaatattaattttttatgttaaaatcatacagtatggtatattcagtactttatgttggatgacatgtcactgacaaatattagctactagaaagtgattatgtcatgcgttctactatgttgaggagagagttttgagtgaattaccattgagtattgtttaatgcagtg

SEQ ID NO: 133213 - DNA, 233 bp, Arabidopsis thaliana columbia
aactatcggccaccattctaactatctttgtgatccttgctataggggtgatggtgaaggaaacattgggacaagcgccgagtacttgttttgaagctctaaaagatgcttctaagggtgcatcatgtgactcggaattgtgtgcctctctatgtaagaagaaatcggcggcggtgttggtacttgtagaacaaagacgacacaacccagtaaaggacaccagatgccactgc

SEQ ID NO: 133214 - DNA, 227 bp, Arabidopsis thaliana columbia
ttttttttttattaataaacttctttagtaaaaaagtttccacctaaatataattgaaacctaaacaacaaaaggagaaatggttgatttttggccctcatttaaccttaacgtccacctcccaaaaattgggttcctgcttaactctccctttccggccctgctttaccttttttccttcctgctcctccttccgggttagtcgactcatatacctgtttcgttcc

SEQ ID NO: 133215 - DNA, 241 bp, Arabidopsis thaliana columbia
acagagaaggacttaaacaattctgattcctcgtctcaacaccatctacgaaaccctccagttgttcgatggaaccagcttctcctacagtggaaagagttaaattggaacgatgttcttcagatgtctgatcacctctctaaacaagccaccatagaggaatgctatcgactggagatctccaaagtcctgattcacttaggacttgggtcttcttcttgccttcggtttctctgttgcc

SEQ ID NO: 133216 - DNA, 245 bp, Arabidopsis thaliana columbia
ttttttttttattgtcaacaaaatgtttgacttttgctttaaaacgaaccacgaattattacatggccaagaatctgacattttacacgttcttctttcttacaagatgcagacgactttgaatgtcttatgtacaagtatagttgtagaattggacctcaatttaactttacagggtgtggaactggaagacaggcatgctagatgccatcaacaattggattgattgacttttggcatcattg

SEQ ID NO: 133217 - DNA, 206 bp, Arabidopsis thaliana columbia
aaagcttacacacaggaggatctcttgatagagatatttatcagaattccaataacaaattgggaacaagtatcggtgttagaggcgtgggctatttattccgcggagaatgcttatggctggcctgctcttatcgtccgtcctcccttgcctgcactggactgttgtccttcttcgttgccgttctccctctattcttgtctctc

SEQ ID NO: 133218 - DNA, 207 bp, Arabidopsis thaliana columbia
ttttttttttgttggaattgaatttcttgtcttattattactgatttgtgcagaatttagaaaacccaataaaggattagggtagaagaagaagctagcttagctactaccatgaagatttgggaaagcctgagatgttgcccaggagaagtaagcacaaaaccaatagttgagagataataaacataaacagcaaagagagactca

SEQ ID NO: 133219 - DNA, 285 bp, Arabidopsis thaliana columbia
ccatgatgatatcatttgagatatggatgatttatcatgaggctgggaagattgggaagaatctcaagtccatgagaagaagaaggagacctcaaggacctgatgcttatgagtgtgtgttttgctgtttatgtttatatgtgtgaactattggtttggtgcttacttctcctggcaacatctcagccttccccaatcttcatgatgtagctaagcatgcttcttcttctaccatatccttattggttgtaattctgcacaatcgtatagacaagattcattcac

SEQ ID NO: 133220 - DNA, 245 bp, Arabidopsis thaliana columbia
agaatatgaggaccaacacttgcaggaacattgctcgccaaaacctgcttgggtttatgttccgccatggtcactttaaagatgcatgcatgttattctttccgcaaagtggtcttccccctcctttgcaaacttcatctgttggcgcagtaagcacatcttcatcacctcaacgaactggtccatattcagttgccaagggatcagtcgtgtaggtgatgaagatgtgaccattgaagttgtgc

SEQ ID NO: 133221 - DNA, 205 bp, Arabidopsis thaliana columbia
ttttttttttgacaaacttcataattttggttattgaatgaaaatcatagtctaatcgtaaaaaatgtacaggaaggaaaagctagagcagaacaaagattcaatattctggttccaatttatcatcgctttaacgtccctcagatttgatcagctgcgagaaaacctttactcatggaaacacctgaacattcatcaacactcg

SEQ ID NO: 133222 - DNA, 221 bp, Arabidopsis thaliana columbia
gattccagaatacttcagaagacaacagctcacagagaaatcagatgtttactcttttggagtggttatgttcgaggttctctgcgcgagacctgttatagacccgacacttactagagaaatggtgaatctagcggaatgggcaatgaaatgcagaagaaagacagcttgaacacatcatcgcccgtcactgcggtaagatcagacctgactcgcttaga

SEQ ID NO: 133223 - DNA, 209 bp, Arabidopsis thaliana columbia
ttttttttttggtgctggatataacttcattatatgtgcctgtccaattcaatattaatctacattaaggaaaatttagtttatgtacatgcaaggtatatatgatgattcaagttaagagaattaatatgttattacttgaagaactaagagccacaggaacgagggtgtctttgatggctaaaagacaaccaccgatagatccaatc

SEQ ID NO: 133224 - DNA, 315 bp, Arabidopsis thaliana columbia
agaaaattggagttcttgggctgctatggaatccagaaagcatctttcaaagaaaagagtagtgtagccaaaatggttgggacaatagtttcactagttggcgcacttgtggtagttctctaccatggtccacgagtcttcaccccatcttctccaaccatttccacaactccgtcagcttcttttgccgttatcatcctcaactcgttggatcatcggtggttgctttgccatcaagaccctcgtctgttgctttctcgttctttctctctgtctcttctgctgtctctttcttgtgttgtgcgcttggttggc

SEQ ID NO: 133225 - DNA, 206 bp, Arabidopsis thaliana columbia
tccagctctctccggccttcttcttctgtctcttttagcaccggcaagccaatcaagagagattatgatggattgttgcttgatgctggaggaactcttttgcaattgtcgaaacctgttcatgaaacctacgcttccttgggccaaaaatatggtctcaagacaactccaaagctgagatcaggaaggtttcaagagagtttttt

SEQ ID NO: 133226 - DNA, 216 bp, Arabidopsis thaliana columbia
ttttttttttaatacaatgattcttttgtcttaatatatatggaataaggatacttttatagataattagaggaagccttcgattccattccaactatggaggaggtggaagggcataccccgacaatcatcggcaagggtactacatttccgttaccatattctttgattccattatataatatatactttcaccacatcatatatgcatctaag

SEQ ID NO: 133227 - DNA, 235 bp, Arabidopsis thaliana columbia
gggatatatgggatgatgatggggcctcatatccatgattctcaatgtttgaggcaaaaatcgccaatggaaatggcgagcaaactttgagtcgcgaaccttttataggataaggacaccgatttgatttcttccggaatgctgtttgttatttcaccacaattggtcatcttcagatcatgttaccgtgcttacggtatgtgtcttaggacgtatatcatgtactagtggttga

SEQ ID NO: 133228 - DNA, 206 bp, Arabidopsis thaliana columbia
ttttttttttatagcgacaattgagcactttgcaaagtgtaaacacacacacaacaaaaaacaggaccattttccaaaaaattctctaagagatatcacaaagagaaccttgtggatactacaatgtgagatttgtcgctctctctcttaaccgggcctgttgctctggcctttgggttatagcgcttgagagagagaggtttgag

SEQ ID NO: 133229 - DNA, 201 bp, Arabidopsis thaliana columbia
ttttttttttccatttcaaattcagttattgactgtatcgtaccagactaaaaaccaacagacacgattaacatacttgtattacattatttttaaaactaaattcgaaaccaaatcgattaaaaggagtttcttaaattcaagttagttgtgtttgaaactgaacatctagtaacaattagattagtgtgtttgattttc

SEQ ID NO: 133230 - DNA, 205 bp, Arabidopsis thaliana columbia
ttttttttttacgaccagaataaaaatgacaccaaagatttacaacaaatcctttacattgttagaaaaaacccaaccttatttccaattataaaactttacatttgaaagaaagaaaaaaaaaacaaagaagaactgagaccagatcttcaactatgtacagaatcttagaaattggatcatcactaataatacagcaaggttc

SEQ ID NO: 133231 - DNA, 200 bp, Arabidopsis thaliana columbia
ttttttttttaagaaggagaagcaacaggagagagaagagaagaaggaaagaagaagaagaaaaaaggaaagtgagagagagaaaatcaataacacatttttcaccctgccaagaactatttatgaatttacatctataacattatatgatgcagaagataaaatactaagtatccattataattttgtcaatgaatggt

SEQ ID NO: 133232 - DNA, 204 bp, Arabidopsis thaliana columbia
agcgagcgagagcccgatatatatattgttatctacttgtgatttatcgagttttatttatgggattgcgtatcattgtgtagtaagtccatagtcattgttccgcagttaaacatgttacttagtcacaatgtttgcccttatctaaaagtctggaggcaaatctccgtctccaatgtgcctgcaacggaccttaatagtcta

SEQ ID NO: 133233 - DNA, 203 bp, Arabidopsis thaliana columbia
aaagcttgccgaaatgaaagggtgtgtgtttcttcccggactacttagtcactttgattctatcagcaggtttgtcttgcactgttctggaatgtggaaatagtttggatggctcggaggactgattgtttctccgggtttagaactttgagacttcctaatcgggaaattcttaacggagggctttgattagcaagttcctt

SEQ ID NO: 133234 - DNA, 614 bp, Arabidopsis thaliana columbia
aggagatgtacgaggagaaaatcaaacgattgaaccttagacatgtggcattccgtacaatgtggctcgcagctgaagattacccattgcttttaggttctgcagatcttggtgtctgcttacacacttcctcgtcgggtttagaccttcccatgaaggttgttgatatgtttggatgtggcctcccagtttgctcggtttcctactcatgcattcaagaactcgttaaagatgggaagaacggacttttgttttcatcttcatcagaattagcagatcaattattgattctcttcttttgttttcatcttcatcagaattagcagatcaattattgattctcttcaagggtttcccagggaactgtgatgcactaatgtcgcttaaagcgggtgcaatggagactggttcttcgggtcgatgggctacagagtgggaagattgtgcaaaacctttaatcactcaggtcgtgtctcaaattgcagattcatgaaagagaagactcaaaatcgatgggcttgagagtttctcacacaactgcttttgtagatccaaatttttatacaaaatcatataaattacaagattgtctcgaaaatattgacagaaaaaaa

SEQ ID NO: 133235 - DNA, 319 bp, Arabidopsis thaliana columbia
ttttttttttaattatcggattgggcagaagcaaaagctggctctagcaaaacagttgaatctaagggcaagacaagttgaagtgtggtttcagaaccgtaggcaaggacgaagctgaaacaaacggaggttgattgtgagtatttaaagagatgttgcgataatctgaccgaggagaatcgacggctgcagaaagaagtgtcggagcttgatgggcgtttgaagttgtctccacatgtgttacatacacatgactctctatctacatcaccattcacttctttgcaactggtgtgtcctcctgttgctgcacttgtgt

SEQ ID NO: 133236 - DNA, 204 bp, Arabidopsis thaliana columbia
ttaatccccgctaattaacatcacccttcattgggttatcagcttcaccaagacgttgggaaatccctgtcttcttccgcagaatatttatcacccttcaaattgttgggtgggccttagcaaagtatccggtaattgatcttcctgggggccaaggtcatgatcaaactacaatcgagaaaacattggtcgtacccattatta

SEQ ID NO: 133237 - DNA, 207 bp, Arabidopsis thaliana columbia
ggatacgagaaagacttcgactctctcaccagtttcgtcgctgctaataagtttatagatgggtttcggtatcacagctctaatagtgacggtcccaattccactaccatcatattccagtgtcgtggtgactcttacaagtctaactgtcgaacctgctatgacaccgctctggccgggtttcgtagagaatgtccaagaaacaaa

SEQ ID NO: 133238 - DNA, 324 bp, Arabidopsis thaliana columbia
ttttttttttcgtcacatactcccattaagcatatctagaaaaccaactcaacgatacaagtttttaaaaataagtatcttagaaccaaaccaaaagtccaagaccacaacggatacaaatacctccgttatacatacacacaaacacacatatatctatagtataacgtgacgtacaacattcatttccataaccagcaaacaacacacgtagtagatacaccgcaagtatagaaaacacaccgccttaaggtcaaaaactgatttacctctggttattaatggttgtttggtggtccggcggaaaggaaaaggggttgtgta

SEQ ID NO: 133239 - DNA, 333 bp, Arabidopsis thaliana columbia
ttttttttttgaaggaagctaaaagtttaatgaacttagtttctcttattggaaatatttcaaacttctccaagtggtacttaattccaggcaaggtccagtggaatattaacaagtggatcatggagtctttactcgtggcggaatttcctggccaggccgggggatccaattagttcttaggacggcggccaccgcggttggtagtccaggctttggttccttttatggaggggttaatttcggacttgcgtgatactaggtccatagctgtttcctgtgtggaattggtttatcccccacaatcccacacaataggggcgggggacctaa

SEQ ID NO: 133240 - DNA, 204 bp, Arabidopsis thaliana columbia
ttttttttttaatttccaaactttcattattatatactatatttgttgggaaaaggaaatggcccctttaatatatatctccccattttttaaataaaccgagtattacatttcgcaccccgtatcgttatattttataggggagagtactctgtttgttggtttgttaatttgcgggcccatgtttatatatatattatatta

SEQ ID NO: 133241 - DNA, 274 bp, Arabidopsis thaliana columbia
  unsure (1)..(274): unsure at all n locations
tagtcacttggcataagcaaaccaagctatccagccaaataattagtgttgggctagtggtgaacgtcatgcgaatagtctggataccctagtttgagtttaagttgagagggtttctaaacgattttnggaaatacattaactttggttcagactttctcgattaattaccattaaaaatcaaaaggtcaatgttgtcgaaaatgtaaaagtataggctttcaaatagtacaatgggtacaatcaatgtccaacgaacgaacgtagcatttgt

SEQ ID NO: 133242 - DNA, 336 bp, Arabidopsis thaliana columbia
  unsure (1)..(336): unsure at all n locations
tgtatatgaaacgagtttgaggaatcaaaactatctaaaaagacgtaccgaaagtgaaaactaagantatactgtatgagacattagaggaggttgtcatctactcatagtgttgacttttgatgaaacccaaatgaatgaatgaatggtggcgccatttcctttatgaaggaacaccccttttgttttgtcatattctatttgtacagcctaattgttaggttgttttcattttgaagacgggcctacgagatcactttcattttgtttatcgtatcataatgggctctntaaatatgacccaccatgtaaagcccaagcaatctgcatatagga

SEQ ID NO: 133243 - DNA, 262 bp, Arabidopsis thaliana columbia
  unsure (1)..(262): unsure at all n locations
atgatttggaacctttccttgcaacacctgcacattcattaacccatcaaccttgcttcctgtaagactataattacttctcctatctatgtcatcaaccaagactagtttagattttgacaacttctggtcaaatgggtacgtcacatatgggngaaaatgaaataaattgtaaagtttattagtcaatttatgncatgtgaattggtaatatgtcaagtaatccnaaatcaagagttgtnctgctttggaatctcaacag

SEQ ID NO: 133244 - DNA, 382 bp, Arabidopsis thaliana columbia
ggtagaaacaacaaaacccggtttactctcggttcagctctttccgcttcatggaggaacagcaaaacccgaaaaaagccggtctactttcggttcacctctttttgctacctggagattttggtgaacactagtatgagaactcgtggccacgaagagagatgtatttcttggcccagattgcaatatcttctgcacaagcctgagcttgcgggagtcctaagaagcatgtcgagggttgcaaactcgtgaaccgcgtctttgtactctagcacgggagcatctacgttgacctttcttagctcttcttgagtaagcaatggctcggtctctcatccagtcatgctctgcgacaatggttagtgtaggtgggcaagaactt

SEQ ID NO: 133245 - DNA, 365 bp, Arabidopsis thaliana columbia
aactcaagaaatggaaaaaccctagaaaactttgcgggaacccccaaatatagaagaagaagaaacagaaaaatttcggatcaaatgaaaatcgaaatggaagtaggaatcagatgatatagatcaatgagggagaagaagaagaagaatgaagttagacctgagctgaagaagaagcttccatggaatcggtgatctcgagtcgtctgcgtttcaaggtgtgtagagaagggtcatcagcaaacatcagacccggttcaagttattctttacttgctcgctgcaaatccaccgtctatataccggaggcgcttttgttttaggtgattttcaatttaagcacagtatgttttggttttttttac

SEQ ID NO: 133246 - DNA, 338 bp, Arabidopsis thaliana columbia
  unsure (1)..(338): unsure at all n locations
gttggtgtatgcctaatacagntaatgttggttcacaagaaacacctcgagctctagagcctataaatcttttggcggctagaaatgaaagagaaagttttcagatagccatgcgtcctaaagtttctngggctgcttccagccctttccgggattgttcaggttcagtgcagtgacttatgctcttctgctggagatagattggttgttggccagtcactaaagttgcggngagtggtgcctgtcttaggcgttcctnatgctttggtgccccttgatttgcctgtttgtcaacttagcttatttccaggagaaacaagtgtcatttggggtctcaa

SEQ ID NO: 133247 - DNA, 221 bp, Arabidopsis thaliana columbia
  unsure (1)..(221): unsure at all n locations
ttttgtgaaaaagagattctaacttctaattataaaaaactctggttttatcacagtgtcttacaattnacattggcaatgncttgnngtcgagaacgactgaaaaagtagaaaagctcgacgaggttngaaaagaggtacctcatgtgttgtcccatttattgtcaccagagtcagccctttgtaaacttggctgcatccaccaacctgtccatcatcgt

SEQ ID NO: 133248 - DNA, 208 bp, Arabidopsis thaliana columbia
ttttttttttaaaaaaatctctaaatccgttggattatataataggactaattaacctggttggaaatgatcaaaaagcgccttaacaccacggcatcaatgttcggtttgtccaggattctcaagccatttggaaaaatattaaaacaatgagcacgcggaatctgacggctgttaagaggctttgagggaccaccttcacactttt

SEQ ID NO: 133249 - DNA, 209 bp, Arabidopsis thaliana columbia
aagcacaacacacaaacatgctaacattgcatcattcctaattacattaaactacatttgattctctctctctctctctttgtgtctcatgtgtcatgaactcaccagtgtcctccatatacccatcctaccccaaccatcacagccaccattaccgttgcaaccaccttccatagttcctcctgtctctttctgctctgacctgtacc

SEQ ID NO: 133250 - DNA, 386 bp, Arabidopsis thaliana columbia
gaggctttgtcggaagtcgcctcgcaaattcctcggaccgctttcatttggggagacagattagcatcaccatttttgtttatgtaggcaacgactcctatggcaactccaactattaagaggatggaggccaccgagaccacaacttgaccttgggagaaatcaataaggctttcgatctattgcacgaaggtacttgccttcgttgtgtcctcgataccagcaaatgactatatgggtccgctctgctttaatctatgtgttcttgtgactttcgtcttttatcggtattgacatttcctaagagcaacagactactctactcgtgtgtgtctcgtttctatcttatgcttcaataaaatatcaattaagaccgaaaaaaaaaa

SEQ ID NO: 133251 - DNA, 293 bp, Arabidopsis thaliana columbia
ttttttttttgatatacttggatctgtcatatgtaccaaaaatatgaatagatagatccaaacgaagataatgccaaaatgtgtatactatataacaagccatctcaaagcgatgccttagatttcttagatttaaaaattgaggatgccttgttatggccatgcgacactgcattcatatattccccatcgttgtcctcgcccccatccaaaatacttttcacttttaatgaaatatcatttgaatgctgcgatctccttatgttagaaccagctacatatatttttctcct

SEQ ID NO: 133252 - DNA, 279 bp, Arabidopsis thaliana columbia
gcttgtaaaaagttgccaaacataaagtgcattgtcgaagtcttactgaagtggctagaaggaatgaagaaaaaccttttcaaagcaaagagtcaggttgggattatatttgaggccaagaaagaccaagaaaggtaaggagaaaaaaaaaatgcaactggctctaacataagtagatcgaacattcaaaagaaacttcattaaagactagtaggtagaagatattttggataaggacgaggacgaggcaatgatggatactatatggatgtgagttgc

SEQ ID NO: 133253 - DNA, 212 bp, Arabidopsis thaliana columbia
ttttttttttgtgaatccattgttattattaatgaaaacaataggaatctgtgattgattcaaaacactcgaaattaaaactactgaggaaaaaacaatgtctcaggaagttccaaagacagaagacgagaacattattagagtattttgttttctattagagacaatctaacaagtttattgtataaaattcgatcaatctcttccagttg

SEQ ID NO: 133254 - DNA, 314 bp, Arabidopsis thaliana columbia
acaccaacagtattcaaggaattcagtttaaatccaacaaacacacttcccagtactttggatatgaatttttgggagatggtacacaattttcacttcaagttaatgacaacaagatcattagctttcatgggtttgctgattctcatctcaattctgttggggcgtattttgcacccatctcttcctccttgactactactcccaacaaagtggaaggctcaaggaggaaatggtgggaacattcgacgattggtgctgatgcatgtaggcttatgttgtcaggtgagtcgtcgtgcttatgtcactcgatt

SEQ ID NO: 133255 - DNA, 236 bp, Arabidopsis thaliana columbia
ttttttttttaaaagaagtcctctttaacttgataattaaaaccaaaacaaaatatacattttccacatctcttttctacctgaatatctcattgacaatgaatttataaagatagaaaaatctacctgatacagaattcatatatatctcgaaaaccacacaggttcatatacttagaacacatagatgctacacgctaaactaagcctaacaagaacaacatattctctcaaca

SEQ ID NO: 133256 - DNA, 332 bp, Arabidopsis thaliana columbia
agagaaggagcaaagcactcgatcattcgccttcttttgtactatattgtattgtcttcttcacgagtcttgttccgattcccgagacagaacatttttattttttttgactcctcaagtttatcagaagccaaaggatcggaaagactctctttgcatcatctctacccttatggcagctgcaccaccgatcgagccggcggtgacgacgacgttccctggcttcaaattctcgccgaccgacatcgagcttatatcttattacttgaagaggaagatggatggttggagagactgttgagattatcctgagttgagattacacttcggct

SEQ ID NO: 133257 - DNA, 320 bp, Arabidopsis thaliana columbia
acgaggtgagagatcgcaatgaagcttggatttatgggaattgggaaagaagggagctatgatagtcttacctgctgggatctatcatcatcgcttcaccgtggactctgacaactatatcaggttcaagtcagcttgttctagccatttattatatattttcggcttgcttagaaaattgaaatatcttgttgaacaggcaatgcggcttttcgtgggtgaaggcctatggacaccatacatcgcccacacgaccatcttcctgcaagaagaaattgtcgataacttcatggtcaatgcctctgcttagagagcttcct

SEQ ID NO: 133258 - DNA, 203 bp, Arabidopsis thaliana columbia
caggctagtagtcatttatctgtgggcttggaccaatgcattagccgatctgagcgttgcagaggcctcggcttcgactaagaaatatttggtcctccccgatgattgcttgtgtccactggcattgcacgaggattgctagacccaggaactgcctgagactgatggtcgtagatttctgcgcttgttgagactttatgata

SEQ ID NO: 133259 - DNA, 313 bp, Arabidopsis thaliana columbia
attctactacaatctaactggcattcctctatcaactgcagttcaaggggtaagcggctttcgcccgccttttttttgtctttaatttccgtttacatggatcaggaagtggggtttgttttgggcttctctctagatatggtgaaggggcgggaccaacagggtggtccaaggtatatgaaacgattgctttggggtaacacgggaactaacaatttatttatttttgtatgaaaaatttattgtgaggtcttctgatcttgatttgatttgaaattaacgaacttggagttcttggacgacaaaaaaaaaa

SEQ ID NO: 133260 - DNA, 202 bp, Arabidopsis thaliana columbia
tgcctttgtactcattactaacctggcttttctgttttcagtcgttgatatattcaccttgagttctcctttcccacgctctttcctcctccctcaagatattcgaacattactgagtcagctgtgaaggccgctttttcgttctcttctcctgtttccactgaaacatcttgctttgatgggaaggcagtagtagtttccg

SEQ ID NO: 133261 - DNA, 208 bp, Arabidopsis thaliana columbia
gctcaaggtccttccaccagcactcaagtagcaaaaacgcattcacaggacttgctagcacagggttctctgcttcttcgttctcgttcggttggttcacaagaaggttcgactgggtctggttctgaacagtcatccttcagtttggccaagcaaacatggaaactcttccctgttgtgcatccgttgcatcttccattaccacgaa

SEQ ID NO: 133262 - DNA, 210 bp, Arabidopsis thaliana columbia
cttccatcttctttccccaggacctcacaaaccccttaggaatgaattgttaatcaatcaatcaatcgatttcaagaatttagtctcgaaaggttatttttgcgccttccgtcttaaatggagatcgtaaggaggaacttaggcgtacctagctccgagcttgacacgacgctcgtatgcgatccagcttggtcgtcgttcgagtactct

SEQ ID NO: 133263 - DNA, 202 bp, Arabidopsis thaliana columbia
agtaatgtcgctattctcagatgatcaggttgcagagatacgtgtcgtccaaatgtcggcaggagtcgtaggatgcataacggagatcagtagtcagaaccaggtgtatccaacggtgcataagtatcgtaccgtagttaatctccggtccggtcgatgtcatcggagtgtgccaaacaactaatcctggggttggaggtca

SEQ ID NO: 133264 - DNA, 206 bp, Arabidopsis thaliana columbia
aagaacgaaaaaaaggaacaacaaactagagagcgaccttcctcttaccggcgcgttactctcaacagcgtaaacgtacatatagacgagtcgagcgatctagacagagctttatcgataccctaagctcctggttgtttcagatttttgttaattgaattctctgacatcgagatagaggagatgtggttcgtatctgaatctcg

SEQ ID NO: 133265 - DNA, 202 bp, Arabidopsis thaliana columbia
ttgacgtcaggcatcaacttcatttgatacgaatccacagaaccgtactcgcgaattgatattcgattttgaccttccctcatatccgtagagaggccctagagaagaccaccagttgcaatctgatcgatttcctccatctttaatgtccaacgaagccgaagataatcctccatattcagaatcgagagtataggtgcca

SEQ ID NO: 133266 - DNA, 205 bp, Arabidopsis thaliana columbia
aaagtaatggattttgtttaagataatctatggggatgaaattttctcacctttctacctttctactttgcatactttttagctagtctctaacatatctttccatatcttcacaatgtacatactgtatatagctctaacgtgggaactcgaagaatgggtacccctgtagagaagtgtatatcagttcattcaagagacctta

SEQ ID NO: 133267 - DNA, 250 bp, Arabidopsis thaliana columbia
ttttttttttgaatttaatctttcttttacttaaagtccatattgtcctcaatttatgcaaaagcactacgaattgtcaaaatgttttagagtgatacgatacccctaggcttatatatcagatcagccaaaaggcctttcataaacgcacataaacaaacaaaactcgggcccaaacaagaaagccgaaatgctacaataccattaagaaagcttatttaaaatgagcctccttattaataattaaagg

SEQ ID NO: 133268 - DNA, 273 bp, Arabidopsis thaliana columbia
ctggctggaaatataggagtcaattgtaaactttgctacaccatgtgcaacatggtcttcgctggaccaatatgttttgtgatgcaggagacggttacaaagcctaatccattctagtttacaggatactttcctatttacgtattttccttttcctattaggattctagtagttttccttatttctaagaattatctattttacgtattaggctttctctatataaagaaccctaggtaatatgtttagacaacttttatcattattattaa

SEQ ID NO: 133269 - DNA, 237 bp, Arabidopsis thaliana columbia
ttttttttttcattctgaacctatctgccattctttatcacttgttcatactacagagacagaaaattgcaaatatactagcattcaaatttgaggatatgtgaatttatgcatgcatatattaggagatacatatatactagaaacaaccaataatcctcacatgccatggcagtttagaataaataaaaaaaacaagcagagccagttgaggaagcagccaaacttgagggggcc

SEQ ID NO: 133270 - DNA, 227 bp, Arabidopsis thaliana columbia
atccttcatttgcaagtttctttagtacgaaacaggagttcatatctctgctttacgcgtgatttgatctactgttttccagataaacagaagtttcaaagtgaaacagatattggcatgtgccgattgtttgttctatgagaaacaaagaagttacatctgaaaacataatctaggaagggctttacacgtatcctaagcattatctttttggtttctcttcatat

SEQ ID NO: 133271 - DNA, 274 bp, Arabidopsis thaliana columbia
tctctttcttctctcctctgtgatgtgaggtttcgaagatccttctctgattcctcatcaaactcagatcagtagcggacccaaataggatcaaagcaaacgaggtttcaatttagagtttttttaagctcaaatctcggttgcttcggttgaacttcttgatacactgtctcgttttgagttcttgttaggtcattcctttagagagatatatggcagaggtgaaggatcaattagagattaagttccggcttaacgatggttctgatatcgg

SEQ ID NO: 133272 - DNA, 278 bp, Arabidopsis thaliana columbia
ttcactccacctcgtccttagtcaccatgacgatcgttgcctccatcgccgctgcaccggctgctcccggagagctctggctcatgaatgcaaccaggattttcaaaaggacacaaagtgtttggactttgcgaccgggaaggcggcaacaactccgtctaagaagtgttgtgacactgttgaagatatcaagaagagatccaagagttgtgttcgtatacacagcagagacaggaggacagcctgagtctggtcaagagcaccttcactccactttc

SEQ ID NO: 133273 - DNA, 216 bp, Arabidopsis thaliana columbia
ttttttttttaaattgagcaacttgccattctggcccatttttcttttcaagttgctgtccatcaacttgctttaagtcaattcataagcgtttttgttcatcaacttggatccggttaacccaaatcccggttttacaattaaacccagagaacaacaatctttttttatggttctcaattgttcatcagaaagcttttttcattcaatgtttca

SEQ ID NO: 133274 - DNA, 242 bp, Arabidopsis thaliana columbia
ttttttttttaaagctgagccaaaaggactagtaaagattacaacaagagttgttcacaatttctcaagatcccaatttcgtcagatcatacaacaacatttgttcaacatctggaaaactatcttgagatcgagataatggccgagagagaacactacaagttaaaaaaaaaaccatgattactaataatacctaaacaacaaacgtctcttttcctctctcatagttttcacttccacag

SEQ ID NO: 133275 - DNA, 203 bp, Arabidopsis thaliana columbia
aactcaatctgaagtatcaaacgttcctacatcatcaacgtaatctcttcttatcgattccactcgaagaacaaccaatctcttctttcaaaccagcttccctcaacactttcgctgcattctccctctcatctttcaaccctactcaaatacctacaatccaacgaacacaatcgtcggagctgcaacagacacgtctgccg

SEQ ID NO: 133276 - DNA, 206 bp, Arabidopsis thaliana columbia
ctctgaagcttatcatgtgttgaagaacgttggtggattaagcaacgaggagcttctgagattttcactgagtggaattcaggtgagcttcagagtttcttcgttgagataacttctgatatatttagggttaaggatgagtttggtgatggagagttagttgataagatttggatagactggtatgaaaggtactggaaatggac

SEQ ID NO: 133277 - DNA, 203 bp, Arabidopsis thaliana columbia
gtgtcggaccattttcctttgaaggagttatcctttagaccgggcagtgagtgcaagtgcgcaaaggccatcggcctttttgaacagtatacagttcatccatacggatctcaatgtattttgggattcttcgaaagttttgatttcttgaacccattttctctctcagcactacttttgcaaggatgcaatgcatcaaaagc

SEQ ID NO: 133278 - DNA, 205 bp, Arabidopsis thaliana columbia
ggaggagaagcacaccacgacgactcgaatcgccgcgggtttctatgttacacgcaagagattaaccatcgagcgtggtaaatttggggatcatgcgaacagtatcatttggatatgaccaaagatgtttgctaagaggaagacccttctgaactgagaggagaacaattgaaacggactgctttgtggaccaagctaagagctt

SEQ ID NO: 133279 - DNA, 207 bp, Arabidopsis thaliana columbia
aacttgcttgtgtctccaaatctgatagatttgaaactttagaactttctccaatgggcgggatcggccttctaagcctttgcgctgatcttaagtactccactgtacgatgaggtagtcgttgaagttaacttccatctcacttgcaagtgaaacctctttcatggagttctgtctcatggctgttgcctggctccagtgtgacct

SEQ ID NO: 133280 - DNA, 202 bp, Arabidopsis thaliana columbia
cacgagccgggattgatttcagacaagtctcaagatatgcaacacgttcattctcattccgccagcctttccgagggagagctaagctcagacagtctaaccgctaagccactagctgaagctcacgaaaactttgttgattactcttcgatcaatcatgaccggtctggagcaggcagccgtagctctcgttcagaacacg

SEQ ID NO: 133281 - DNA, 203 bp, Arabidopsis thaliana columbia
tctacaattcagctgcttaccaactaccattagagagagggttgcatctcagctgactacgactgcagagtaggaaagcggttctggagaacgtatgtgattcgatgagatcggtttcatgccatcggatcggttatgcattatgcagggaaaacaaagagtagatccaaacacaggacaggttactaagggaactagagcaa

SEQ ID NO: 133282 - DNA, 454 bp, Arabidopsis thaliana columbia
cttaccactcttctgctcgttctcttgttcatctcggctgagatcccgacggctgaggctaattgtgatacgtatttaggcgaagtcacagtgtattacccatgtagggaaagagactgtgaagcccaatgctatgagcattacccacactcatgtaaaggagagtgtgagcatcatgaccactgagtcatcatgaccacgaagaagagcattgccactgctacggtcgttgaaatattttacgaaaaactacgtatccaataacaaataagattgtatctctataatgtaagtgtggtttcgatacctatgtaagggatgtgtatgagttagtttctgttaaaaacagtaggacgaagctaatgacggcgtctctctgcttactataataagatcagttgatgcttggtcttgttgaacaataaaagaaagagaaagactacgaaaaaaaaaa

SEQ ID NO: 133283 - DNA, 480 bp, Arabidopsis thaliana columbia
  unsure (1)..(480): unsure at all n locations
cttgactggatctgaattggttgatgatgagactgctttgtctctgtggcactctaatctgaaacttctcttggtcactctaggtgaaaagggttgtagatactacaccaagagcttccgtggatctgttgatcccttccatgtggatgcagtagatacaactggtgctggtgattcatttgttggtgcattgctttgcaagattgttgatgaccgtgctgtgcttgaggacgaagctgcgctgagagaatggcttaggcttgcgaatcttgtggagccatcacaacaacaaagaaaggagctattccagctccctacagagtctgaagttcagagcctcctgaaagaaactgatttacaatgctggatttttaggacttcaagttttaccttttaagctttgctttttatttaccctgctttacgctctgtgtcttgagaaccgtncattcgtagaatctcgttattccaaaaaaaaaa

SEQ ID NO: 133284 - DNA, 208 bp, Arabidopsis thaliana columbia
ttttttttttgtttcgtgattattcgaatttgatatatttcatttcaccccttagggaataataatgggttcacatggaattgcataatgttgtccaaatcagctccaaaaagtgtgatgccaatttcttgacaataaaaacaatgattgccttaagctttagaaaaaacaaaagaacagagttgtgttccctccatgagcttttttg

SEQ ID NO: 133285 - DNA, 226 bp, Arabidopsis thaliana columbia
gagagacatcagtgccgaattcgaagagtagataccacatagtattccttaccaggaccgggtataccggagaaaagatgggtttgagaatttcggttccagatgagcatgctgtggatctagcaaaagcaatcttggacaaatccgagggtaaggtaaggcttaccggtctaggagcaagagactctcaggttagaagcaggactttgtctatatggaacacatg

SEQ ID NO: 133286 - DNA, 210 bp, Arabidopsis thaliana columbia
cccgattatttcggcacacaccccacccacaccctcgacaacgcgctccggcaagttagacgttcaactcggacgagtctcctctgccgagcgcgtgtccatcccatcacgctcagtcagttcattacgtcatcgctatgcaatgcggaggctcttcctttggtcaacaagttcggactctctgatactactgatatcgccgttggttaa

SEQ ID NO: 133287 - DNA, 204 bp, Arabidopsis thaliana columbia
ttttttttttgtcacataaatatttttatattgcctacatatgaaaacattacacaatcacaccattaccatacataagagaaaatacaaagctgggaaaatgtcaaagcttaagagaagtgtgagtcacgacaacacaacaggatcacgtctgttacttccaagcaagcacacttctgctcctcttaagcataaaaacatcac

SEQ ID NO: 133288 - DNA, 295 bp, Arabidopsis thaliana columbia
agaagagtgctctcttggagtatatcatcgtgaggactcctactgacgtctcccagaatgacttcggagacggtctacactgtgcagatgcctcaggatggcccaggtggagccagcagcagctcaagtcaaccaaaaaatagaaaactagctactgtattaagtattatgttatgtaataaactatgttcgttgactctcttcgatcggatttgttgtgtgactttttttttctgccttgttaacttattgtgagactgttttctaatttaatatctattatgcaaaaaaaaaa

SEQ ID NO: 133289 - DNA, 205 bp, Arabidopsis thaliana columbia
ttttttttttccacttaaaataacagacacaatttgttccaaatacaagaccataccataatccaaagaggataaatattctactctttcagtttcatcttcaaccccttggaatctttgcaatcagaaaaacctgagcatcccaaagaagataaaatcatcgactggactatgaagtgtttcactcaagtaatgactgcacccc

SEQ ID NO: 133290 - DNA, 418 bp, Arabidopsis thaliana columbia
ggtaaacatgtacttagcacaatgtttaccttatctaaaagctggaggaaatccgtctccaatgtgctgctgcaacggacttaatagtctaaaacgcggctgaaggatagacaagttgcttgtaattgcttgaagagtgttgctaatacatccctggattaatgtgtttgcagcgctcctgctaatgtggtgttatatggtgtccttctctagactgtggacttgtaacagcataaactgcaaaagacgaattgactaccaacggccatgcagctacaataaagtggatatcctaaaagatcaaaaccatcatgaacaaattatatggatacttagtatttatcttctgatcatatatgttatagatgtaatcatatagttcttggcagataaatgtgattatttcccaaaaaaaaaa

SEQ ID NO: 133291 - DNA, 211 bp, Arabidopsis thaliana columbia
gactagtctcgagtttttttctttcttttatgtcaagatcttccttctttttctttttgatgctttcaatcctaaaaggtgaatattcaggagatactgctttcgttctgtctgtgtattcttttcttttccttttttcttatttttgttattatggcttatgtgcaaattcttttgttatataattgattctcttctttcaaaaaaaaaa

SEQ ID NO: 133292 - DNA, 250 bp, Arabidopsis thaliana columbia
ttttttttttgaaataaaaacaaattagagagagaaccttaaaccctatattaaggtaataaggaggcacacactttataactggacacaaagcagaggtgggaacccgagatgagttatcacaagcacaaatatggagcgcagtatccaagagtcggttttgttttgtttatttttcacgagtattagggagaattaactctacaatctcacttcacggtaatttaaaactctgtgtaccaaaaatctg

SEQ ID NO: 133293 - DNA, 202 bp, Arabidopsis thaliana columbia
ggacgagtatcactcaccggagctttgagaatgaaagtagacggagacggaatggacataatggtggcaatatacgaaaccgggcttgtgaacgactgtgcaagaggagagaacgaaggaagaatgttgtcgaatgattacgttgtaagaaagatagaagatgtagcccgaagaggcagtctcggggactgctcattttccc

SEQ ID NO: 133294 - DNA, 208 bp, Arabidopsis thaliana columbia
ttttttttttaatgagacacaacaaaatgtgaatttgggttctctctatcactataggagaggaaccgagagagtttgtgttccaaaagggagaaaacacaacacacacaatatttctctaaatctcaaaaatctctggaagagaggaattcactataattaaatctctaatctcttaaaacctttttccaattaatcctggccaaac

SEQ ID NO: 133295 - DNA, 255 bp, Arabidopsis thaliana columbia
ctctcacaacaaaatcttttgaaattggcgatttctaaggactttccatttgttgttctcattgattggtgattatctccttcgtttgcatcggcacaattctgaggctccagtcatccatagttcttacttctggatctagtgcgtatctcatgctgtcttttcgtgttcatgctggtagtttgccatgcagtcgcgtgctcttggttttttgggctcatgcttctttcggtattctaagtttactgtgatggt

SEQ ID NO: 133296 - DNA, 226 bp, Arabidopsis thaliana columbia
  unsure (1)..(226): unsure at all n locations
ttttttttttancgtcaaatagaaataggtataaagaccctatttcattattcataaagaagatcaatattcttctagtgtacaaatnttcttctaaagtcttgatgtattgtaacctatttcaatattcataaagactgaccaaaaaggaaacggatcacataacatatgttgaacggcaaaatatgtggtctccgcagctaaaaacaaatatggggtacaaaag

SEQ ID NO: 133297 - DNA, 265 bp, Arabidopsis thaliana columbia
  unsure (1)..(265): unsure at all n locations
gcaagttcagagacagcgggatctcccgaacaattctcctacttagtggttagccctttctctcttactgattgagaagtccagtatgtcttgacatggagaagacgaggaaggacagatcagcaggacttccgacccatagtagagctaaagcagccgtagcagtgaagtctataggtttngattggtcctcttgctcctcatcagtatcagcaagcaagtcgtagctgtgaagtctataggtaggaaagttcctcagtcaacg

SEQ ID NO: 133298 - DNA, 316 bp, Arabidopsis thaliana columbia
agctaacagctgcttaacccgccaacctaccatcaacctaccaataagaatgaagctaactgctaaagccatgcccttctctaacagctaaagctaagtcctcaagaaaggggaatcctatggttacctaggcatccggctacctatcaggacgagaagttacgtagaaagggaagagttctagagattcctccgataccttttagctgcttcacgcagagactccaaggcgttctaacggaagaggaaagagttgtttatgccttcccttcgccggaaagagtttatgccctctgttttagggttcattcaacag

SEQ ID NO: 133299 - DNA, 221 bp, Arabidopsis thaliana columbia
  unsure (1)..(221): unsure at all n locations
aagaaatgtgataaagttgaagacaagagtgttaaagctggtggtgttattggttcacaggagctaaggaatatncaaggnattgataaactgatggataagcatacgaggtcttccttgtctaatacaagtacatcgtctnctctctggactgatgagtcatcgactgattccagtagaggtctgtgctccttctcctgttcgtaaaaagatcaatcacc

SEQ ID NO: 133300 - DNA, 359 bp, Arabidopsis thaliana columbia
atccgcagaacctcagaaaccggagtgctccccgagctatcaggaactagtcccttgttacctggttttggtgctagcccatcataagtggtgtatcttcccatctatctcctctgcggcaatgccaagctccagttataatggctctacccagcaataccaccaacagccaccttcctgtagtagcggtaaccaaacattggaacaacaaatgattcatcaaatatgggaacagatggcaaacagcaatggaggctccggtcaacaacaacagtcactttctggtcagaacatgatgaattgcaataccaacatgggaagaaacagaacagattatgttcccgcaggaggtgaaacac

SEQ ID NO: 133301 - DNA, 381 bp, Arabidopsis thaliana columbia
  unsure (1)..(381): unsure at all n locations
gagagagagagagaacaaaaaatgggagagagcaaacgcaccgagaaaacgcgcgttttggtggttggagcgactggatacatagggaagaggatagtaagggcgtgtttggctgaaggtcacgagacttacgttttgcagaggccagagattggtctcgaaatcgagaaagtccaactntttctttctttcaagaaactcggcgcacgtatcgttgaaggttctttctccgaccatcaaagnctcgtatncgccgtgaaanttgttgacggcgttntctcccgcaatgtnccggtgttcantttccgtaggcataaacaattnttagnnccagcttaaaagnttcnttnggaggttttcaaaagagggctttgntaaccg

SEQ ID NO: 133302 - DNA, 409 bp, Arabidopsis thaliana columbia
  unsure (1)..(409): unsure at all n locations
aaaggaagtgcgttgtaccagattcatcttgngaaggctgcgactgctcgagcattcatccccaaggagtttcgactagttgaagcttttggatacactcttggcggtttcttccttgctagctacgatgatagcccccgctggtgtctttgatgagcttttagtaattgcagggattntatggaacccctnctacaatcatgcgcattggccccgagggtactttntgaacagcgatgaggcttgtcatcacgggacgcaaggaaagtagggcctncccaaagccaaagtttncaaagaatttttcaaaaaaccattaactttcnaggnccccaaaancaaaaaaaanggggccannnggtttttgggtttctttnggccnaaattttngggtttttgggaacctacc

SEQ ID NO: 133303 - DNA, 457 bp, Arabidopsis thaliana columbia
  unsure (1)..(457): unsure at all n locations
cttaanagcgtcacaacaatatcacactcagataaatatcaagagatagagagagtaacagtgatatagtcgagaaaatggcgtcgtggatgaaagcggtgctaatctctactggcgtcgtagccacggctatgcatctaaaggttattgtncctgtggctatggatttntcacaaaatccgattattttaagctctttcctcacgtggctgaaaccgccgtatctttacgtcatcactaacgtcatcatcatcgttgtcggagtttcctaccggattactacttgtntccagccacgtcgacgggcaaanactatnagggctttttaccagtggggggcaataaggtttcaaggcttgntcatcaaccagttcggnccaagaaggttcccnttaagggggccggnccgggggccgnaaattcngggtttttgggtttnnncgggnaaantttttna

SEQ ID NO: 133304 - DNA, 565 bp, Arabidopsis thaliana columbia
  unsure (1)..(565): unsure at all n locations
aatggaaacagcaaagcgtagaaccatgtcaacaatcgtttccaggcttagctctgtctctnagcaaaccagagccgctgctttagctgagcttagactcatctccaaacaagatcctgatagccgtctaatcatcgccgacgccggagctattccgtacctcgccgagactctttactcgtcgtcacactcttctcaggaaaacgccgccgcgactntcctcaacctctcaatcacctctcgcgaacccctaatgtcttcacgcggcttactcgacgngctttctcaacgngcttcgtcatcacggcancancacttnccccgccgnggttcaaatccttcggcggtacgntttataggccttttgataggccgaagagttttaccgncctatcatcgggtctaagggggntaataatcttttccctaattcancanattagggtatccagatttgaatccttggtnggtnaaaaggttggntaaagggactttttngggntcggntttgattccgntggaccngtttgggggtgttttttttggggggnttccgggttttttt

SEQ ID NO: 133305 - DNA, 507 bp, Arabidopsis thaliana columbia
  unsure (1)..(507): unsure at all n locations
attacttcctcaacttgttgtctatggctctgaccaaacccattctagtttccgaaaagcttgtctgattggtgggatacatgaagaaaacattaggctgctcaaaactgattcttccacaaactatggaatgcctccagaatcacttgaggaagctatttctcatgatctcgctaagggttttatccctttnttcatttgtgccactgttggcacaacgtcttcagcagcggttgatcctttggtcccattggggaacatcgcaaagaaatatgggatatggttgcatgtggatgcagcttatgcagggaatgcatgtatatgtccngnatatcgaaaatttattgacgggntttgaaaacggagactccctttaacatggatgctcanaaatgggnatttgctaatcaaacttggtcaccccttttgggtaaggggncggnactntcncnttnangcncncaaaacaaatcccggggnttntnggnttcaagggttnccaaaaag

SEQ ID NO: 133306 - DNA, 401 bp, Arabidopsis thaliana columbia
  unsure (1)..(401): unsure at all n locations
cgccggtcaacttttgagagagagaagaagaaaaatgcatttnagtgagaatnaaggtgtcgaaggtaacaccttcgtggtcactggaggtcttggcttcgtcggtgcagctctctgcttagagctcgttcgtcgtggtgctcgccaagttcgctcttttgaccnccgtcantcttctccttggtnccgatgatctcaaaaacagtggcgttcgctgcaatcaaggtgatgtgacctaaggaaccaagatgttggtaaacncttttanattgnagcagacctnttgtttttcaaacttgctttcttaatggggatgtctttggggaagggggattccttnccgggttttgggccggttttnatnaggggttnaaaannnaaccgggggcctttttaaaagt

SEQ ID NO: 133307 - DNA, 547 bp, Arabidopsis thaliana columbia
  unsure (1)..(547): unsure at all n locations
cttctnccggcgttttctctccgccgtttcgccaccgtacgtgacaatgtctgtttctctctccgccgcctctcacttactctgttcctccaccagagtctctctttcccccgccgtcacctcttcgtcctcgtcccctgtcgttgctctttcttcctctacatcgccacattctcttggaagcgtcgcatcttcttctctgtttcctcactcctccttcgtgcttcagaaaaaacatccgatcaatgggacgagcacgaggatgatttcancaaaatgtgccgcttctgatgcagctcaattgataagcgctaaagaagntatcaaagnttctttctncggactnaaggtttgccatcccatcttgggtagatttggggtggacgatgctggtaacttataacaagnatattgnggggtggcactnagaggttggggtaaattgaaggnttagggttttaggctngcttnaagaatctgaaaaanttggctcttaaatgnttnaaagcaattagcntnnaaancaaggttctanaaccttnttggg

SEQ ID NO: 133308 - DNA, 411 bp, Arabidopsis thaliana columbia
  unsure (1)..(411): unsure at all n locations
agcgtaaatnacgaaaaacagagagataaatccgggcattgagattttggagatagagagagagaaaaatcgaaatctattgtctatctcctcaatttggattggatttnctgcatatcatcgctctagctttcgcgggttttggattcgattccttacccttctccaatcgaagtttttggctttnaattggatttgggtttcgttccaaaatcagctctttttgttaatcagatatgcaaggnccagcttggtgtgtcatgggttgtaggaatttaattgatngnatcctagaggngcanntaaatgtgccgttttncggttantgtaaccacctttnaacnatgggttccccccttcctccttccaaccttnaggggaattgggcacacantttaaatgngggggggg

SEQ ID NO: 133309 - DNA, 578 bp, Arabidopsis thaliana columbia
  unsure (1)..(578): unsure at all n locations
cagcttatggatgaatcagatatctcaaacctgccttatctccaaaacattgtgtctgaaacgttgcgcctttatcctgcggctcccatgcttcttcctcacgttgcctcggaagattgtaaagttgcaggatatgatatgccgcgtggcacgatactattgaccaatgtgtgggctatacacagagatcctcagctatgggatgatccaatgagcttcaagccagagaggtttnagaaggaaggagaagctcagaagcttatgccgtttgggttaggaaggaagggcgtgtcctgggtctggactggctcaccgggcttataaaacctgactnttttggtcatttgattcaagtggtttggaattgggggaagatttngaggagaaagtngntattaggtaaaggcaaaaaggtgttncaaatncctaaagccaagnccttttgaagccatnttccaaggccggncccnctttttgtnaaaacttnaactagncccntttaccggttaggctttaaggaangncttttttnccttgggnccaatatggtnnangttcctttttttttgggnaaaaat

SEQ ID NO: 133310 - DNA, 576 bp, Arabidopsis thaliana columbia
  unsure (1)..(576): unsure at all n locations
atggcgtcgtcctctatcgcagcaacaccgacacaatcgtttgaagataatttcaacattatgtggtctgaaaatcacttcacgacttccgatgatggagagatctggaatctttccttagataacgacaccggatgtggatttcagacaaagcacatgtatagattcggatggtttagtatgaagctaaagctcgtnggaggcgactccgccggcgtcgtcaccgcttactacatgtgttcggagaatggggcaggaccggagagagacgagatagatttcgaatttctagggaaccgaaccggacagccttacattattcagaccaatgtgtataagaacggaaccgggaatcgggagatgcgacattccctctggttcgacccggccaaggattatcacaactactcaattcttttgggataaccaccagcttgtgttcttcgtggnaagggaccaattcgggtttcaagaccagtntaaggtccaacaacgctttttccgaccagaagccntgncttgtntcanattttgaccgtnnggttggtaangngnggcttggagnttctgaaaant

SEQ ID NO: 133311 - DNA, 591 bp, Arabidopsis thaliana columbia
  unsure (1)..(591): unsure at all n locations
ccaaatcgccaccaaatttgcagaacttcatgacacttccatgagaatggctgcaaagggagtgatcaaaagtgttgtggaatggagcggctcgcggtccttcttctacaaaaagctcaataggagaatcgctgagagctctcttgtgaaaaacgtaaganaagcatctggagacaacttagcatataaatcttcaatgcgtctgattcaggattggttctgcaactctgatattgcaaaggggaaagaagaagcttggacagacggccaagtgttctttacatggaaggacaatgttagtaactacgagttgaagctgagcgagttgagagcgcagaaactactgaacccaacttgcagagatttggggattcctcagatttgcaagctcttccacaaggnctttctaatcttctaaacaaggtggngccgtcgnaaaggggagnncttggtggcttctnttcgaaaggctttgggtgncttntntccgaggcctttggttatnccaggaaggtggcntttaaggttcttttgcccntttggccacttccctnatttgtggcccgttaaatntnttnngttncntncngc

SEQ ID NO: 133312 - DNA, 436 bp, Arabidopsis thaliana columbia
  unsure (1)..(436): unsure at all n locations
cattctctcccgcagcagcttttcctaatcgatggcggacatcgacatngccgttggganagagccgcngataaaccatgaaaacaacaacaacacgnacaagatcttcaatcgctgcgtttcacaccaacaagacgagctacacagcttccgcaaatacctaaggtggatgtgtgtagatcactctagtccatggacagcgattctctcttggaccatgttcatcgtcttcacactcgtcgttccggcgatctctcacttcctcctcgcttgtgctgattgcgacagttaccattcangaccttacgnctccgtcgttcagcttttcttctaagnagcgtcgcaaccgtntctttcctctggtcttacccagantcggttagcaagnatgggntttcgangntttcctnttncntttnataaacttttggggccg

SEQ ID NO: 133313 - DNA, 379 bp, Arabidopsis thaliana columbia
  unsure (1)..(379): unsure at all n locations
ggagaaaactctgcaaagaatccatcaaccataagtactacagtncagaaatcttctggcggatacaatnctggtttagaaggtcttctaaagcctgcagatggtgtatgtggttgtttcaacaaggataaagatggtcttcaggcagacactgattctccgattaacatagcggagatactcgcagaagaatccaaattacagggctcagggacctctcggctcaccacatcattgnacaatcttggttgatactcataggaaaggaacggtcctcaaagggtagggctcagtcccttngnttcantcttcatccaggttnctttttnccncaaaggggnatccagccgggntnccattcaggaggngccatnggngg

SEQ ID NO: 133314 - DNA, 561 bp, Arabidopsis thaliana columbia
  unsure (1)..(561): unsure at all n locations
aaggctctctctgtctctttctcaaaaatcatctgcaggaagtgaatcgtcaaaaccgagtttggaggatctgtcttgaggagtttttttttggttgagaaatggcttcgaaaaggatcttgaaagagctcaaggatctccagaaggntcctccaacttcctgcagtgctggcccagttgctgaagacatgtttcattggcaagctacaataatgggtccatctgatagtccttattcaggcggtgtctttctcgtaaccattcacttccctccggattatccctttcaaaccaccaaaggttgcattcaggncaaaagtgttncaccctaatgtcaacatcaatgggagcatttgcctttgacatttttgaaaagnaccaatggggtccctgcaattaaccatattcgganggttttgncttttcgnnaatggtnaattgttaaacgggcccaaancccaggttgntcccattgggtcccngggtttnncacatggtncaaaacccgtttgggnaaaggnttgnggcttnttcngggaaggtgggcntagaatttnaaat

SEQ ID NO: 133315 - DNA, 587 bp, Arabidopsis thaliana columbia
  unsure (1)..(587): unsure at all n locations
ggtggttcaaatcccactgccagagccgtaactggagtcgtcgcaaatccggctttaagcgggcaacttccatttgctaaacccaacggcgcaaaccttcctgtaagcaacggagttccgtcaaacaacaacaacaatgggattgtcaacaacaacaatgtccctttcctcgttggactcggcggaaccacagctaacattctccagaacaacaataacggaaacaacattttaaatggtttccctgttgctagtggcggtcagctcccgagcggttctgctcttcagatgctaatgttcggggcaatgacagtaatcgatgatgaactaactgaaggccatgagctcggatctgggcttactcggggaagcgcaggggntattatgtggcggggtcaattnccgganctngccagacaattggttttacccggggttntttaaagcggngggttttnaaggtaggntaagnttnttttggggttttagacaanggttntanatcggattnnggggaattgggggncccgaaagntttaattcggggggttcgggtttagggtttaggctttgggcggaaatnnccc

SEQ ID NO: 133316 - DNA, 337 bp, Arabidopsis thaliana columbia
  unsure (1)..(337): unsure at all n locations
caccctgaaatcatacgtccagttcctaagcggatggctcacgaaatgccttcactatgaacccgaggcaaccgatgacggaatcgctcctttctctcctagccagatcggtgcaccgcccatctttatcatttgcaaagattggcaagaagcaatgtgtagaatatctggagagaatgtgaccaatgcaatgcaaggttttgcttcaagcctacacgngctattgggagaagcaagnagnngnncaaaggggtaaaagcncaaatnttgaggcaaccgngattcagnagtcaagagnagaaggttttgggttttcgnaaaggtcgggtcaanaagg

SEQ ID NO: 133317 - DNA, 403 bp, Arabidopsis thaliana columbia
  unsure (1)..(403): unsure at all n locations
aaaaattggggaacgacgatggcgacgactcttcagaaactctcctctcaaatccaccgactctctccattcaccagatctctaatcgttcgcacatccgcaacgtctgctccttctccgtctctgggatcgaagaaagtctctgaccgaatcgtcaagctttctgcgatcgatcccgatggatacaagcaggacatcattggactctctggccagactctccttcgtgcgntcactcacactggtctgatagatccagcatcggataggatttggatgacaatcgagggctttctcaacggagtccgagggttcaaatncgnagngggaattgggcncgangaaggttccccnccggggnaantttacggntttnggggggtntnttncttnaangggtaag

SEQ ID NO: 133318 - DNA, 595 bp, Arabidopsis thaliana columbia
  unsure (1)..(595): unsure at all n locations
aagattagaacttgcaaggaatttccagtttcctgttttaagagagcctccacaatcttttcttacaacaatggaggaatatatgagagacgcacctcagatggtcgacgtcacatctgggccactgcttctgacctatacgcctgatgatggtcttacttctgaagatgttggaccttcacatgaagaacatgaaacatcatcgccttcagatagtgccgttgttccctctgaagaaacgcaactttcttcccagtctcctccttcagtagaaactccacagaacttcattgatactgatgatctattgggtctgcaatgatgatacacctgatccgttagcaaatcctgggcccaaaatgcactagctttggccttaagtttccaatgatgttgattcttcggccgtttaggttttnggcaagnaagagatttngntccggcaagntgggganctttccgttnggcacaacaccttgnaatgntntntnttnagcncagngggcaantngncgggtggttagganggtancctgaacagcttnttnggtgggcttaggggncaaagctccttgggccagtcaccgttgggcag

SEQ ID NO: 133319 - DNA, 251 bp, Arabidopsis thaliana columbia
  unsure (1)..(251): unsure at all n locations
ggtcggtacgcctcgagttgctcgcgggcatcggccggngtgccgacgattccnaccgttgccaccatcgcgtccgagacctggctcaagagctcgcgcgncgcggccccggccctggntgactcgatcacatcagcgtanccgcgcggacgaacatgtccgagtaccccggagcagccagatacggtacgagcccgcntcgaagttgatcgatcgacacctgtnacggtccattntnggcganggcagct

SEQ ID NO: 133320 - DNA, 442 bp, Arabidopsis thaliana columbia
  unsure (1)..(442): unsure at all n locations
ggcttcttcacatgcaagattctgtgaattgttcaagttgaggcatcatttctggattactaggagacgaatctnttgcagacggatgtgtgtgtgttggattgaattgagattagggtgtagaagatgttttgtggatagctaatagcttcctgattgcatctctgtcatccgacctttgccatgtcaggtgcgcttgcatggcaggtcaaaaaaactgatcctcaataaaaaaaagattttgtgggttttggagaggaggtcgcacgggttattattttttcccgggatctcttctcctctgtgtgtgtcgnctttgcctctggttctaactntnctccccggttctttcaaaatttcaaaacctttccttaaaacgcncatnttcnnccntnaaaaacccgtnccnaaagggnggggttttnaacccnatttngggcna

SEQ ID NO: 133321 - DNA, 359 bp, Arabidopsis thaliana columbia
  unsure (1)..(359): unsure at all n locations
ggaaaacaccagctgagcgatgtttcttgtggcttggcgggttccgctcatccgaacttctcaagcttcttgcgaatcagctagagcccatgacagaacgacaggtaatgggcatcaatagcttgcagcagacgtcgcagcaggcagaagatgctttatctcaagggatggagagtttacagcantccctagctgatactttatccagtggaacttctttngttccangttcatcgggtaaatgtngcgagcnnncatggggtcagnattgcccattgggnaatggggcagnttagggaacccctngaaagggtttcataacggcnagggcttnttaacctttgtggggctgcaaacna

SEQ ID NO: 133322 - DNA, 602 bp, Arabidopsis thaliana columbia
  unsure (1)..(602): unsure at all n locations
aatcaactttctcttcagcgcaataccgtcatcgggaatgtacaccatcatgttccgnctctgttctcaaccttcttactggataacaatgtttctcatagttggagcaggcatgggtcctattttcgcattgaagtacttccgctacacatacagacccagcaaaatcaatatactccagcaagctgaacgaatgggtggtccaatactgacactaggaaacatcgaaacgcaaccaaggaccattgaaaaggacttgtctccaatatccatcactcagcccaagaacagaagcccggtctatgagccattgctatcagattctncaaacgnaacacggcggtcatttggncctgggactccattcgagtttttccannacagtcaagnttatcatcatcctctggttataccaggaacttgcaaaggcaaactnaaaaggtttttaattttttttggttctttcaaanttttagggtccgtgncggtttgtgcttttctggcctaatgggaatnagnccagtgngggttttcagggaaaaaaaaaagggggccgnttggggccaggttggngggtattgcggatgcttttggnncctttc

SEQ ID NO: 133323 - DNA, 427 bp, Arabidopsis thaliana columbia
  unsure (1)..(427): unsure at all n locations
cagccacggcttcaaaagaaatgctcacccagttcctttatcgcnccgtcactccnctcctcttctccagatctttctcctctacgcttttcgttaaaggcatatctttctcaagcactgaagaaacantaacccaagcattttctcaatatggtcaagttctcaaagtggatgttataatggncaaaatcagatgcagaccaaaagggtttgcttatgtcacatnctcatctaaagatgangncgagaaagctttattagaactcaaccgccctgtnngnttgacgggcgggtcgtgatccttgacacatcaaaagctgcaaancacaatcccaccaagacaccangccaaatcanttgcagggtgggtgatngctgatacttcctccttttgtcaaccttngttagggttaaatttattgtggct

SEQ ID NO: 133324 - DNA, 281 bp, Arabidopsis thaliana columbia
  unsure (1)..(281): unsure at all n locations
ggaatcctctgggaagtagaaggaaagtgggttactgtgggagctgtagangttaacattggtgccaatccatctgctgaagaaggtggngaggatgaaggtgttgatgactntactcaaaaaggttgttgacattgtcgacaacttcagacttcaagggcaacccactttatgncaagaagggnttcatcggttacaataaggaattcattaagnntttgacaacccaggtnaagcnaggaggtccaagctntctttaaagaaagggtttttngggggct

SEQ ID NO: 133325 - DNA, 470 bp, Arabidopsis thaliana columbia
  unsure (1)..(470): unsure at all n locations
gtccacnggcacgttaaaactaactacaaagactattggcgagtgaagatagcaatcacaaatttcaattaccggatgaatcatacactctggactttagcaattcagcatccaaatctcaacaatgtgactcaagttttcagctttgactacaaaccagtctctccttacggntccataaatgatactggaatgttctatggaacgaagttttacaatgatttattaatggaagctggaccttcagggaatgtgcaatcagaggtttttgctacaggaaggtcaaaagncttttactttcaagnaaaggttgggctttttccttaggaaaaggtttactttaatnggtgnatggaatggtaatgttnaccctccaccaggattcantacccttttncttcccaaactttggnacaagggggancttttgcttcggtnttaattancnattttgnttnnncccattcaac

SEQ ID NO: 133326 - DNA, 568 bp, Arabidopsis thaliana columbia
  unsure (1)..(568): unsure at all n locations
ctccgaaaacctttcttctctcaaatttctgtgaaaacatgtctgacgacgagcaccactttgaggccagcgaatccggagcttccaagacctatcctcaatcagccggtaacatccgtaaaggtggtcacatcgtcatcaaaaaccgtccctgcaaggttgttgaggtttcgacttccaaaactggcaagcacggtcacgccaaatgtcactttgttgctattgatatcttcactgctaagaagcttgaagatattgttccatcttcccacaattgtgatgttccacaatgtgaaccgtgttgattaccagttgattgatatcactgagggatggcttcgtgagncttctcactgacagtggtggnancaaggnatgatcttaaaggttccaccgatgatgggntcaccgnccagatgaggctttgattcgnntgnggggnaaggtnattgtggngctgcatggcttccatgggggagggggagtntttncgtaaggaagttgtggtgaagaacaaggttatncggaantttaccatttcacggcgnaattttnagcccaaantttt

SEQ ID NO: 133327 - DNA, 483 bp, Arabidopsis thaliana columbia
  unsure (1)..(483): unsure at all n locations
cgttggtacaatcacattgatgccctcttgaggatctctggtgtctctnctgaaggaagcggtgtcattgttgagggatcagctcctatcactgaggaggctgttgctactccccctgcagctgattctaaggatgctgcggctgatgaagaagatgatgatgatgttgaccttttcggagaggagaccgaagaggaaaagaaagctgctgaagagagagcagcttctgtcaaggcatctacaaagaagaaggaatctggaaagtcctcagttttgaattgatatcaaaccgtgggattgatgagactgacatgaagaagcttgaggaaagctgtgaaagtccattcagantggaaggtttttnttttgggggngncatcaaaanctttatccccagtttgggttaatgggaatcaaagaangttccaagnttttntttgcancnatttttttnncggcccttttcnccnnntngncaccatg

SEQ ID NO: 133328 - DNA, 557 bp, Arabidopsis thaliana columbia
  unsure (1)..(557): unsure at all n locations
cccggagctctcaccattcctcgcgagcttcttgatgcatcaactgtggcagaagccatagccgtcatctcttgttggtacgaggataaaaccgagtggggatctcggatcggttggatttatggatctgtcacggaagatgtggtcacaggttatagaatgcataaccgaggctggaaatcggtttactgtgtgaccaaaagggatgctttccgtggcacagctccaatcaacttgacggataggcttcaccaggttctccgatgggctactggctcggtagagatcttcttctcaagaaacaaatgccttctttgctagnccgagaatgaaaatcctccagagaatcgcttacctaaacggtgggaatcttacccgnncaanatcaatccttcccncaatnggcttcttgnttccctccccaggtctctccctattcttaaggcaaggncannggccaaaaaaatcaangncaaaatcccngggtttcccctnaancaattccaanagggtctgnttantcggtcttcccgggacaaatggcaagnntttnancg

SEQ ID NO: 133329 - DNA, 483 bp, Arabidopsis thaliana columbia
  unsure (1)..(483): unsure at all n locations
gcaaagtcttcctcttcttcttccaccagagacaattccatcatcatcatcaaatagacaagggaagaattcaatttcccctttctttattggcgcgaagatctttcacagaatcaatcaccaacgaaaaatcgagaatggatgtttgcttgagctattcatatantatggatgatgagattgctaagttcatcagaagagtgaatccaccaagggttgtgatcgataaccgnagtctgcaaaagatgttactgtcattaaggtgggtagtgcggataaacatgggntacttctgggagggttgttcaaggttttgactggagcttaaatcttgcctattaaggaaaggntnatatccnccccctggangggtgggcttgggttttatggnntgtttttcaaatngttacctgntccaagnattgggnnccaaaaggttncccggttgaaaatttgtcccttggaanttntncccggaaaanc

SEQ ID NO: 133330 - DNA, 504 bp, Arabidopsis thaliana columbia
  unsure (1)..(504): unsure at all n locations
caattcatcaatctcgtgatatgagttcatcggtcgtgctagtgcgatcgagctcagaagagcaactatgagtctctggtaaaactctctcacaggggcttatagctgcactgttcttagcttcctttggtagtctaaccctcaaagctgcttctcctctcaatgctacattatcgaaaaaccgagaatcataatcgaatgatcaactcaaaactacaatggactagtcaaattcaatagatcgnaacaatcaaggattgagaattgaagtcaaacaatcaatgtacctgttgcagctgcagcaagttagagtcaacaaatcgncagggtccacggacatcaacagcttgatcggncagcagagaccggcggngnttcgtnattcggcggccgggaaagntccgncaatttcgggggcagtttgnaagnttacaaacttccgncggccggaggcaaagggntttnangtcatncttttnatnccngcgaagngggtctttgatt

SEQ ID NO: 133331 - DNA, 404 bp, Arabidopsis thaliana columbia
  unsure (1)..(404): unsure at all n locations
gcagcagacacaacacgagttcatcgagaagcaagatgactttcaagcgaaggaacggtgggaggaacaagcacaacagaggacacgtcaacccaatcanatgctccaactntggcaaatnttgccccaaggacaaggccattaagaggttcattgtgaggaacattntggagcaggctgctattagagatgttcaggaagctagcgtctatnaggggtacacatttccggagctatntgcaaagacggcaatactgtgtctcctgtggttattccacttctnatgtcggttagagtcccgttcccgganccaacccgnagggttncgnanntccttccaccttggtttnggcccaaccgggaagggngggtttcttcccaaaggcctttgggaaaccnggggc

SEQ ID NO: 133332 - DNA, 445 bp, Arabidopsis thaliana columbia
  unsure (1)..(445): unsure at all n locations
atgaaatatggggaagagattaactgtgcggtgattccaagagaaggaactactgtaaccgaagaggacattaaagcgttttgtaagaagaatttggcagctttcaaggtgccaaagagagtnttcatcactgataacctccccaaaactgcctctggtaagattcagcgccgtatcgtngcacaacatttccttgagaagccctgaaacacacagaaaacaccatcttgctcgaaaatcatcggtgatgagtcctagttttcactttcccgcaaatgggtatgcgggtctctattaatggttcttgggtttaaaagttccttttataaggttcangggtgggaaagggtttaggtttaatccccaaaagnggggaataaaaagncgggtaaggggtttttttgggggncccccntttangggggggnttttttttttaaaaaaa

SEQ ID NO: 133333 - DNA, 443 bp, Arabidopsis thaliana columbia
  unsure (1)..(443): unsure at all n locations
gaagcgcacacacacaacatatttctttcactacccaaagagatggcgacatcgggaacatatgtnacggaggttccattgaaaggntcggcggataaacactacaagcggtggagagatgagaaccacctcttccccgatgccatcggccaccacatccaaggtgtcactgtccacggcggtgaatgggactctcatgaagncatcaagatttggaactatacatgcgatggggaaccggaagtnttcaagggaagggaaagnggtagaccgntgaggattatnggtgataacgttcagagggccttagaaggtcacggnaattggggccagctttaaaggtgtattgaccctcaaattttccagntnaagcccaaaaagnnttcccgntggattntcgnttttcaaaggtccccaatngnttttggggggaagggaacccc

SEQ ID NO: 133334 - DNA, 615 bp, Arabidopsis thaliana columbia
  unsure (1)..(615): unsure at all n locations
caagattcagacaaagaagagataatctaaaaatgaattctaaggcaatgcaagctttgatctttcttggtttcttggccacttcatgtctcgctcaagctcctgcaccagcaccaaccaccgtnactcctccaccaacggcgcttcctccagtgacagcagaaacaccttcaccaattgcttcaccgcctgttccagttaacgagccaactccagctcctaccacttctccaacaacatccccggttgcttctcctcctcagaccgatgctcctgctcccggtccttccgctggattaactccaacttcgtctccagcttccagggcccagaacggtgcttgctgatgcancaagtgccgcaatgggctaacaaagnttttcctttgtgggacaagctgttgccggaggttttataacgggtgtcggtttttggcttagaggggnttttaaggtttggtggattttgntcccnctggntttccaatnactggtnttaattnaatnacttnttntnggtcaaaatttggaanttactnccnttatcaattttgacgggggnaattttttgttnttgggntaggttnccangggnaanttgggaaatttttttttc

SEQ ID NO: 133335 - DNA, 582 bp, Arabidopsis thaliana columbia
  unsure (1)..(582): unsure at all n locations
ggcatgtaccttgtgaaccaccccgtcgaactcggaactcagttggcaatatacattctcgttgcaggaattctgtgcatttacataaactatgactgtnatagacaaaggcaagagttcaggaggacaaacgggaaatgtttggtttggggaagggccccgtcaaagattgtggcgtcgtatactacaacatctggtgaaactaaaactagtcttctcttaacgtctggatggtggggattggctcgtcatttccattatgttcctgagatcttaagtgctttcttctggaccgtaccggctctcttcgataacttcttggcatacttctacggcatatttctcacccttcttctctttgatccgaggccaagagagaccgntgacccgatgcccgntcaaaggatggggaatatttgaagctgtattttgagaaagcaaattcaggtcattccgggatttatttnntgnacgagcttgttgtnccaanttccncttntnccggtaatcgancggtggntnanaaaagccgtccaaacaaaatnaattnntcggnggcattttttaaaaaaaaaagggggc

SEQ ID NO: 133336 - DNA, 429 bp, Arabidopsis thaliana columbia
  unsure (1)..(429): unsure at all n locations
cagacaaccaacccggtgtgttgatccaggtgtacgaaggagagagagccagaaccaaggacaacaaccttcttggtaaatttaagctctccggaattcctccagctcctcgtggtgtcccccagatcacagtctgctttgacattgatgccaatggtatcctcaatgtctctgctgaggacaagaccaccggacagaagaacaagatcaccatcaccaatgacaagggtcgtctctccaaggatgagattnagaagatggttcaagaggctgagaagtacaagtccgaagncgnggngcacaaggaggaaggttnaaagccaagaaccggttnttgggnactncggtttncaaccantnngggaccacccntcccaaggccggggaaaggttttngtttaaaaaggntccccgggttntagncaaaga

SEQ ID NO: 133337 - DNA, 504 bp, Arabidopsis thaliana columbia
  unsure (1)..(504): unsure at all n locations
ctcggcgctgctactcaggtcttcgccggacacatcagcaccatcgctctcgcagcggtctccgttgaaaactcggtcatcgctggattctcatttggtgtcatgcttggaatgggaagcgcgttagaaacgctatgtggacaagcgtttngagcagggaaattgtcaatgcttggcgtttacttgcaacgatcatgggtgatactaaacgtgaccgcggttattctctcgcttctttacatcttcgccgctccaatcctcgcgttcatcggtcaaacgccggcgatctctagcgncacgggaatattttccatctacaatgatccctcaagatcttttgcttaacngtggttaaattaccccaaacgggttaaaggttntttgcaaatcaccaaaagcaaaaatcaatgggtgattgggcttcngatntcaagggggtttnnactttgttnttanaanggngntncccnaangggggggtttntcnaattnagggggcnccaa

SEQ ID NO: 133338 - DNA, 513 bp, Arabidopsis thaliana columbia
  unsure (1)..(513): unsure at all n locations
tgtagtctctatcttcccatctccgatgctatacgctggcccaactgaggttcaatggcatgccaaagctaggatcaacgcgggagctaatttctacattgttggtcgcgatcctgccggtatgggccatccgacagagaagagagatctttatgatgccgatcacgggaagaaagtgcttagcatggcaccaggacttgaacgcctcaacattctacccttcaaggtcgctgcatatgacaaaactcaggggaaaatggccttctttgatcccttccaggtctcaagacttcctcttcatatcaggaaccaagatgcgtgggttggcgnagnaagnaagagaaccccnccanatnggtttcatggtgtccccccttggttggaaagggtgtttggnttacttacttacggcaagcctcaagttnaagagacttgntaattggaaggggtttcaaaagnctttttnntccnnnnttaaattnaaaaanggtttnctttttccccaaaaggntt

SEQ ID NO: 133339 - DNA, 614 bp, Arabidopsis thaliana columbia
  unsure (1)..(614): unsure at all n locations
gcttgggaccagagcagctattatcagacaccaaaccatccatctgcgtctcctgtttcatcctataattctgggagacaaacaccgaagaatcttgagaggaagtattcacggattgctgataactaccgttccattgatgaggttaccgctgctctttcacatgccggtttggagtcctcgaatctcattgttggtatagatgtcaccaagagcaacgagtggacaggggcgagatcatttggtaggaagagtctgcatttcattggaactactccaaacccttatcaacaagctatttccatcattgggaaggctttatcgggtttttgatgagggtaatttgatcccctgttnatggntttggngnatgctacaactcatggtcaggatggnttcaggttcaaanccaaatggttccatattgtaccggggtttaaggagttccanggtgtacaaggggnggttttnccccagntttgggttttaagggccggaatnttttgancctttcattggaagggccnttgcaattttggnanaagnggggccaanccntgtnnttctaanatccgtgtngcaagggccaagngggttttccagaaacggggntc

SEQ ID NO: 133340 - DNA, 543 bp, Arabidopsis thaliana columbia
  unsure (1)..(543): unsure at all n locations
cgttcattctccggattctccatttccgctgtcgctgtctccgtcaccgttggcgccgcagccgccggagctgcgatcgcggcgtcccggaatcccagccatccgattctagagtgggccttctcctctcaccgttcgtctctttcaccatggggatctataactctagcagacgaatccgttgtcgaacctaagaccggtttctcgtttcccgcttcaatcggagattcccggcgattactcggcgtcggcctgaggaagaagagcttactgggattgaagaacatcgatgtctacggctttcgngtggtaatgctgatttgtaaatgatgtgaagaaactttttggggagacaaagtaacgnaaaatntttccaagctttaagaggtccagggggaaaacaaaggcnaattcattgggttnatcttaattggaaagnccgntnttaaagnttgccggttaaggcttacaanatttttttcnggnaaanttaaaaanccnntcccggnngnaantttttcaaangggtttttttggaaaagg

SEQ ID NO: 133341 - DNA, 555 bp, Arabidopsis thaliana columbia
  unsure (1)..(555): unsure at all n locations
canacaaactcataaacacagatgtccctgaaaaggacgtttttgccttccnnttcctccaatccctctcaaatctcagaaaacaaaacccttttgatactccggaccaaaaaaactaccgcgtgaggaagatcaagaaggctgcgtacgtttccatggccagagcagccggagggagtagccggctatggagcagagccctcttgcgtagagcagacaaagatgacaacaagatcgtaagattttcaaggaggaagtggaagatatcatcaaaacggaggaggagtaaccagagagctccggtggtggaggaggcgncgnagaggctgaggaatcttgttccgggaggcggaggaatggagacgtcaaagctgatgggangagacggntcattacatcaagtgccttagtatgcanggtcaaggtcattcagtgtctcgttaatgnttattcccaatgntcatcaataatcataacatcatatnaatgancgtgttttngggtccgcacatcatgntttngttngggancaacggtnttttggnttatnantcc

SEQ ID NO: 133342 - DNA, 615 bp, Arabidopsis thaliana columbia
  unsure (1)..(615): unsure at all n locations
atcgattcaatgttggatgtgattcataaacaaggagaggacagttccttagagctcacaatagatcatatcaaggggtttctcgcgaatatatttcttgcagggatagacacaggggccatcaccatgatatgggcagtgacggagctcgttaaaaacccgaaactgataaagaaagttcaaggcgatatccgagaacaacttggcagcaataaggagagaatcaccgaggaagatatcgagaaagttccttacttgaagatggtaatcaaagaaacattcaggttacacccagcagctcctcttatacttccaaggggaacaatggctcacatcaaagttcaagggtattgatattcctncccaagagggaggtctttggtcaatgtttcggcaatagggaggggtcccaaactcttgncaaacccgaagngnttgcccttaggggtttttggttagctttttttgtttttgggggcaacatttcggggtnttnccnttttgggcccgntcgaggaattncccgggttccattggggttcttccnccgatttggccttnacttctnnntntcgttgagtcctttggtccaaaagttttntangnngcttnttt

SEQ ID NO: 133343 - DNA, 527 bp, Arabidopsis thaliana columbia
  unsure (1)..(527): unsure at all n locations
ctatctctctcatcttctctcaaaccttcactcgtttcatcaagactcaattcatcttcctccgcatcttcttcttcgtttcctaaaccaaacaatctctacctcaaacccaccaaactcatttcaccacctctcagaacaacttcaccatcgccattgagattcgccaatgcttcaatcgagatgtcgcagcacaaggaatcagctattcgcggagtgaatctgacgtcatgggtcttctccttagggaacgaatcgtctttctcggtagtagtatcgacgatttcgtcgctgatgctattatgagtcagttgcttctcttagatgctaaagatccaaagaaaggtatcaaactctttaatcaattctcctggngggtctctaagtgnaccatgggtatatacggtgtggtcaacttntgngncctntgttncgcggttcctttggattnttgatnacagttcggtnttnttgggnggnccnaggaagngttttnntccaanggggaatgtnncaccttggggggc

SEQ ID NO: 133344 - DNA, 504 bp, Arabidopsis thaliana columbia
  unsure (1)..(504): unsure at all n locations
tgaaggaattcaaggctgaactcnctctcctccgtgtcgctaaagtcaccggaggcgctcccaacaagctctccaaaatcaaggttgtgaggaaatccattgctcaggtgttgacagtgatctcccagaagcagaaatctgctttaagagaggcatacaagaacaagaagctcttgcctcttgatctccgtcccaagaaaacacgagctatccgtagacgtctcaccaagcatcaggcttcgttgangacagagcgtgagaagaagaaggagatgtatttcccagtgaggaagtacgcttatcaaagtgtagtttcattctcccagctctagcttctagaaatgaatgattcagncntngattatcggcttatnttatctcctctctttnngggccaacccnattaatttnagnggtctgaagttctggtaatanaaaacnctctaaaataaaaaaaaaagggggncnttttgagatccagcttngncnggnanggaggaaagc

SEQ ID NO: 133345 - DNA, 601 bp, Arabidopsis thaliana columbia
  unsure (1)..(601): unsure at all n locations
agtgttgatactaagatatgttcctccagatgagcaacctcttccgtcatctcttcaagagagaattgattctgtttcctttatatgtggtgaaacaacgtcatccggtcatgttggtacttccgatagcagtcaccagcctttaatagttaataatgatgctttggtcgatgtcccacttatcaagaatcaagaagctctagggtgtttggttctcagcgaggaaaccagaaggattgtcgctggatggagcattatgttcacatgtgttggggccttccttttaagttatgcggcatcaagcctgagcttcccagggcttattagatatccgttgtgtggtgttggtggatgtctcctccttgctggnttgattgctctgaggtccatagntcaggatgatgcgagacacactttttgnnattctggggggtacatgtncccgtttgttccccnccnacccataanctgnattctaanaacatgacctttgggnaccttgncctcggnatggcncgggatcggtgtggctcttnaagggnattggatgttcttggcgnaanagtcgtncaacagtngnnccagcatngggggantcggg

SEQ ID NO: 133346 - DNA, 568 bp, Arabidopsis thaliana columbia
  unsure (1)..(568): unsure at all n locations
gaaacaggtagctggaaaattaaaattggaattggctcaattcgctgaattagaagccttttcccaattttnttctgatctcgataaagctactcagaatcaattggcaagaggtcaacgattgcntgagttactgaaacaatcccaatcagcccccctcacagtggaagaacagataatgaccatttataccggaacaaatggttatctggatggattagaaattggacaagtaagaaaatttctcgttcaattacgcacttacttaaaaacgnataaacctcagtttcaaggaatcatagnctctaccaaggcattaaccgctgaagcagaaagcttttttgaaagnagggtattcaaggggcacttggaccggttcctacctttcaggggaaagtttaaaaacggancggttnttccttaattttggttcctttaggcaattttnccccttnattttaaataantttttanggattcctggattggggcctttangccagggttttttattggaggggggtnnnccnaannccggttanttaanncttanggtccggttcttccc

SEQ ID NO: 133347 - DNA, 276 bp, Arabidopsis thaliana columbia
  unsure (1)..(276): unsure at all n locations
gtttatggtgatggaaaacagactcgtagctttnaatatgtttntaanttggtggagggacttgtagctttaatggaaaacgatcatgtaggacccttcaaccttggtaaccctggaganttcacaatgcttgaccttgcagaggtggttaaggaggtgntcgacccaagcccgaccatagagttcaaaccaaacacagcagacgatcctcacaagaggaaaccngncatatgcaangcaaaggacagttganctgggnaccnaaggttatctttg

SEQ ID NO: 133348 - DNA, 408 bp, Arabidopsis thaliana columbia
  unsure (1)..(408): unsure at all n locations
agtcgatgtgccagtagttgggggacacgccggagtcacaatcttgccactactgtcacaggttaaacctcctagcagcttcacacctcaagaaattgagtacctgacaaaccggattcaaaatggtgganctgaagttntggaggcaaaagctggagctggttntgcaacactttcaatggcatatgctgcagccaagtttgcagatgcttnccttcgcgggttaagaggagatncgnatntcgtagaatgctctttttgttgcttcacaggtgacagaatttagctttctttgnaacaaaaagtgcgcctttgccgtancaaggggcagagggaagtttntcaaactttgnccccttaancggngttcggaaangattttggccttngggaaagncaaaaaaatgg

SEQ ID NO: 133349 - DNA, 401 bp, Arabidopsis thaliana columbia
  unsure (1)..(401): unsure at all n locations
attagagactatgtaaatggctgattccgagactccgtatcaccccgaccctgaggatctccggcgtataccagtcgatctcttcgnttccaaaaagcttcccggactttcctccggcgatctcggatttgccgattcttccgaacatctcgtcttcatcctccgcaaatnttcttcctccttgaaatctctccttgattcctccggagttcctctcttctccatctctcgtctccacaatggagtntgggaattacataaaggngatgtggaaaagcgtaaggattttggttctaacggtgaagggnacatcgaaaaggnttcagtaaggncagagtcaaganggtcnntttttctgggagaantcgnccgaaaaatttntttaataaaaggngntnccc

SEQ ID NO: 133350 - DNA, 516 bp, Arabidopsis thaliana columbia
  unsure (1)..(516): unsure at all n locations
ctcgtnttttactcgtgccagccactcgcatttttccagatttaatnatccttcctcgaaacaagagcttagctaagatgacgaagaactacccaaccgtgagcnaagattacaagaaggctgttgagaagtgcaggaggaagctcagaggtttgatcgctgagaagaactgtgcacccatcatggtccgactcgcatggcactctgctggaactttcgattgtnaatcaaggactggaggtccattcggaacaatgaggtttgacgctgagcaagctcatggagccaacagtggtatccacattgctcttaggttgttggaccccatcagggngcaattccctaccatctcttttgctgatttccatcagcttgctggtgtttgtggccgttaaagttacttggtggccctgaaaatcctttccaccctgggangagggggcaaagcccnancancttcagnggggngttttcntnattntancaaggggttttaaccatttnnaanatnntttt

SEQ ID NO: 133351 - DNA, 459 bp, Arabidopsis thaliana columbia
  unsure (1)..(459): unsure at all n locations
ctttttgtgtttattttctgttattttgaatcgaagtcggcaagcataggctaaaaggtgatggaggatggaattggagggctgagacacatgttggcgacggttttnctttctgccttcgccggattcatggtagtaccagtgattactgatgtcaccgtcgctgctgtatgctctggccctgacgactcatgttctcttgccgtttacctcactggttttcaacaagtggcaatagggatggggactatgataatgatgccagtaattgggaatctatcagacagatatgggattaaaacaatcctcacccttcccatgtgtctctccattgttcccnccctgtaattttaggntacaggaagggggtataaaattctttttaatgngttttatataagcaagnttctnncccnctatgggnttngtnnangccccntttgncnnccttgtttgtng

SEQ ID NO: 133352 - DNA, 504 bp, Arabidopsis thaliana columbia
  unsure (1)..(504): unsure at all n locations
gangctaagacaatggcatccatggcaggaccagatcatctcttcaatttgagaaaccatttctacttgggtgcttatcaagctgcgatcaacaacagcgagatccctaatctttcgcaggaagatatcgtcgagcgagactgtctcgtccatcgcgcttacatcgctctcggaagttaccagcttgtcatcagtgagatcgatgaagccgctgctactcctctacaggcagtgaaactccttgctatgtatctatcgagtcctgaaaacaaggaatcaacccatttcgagcttgagggaatggttggcaagatccaactgtagggnaacaatgctattatcaggtttgattgctggtnctaatattcatggcatgaggaagnctataatgnggntnttgaagaacanttttttctggaggganccatgggtnttgcaatnttttttgaantgccccngatttttnanaaaggttgccacaggtttattttttngnggnggaaa

SEQ ID NO: 133353 - DNA, 579 bp, Arabidopsis thaliana columbia
  unsure (1)..(579): unsure at all n locations
cacaacctagctagctagtaaacagtattttctatataccaaaaatggcttcaagttccatagctcttttcttggntctcaatcttctctttttcacaacaatctccgcctgtggtagctgtactccgtgcggcggaggttgcccctctcccaagccaaagccaactcctaaaccaaccccaagccctagctctggctcgagcaagtgccctaaagacaccctcaagctcggtgtctgcgctaatgtgctcaacggcctcctggacttgacccttggcaagccaccggtcgagccatgctgcagcctcatccaaggactcgctgatgttgaggcaagccgtttgtctctgcancggtcttaaggttacattcttggnatcaacttgaaccctnccaataatctttaagnctantccttaatgnttgcagnaaacaaatttcttctgggttcaatgtaaaaccatattggtatatnantnantncancttatggggggattaaattnacctctggtttaaggggaagggggtttntnacccntanatggggctaaanacctggactgggggtggctttgc

SEQ ID NO: 133354 - DNA, 417 bp, Arabidopsis thaliana columbia
  unsure (1)..(417): unsure at all n locations
aaaagcgttgggcgagaagaagatgacgtgcttctnttctgctactcctcatcgccatcatctnctactttcttctccatctacttccaaatccctgcttcgatttccctcatcttatctgaaacctagccccagtcttctcttccatggctcatctcgctctctcctctcctgttcagacggcagcaacaaccgtcctcctccctccggtgacaacgtcccaaataacttctgtatcattgagggatcagagacagttcaagactttntgcagatgcagcttcaggaaatccaagntaacataaggngtaggncggaataaggtnttttntcctcatggngggantttaggggggtttacggntncaagcaacgttttcnaggngggtttaaagcccttnaaatgggggcaagttg

SEQ ID NO: 133355 - DNA, 428 bp, Arabidopsis thaliana columbia
  unsure (1)..(428): unsure at all n locations
agaaaaaaattcgatttttttgcgctctttgtgggttgttgttgttgaaaatggctggtcgtggaaaaactcttggatccggtggggcgaagaaagctacatctcggagtagcaaagccggtcttcaattcccggtgggtcgtatcgctcgtttcttaaaagccggtaaatacgccgaacgtgttggtgccggtgctccggtttatctcgccgccgttctcgaatatttggccgccgaggttcttgaattagctggaaacgcagcaagagacaacaagaagacacgtattgttcctcgtcacattcagctttncnggtcagaaaacgatnnagggctaaggnaagctttctttggngnatttttaccgntttcctaaatggnggngntatttccctaaaantcccaaanttttcnttntncccnaaag

SEQ ID NO: 133356 - DNA, 458 bp, Arabidopsis thaliana columbia
  unsure (1)..(458): unsure at all n locations
ctcttctnaaaaattagggtttgagttcttctnctaatcgatcagaaagatgggtggaggaaacgcacagaaatcagccatggctcgtnccaaaaacttggagaaggctaaggctgcaggaaaaggtagccaattggaagctaacaagaaagctatgtcgattcagtgcaaggtttgtatgcaaacattcatctgcacgacatcggaagtgaaatgcagggagcacgcggaggcgaanatccgaaagccgatgttgtcgcttgtttccctcacctcaagaagtgatgaaagctattatctcaactataaagggtttccaattgtnttaaccggattgggttcctcatcttttccctatggttttgtatccaaaggnttggccaaatttttnttggggttncnanttccnntcctacctgggtttccancaattaagggcntcttngctatggnttnna

SEQ ID NO: 133357 - DNA, 519 bp, Arabidopsis thaliana columbia
  unsure (1)..(519): unsure at all n locations
gaaactaattccaacagacgacttgctaaggatttggttgataaatggtctcgtccaattttcaacaagagtactaggtttgaggacatgagaaatctcgatgaagatagggttccctatagaagaccaccagtgaagaaacctagcaacaaagcgacaatggagtccagagatggtgactttgncttngaaattcgggaacgtaaaactggtctgacttcgggtcagagttcaaggggagacaggcaaatnacgatgaggccggaagcaaccccattggactttttgatccgtcctcaatccaagnttgatccagatgagatcatagnccgtgcaaaacaggttttttcaggaccagcntcggggtcaaggatgaccaaggaacttcagcagcttnaaagggaccaaagnagnagcgggtncaaagcttcngaanttaggtttttaaggtcgggggnntgtcaaggtnccttttgggggttcaaccnggcccttncnntcctcccaattnaatttggg

SEQ ID NO: 133358 - DNA, 560 bp, Arabidopsis thaliana columbia
  unsure (1)..(560): unsure at all n locations
aaaggcgtcgccttcttcggcaacggaccttacgttttccttcccggaatccagatctcaagtctccaaacgacgccccttctcatcaatccggtcagcactgcttctgcgttttcacaaggtgagaaatcctcagagtactttatcggcgtgacggcgattcaaatcgtcgagaaaacagttccgatcaatccaacgctattgaagattaacgcaagtaccggtatcggaggaaccaaaatcagctccgtcaatccttacacgggtgttggagtcatcgatctacaatgcttttaaggtcggagttcgttaaacaagcagcggcgaggggcatcaaggagagtagcgtcgggtgaaccgtttccggcgngtgtttttagcacgnaggacgtcgggcgttacgngccttagggttacnncgtnccnggggnttnncctttttctttnanagaaaaaangccttttnggggattttttgggcccccccttggggggtttnaatnatcncgcnattttttggntttttttgggggganaanaaaaanccctttttttttggg

SEQ ID NO: 133359 - DNA, 435 bp, Arabidopsis thaliana columbia
  unsure (1)..(435): unsure at all n locations
agtttgagttcatgtcacatgcaaaaccgtctttatttgagtacccaaaacccaccacggttcctacagccaataccgccgttaaacttccaaccgctgttctctcaacttcagttaaagccaaagctagggctaagaaagaagcagagcaaaaagctattgctgagaaaacatctggccctgaaaagcctgtcaatgaaagtggatctggaaaaggaaaagcatcaactgagaaggaaggagactctatgcaggtcgatagcccagcagcggtcgngaagaaagcaccttgagcctgagccagcgtttganattttagtggacccngctncgngtagtncccagctncangngggattccattaaaggttactttnttgncagccaggttttttttccccntgnagnttggnacccgccaggttttgntncttt

SEQ ID NO: 133360 - DNA, 305 bp, Arabidopsis thaliana columbia
  unsure (1)..(305): unsure at all n locations
gagaaacctatgaagccgactttcctgaaaagggaatccgattntcctntganaaggtcagtcaccatccaactntnatcgcctgcnactgtnaaggtaaagggtggaagttttggggtgacactaacctcaggtcaaagttttgggggaggtcgattcaagtcgaacctgttggagttttnactctggagttcgatgatggagaagtatttnattggagcaaggtaacatcaactatatacaatatcatacttagggtaacnctactgnaatccatcatgggtgtgatncaaaaccgtggggga

SEQ ID NO: 133361 - DNA, 509 bp, Arabidopsis thaliana columbia
  unsure (1)..(509): unsure at all n locations
tttctggcagcgggaaccgaaagtcgagtaggctgcagcggcgggctccaccgcctcttaagataaacccttgcgaaggaanttggaaagtggctattcctcttctatcacctacggagtcgccaccacaaaaaccaccggcggtaatgaagagggaggagcaacggtggggtaaagaggcggagaagccgccggtttttaagaagtggcagcatccggcagctccgttttactaccagccagcaccgtcatcgaatcagccgtttgcatggccaaattaacggtctcttaatattaggtctatcacacaaatacataaatatttggaatctttttaaattgtatgccggtcatattgacaaataggcntantttnaatttttttttaacattnccnttctttttttgcaggtatgtaatntttggggtttnanngttgtnattgtccccttgtaaccctttnatttaannacccaantttttnnagggnntttgttccggaaacnggg

SEQ ID NO: 133362 - DNA, 323 bp, Arabidopsis thaliana columbia
  unsure (1)..(323): unsure at all n locations
tactaacgacgcattctatggaagaagctgatattttaggtgatcgaatagggatcatggctaaaggcaggctccgctgcattggaacctcaatcaggttaaaatctcgctttggcacgggatttnttgctaccgttagcttcatcgaaaacaaaaaagacggtgcacccgagccattnaaaagattctttaaggagcgtctaaaagttgagccaacagnngnaaacaaagctttcatgncttttgtaatcccacacgncaaagagcaacttttnaaggggtttttcgcggggttacnaagatagngnatctnaatttggtat

SEQ ID NO: 133363 - DNA, 415 bp, Arabidopsis thaliana columbia
  unsure (1)..(415): unsure at all n locations
gataaggaagctaagctcaggatactcgtcgatgaaaacgagatactgaactcgaaaatcaaagaaaaagangaagtatacttaaacttggngaacagcttgaaccagaacgagcctgaggataccggtgaactcaagaagctagaatccgatgtgatggagttnagagcaaatctaatggacaaggagatggagctacagagcgtaatgtcgcaatacgagagtctcaggagcgaaatggagacaatgcagagtgagaagaacaaggctatcgncgaggccttagcaaagctcgggagtntnacagaggaagcagataagagcgtgangtgagcccnnaaaattcggcagancagcttanggggcggcacangtcacccaacaaccgnactnggaaggcttnagcttttaggng

SEQ ID NO: 133364 - DNA, 535 bp, Arabidopsis thaliana columbia
  unsure (1)..(535): unsure at all n locations
gaagaaccaaagcagcttctccattgttgctcttcttctcattttcttttcctcatctgtctttgctcagctgcagacaaatttttaccggaagtcatgtcctaacgtggaaactattgtccgcaatgccgtccgccaaaagttccagcagacttttgttacggctccggccaccctccgccttttcttccatgattgcttcgtccgtggatgtgatgcttcgatattgctggcatcaccatctgagaaggatcaccctgatgacaagtcactagccggagacgggtttgatacggtggcaaaggcaaagcaggccctttgatagggaccccaactgccgtaacaaagtctcatgnggctgacattttggttctcgcaactcggtgacggcgtcggtttttancccgnggncccgaacttttccggtagagntngggnagggnnatacgggaancttttnggnaagtggtttgggttaaaaaaaagttttnccnntgcctngttttaaaatttggcccanttttnaantntgtnt

SEQ ID NO: 133365 - DNA, 456 bp, Arabidopsis thaliana columbia
  unsure (1)..(456): unsure at all n locations
aggacaaactgcatagactgtttagatcgcactaattttncgcagtacgcccacggattggtttctctcgggcatcagctgcgtacattaggtatctnaggacctcctgtcgtcgatcttaataatcctctggcaatagaactgatggacgcttaccaaaagatgggtaatacacttgcnatgcagtatggtggctcggaagcacacagcaagatgttctgtgatctgagaggtaattggaatatggtgatgaggcagcgtgatatcttcacagctgtacgtcgttactacagtaacgcgtatcaggacagtgataagcaaaacgncatcaatgtgttcttggggtcattttccggncctcgacttggggaggccaaccgntatgggagttngnttcnncccngacaacaatcggaggnnttgggtcnnacctnggtttcgaaaanttngggcccc

SEQ ID NO: 133366 - DNA, 581 bp, Arabidopsis thaliana columbia
  unsure (1)..(581): unsure at all n locations
ttcctcaatttcacncccgagtacgattaacaatgcattgtnacaacgatgatgttcgcttctnttcatcttctatcagaatccattctccatctcccaaagaacaacactctttactcaccaatctccaatcctgctctaaaaccttcgtctctcacctctcaaatactcgtaactcactaaaccaaatgctccagtcgctaaagaatcgccacactcctcctccacgttcggttcgtcgtcccaatttaccgactcagatgctcaattcagtaacccagcttatgattgggaagtcttctccaatttnattgtctcttatccaatccacccaattcaattgggctgaatcaagngattgagnacgttgaggcaatccgggggctaaggttggctcttgntctggtggggcccctttggctttaaacttggccctnacggggtggggcttagncangtgggagggggaggnnttcagttnaaggngncanaagggggccnnncgggggggccgnaattcggggggaccgggttttttnnttaggggggggttttgnaagcccgaaagttggtgggcttta

SEQ ID NO: 133367 - DNA, 515 bp, Arabidopsis thaliana columbia
  unsure (1)..(515): unsure at all n locations
ctctcgccgccttcctctcaccctcttcgcatagcttcattttcgccgatggctctacctaaccagcaaaccgtggattaccctagcttcaagctcgttatcgttggcgatggaggcacagggaagaccacatttgtaaagagacatcttactggagagtttgagaagaagtatgaacccactattggtgttgaggttcatcctcttgatttcttcactaactgtggcaagatccgtttctactgttgggatactgctggccaagagaaatttggtggtcttagggatggttactacatccatggacaatgtgctatcatcatngtttgatgtcacagcacgnctgacaatncaagaatgtccnacatggcaccgtgntctttncaagggtttttgaaaacatcccaattgttctttgtgggataaagttnatgtnaagnncagggcaagtcaaggccaagcaggnaacattccncangnggnagnncccccnggttttcgggnattttccangg

SEQ ID NO: 133368 - DNA, 360 bp, Arabidopsis thaliana columbia
  unsure (1)..(360): unsure at all n locations
caatactttnaaagtgtcagggaggatcatnagcgtaanttttgcaaganggttcaagaagcctactcngaaatcaccgaacgatcttccttctcctgcccctggagacactcgtnacaaactctacgtatctaatctggcttggaaagcaagatcaacacatctccgagagcttttaactgctgcagatttcaacccggtctcagctcgggtngttttngctgaccccgaaggtagatcttctggctatggctttgtntcatttgctactagagaagaagctgaggatgcaaatcacaaaactnaatggggaaaggngntaatggggtagnccctntcacttctaaaaggtttagtctt

SEQ ID NO: 133369 - DNA, 565 bp, Arabidopsis thaliana columbia
  unsure (1)..(565): unsure at all n locations
gaagaacagatcaaatacgaggagagatctctaaagagatttatcgtttcaaatttgttcacgttgagaagtttaatttagattaancaacaaaaagatgggttactggaattccaaggttgttccaaaattcaagaagttattcgagaaaaatagtgctaagaaggctgctgctgctgaagctaccaagacctttgatgaatctaaggaaacaatcaacaaggaaattgaggagaaaaagacagaactccaaccaaaggtcgtgggaaacctatgaagncacgtctgcagaagtcaaggctttgggtggagagaccctaaggtggctggtttggaggaaanactcagcngctgngcagaaggtacctcgaggagctagtcaaacattgaattccccccgggntcaaaaaggggggggagttgaaggttccgnnttgcttccgnaggttgggttttttcggagggaccgntccaagttccattttccgagaaggtttcttctttcccccccgngggggnnnagnnttatgaantcccgnngcgggangtntatnttttagaaccc

SEQ ID NO: 133370 - DNA, 408 bp, Arabidopsis thaliana columbia
  unsure (1)..(408): unsure at all n locations
agaattttattaaagtcccaaactttaccatatttaagagagatagagaaagcttctctgcttctnacttcaatggttgtnatgaatcgagttctggtagctcttacattagctctgctagcttcgtcggcgttattacctgtttccgatgccgcgaagaaaccttcttcgacgccgagaaaggaggatgttccgtatataaagtgtcaggtttgcgagaaactatcttctcggttacaccagctagtgaaggaggagcaacaacagatctctcccaaaaagatctcggngtatgagatccattgagnttnctgaaaatgtctnnaatttnaagnaaaggggnagcttnttgggntccttaaagnttaanatttttttaaaaaaggggggtantntttttcctgggtt

SEQ ID NO: 133371 - DNA, 396 bp, Arabidopsis thaliana columbia
  unsure (1)..(396): unsure at all n locations
gggattacccgctgagtttaagcatatcaataagcggaggaaaagaaactaacaaggattcccttagtaacggcgagcgaaccgggaagagcccagcttgaaaatcggacgtnttcggcgttcgaattgtagtctggagaagcgtcctcagcgacggaccgggcctaagttccctggaaaggggcgccagaaagggtgagagnccngtcgtgcccggacccctgtngcaccacgaggcgctgtctacggagtcggggttngtttttgggaattcaagncccaaatttggggcgggtaaaatttccggtnccaaagggcttaaattnacggggccggaaaanacccgattaagccggaccaaagttacccncgngggttnaaaggntttgnaaaagg

SEQ ID NO: 133372 - DNA, 504 bp, Arabidopsis thaliana columbia
  unsure (1)..(504): unsure at all n locations
ggctaatctagctgattgttgtaagtctttgggtaatcgacgtgtcaatggcgttgaggttaagaagttgaatgttcaaggacagattgtggatgcttttggagcttccatggttgagccttggttggctgctcacgccgatccttccagatgtgttcttctcggggtgagctgtggtgggaacatagcagactatgtagctcggaaagcagtggaagctgggaaacttctagaaccggtgaaagttgttgcacaggttctaatgtacccctttttcattggaaacaacccaacacagtccgaaataaagctggcaaactcttacttctnncggtaagcctgtctctgttctagcctgggaactcttcttaccagngaaagagttcgacttttnnccacccggcaggcaaanccactttgcccattaacccnagtgggnccncctnttnannnaatncctccaacactttcaagtnggttgnttnggnattncttgattagggg

SEQ ID NO: 133373 - DNA, 544 bp, Arabidopsis thaliana columbia
  unsure (1)..(544): unsure at all n locations
cttggnctttcggtggtatgatcttcgctctcgtctactgcaccgctggtatctccggtggacacatcaacccagcggttacgttcggtttgtncttagctaggaagctttcgctcacacgagctgtgtactacatagtgatgcagtgcttagnagctatctgtggagctggtgtggtcaaggggttccagccaaagcaataccaggctttgggaggtggagccaacaccatagctcatggctacaccaaaggaagtggtcttggagctgagattattggaacctttgtccttgtttacancgtcttctcttgccacttgatgccaagaggaacgnttcgtnnctctcatggtcctattctaggaaccggtnccctattcggttcgnctggngtccttggtcaatttaggaacnatccccattaatggaacttggattaaaccccgaaaagaaggttttgggggggaaanaattttaaaaaagggnaccgtttgggntncccctggggttttttggggnngggcncttnattgggggggaantt

SEQ ID NO: 133374 - DNA, 380 bp, Arabidopsis thaliana columbia
  unsure (1)..(380): unsure at all n locations
acgatgttgatcacaaggggcaagagatggtaacaacagtttgcatgaaatnccacatgctggttatgttgtgtacatcaactcctgtttgtcccaactgcaagtncatgcacccacacgatcacagctctacaaaactgtttaaaccatcaaatttgcttaggcttctatgctaggctctttcaaggttactgaatctataaaatttgtacggcagataataagccanggtgactagatatggncaaagttatgtatatactaaaagtaccagaaagtttgtattaattctctgctncctaatggancggntcatggctttangatcctcttaaaaaaanantanattnaaatggggcgggccgnntctngggggttcc

SEQ ID NO: 133375 - DNA, 565 bp, Arabidopsis thaliana columbia
  unsure (1)..(565): unsure at all n locations
gaatgatcctaatccgtttagcttttaaaaaaataagaagacatatttatcaacttgatcaacttgagcaagttgcagcagatattttcctcggccaagatctagagttttgagaatggcgatggtatcaggaagacgatctactctaaaccccgacgcacctctttttattccggcagctgtacgncaagtggaagatttctcaccggagtggtggcaattggtgacaacttcgacttggtaccctgattactggatcagtcagcagcagcaaggcgcggatggtttctatgacaacggagagaatgagaatggtggaggtcatatcgatgtagctgatcttcttccagaatcatttgattttnatgatatggagntttctttgacactgatgctgctgagtttgatcaaggnttccgatggaagaatgtnttaccaanaccttccgaatttggcttttggaagattggtaanatggtnagaaanaaggtggacaggngcccnnnccgtttngaccnccnagattcggaanccccnattggaacnaggttttttncgganacnc

SEQ ID NO: 133376 - DNA, 574 bp, Arabidopsis thaliana columbia
  unsure (1)..(574): unsure at all n locations
aactaacaaaagatcaaaagcaagttcttcactgttgataatgtctaccaccggacagattattcgatgcaaagctgctgtggcatgggaagccggaaagccactggtgatcgaggaagtggaggttgctccaccgcagaaacacgaagttcgtatcaagattctcttcacttctctctgtcacaccgatgtttacttctgggaagctaagggacaaacaccgttgtttccacgtatcttcggccatgaagctggagggattgttgagagtnttggagaaggagtgactgatcttcagccaggagatcatgtgttgccgatctttaccggagaatntggggagtgtcgtcattgccactcggaggaatcaaacatgtgtgatctttctcaggntcaacaaccgagcgaggaagggttgattcacgntgggtgaataaggttctccattaatgggcaaccnaatttaccatttcctttggncttcacggtcagtgggaanaaagnggtnacnctggcaagttctanacaanccggtccccnttnnaaggctgtnttcantgnggtnntctggttc

SEQ ID NO: 133377 - DNA, 333 bp, Arabidopsis thaliana columbia
  unsure (1)..(333): unsure at all n locations
atcattcaatgtccagccaaagatgaaagctctggaaatnggtgagaaggcaagggatgcaatccttagtggcaagtttgatcaggtgcgagttaacattccaaatggagatatggtgggtcatacaggtgatattgaagccacggttnttgcatgcgaggctgctgatcttnctgtgaagatgntttttgatgcaatcgaacaagtgaaaggaatttatgttntgactgctgatcacggaaacgcagnggacatggtgaagagggataaatctggcaagcctncttttngntaaggnagggaaagcttcaagatttntaancctctnacaca

SEQ ID NO: 133378 - DNA, 617 bp, Arabidopsis thaliana columbia
  unsure (1)..(617): unsure at all n locations
atcaaagtctaatatcacaaagaaagagtttttttaactagcttagctcaaagtgtttgcttaagacaagaagaacatggcgtcttaccagaaccgtccaggaggtcaggccactgacgagtacggaaacccgatccagcagcagtatgacgagtacggaaatccgatgggaggaggaggatacggaactggtggtggtggaggagctacaggtggccaaggatacggaacaggtggccaagggtacggntcaggtggccaagggtacggaaccggtggccaaggatacggaaccgggaccgggactgaaggctttggaactggcggaggagctaggcaccacggccaagagcaactccacaaggaaagtggtggtggcttnggaggaattcttcaccgttcggatctggatccagctttagctcggaggatgatggccaaggagggaggaggaagaagggatnacacaaaaagntcaaaggggaagtttccaggnatattntcagncttgtaagcttaancnttgggggattgnncccgntatnattcttgtggntcggtgttnnncncgggaanaggggttttgcaanntaggaaagttccgtgtncctnagntt

SEQ ID NO: 133379 - DNA, 367 bp, Arabidopsis thaliana columbia
  unsure (1)..(367): unsure at all n locations
cttagaaaaatgtgcagangttgcccatccggaaaagactggtgtcattcgtaggatcgatttacttgaaaaatgcttnagccatgncacagtaganganattattgatnctttggaaatcgnggctagtagaagaaaagatacatggtgcattacgactctacgtagacttaaagaaagctcaccgttatctttgaaggtggcattgagatctcttctttaaaacgnatccaacagatccgggaaggaagattacaaacactttgaccaatgcttaattccgngagtacagaatgtcgctacaagganttaatcgggccaatgtcccgtcaatttttgttgagggagtacgngnctcgattgntag

SEQ ID NO: 133380 - DNA, 561 bp, Arabidopsis thaliana columbia
  unsure (1)..(561): unsure at all n locations
agaacagtgggaaagcttctatactatgcgaagtanctcgattcttgaaggacgtgtttggtnaaattgagtctcttagaaaggagcatgcttctctcctatctgaatctagctatgtaaccacagagaagaatgagctcaaggaagaaacatcagtgcttgagactgagatttcgaaactacaaaacgagattgaagctagagcgaatcagtcgaaacctgacttgaacacctctcctgcacccgagtaccatcatcatcattatcaacaacaacatcctgaacgtgtatctcagttcccaggncttcccattttccaaggccccggctttcaacaatctgctacaactcttcatcctcctgcaacagttcttgtccttccaatacaacctgatcccaggcacaaggtatctaggaatgnctaaggggagggcctttgatgttaanngntcaatgtgggaaccatgncaaggttgttgcgggtgctgngnttnnggtncttggggnggntnacagtgatggggttacggtcnatggtgncgagtttagatggattttggc

SEQ ID NO: 133381 - DNA, 560 bp, Arabidopsis thaliana columbia
  unsure (1)..(560): unsure at all n locations
agaacaaccttgtacaagtgaccaaatacaatgctgctcaacactgcaagacttggatcgttggaaaatggttaacaccaagagagcagagctgggctcctgcagggacgcatttccatcagtttgtggtgccaccaatccttaagtttagaaggaactgcacttacggtgatctagcagctatgaagctccctaaagatgttgaaggactcggaacttgcgagtacacgatggagagaggggtggtacatgcgtgccatgcaggaggagtggttcatatgcttgagggttggaagcatcatgaggttggagccattgatgttgaccgtatcgatttggtgtggggaagcagccatgaagtatggtcttagtgctgtttcttcaactcacaaatttnggttaagggngggncaacgttcattggtgncttttnaccnnncccaaggttggcattnctttnnacaggtnaagggggttcaanncggaaaaaagggggnttccccccaaggatttgtttaccnttnantaaaggggnttccctccttaaaaaaaaangnnca

SEQ ID NO: 133382 - DNA, 567 bp, Arabidopsis thaliana columbia
  unsure (1)..(567): unsure at all n locations
taatgagcaagggttaccagattgtgaccaatggaactgagaaccaccttgttctctgggatcttcgccctcttggattgaccggaaacaaggttgagaagctctgcgatctgtgcagcattacattgaacaagaacgcagtatttggagacagtagtgctcttgctcctggaggtgtaagaatcggtgcacccgcgatgacatcgagaggattggtggagaaggactttgagcagataggagaattcctgagccgtgcagtgacactgacgttggacatccaaaagacatacgggtaagttgttgaaggacttcaacaagggtttngtgaacaacaaagtcttcgatccagctcaaggcttatttcgagaagttcttcggcggcttattgagattcctgggttccccanggcnttggtnnagtccaaggtttnggncctttccccttnttcaagggaaannncntttattaccnccccttttttaaaaaaatcctttttagggcccccttaaagnggnggggttangtccnacccgtaaaaaagggttttttnanncatttnccnt

SEQ ID NO: 133383 - DNA, 544 bp, Arabidopsis thaliana columbia
  unsure (1)..(544): unsure at all n locations
cnacgagnaagatcgaaaatcacaaatcgtcaccggactcttgcaatcgagaaccatctgtcgcctttttatactcgaatacgagctcgtgatcaatggcgaaagctttggaatcaaactcgaaatcaaggaaagaaaccatcttgatcaaatacgccatcttctcgcgacttctcgttctcttcttaaccattttgtggcgganttactccaaccgtacgatacatccgctgcactgaatcctccttgcttgtatcacaaagaagattcttttccgtttctagtagccaatgcagcttcgagatcccttgaggacagtgttgtctgggacagtgttttattttctncgnatcacaagagtgtggctaatgagtatgagcagncttacggccttcttgcctctggttnctttcttcaanctnggttnttttttggaanagtttttgngcctttgggnccatgaatnggcttcgggcttnaatggggttgcctggggtcaccgtaagaactgggggcaaaattccnggaancancnntttggngg

SEQ ID NO: 133384 - DNA, 504 bp, Arabidopsis thaliana columbia
  unsure (1)..(504): unsure at all n locations
ctcagttcgagcggatcaaaaagcagcaagantcccttctggaggaagtgagtnagactngaaaaaagattcaggacgaaattagtaatctagagaaaaaaactttaattacgaacgtggttttcggcgctgcgtttnctattgtngcggttgcatccatagctctaattgcaacaggcgtgggtgcggctgccggctttggggctctagccgcaccactgcttgcggcaggatgggctggagtctacactaccttggataaaaagaaggatgctctgaacaaacagttagaaggtctaaagaaagtggaagagatagaagaatcggtggagaaaggtataaaaaccaccgnagaagcgccggagaccgtatcgattttagtcgncggggctagaagnccgtatcaaaaaatatnttgaacctttttaggtaatnctattgcccntgnaggtattangncggcccgnganttnncctactcaggccagtnagaagttgggnatt

SEQ ID NO: 133385 - DNA, 368 bp, Arabidopsis thaliana columbia
  unsure (1)..(368): unsure at all n locations
acagaacaagaattagaaagaagggagagaaagcaaaaatggcactaagaatgtgggcttcttctacagcaaacgctctcaagctttctncttctgtttccaagtctcatctctctcctttctccttctctagatgcttctccacagttttggagggtttgaagtatgcaaattcacatgagtgggttaaacatgaaggctctgttgncaccattngcatcactgcccatgctcaggncccatttagggtgaagtggnttgtttnttgaacctgccagaggnccaattactttcaagttgagcaaaggaggaaaaagncttttgggaggcagttngangangttntttnaggggcaaccaaggtgtng

SEQ ID NO: 133386 - DNA, 622 bp, Arabidopsis thaliana columbia
  unsure (1)..(622): unsure at all n locations
gagactcgtaagaaaaaagagaagaaagctaagaggaataaggagaagaaaaaagagaagaagaagaagaagcagaagaagattaatgaggccgcaaagaatcaggacgcttctcctgcagttagctgtgatggagatgacacagtagaggagcaagttgaggaagaagagattcctccagaatttagtgcatggagttcgatgagactccatccactactcatgaagtccatataccgcctcgatttcaaggagccaacaaaaatccagaaggcttgttttaacgttgcagcatatcagggaaaggatgttattggtgctgcagagacaggntctgggaaagacacttgcttttgggttgcccatactgcaacgcctctttagacgngcggggaaaggtttggtaaattgtatgcatttaaagggngatggngcncagaaaaattcttccagnttgctnttttccgggntctnatcatnactcccaccttggggaccttnctnttcaggtnccgggnatctttnggattcttccnagaattntttgggcaaggcgtccctttttggngggtttttcggggcngganccggttanggnnccntaattttttcacccccgggg

SEQ ID NO: 133387 - DNA, 291 bp, Arabidopsis thaliana columbia
  unsure (1)..(291): unsure at all n locations
gcgaacaagtaccgcgaggtaaagatgaaaagnactttnaaaagagaggaagtatagatggacgacggagattaaaggagggaagaaggatgaggaagggttaaagttagctnctttgaagaaggagaaggcgaaactaaagctattnctgctgctgaagcggagaagaagaagantaagantaagangaagagttataattggccgncggaggtgaagagtgagagagagaatngtgaggtttcgcatacttatatcatcaaggctactactggaggngagaaaaagang

SEQ ID NO: 133388 - DNA, 551 bp, Arabidopsis thaliana columbia
  unsure (1)..(551): unsure at all n locations
ggctgctgttggcaatagaatactaaaggctgacattgagacattaagagctaaggtgaaaatggcggaagaaaccgtgaagagagtaacaggaatgaatccgatgcttctcggaagatcaagtggacataacaacaacaacagaatgccaataactggtaacaacaggatggattcttctagcattattccagcttatcaaccacactcaaacctaaaccatatgtcaaaccaaaacatcgggatcccaaccattctacctccaagactcggaaacaatttcgctgctcctccatcccaaaccagctcttccttgcaggngaattnggaaatgggcaaaatcaccatgttacttccaaggggccaacccgtattggctgggatttccggaccttaggacggttnaggatgggcggaaaaatgggtggcttgtccaacaaggngngggtttggnctnnnttaaggntttnnnccgaaatttgaanggtttttaggttcgggtnttgggaanncntttggaaanncggtttngggtttttttttangggggg

SEQ ID NO: 133389 - DNA, 567 bp, Arabidopsis thaliana columbia
  unsure (1)..(567): unsure at all n locations
gaactagggagaaatgactaatcccatgatcatggttatgctgttgttgtttcttgtgatgtcgactagagcagacgaagagctgattaagacagagtgtaatcacacagaataccaaaacgtatgcctctnctgtcttgaagccgatccaatctccttcaatatcgaccgtgctggacttgtcaacatcattatacactgtctcggatctcaacttgatgttcttatcaacaccgtcacgagtctaaagttgatgaaaggagagggtgaagcaaatgagaatgttctgaaagattgcgtcacaggctttgcgattgcacaattacggcttcaaggagccaacatcgatttgataacccttaaattacggtaaaggcgtacgnattggtgnaaactgcgttaaactntcctcggnctttcggagnaaatnntcaaaaactaaggtcaaaggtcacctgttgtttntggcggtntnttgggatnttgccacctacctttttgcnaagcggtnncccccgttttaggncaaanttngggggcttgggncaaaaatnttttngggcgntc

SEQ ID NO: 133390 - DNA, 404 bp, Arabidopsis thaliana columbia
  unsure (1)..(404): unsure at all n locations
ctcaagctccgccgtcggggaaaaaagaatatggaagcagctactgttcagaggtttcagtactcatcatggaatgatttgagaaattttgaagggaagcctcgtggttctctgaggtataatacacagcgaattaaggaagataaaaggtttagagttgttgctttaactcttgacaaaagaagggatcatcgacttagatcagtttctgataagaacncctcagcattgttggaaacnggaagtcttcttcattctccatttgatgaagnacaacagattttgaaggaaaaagctgaagaggttnaanccgtattttaaaatggncgntcgatgtatcttngttggtatgatnggtncngggnaacgncttttagggaaggttttngcaaaatcncntggtt

SEQ ID NO: 133391 - DNA, 606 bp, Arabidopsis thaliana columbia
  unsure (1)..(606): unsure at all n locations
ctgttccaagcgctccaacaagtccgcctcaactnttccgcctcaacatcatcatctccaacggctcagaaacgaggaaaggccgtccgtgaagccgccgatcgagctcttgccgtttccgctcggggaagaacactctggagcagagcgntcttagctaatcggatcaaactgaaatttcgtaaacagagacgtcctcgagctacgatggcgattccggccatgactacggtggttagtagcagcagcaacagatcgagaaaacggagagtgtcggtgttgagattgaataagaagagtataccggatgttaaccggaaagtacgtgttctaggccggttaagttcccggttgcggtaaacaattccgtaccggtgattctagaagaagcaacctngattaatattcaaggctcttgagattcaagttggggccattgaccttttttagttcagattttttncttcctacgggttnacttcttcaccggntttnttagggtaaaatcgctttttaaattnnccatcttttnncttttcaagtttttgggttntngnnnttcgggttnttaaacngnaacnctttccacccgntntttttnttnta

SEQ ID NO: 133392 - DNA, 457 bp, Arabidopsis thaliana columbia
  unsure (1)..(457): unsure at all n locations
cccacgngtccgggagaagaaggagatgaagaaatgaacaggagtgaaaaggcaagcgaggatgcgaagttgcagcagcagctcgatgatgatgatcacttaacgccagcagaaaggcgatacatagagcagaaacaaagattggatgtgcagaagctagctaaggaagcgaacaagtctcaccgtaacaggattgaggatttcaatcagtatctggctaacatgagtgagcactacgatatccctaaagtcggacctggttaatataattntttcttgtctttgttttactcngcttatctattttgcatcgttaaacggctactttggatgtctgttaatgttttagncccctttaacctttttgaattgatggtnatcgcaaaatctgtaatggcaaaaaaccantaanaantnttaannntntttnttatntattggtgantttntttttaat

SEQ ID NO: 133393 - DNA, 582 bp, Arabidopsis thaliana columbia
  unsure (1)..(582): unsure at all n locations
attgcttgaagacggcttcttcttctcacaaacctcatctctgctaatcaaaatgtctctggttgcaaatnaggagtttcaacacattcttcgtgtgttgaatactaatgttgatggtaagcagaagattatgtttgcccttacctctatcaaaggtattggtaggcgattggctaacattgtctgcaagaaggctgatgtcgacatgaacaaaagggctggtgagttatctgctgctgagattgataacctcatgacaatcgttgcaaacccacgtcagttcaagatcccagactggttcttgaacaggcagaaggattacaaagatggcaagtattctcaagttgtctccaattgctcttgacatgaagcttgagagnttgatcttgaaccggctcaaggaggtccagnaaccaccgtggttttaggnattnccttggggctccgngtnaaagggcacnnaccaggctcttggngcaggggaanncttttgggcntaaanaggggtaggagncccatttgcactnnctntgtttggncctnaangccctttttttggctngcccttttntccggtttggg

SEQ ID NO: 133394 - DNA, 401 bp, Arabidopsis thaliana columbia
  unsure (1)..(401): unsure at all n locations
ggctcggtgggtcgtaacctggcattgcnaagaatgaagacaaagaccgatcttccataagtccttnanattccatcaaacccccttgcaagtttccgtntcactctgaggactgcccagcttcttacaagcctaacagtagccaggatggaccagtctatgtnattgtaatcgaaaatnataagatgtctgtncaagantttccagcgagttcaacagtctcggntctgctgagccgggcggggccagggagctcgaggtggtccatgtatggcataccagcaaaggaagnactaaggccaagactgnaccaaatacctgtaagtagcctcaagtggaagctgaagntgggtgatntggtggagctgacttcaacaatttcctgntggggctntgcttna

SEQ ID NO: 133395 - DNA, 512 bp, Arabidopsis thaliana columbia
  unsure (1)..(512): unsure at all n locations
gtaaaatcctcaagtacctccccgagacgggttatgttgactttgcccagatcactgaatcctcgaactcttcatggtgcgatggtactattggaacggctttagcggacgctgtggtcgaccagcaggaatagcattcaacgagaaaacaggtgatctttacgtcgccgatgctccgttgggtcttcacgttatttctcccgccggtggtttggctacgaagatcaccgacagtnttgacggaaagcctttcaagtttcttgacggtcttgacgttgatcccactactggtgtcgtctacttcacttccttcagctcacggttntccccaatncaagtgttgattgcattgggggtnaaaggaccgggaccggaaagcttttcaaatnacggcccatngnccaaaattggtgaccttacttatggaagggctaaagtnggtnaacccgggtttcaantaggcnnaaattggttncgttttcntggtaagcaanttccnaaaagnncnntaa

SEQ ID NO: 133396 - DNA, 413 bp, Arabidopsis thaliana columbia
  unsure (1)..(413): unsure at all n locations
tagagtcggagctaacaagtttccggagaggcaaccgatcggaacttcggctcagagtgacaaggactacaaagagccaccacctgcgccgttgttcgagcccggcgagctagcttcatggtccttctggagagctgggattgctgagtttatagctacgtttttgttcctgtacatcactgttttgactgttaatgggtgtnaagaggtcaccgaccatgtgtgctttccgtcggaatcccaaggtatcgnttggnctttcggtgggtaataatcttcggtcctcggtntactgaaccgttggtatntcccggtgggcaaaattaaacccaagngggtaacgttncggttttntnttaggttngggaaggtttttcngtttaanaggngttttttncactaaaangggtntt

SEQ ID NO: 133397 - DNA, 470 bp, Arabidopsis thaliana columbia
  unsure (1)..(470): unsure at all n locations
gaaactttctactttgtttatagtttctaatctaaatcagatctacaaataaatttcngttttaacggataaagcttccggcgttgtccggtttatctttccgattagatcggatttttngtttgtttttnagttttcntttttccacatgtttacaagatcaattcggtttgctttcttcttcagaagaattcngctttcaccaaactcatctttccctttataagggagtaatatcntcaccgtccattgaagggacctacaagataggtattaggtgaaggtttcctttgaaggctagattgngagatctctgaatttatttcaaggtggtggcatggaatctccagctgatggaatccgggcgnattatgtggaagaaggcccttgggtgttgatttngattangccgaccggcggggcaganggtgggnncgggggncagccgggaacggcantttnaacancnt

SEQ ID NO: 133398 - DNA, 603 bp, Arabidopsis thaliana columbia
  unsure (1)..(603): unsure at all n locations
agagaatcttcttagtaatcttcccaaagatcttagacgcgacatcaaacgtcatctctgtctcgcccttctcatgcgggtccccatgtttgagaaaatggacgaacagcttcttgatgcgctctgtgaccgtttgcaacctgtgttatacacagaggaaagctacatagtaagagaaggagatccggtagacgaaatgttcttcataatgcgcgggaagcttctaacaatcacaacaaacggtggaagaaccggttttttaaattccgagtatcttggagccggtgatttctgtggtgaggagcttttaacctgggctttagacccacactcatccctcaaacctcccaatctcaacaagaacttgtttcgagcttctcattgggaggttgaagctttcgnaacttaaagctngatgacctaaattcgtgggttcccagttcagncgggnttacagnaaacagntntggcatactttcagggcttctnacaccaatggagcnttggccgttttttataaagccgttggggggtcattagnggacttgnggcnttaagagggggtnggttcagntctttntaaagntttnngtccnnccnntt

SEQ ID NO: 133399 - DNA, 553 bp, Arabidopsis thaliana columbia
  unsure (1)..(553): unsure at all n locations
ccatctccttagttctattttataattcctcttctttttgttcatagctttgtaattatagtcttatttctctttaaggctcaataagaggagatgggtgaaacgctgccgccaataaccaccgtcaccaccaccatcacggccaccaggtctttgacgtggccagccacgatttcgtccctccacaaccggcttttaaatgcttcgatgatgatggccgcctcaaaagaactgggactgtttggaccgcgagcgctcatataataactgcggttatcggatccggcgttttgtcattggcgtgggcgattgcacagctcggatggatcgctggccctgctgtgatgctattgttctctctttgttactctttactcctncacaatttcttagngncttntaacaganccggcggatgaagtntnttngnagnggnacttcacttcaatggatncgttgatcaattttcggtgggttaagttnaagattttgggttgtcanactgaanttttgnttgnattgggancggtgngttccangattttgggnaagg

SEQ ID NO: 133400 - DNA, 533 bp, Arabidopsis thaliana columbia
  unsure (1)..(533): unsure at all n locations
ccacgagctaatgggtgcggtgtacttacaagttagtatcattagtcaagctctgatcttcgtcacaagatcaaggagttggtcttttgttgaacgtcctggagcattgctgatgattgctttcctcattgcacaactgattgctactttnattgcggtttacgccaactgggaatttgcaaagattaggggtattggatggggatgggctggtgtgatctggctatacagtattgtcacatacttcccattggacgttttcaagtttgccattcgatacatcttgagcggaaaggcgtggctcaacttgtttgagaacaagacggctttcacgatgaagaaagattacggaaaagangagagagaggctcaatgggcacttgctcaaagggcacttcacggtttcagccaaaaagaagctgttaacatcttccctgagaaggaggttcagngaattnctnagtcgtggcaactagngagncttggtcctggttggggntccaacttaggcttgnnangtagtaaggttgctt

SEQ ID NO: 133401 - DNA, 552 bp, Arabidopsis thaliana columbia
  unsure (1)..(552): unsure at all n locations
gctttataacttctaaaacaacctcttataactttttacttcctcctccatggcttattctaagattgcncttctcctcatcttcaatgtcatcttcttcactttagtcagctcgacttcagtcccttgtccaccaccaccgcccaagagccaccacaagaaacccgcaacgccatctcctaaacccacttgtaaagacgctcttaaacttaaggtatgtgctaacgtgttggatttggttaaggtttctctgccaccaacgtccaactgttgcgctcttatcaaaggtctagttgatcttgaagccgcggtctgtctttgcactgccctaaaggctaaatnttcttggtatcaaccttaatgttnccatttctttgaacggtgtcctaaancattgtggtnagaaggttccatctggtttcaaatgtgcctngngggttcacattcaaaattggggttctntatccncattcatttctgttttaatccccggttggnanaccttaattgtggaaattgttnttgtcacaatgaataacaaaggggttgttt

SEQ ID NO: 133402 - DNA, 554 bp, Arabidopsis thaliana columbia
  unsure (1)..(554): unsure at all n locations
cctctttctcttattctctctctctcgctatctctccctcttaagtttttttttaaaacagactctccctctaagttattcggtcgcaattaaaaaagaaaacaaaatctttataaattttnattttntctttttcacccgattattttgatttgactgttttacgacagtcaatatttcaattttattattgggtgctgacgtggcatgcatccaatagagtatcaccatgaacaccaaaacgatgcgtcttcccccacgtcgcgttctaacggcggataagcgcaaagaacgagacgncttcatctcctccgtcaccgataatccgccggnaatcgncaagtttccctctccgccggctaaacttgtttcctccgccggttaatcccattttcaagnaattcttcaaccgcagcagccgagccgatcggntgaanccaactgatgttagccggtatctgngcacgggtcctanccagggaaatntttggggggaatggaccnggtgagccagcgggtcngnaggtaagccggcctntntnnnggttggttgc

SEQ ID NO: 133403 - DNA, 511 bp, Arabidopsis thaliana columbia
  unsure (1)..(511): unsure at all n locations
aaaaagttttcccagaaatcctatcaaaagaaggactatatcaagcttctgtttctgtttttaaggtcttttggtaacctaaagagctgctatacactgatctgagaactgtcaaaactttatcataccaaagaatgggttgctgctgttgtctcccgagtatacccgaaagctcaagaactatagatgagcatcttcccttatctcgtgccacgccttcctctctctctaatgcatacagttcaccnctttcgccgcctattcctttagccatcacgaatataaatcttcaaactagtccaccgaaattgncaagaactcagggcaattcgngtgaagcatccccggggcttacacaaggttgttcagagnaggnaacatggcatgttgatggtctaactgnttttgnntaaagaaacagtncnggaggatnnggtggntggccaatttggtttgangntttgggttggtaccccgaatttgttcttaangnggcnggctttaanntggt

SEQ ID NO: 133404 - DNA, 500 bp, Arabidopsis thaliana columbia
  unsure (1)..(500): unsure at all n locations
caacaagagcttgtctctagagttgctaaggccgctaaaggcccagttatcttagtattgatgtctggtgggcctatcgatatatcttttgctgagaaggatcggaaaattccagcgattgtttgggccgggtatccgggtcaagaaggtggtaccgcaatcgccgatatcttattcggcagtgctaatcccggaggaaagcttccgatgacttggtatccgcaagattatttaaccaatttaccaatgacagaaatgtcgatgcggccggtccattcgaagcggatcccgggtcggacttaccggttctacgncggtccagttgtttacccgttcgggcatggtttgagttacacgcgctttactcacaacatagccgacgggcaaaagtgattcctatagctgttcgtgggagaacggaccgttnaggggaatnatccgtgtnnggncgtaggtgttatcgctttttttcgggtnccgtgnagtactaacgtggtttg

SEQ ID NO: 133405 - DNA, 554 bp, Arabidopsis thaliana columbia
  unsure (1)..(554): unsure at all n locations
gctcttggaatctggctaggagtttcaacaatcctcagcataatctacattattgttgcaatagttctatcagctaaagatggagtaaacaagcctgaaagagattacaacatacaaggntcatcaataaacaaactctttaccataacaggagcagctgcaaatctagttttcgcattcaacacgggaatgctcccggaaatacaggccacggtgaagcaaccggtcgttaaaaacatgatgaaggctctgtattttcaattcactgttggtgttttacctatgtacgcggttacattcatcggatattgggcttacgggtcctcgncatcggcttatctcttaaaccagcggtagtgggccctgtttnggtaaagcactcgctaacattntagtttttctccaatctgtnacnctttncaaatttttgaagcccgcttttgggttnttggcacaaggntnggggnaaaggnggcccttggaatgagganctttnttgnccgtgnnagggnggtcattnggnggcttttttttnggttnccgtccggggttat

SEQ ID NO: 133406 - DNA, 556 bp, Arabidopsis thaliana columbia
  unsure (1)..(556): unsure at all n locations
tatagccggaaacatctgctagacactgcggtcaccccagaaagtgcagataggctttggtggttccaagtttgcactgaagtggcatatttccaagtggcacctgcaaacgatagcatccggtctcatcaaatcaatacagagtatcatttggatctatgcaagagtctgtttgggaaaggtgtttaccctgaagtcgatgcaacaaacctgtattatggaagtgacagaattgctgcgaccaagattatcttcacaaatgggtcacaggatccatggcgtcatgcatccaaacagacctcatctcctgaactgccttcttacattgtgacttgccacaactgtggccatggaagtgatctccgtgggatgccctcaatntnccatgggcattgggggtgttccangaattncagttacctatgcagtancaaagtgggnaccatttgtggtcatatggcttttggncttttagttnntgggggtttgggtcccttaaaggnccccggggcanaactcggtttnaaaaaanaacccngggtttttaccnttctta

SEQ ID NO: 133407 - DNA, 496 bp, Arabidopsis thaliana columbia
  unsure (1)..(496): unsure at all n locations
ccgaacatcaaaactgtatctncttctcctcctcctccttggcccttttcacaaagggacaaagagtttttgttgtcagtaacttcaagctctaagctatggctgtcaccaagatttatattgtgtactattccttgcacggccacgtcgagacaatggcacgagaggtacttcggggagtaaactctgttccagacgtggaagcaacactttggcaagtgccagagacattaccggagaaaatattggagaaagtgaaggccgttccaagaccggacgatgtgccggatattcgaccagaacaactggcgggaagcgaccggattcatgtttggctttccttctaggtttggagtnatggcatcacaggtcatgactttctttgacaatacaaatgatctctggnctacacaggctctgctgggaacctcaggatttcttgagncgggttcccggtgnggcangacctactngttacggagtncaaatggtttgc

SEQ ID NO: 133408 - DNA, 488 bp, Arabidopsis thaliana columbia
  unsure (1)..(488): unsure at all n locations
caagataaagaatatggntcttnagataagacggcgagaatcaactggagcaggagctaatactcacgtcgaaacagaaacactagccaaatttnagttaatggatggtgctccagttagaggcgaatcgatacctgtaagagtgttcttgacaccatacgatctgacaccaacgcataagaacataaacaacaaattcagcgtaaagtattatctaaatcttgtgctggtggatgaagaggatcgccgttacttcaagcagcaagaaatcacgttgtacaggctcaaggaggngncatctttgatgtgtncaaaccaaaanggggnggggaaaanttatttttcaggaccttttttaaagccttttnaaggcttttcttgtttccaaaattgggttngggccttttnggggnatnttccggnggtttttccacggncccaaatttttttttgggttttttttgggttnttggcccnncccttgtttt

SEQ ID NO: 133409 - DNA, 338 bp, Arabidopsis thaliana columbia
  unsure (1)..(338): unsure at all n locations
agcagtatttgtaagaaaatggcttccaagactttgcttcttttgggtctctttgcatttcttttcatcgtctcagaaatggctgccgcgggcacggtgaagtcagagagtgaggaaactgtgaaacctgaacaacatggtggtggattcggtgacaatggaggaggaagataccaaggaggaggcggccatggtggccacggagggggaggataccaaggaggaggaggacgntaccaaggaggccggttggcgncaagaaggnnggggaaanttatttccccccnggtttttttttnnaaagntttccnntgggtnnttcaaaaggtttttttcaa

SEQ ID NO: 133410 - DNA, 491 bp, Arabidopsis thaliana columbia
  unsure (1)..(491): unsure at all n locations
atagtggataacaacancaacgacaagcaaagaacagaaacagacacaattacgttatcancattttcatcttcttcttcttcaccagaagagtcaagaagattcaggaaatggtcgtgtctacgaaaagatcctgaaacgacaccgtctgaagaagaagatgaagatgatgaagacgaagaaagcggttacaatgcaaatcaacggtcaggagataacaagttagtgaccgttgntggagagaaggagatggagattgagactctncttaaggcttcagcttatattttaggagccacaggttcgagtataatgtattaaagccgttctttgaagacggtagggttttcncggntcgtcgnctccggtgaaaacgggtttatctnagcgnccggtttaagggttttagcccgaaattttgngccntttngnaaatngttnncccnaatttggtaaacttttnggggcttttttgggccccccgggaantt

SEQ ID NO: 133411 - DNA, 484 bp, Arabidopsis thaliana columbia
  unsure (1)..(484): unsure at all n locations
gtcttcaacaggtcgagtagatttgcaagactgcaaagtgttaaatgcacaatcgcggggaagaatgcttatgtaaggttctgttgtagtactggtgatgctatggggatgaatatggtttctaaaggtgtgcagaatgttcttgagtatcttaccgatgatttccctgacatggatgtgattggaatctctggtaacttctgttcggacaagaaacctgctgctgtgaactggattgagggacgtggtaaatcagttgtttgcgaggctgtaatcagaggagagatcgtgaacaaggtctttgaaaacgggcgtggcttcttttaggtcgggctcaacattgtncaaagaaccctaggttggntnttcctttttcaagnncntttaggggggtttaaacggntnttccccaaaanaanggttncccgggttttnnaaagggctttgccaaantccccctttaaaangnggggggnttcttnna

SEQ ID NO: 133412 - DNA, 496 bp, Arabidopsis thaliana columbia
  unsure (1)..(496): unsure at all n locations
gtgaattgaaagcacctggtggctcgngtttggaccttaatatttatagccctaatgcttcatcgacaagtactaaagttccttgtaatagcacattatgtacaagaggtgatcgatgcgcttcccctgaaagtgattgcccataccagatccggtatctttctaatggtacctcttctactggagtcttggtggaggatgtacttcacttagtttcaaatgacaaaagttccaaagctattcccgctcgtgttacttttggatgtggtcaagttcagaccggngtattccatgatggtgcagctccaaatggtcttttcgggcttggctttnggaagccatatcggtgcctagtgtactagcaaaagaaggtttgcagcaaactcatttncaangtgttttgggancnttggnntgttaggcncacttttggngaaaaggtngcgtgccnccngggaanncctttgaacaaatgaancccaccttttttaatttc

SEQ ID NO: 133413 - DNA, 505 bp, Arabidopsis thaliana columbia
  unsure (1)..(505): unsure at all n locations
attttttcggaactgtaattaattggcgggttctggctgttataggtaacgaaatatctcctcgcaagccatttacatttttttnctttcaataatagtataatatttatttcaacatgtacatttttgtttatttcaatcttctgtgaagactacatgttagttttattcaagtatatatnccggttcaggtgctcttccatgtttcattccagtgatcggtatatatttcataccggaatcaccaagatggttggttggtattttctttatatatttcagatcgnctgtgaaatttttcatatgaatatatagagctttcntaaattattttaaatttaatttatttattactgttttttaggctaaaatcggttcagttnaaggagtnggaanccnctntgcatcgccttagagggnaagatgctgatgttcanatgnaggccgctggaattcaggtnttgccaaaantccttnnggaggtccaaagccngttttttgcatc

SEQ ID NO: 133414 - DNA, 407 bp, Arabidopsis thaliana columbia
  unsure (1)..(407): unsure at all n locations
cgagctcactagtgagctntcaatccngacnntccnatcctcttggngacagaagaaaaggattnaggaacagagaaaatggcagcacaagcacttgtttcttcttcacttacctcctctgtncanacagctagacagatattnggctcaaaaccagttgcgtctgcctcacagaagaagagttcctttnttgttaaagctgctgcaactccacctgtcaagcaaggngccaacagaccattgtggtttgcttcatcgcagagtctctcttacttggatggcagcttacctggtgacctatggattcgaccctctttggtctttcagacccaganggtacttgnagggtttcaattnnggccaagaatggcttagcataccgggggagatcattcaaaccgggccgg

SEQ ID NO: 133415 - DNA, 542 bp, Arabidopsis thaliana columbia
  unsure (1)..(542): unsure at all n locations
ggacgatgacggaactgatcagaagtccaaagagtatgaagaaactccaagacgagattcggtcaactattaggccacatggttcatacataaaagaaaaagaagtggaaaatatgaaatacttaaaagccgtgattaaagaggtgcttcgattgcatccttctcttccaatgatacttcccagactcttaagtgaagatgtcaaagtaaagggatataacatagccgcagggacagaggtgataatcaatgcttgggcgatccaacgagacactgcgatatggggaccggatgctgaagaattcaaaccggagagacacttagattcagctttagattatcacggnaaaaatcttgaacttcatcccattcggntcagggngagggtattncccggggtaaatcttncttttngggnttgcanaggtacagtggcacctttttggccgtttnccttggggntagggcttgcccaattggggtnacctgtntaactaagcnattggttngntnttncgaaatcccctatgattcntttcgtc

SEQ ID NO: 133416 - DNA, 565 bp, Arabidopsis thaliana columbia
  unsure (1)..(565): unsure at all n locations
gcaaatttcaagtttatttcattcaatttcgatccgagtaaccatggagtgtagatcattggatctgacgattatatctgcggaggatctcaaagacgttcaattgatcggtaaacaagacttgtacgccgtcgtttccatcaacggcgacgctaggacgaagcagaagacaaaggttgataaagattgcggcaccaaacctaaatggaagcatcaaatgaagctcaccgtcgatgacgcagcggcgcgtgacaatcgtcttactcttgttttcgagatcgtggcggatcgtcccatcgctggtgataaacctgtcggtgaggttagcgttccggtgaaggagcttttggatcagaattaaaggtgaccgggnggaaaccgggttacttangncgtnaggttgcctaacggggaggcgaaaggntctttcaattctcgttcaaaattttggggaaagtttcttttggntcttccgngtggccntangggccggnccctnnggntttggtncaaagctttggccaccctnacccntnccnccggaacggtnacctttanccntttc

SEQ ID NO: 133417 - DNA, 570 bp, Arabidopsis thaliana columbia
  unsure (1)..(570): unsure at all n locations
ccgtaatgctgaaacgggtacacctaatgcaaatccacttcctaatccttggggtgccacggctggccagacaactgcccctggaaggacaaatgctggacttggtggtcttggtgggcttggaggccttggtggactcggtatgctgggagcggactcacctcttggtgcgactccagatgcttctcaattgagccaaatactgcaaaaccccgctatgtcgcagatgatgcaaagcgtactttccaatccacagtacatgaatcagcttatgagtcttaacccacaacttccgaagcatgctaggatatgaatnctcaagttgaggggaaatgatgcagaacccctgaatttcctttgccagtttagcttttcccgaggatgattcagcaaatnattgtntntttnaacaaatcactttttnttttcaggaataggggcnccgggttggccnagggtcnttcggaaacttggtcttnggcaggggcagncaattaacgggggctngnttttttgntgatntttttgaancttggtcttgggcctaagnggnaaacanccatttnttgc

SEQ ID NO: 133418 - DNA, 509 bp, Arabidopsis thaliana columbia
  unsure (1)..(509): unsure at all n locations
attctnttctctctatctctctcgcgtacgccgcaccgtagcgaccaattgaatccacgaggaaatctcagtaaatactatggcgaccaacgaacccgagcacgagcacagagacgaggaagaggccggagctaacgaggatgaggacaccggagctcaggtcgctccgatcgttaggcttgaggaggttgccgtcactaccggcgaggaagacgaagatgccgtccttgatctgaaatcgaaggctttatcgattcgataaaggatgcggatcagttgaaggagganaggagcttggtactnttnaaggtctttaaaggcattaagaacancttgggaaggattccgtctccggttaattganggcaaatncttnaaaactttttgaagntcnttttngctaaatcaactttcggttaaattccggggcatttagtttttnaaggacaccntttnggnattaaaaagncatntttttttgaacgctcngggacttttncttnatgggg

SEQ ID NO: 133419 - DNA, 327 bp, Arabidopsis thaliana columbia
  unsure (1)..(327): unsure at all n locations
ggaacattaaaacaaagggtggagcatttccgaatccagatgcagaactgagatngctcgaggtgttttaccacaaganctacaagattttcccatcaactgaaagaattgagaatataaatgaccagtacnggactttacgagctgaggagattccggaagaagagaagaatatngggccaaatgatcggttaattctngtgtacccatttttgccaaggaggctgggccaaaacccagnaaagtgcaaaaacttttgggggggccttncttccttggggnaatcccntggaagggnggaaactcttttnnaagggaanttcaagg

SEQ ID NO: 133420 - DNA, 538 bp, Arabidopsis thaliana columbia
  unsure (1)..(538): unsure at all n locations
aaattagaaagacgatgatggagaaaattatggagtatctgcaattgagcgatgaggtggttgacgacggtgaggcaccgcgagttgaagaatttttaggtgaagggaaaagcttctacgagaattttagtctcagaggaatccgagtcaaccgagtcgaaccgggtttcatttcctgctctttcaaggttcctcttcgtttgacggacagagacaagaatttagcaaatggtgcgattgcaaatcttgtggatgaagttggtggagcacttgtacatggcggaggcttaccnatgagtgtttcagtggacatgtctattgcattnctttcaaaagctaagctttgttaaggagtttggaggtaaccgccgnggtttttttagggggggaaaaggnggttttaaaagggccaatccgttttaggcnnnaacaaagattncccccgggggnttttnccggaaggccgccattntttttttttgggggcaacctttnaannnttggncccctttaaggntttccccaaaanctttttttc

SEQ ID NO: 133421 - DNA, 414 bp, Arabidopsis thaliana columbia
  unsure (1)..(414): unsure at all n locations
caaaggagacccctctaaagaaaccgcacctgtgttagattatctggaaaacgctctgtataagtncgatgacgggccgttcttcctcggtcagttaagcttggttgatatcgcctatatcccgttcattgaaaggttccaaactgtactcaatgaattatttaagtgcgacattactgccgaacgtcccaaactatcagcatggattgaggaaattaacaagagcgatggctatgcacagacggaaatgggtcctaaggggattntngagggtttcaaggaaaaaattcatgtaaccttntnagcaaagcaccggagncagtaaaggtgtnttngggcccaanccacctttntttcggaccaaggtgggctttttgggtnttnganggaattaaggntgtgtacctttgnncc

SEQ ID NO: 133422 - DNA, 383 bp, Arabidopsis thaliana columbia
  unsure (1)..(383): unsure at all n locations
caactctaatgggaacacctacttcgatcgaatgtcgatgggggaagagcttttctgggcggttcgaggaggtggagccgcgagtttcggcatcgtgatgggatacaaaatccggttggttccggttccggagaaagttacggtttttagcgtcggaaaaaccgtcggagaaggagccgttgatcttataatgaagtggcagaacttctctcatagtacggntcggaatttntttgtgaagctganttttgantttagtcaacggtgcaaagccgggtgaaaaaaaggttttagngnctttcantttggntgnaancttgggggttttatnagaacggttaaccgggattnancccgngttttcccggggttaaaaccttngg

SEQ ID NO: 133423 - DNA, 565 bp, Arabidopsis thaliana columbia
  unsure (1)..(565): unsure at all n locations
caaggccattttctaagcaacttgtgcgactctccttcgtcctcatctgccaaaaacttcgtacgagtcgctacttctctctatatatataaactccttaccactctctttttttctgattttttgacgttaagagatagaaacagggagagatagagagatagagttatggctttggcgatgatgatccgaaacgcagcttcgaagcgaggaatgactccgatctccggtgatttcggtggtttgagatctatgtcttcatggtggaagagcgttgagcctgctcctaaagatccgatcctcggagttaccgaagcttttcttcgctgatccnaaggncctgaaaaaagttnaatgtttgggtnttgggagccatatccgtnnatgataattgggaaggcctttttttctttggaattntttccangngaagctttngaaaaaggctttnttgggggnccttttnatgggggaccctnccntttgggggggagggcccaaaantnnggcccccancatttaaggttcctnggggggcaaaagggattttccaananaaaaattt

SEQ ID NO: 133424 - DNA, 391 bp, Arabidopsis thaliana columbia
  unsure (1)..(391): unsure at all n locations
cacatctcctattgcaaacgaacataaaacactacctaagagatcaatatggctggagtgatgaagttggcatgcttgctcttggcctgcatgattgtggccggtccaatcacatcgaacgctgcgctaagctgtggctcagttaacagcaacttggcagcgtgcattggctacggtgctccaanggtggtgtcattcccccagcggtgttgcttccgggggntaaaaacctcaaacaagcattggccaaggncgggccccgganccgttaaggnaaggtttttcaaatttgcattttaaggggnccccttnaggccnttagggtttttgggnnttaaaaggtngggcccgttgaaanttgggaatttcctaaagggantttnggggncaa

SEQ ID NO: 133425 - DNA, 376 bp, Arabidopsis thaliana columbia
  unsure (1)..(376): unsure at all n locations
gataacccaacaaagcccatctacttatatataaattcacccgggacccagaatgagaagatggaaactgttggntcagaaacagaggcttatgccatagccgatactatttcttattgcaaatcagatgtatacactatcaattgtggcatggcttttggtcaagcagcaatgcttctttctctcggggaaaaagggtatcggggccgtacaaccacaatncatcaaccaaaatttatatnttgcccaaaggtaancagntncgggttggngctgccatnaggccatgttgggtnaagggcccagggactttgattcaaaattnccggggtnctncaattggngcttgtttagcttnaggggaccagggggaant

SEQ ID NO: 133426 - DNA, 534 bp, Arabidopsis thaliana columbia
  unsure (1)..(534): unsure at all n locations
aatttccccaatttctcagagagactcaaaatcaccaccaccaccaaatcgccgccatgtttaaacaagcttctcgtctcctctcccgatctgtcgccgccgcatcttccaaatcggtgacgactcgtgccttttcaacggaacttccatcgacgctcgattccactttcgtcgaggcatggaagaaagtcgcacngnatatggacccaccgcagactccttctgctttcatgaaacctcgtccttccacttcttcttctatcccgacggagctcaccgtcaattttgtcctnccttacaaatctgagcttaccgggaaagagggtngncatggtcatcatttcccgcattaacagggcaaaatgggtgtttttncccggcaanggttccaaaaaattgctgngntaaaacctnggatnatgtccgtccatgaagggaactncngtaaggaaatnattttttaggaagngggtttnatttttccccggaaattcgnnggtgaaaaatcnggnggagttttccgtttccaatttc

SEQ ID NO: 133427 - DNA, 318 bp, Arabidopsis thaliana columbia
  unsure (1)..(318): unsure at all n locations
cnacgatatgtgggctggatggtgtatcaaggtgatctgtgaccatttgggattgggagtgaagacaggtttgccctacatttaccacagcaaagccagcaacccgtttgtnaacttgaagaaggagtacaagggaatcttctggcaggaggatatcattccttttttccagagcgcaaagtcacggaagaaggctttgccagtnaanaatngttcaangggcttttccagttggttnagggggagcttaggcccntttatncctaatttngcaaggtttcaagatgctnttgggcactttggntttaaggttttggg

SEQ ID NO: 133428 - DNA, 415 bp, Arabidopsis thaliana columbia
  unsure (1)..(415): unsure at all n locations
ccacgccgtatcggagtcggacgtctccgtccactncacattcgcatcacgttacgtccgtacttcacttcctaggttcaagatnccggaaaactcgattcctaaggaagcggcgtatcanatcatcaacgacgagctgatgcttgacgggaatccacggttgaacttagcctcctttgtnacgncatggatggagcctgagtgtgataaactcatcatgtcctccatcaacaagganctatgttnacatggacgngtaccccgtcaccaacggaacttnaaaaaccgattgttttgacatgatttgcacatttttttcaaatgnacccgtttaaaaangggcgggngaccccccttnggggttagggacccttttggttctntggggggccaaaantttttggccngtttttgg

SEQ ID NO: 133429 - DNA, 415 bp, Arabidopsis thaliana columbia
  unsure (1)..(415): unsure at all n locations
ctatctctctccctctctatctctctcttaccaatttccatttctcgggggaaaataataatacgacttttgaaatctctcactaatatttcccaagaaaacctgatgaattaaaagttcatatttncttggtgttgattggtattagatgactatttcttagtattagtcaattctctgtttccatcttatatggatagtctagacacagagcaaagatccttctttggaggaaaangaagatgagagacgngagaggatcggtttctttcaacggaatttggtcggagnttagntccttaantcggntnanccatnttaagggccttgaancttaacccattncaattatnaaactttaatttnccttcctttcctttttccgngccccaaatttgtttcccgnccaacaaag

SEQ ID NO: 133430 - DNA, 354 bp, Arabidopsis thaliana columbia
  unsure (1)..(354): unsure at all n locations
caaagatatccatatctcagtcactatgccatctatcgaggtggggacagtgggaggaggaacacagcttgcatctcaatcagcgtgtttaaacctgctcggagttaaaggagcaagcacagagtcgccgggaatgaacgcaaggaggctagcgacgatcgtagccggagcagttttagctggagagttatctttaatgtcagcaattncagcttggccagcttnttnagaaggnaccatggaaatncaaatnngtcccgcccgnggccatttttgggggaaacggccaacggcaaccaccaaccaccatggtcntggatcntgnattnatcaatccnntcaaagggaagggcc

SEQ ID NO: 133431 - DNA, 374 bp, Arabidopsis thaliana columbia
  unsure (1)..(374): unsure at all n locations
catcatcatttctctctatctctttctaaaacacaaccatgactgtttcttcatctccatgggctctcatggctctctttctaatggtttcttcaacaatggtaatggctattcctccacgcaaggccatttgatgtaccattttggtcgtaactacggtccaacttnggcttttgaccaccagnaacagttcaatgggcgggttccgaactttaagcttatcctcggcaaatacactggcacagggtttcaatcaaagggggcaaanttttgttttnggcaatttttggtttgcaccataaaagggtttccnccnttggnnggcaaaagncccggnggtttttanaagggtttntttnnttttcaaattttcc

SEQ ID NO: 133432 - DNA, 364 bp, Arabidopsis thaliana columbia
  unsure (1)..(364): unsure at all n locations
cagatgtatgatcagccacactatgataatcctcctatgcatcaatcttatggaggatatggtggctcccaacagggctatccatcggcaggtggtcagcaccaaatgcagcagccaagtagaccttacggtatgcaaggttcagccgagcaagggtatgggcctccaaggcctgcagcanctnctgggtgatgtgccttaccaaggttccanaacnggnggacccgtcatatgggttaacaaccagcaggaggattggattggttaanttccggaggaacnttgttttggtcaaacaanggtttacaacngnnattttgggtatncattaaggggnggcnttttttggaaaattttttcctca

SEQ ID NO: 133433 - DNA, 506 bp, Arabidopsis thaliana columbia
  unsure (1)..(506): unsure at all n locations
gagtggttacaagatagctaaatcagttggagctattgcaatcattgataaatcccctagacccgacgttgcattcactcaccatttaccngcctctggtttaaaagcaaaagactttaagtctctcgtctcttacattgagtcccaagattctccacaagcggctgttctaaaaacggaaacaatcttcaataggacatctcctgttatcgcttccttctcttctcgtggtccaaacaccatcgctgttgatattctcaagccggatataacagcaccaggagtggagatccttgctgcattttcacctaatggtgaaccgtccgaagatgncancagacgtgtgaagtactctgttttctctggaacttcaatgggttttcccnaatgtncaaggggtggttcgntttcaagangttttccnnngtgggntccttccanggttaaatngccnttatngnaaatgtttggccttnaaaactnagggccggggattgnntgcccgg

SEQ ID NO: 133434 - DNA, 413 bp, Arabidopsis thaliana columbia
  unsure (1)..(413): unsure at all n locations
atcaccatggctaaagccagtagtactctgtttgcngtttccngctccgcttcagctcgtttntttttcctccgacgctctgaatctnttaaaccctcagtttcaagagcgagattcgccgttccaatggctatggccgccgcgtcactgccaccgctaaaaaactagcgncctgcngtnattgtgggtggcggaagantcggaagggcggtacaggaaatgggtaatngcgaggattttttggtgaagagaggagaagcagttccggttgattttaaaggncccattttgggtttttacaagaaatgatgatctcgatgctgttctttgaaagctacctccccagcctagattggaaanaatttgggccttctttnccaaaattggggattnttgggcccnngggttttang

SEQ ID NO: 133435 - DNA, 661 bp, Arabidopsis thaliana columbia
  unsure (1)..(661): unsure at all n locations
ctcaggttggaaccatttctgctaatggagagagggaaattggtgaacttattgccaaggctatggagaaggttggcaaagaaggtgttatcacaatccaagatggaaagacattgtttaacgagttggaagttgtagaggggatgaaattggacagaggttatacttcaccatactttatcactaatcaaaaaacccaaaaatgtgaactagacgatcctctcattcttatccacgagaagaagatctcaagcatcaactctatagtgaaagtnttggagttggctctgaagaggcaaagaccactattgattgtttctgaagatgtggaaagtgatgctcttgcaactcttatccttaacaagctccgtgccggaattaaggtctgtgccatcaaggcccctgggtttggagagaatagggaaggccaattttcaaaggcctttctgccctttccttggtggggaggtttcacaagnccgggcttggattgannctggagaaggtggccctaggaatccttggnncctccaaaaagggttcaagnttccaagggcggcacttgttattctttnatgggntttgggcaaagaaanggattttgggaaangttttccnangnttggggncaaattttccttnggcccctcaggttttttnc

SEQ ID NO: 133436 - DNA, 530 bp, Arabidopsis thaliana columbia
  unsure (1)..(530): unsure at all n locations
ggcgacgtcgggaacatacgtnacgcaggtnccgttaaaaggaacggtggagaaacacttcaagaggtacaggaacgagaactatctcttccctgacactatcggccaccacatccaaagtnttactgttcacgatggcgaatgggacactcaaggaggcatcaagatttggaactacacactcggagatggaaaggaggaggtattcaaggagaggagagagatagacgatgacaataagatagtgaaggttgtaggattggaaggtcacgtgatggagcagttcaaggtgtatgagattgacttcccaatttattcccaacttctgaaggaagnattgcntctgcaaaaatcacttatggatatggggagaagccgcaaccgattgatttccccgnaccccaagncagcttcaatgcaaactccctcaaaggagtatggttanttnanattggggggnccacnggcctttaaaagcnttaantcaattttcccaacccacccncccantnanttacnaacccnccnat

SEQ ID NO: 133437 - DNA, 618 bp, Arabidopsis thaliana columbia
  unsure (1)..(618): unsure at all n locations
cttcactctccagcgatcgtttattgcttgaagacggcttcttcttctcacaaacctcatctctgctaatcaaaatgtctctggttgcaaatnaggngtttcaacacattcttcgtgtgttgaatactaatgttgatggtaagcagaagattatgtttgcccttacctctatcaaaggtattggtaggcgattggctaacattgtctgcaagaaggctgatgtcgacatgaacaaaagggctggtgagttatctnctgctgagattgataacctcatgacaatcgttgcaaacccacgtcagttcaagatcccagactggttcttgaacaggcagaagggnttacaaagatggcaaagtattctcaaagttggctccaaattgctcttgacatgaagcntgngaggtgatccttgaacgggctcaaagaagntccangaaacccacccgtgggtttnagggcatttacttgggggcctcccgtggtcaanaggggccaaccancanccaanggctncctttggtcggaaganggggaaaggcctttttgggnggccncaaaagaangngggttanggaaaggccccaattgttgnntccttnccttcctgnatttggg

SEQ ID NO: 133438 - DNA, 568 bp, Arabidopsis thaliana columbia
  unsure (1)..(568): unsure at all n locations
ggaagaagaagaagatgtcttggcaatcatacgtcgatgatcaccttatgtgtgatgtcgaaggcaaccatctcaccgccgccgcaattctcggccaagacggcagtntctgggctcagagcgccaaatttcctcagttgaagcctcaagaaatcgatggaatcaagaaggactttgaggagcccgggtttcttgccccaaccggactatttctcggtggcgaaaaatacatggttatccaaggtgaacaaggagctgtgatccgagggaagaagggacctggaggtgtcactatcaagaagncaaaccaagctttggtctttggcttctacgntgaaccaatgactggaggtcaatgcaacttggttgtcggaaggctcgggggttaccttatcgagtctgactctaaaaccaaggtttcattcagggtcttcttactaaagngtgtcaatnactttttattgtggtttnttgaaatntttcaacacaattattttgtnctttngaccaatttngttnttggcnctncgtaccggttagttnggcctnataattnccctttcccntc

SEQ ID NO: 133439 - DNA, 276 bp, Arabidopsis thaliana columbia
  unsure (1)..(276): unsure at all n locations
caaaaccattgcagccatcttttttgtntcaaatncgccatgaaggatggatgcaacgtagcaggatatttnccatggtcattgatggacaattacgaattcggaaatggttacaccctccggtttggtatgatttgggtcaacttcactaatccngctgatcgtaaagagaaagcttctggaaaatggttctntaagtncctngcaaaatangtggaagccctagatataantccaaacctcgaatgtaataacanttgcactgtatgtttttna

SEQ ID NO: 133440 - DNA, 526 bp, Arabidopsis thaliana columbia
  unsure (1)..(526): unsure at all n locations
gaaatccagaagcaagaaaactgcagtccctacgaaatccagtccaccaaagaaagctactcaaaagcgctcagcaggtaaacggaagaagagtgatgacgacagtaatacaagtccaaaggcatcttctaagaggaagaagactgaaaaaccggccaaggagcaggccgcagcccctttaaaatctgtatcaaaagaaaagccagtaataggaaagagaggcggaaaagggaaagacaaaaacaaggngcctagcggtgaagaattgaaaactgcaattattgntatcttgaaaggggtggnctttaacacgggcccttttcactgacatcctcaaggggcttggttgttaggtccaccntcagtcttggcttcaaaaaaattcctctttnangngggtgttcccngttgggntncntnggtttgcggccaaaggcttcttttggggggggggggncctccctnggtttttncttccngggggggttggggnttgncggtttttnctttgggtngggnccccctc

SEQ ID NO: 133441 - DNA, 589 bp, Arabidopsis thaliana columbia
  unsure (1)..(589): unsure at all n locations
attatcctcactataggaacatgtggaggtcctttgttaactcgtctctacttcaccaatggcggaaaacgaatctggttcatgagcttcctatcaaccgctggttttccaatcatcctcatccctctcttggtctccttcctcagccgtcgccgcagcaaccgcaaccctaacaacgcggaaaacaagcggaaaacaaagctcttcctcatggaaactcctctgtttatcgcctccattgtcatagggttgctcacaggacttgacaactacttatattcttacggttagcatatctgccagtttcaacttcatcggtcataatcgggaactcaactagcttttcaacggttctctttcggntttcttgttagtcaagcaaaaaggttcaactncggttcttccatnaaacggccgtnggtttttgtttnncggntttggtatcggggatcctttccgttacacaagtgattgggggncaaaaccgggcttaaggnggngcaangaaagngtnatgttggttgggggnctttaatgncctttggggttcaagncncttcccccnatgnttttnaaattncccgccnng

SEQ ID NO: 133442 - DNA, 511 bp, Arabidopsis thaliana columbia
  unsure (1)..(511): unsure at all n locations
caagaacattgacaacttctttgcagagaatgagcaacttgctttctgtccngcaattattgtcccagggatacattactcagatgataagctgcttcaaacccgtgtcttctcctatgccgatactcagagacaccgtcttggaccaaactaccttcagctgccagtcaatgctccaaaatgtgctcaccacaacaaccaccatgagggattcatgaatttcatgcacagggacgaggaggttaactacttcccgtcgaggtatgaccaggttcgtcatgctgagaagtatccaactccgnctgctgtctgttctggaaaacgtgagaggtgcattattgagaaagaggaacaacttcaaaggaagcctggnngaggagataaccgtanccnttaacaccacgagaggcnaaggaaccgnttcattccacgaggntggnntttaatngcccttatccagacccaacggattnancgnantgaaantcccgcaagnatcctggntcctngt

SEQ ID NO: 133443 - DNA, 251 bp, Arabidopsis thaliana columbia
  unsure (1)..(251): unsure at all n locations
gaaagctnanatctatgtttacgtnacggtggtcggcgtcgganataatggggaagcttgaagggataggnaaagaaatgaatataaaggtnaagaggactaaagactttaaggtgaagttttttgggaaancggaagggaggaaaggccagatcgcggtgactcctgaggttttcnaggttcccccggaagtcgccgtcnttaagttgtgtaagtcggcgggagatactttngagtataataggttgtat

SEQ ID NO: 133444 - DNA, 433 bp, Arabidopsis thaliana columbia
  unsure (1)..(433): unsure at all n locations
ggaggagaagacggtgttgaaacgcgagccgtcgccgggacaggaggagttgaatcggcgcgttgaagcgtttataaagaagtttaacgaagagatgagattgcaaagattagaatctttggctaaatacaatgaaatggtaaatggagggactcgtttgtaaatttncgtggtttttncttaggcgtcggtgaaggagaaaaatgacggcacagtcgcaaaagttgacttgactcttttttacaaccacttaaaagagtttttttttccntcttccggggaacaaantttcaaaataatgcaaaaattgtttttatnnttggaaatgttccttttgggggtcgagccggtaatccctgtgggttccaaagttaaggnttttttttgttnaccagtaggttagtngggnctngnnntccgnanctgntttcct

SEQ ID NO: 133445 - DNA, 559 bp, Arabidopsis thaliana columbia
  unsure (1)..(559): unsure at all n locations
tcttgctagggtttgatgatgaagctgatgatgtgaagacgaaaggagggttgagatccgggaggttcttggtggaagaagaagtagaggaattaggaaatggaagcttcttgtnctttctagaacctccgcctacggggacgttacggagagagccaccttcagtccaatatctccgacaagacttacacaagtacctaggctgtgctaagctgtagttgttgtaataacaaaacttggtgttgcttgagttgcatcttggacagtttcttggttcttgcggcctagtgctcattgtcgtcatcaacttcttctcgtcatccattatcatagttgtttgcttgttggttgaatcccatttgttggttngttngttggtggttggttgttgttgttaccnatgggtgttatagggaattattngtaaggacttagncatnaacctnatgtttggaattgaccatnntggntggaacctggtgnatggnccnctnantgtngnctccaattccaagaaattaancccccgaaataagggancngatgnccaaaccccttg

SEQ ID NO: 133446 - DNA, 537 bp, Arabidopsis thaliana columbia
  unsure (1)..(537): unsure at all n locations
ctttcagcggtgaagagaatgtnactccaaagaaaccaaccactttaaacgaggctgctaagcaaaaggagttgagcaggactgtagaaacccaagcagattcgaagtgtaagaagaaacagatatcgaacaccaagaataaagcaatgagtgggcatgacatctttgcatctcctgaaagccaacctcgccgcttgtttggtggtgcaacacaatcagaagttaaaggaaataagancacggaggaatctgcaccgaggagctcgcgtgcatctntcaaaacctcaaacgggcaaagcagcaacagnttgtttagtgaaggancatgttgtgaaggcatcaaaggaggttcattancccggagtttcagtttcaggggggtcccagcaattggttcttcaaanctggttaaatcccnccnnggtttttcagggaggtgcaaagcttgncnaaagnggggatttgggggcncatttttttccgcngggntcngggnttccgggttcttttgggggccgggggnccnnttgggggggg

SEQ ID NO: 133447 - DNA, 561 bp, Arabidopsis thaliana columbia
  unsure (1)..(561): unsure at all n locations
cacaaatnacgagttcttctgaatcaactcgcaagggtctgaccaaaatcgccacgaaccggttgcagaaagagttcatggagtggcaaaccaatcctccttctggtttcaagcacagagtctctgataatctccaacgatggatcattgaagtgcatggagttccaggaactctttacgccaatgaaacttaccaacttcaagttgagttccctgagcattatcctatggaagctccacaggttatctttcagcatccagctccacttcatcctcatatttacagcaacggtcacatttgtttagatgtcttgtatgattcgtggtcancggcgatgagnctaagttccatctgtctcagcattctctcaatgctctccagctcatccgtgaagcaaaagccgaaagncaatgaccattactgaaaaactgcaaacatgggaggtttcccaagaactaggtggggtttcatgcggtaaaggtanattccttaanttngtgttcaaacgnttgnagnnttaggcgggtttnncntgtnntnttaacaaaaaaaaagggggc

SEQ ID NO: 133448 - DNA, 576 bp, Arabidopsis thaliana columbia
  unsure (1)..(576): unsure at all n locations
aaaataaatttgtattaaccactctttaaattcatcctctggatctgttgtactcgtatagagaaaaaatggcgtatcctgagagatctctcattgttgatcctagaagtggtttctgcaaatcaaactctacattctatagcaagcgccaaccattaagtctcccgccaaatctttcgcgtgacgtnaccacattcatctcctctcagccacaccgtgnaaaaaccgcctttatcgacgctgccacaggncagtgcttaaccttctccgatctctggagagccgtcgatcgcgtcgccgacttgtctatatcatgaagtcggaatacggagagggcgacgtcgtcctcatcctttttncaaactccatcttcaattcccgttgtttgcctctccgncatgtctntcgggggcggtttttaacaccggcaaaantttcaatantttccggnggaattttccaaaanaggtttnccggcagaanncaanctttgggtttnatnaggggcntttgggaccaaaaatcccgggggtatttcggnggtttancgcggngggntttcagggggttnntggg

SEQ ID NO: 133449 - DNA, 385 bp, Arabidopsis thaliana columbia
  unsure (1)..(385): unsure at all n locations
accaccaccaaagaaacattacgtatacaagtcccctcctcctccggttaagcactactctcctcctccggtttaccactctccaccaccaccaaaggaaaagtacgtgtacaaatcacctcctcctcctccagtacaccactactctccaccacaccatccttacctctacaaatctcctcctcctccataccactattagntatctctatcacggngaacacgntgtacacaagaagacaaaggcaagacgganccnagtactggtgattgtaataagnggaacaaaaggttgtnangggggattccaggcaggggaaaggntttttcattcatttttcaaaggnnattggttttcgggtttttttngtaataantttntgaa

SEQ ID NO: 133450 - DNA, 408 bp, Arabidopsis thaliana columbia
  unsure (1)..(408): unsure at all n locations
ctccgattcgcagatcaattagctgggttttgattccgttgtgcgaaggactttaagaggttttgcagatcgaaatcggaagagaagaagaagatgtttctcactagaactgagtatgacagaggagtgaacactttttctccagaaggaaggctatttcaagtggaatatgccattgaagctatcaagcttggttctactgcaattggagtaaagncaaaagaaggagttgtgcttgctgttcgagaagcgtatcacgtcgccattnctgganccnagcagtntggagaagattatggaaattgatgaccatattggntgtnctatgagcggttttaaatttctgacgngngnacaacttttttnagcatnctagagttgganctcnaaaccccnagattttcnatt

SEQ ID NO: 133451 - DNA, 484 bp, Arabidopsis thaliana columbia
  unsure (1)..(484): unsure at all n locations
aaacaaaatggcttcgatgggtggattacacggtgcatctccggcggttcttgaaggaagcttaaagatcaatggctccagccgtctgaatggctctggaagagtggcggtggctcaaaggtctagacttgtcgtcagagctcagcagagtgaggagacttctcgccggtccgtgattgggcttgttgctgctggtttagctggtggctcgtttgttcaggctgtcctcgccgatgctatttcgatcaaagttggccctcctccagctcctttccggtggccttnctggggacagataactcagaccaagcaaagagactttgcattnggaatttgaaaggcaaggtttnacttacaagccattngccaccaaccgnaaggttncagttagggccaaagnaatttttcaaangggtttncntaaatttngagcccntttttcgcnaaggaanttttgcccantttttnaaaaggtttttggnnc

SEQ ID NO: 133452 - DNA, 510 bp, Arabidopsis thaliana columbia
  unsure (1)..(510): unsure at all n locations
agtgaatcgcaaaaccaaatttggaggattctttctgaggggtttctcagtgagaaaatggcttcgaaacggatcttgaaggagctgaaggatctccagaaagaccctccaacctcctgcagtgcaggtccagttgctgaagacatgtttcattggcaagctacaattatgggtcctgcagagagtccgtattcaggcggtgtgtttctcgttaccattcacttccctccggactatccattcaaaccaccaaaggttgcatttaggacgaaggtgtttcaccctaatatcaacagcaacggaagcatttnccttgncattttgnaagnacaatggngccctgncctcaccatttncaaggtgttgctctcgatatgttcgctgttaaaagntcccaaatccagntgacccnttttgnancncaggttttacacatgtcnaaaaccgcagggccaattngggggttnttaagaaactggctcnnagntttccatgggttaaaaaagtttg

SEQ ID NO: 133453 - DNA, 559 bp, Arabidopsis thaliana columbia
  unsure (1)..(559): unsure at all n locations
ctcagacaatgtatggtgtgaaggaacagctgctggtgttgatgctgatcttagatacagttatctgatgaacactagcatcagtggacttgaaaacgccgatctcttccttctcatcggtacccagcctagggtggaagctgcaatggtgaatgctaggatctgcaagacagtccgtgcatcaaatgccaaggttggatatgttggtccacctgcagagttcaattacgactgcaaacacctcgggactgggcctgatactctcaaggaaattgctgagggacggcatccattctgtacggctctcaagaacgncaaaaaccctgcaatcattgttggtgctgggctcttcaacagnacttgntaaaatgctatccnctcttctgtggngtccatttacaagccanaatgttgtccgnccanattgaanggtntnaatttttcctcagtatgttcccaaggggtntnttgacnttggnttattaanagcccgcaagcctcgggnttaaattggttcttgtgggggncggttaaattnnaagtnctaaggnttttgggc

SEQ ID NO: 133454 - DNA, 513 bp, Arabidopsis thaliana columbia
  unsure (1)..(513): unsure at all n locations
caaaaagagtcacttccgtgtcacaagaaaccatgaaactttctcttcatcaaccacttctnttcttcttcttagccagcgtcctcccattaatcctgaccgtccattctcaatcagacgactcagatttcatccgtactagctgcaacaccacattataccctgacctatgcttcttttctctttcctccttctctagctctgttcacaacgatccagccctcttggctcgagccgccatctccgtcactntcaccaagactctcgacttagcctcatacctcgccaatatcaccactctccagccagagagcaacgnagatggtgctcaccacccaaccggagccgctgtttttaaaggctgcttcggcaattttaaagnanggggnggagnaatgaagggttcgntgaaacagatgaggggggctggttngactggtnggttgngtcctnaggttcaatggtacgtcaaggggtaagtnggtttactttgggggtttcgggggttaaggc

SEQ ID NO: 133455 - DNA, 526 bp, Arabidopsis thaliana columbia
  unsure (1)..(526): unsure at all n locations
gcccttgatgcaacttgatgagccacacaacgctaacttcatggccaagtctgccactcgaatggctattctaggagtccccttaagtttactgggtcaaccaagcatgaattttgcttcatcaagtagcaagggtgatacacttgtagcactaggctctccctttggaatcctttcacctgttaacttttttaacagcgtatcaactggttccattgcgaatagctatccttctggatccctaaagaagtcactgatcatagctgatgttcgatgtctccctggaatggaaggggctccggtgtttgataagaatgggcacttaattggcattttgattaggccnctaaggncaaaaagaatagcggcgttgaaatcaanctggtggttccatggggngcaaatcacancttgnttcagccantttcntgntttnggacccctttttggggggaaagnaangcanttgggggggtnaaggtntaagnttnaatcagntgctgnatccttncaanggttttgggtc

SEQ ID NO: 133456 - DNA, 433 bp, Arabidopsis thaliana columbia
  unsure (1)..(433): unsure at all n locations
gtaaaacttcctccgggagaggatttaaacgaatggcttgcagttaacactgtggatttnttcaatcaggtgaatctnttatttggtacacttaccgagttttgcaccccggagaactgttctacaatgactgctggtcccaagtacgaatacagatgggccgatggtgtacaaatcaagaagcctattgaggtttcanctccaaagtatgttgaatacttganggattggttcgagacacaactcgatgatgagaccatatttcctcaaaaacttggtgcagtttttccnccaaacttcaaggaagtggtgaaggcaatctttaaacggctattccgagtttacggacacatttaccactctcatttccngaaaaaagtttggntcaanggggggntnatctnannacttggttttaananttnaccccntt

SEQ ID NO: 133457 - DNA, 503 bp, Arabidopsis thaliana columbia
  unsure (1)..(503): unsure at all n locations
aatgaattgttttccaccattcctgcaaagcagagaagaccagaagcaacgcaagcttacatcacaagaaacaaataccaacttcacgaagcattcaatggaagtttcatcttggaaaacttgcttacccgatctctagagggcatttnagcttggtcaacacaaatgttgatgacaacccttcagtcaccttcaattactttaaacacccggtggatctccaacgctgtgttgaagccattcgtcttgtttccaaagtggtgacgtctaaccgtttcttaaactacacgnagtggaccaagcaaaacggtacacaagatgctttagcttaagcgtcaaaggnaaaccatncaatctaagggccaaggaacttgnncggtncccaaatcaaatgggtcagttctnnaaaggcactnttgtcacaattttgggncttccntngnngggtgctttttngggnaaagtttttngnccttacccgaaggtttttgggtnggcaaggg

SEQ ID NO: 133458 - DNA, 291 bp, Arabidopsis thaliana columbia
  unsure (1)..(291): unsure at all n locations
gatgatacttaaactattcacttgattatagtttgaacttgtgtattttnaaacacgatgttcaatagatttagatggtagttcaagtattccagatggtagaaatgggatatacatatatntttcantcttatccccgtaaaaaaagttgtaacncttgttgatcggatggtagaaacataggtctttaatcccatataggtattcgngtatatncaaaagagtaagatggatctngataatctnngttttagtaaacatataagnttcatttnatatctttggtaatac

SEQ ID NO: 133459 - DNA, 377 bp, Arabidopsis thaliana columbia
  unsure (1)..(377): unsure at all n locations
cgtaacagtataactgtataaggtctcattttcgtgtgctctcgtcgcgattactctctttgagntctctctctctcttctaacatcggtcttgtattggtgcttattggatatctccggcgaaggaaacgagtttcgcggttagatttttctttatcgcttaccggcgaggatgatcgtttcttcggtaaggtcgattaatcggttctgttttcgaagatgttgttgttagagttagatccccatggtttttggtgatncgntttggatcgaagacggtgggttccacaagnccggaaaaaantgcccggccgtctctttncnttttaggattttgggctttctnnaaaancttttccccctttncggnncncgnt

SEQ ID NO: 133460 - DNA, 516 bp, Arabidopsis thaliana columbia
  unsure (1)..(516): unsure at all n locations
aaactctatcctttcgttttcttgtcagacaaaaactaatactagatgggtaacagtttaggcggcaagaaaacgaccaaagtcatgaagatagacggcgagacttttaaactgaaaactccggtgacggctgaggaggtcttaaaagactttcncggccacgtcttgttagactccgaatccgtcaagcactacggtgcccgagccaaaccacttnaggcgaanaganggttggaggcgaanggctttattttgtggtggagccggtgaaagagtntccaccgagaagggtaagatcaggaattcacgtgagtccaaaaggaggaggctttagagtctcattgcttggcccggagaatcgtcttnccgatctttttcatactcaaaccacccagggggnntggaccggcggagggaaggaaggaaggagccngttnagnaggggttaaaggnttgagngttttcccaaaagcttnnnctttnaaaaaacttcgntaaanggaaggggccccccaa

SEQ ID NO: 133461 - DNA, 601 bp, Arabidopsis thaliana columbia
  unsure (1)..(601): unsure at all n locations
cgttgattcttcttcttcttcttcttctctctttctcatctaaaccaaaaaatggcagatcagctcaccgatgatcagatctctgagttcaaggaagcttttagcctttncgacaaagacggagatggttgcatcacaacgaaagagctaggaacagtgatgagatcattaggtcaaaatccaacagaagcagagttacaagatatgataaacgaagtagatgctgatggtaacggaaccatagacttccctgagtttctgaacctaatggctaggaagatgaaggacactgactctgaagaagagctgaaagaagctttcagggttttcggtaagggccagaacgggtttcatctcgggcaacttgaggttaaggccattgtaatggccaaatctttggtgagnaggttaacctggntgaaggaagtttgttgagnttgtccaaaggaaggcttgattntttnntgggggttggncagaccaatttttggnggggtttttccaaaagttnttnnattgncaaanttggggaacttttnnccaaanctttcccccccgtttccnttcntccctttttttggntnnnccccctggtttttta

SEQ ID NO: 133462 - DNA, 485 bp, Arabidopsis thaliana columbia
  unsure (1)..(485): unsure at all n locations
cccagatttgaagatcggagatatgaatctcttctttctctggatttgaaagttcgataaaaatctactgatacatcgacttctggaagcnatctcgatctctctagaattgtttcgacgacgaagatgaagaagattcaaattggtgcggtggcgctattggtgtttctatctgtggcctctctctttgaaatcggattggcttctccgaacacagttcctgctttcctctggtctccgcatctccagtctgctaatggtgaattggatgaggctgtaaatnatcaggtcatgtctgcaaaggatctagttggttctgttttcactcaaaggagggttggtcaaactttctgtgctcagaggaagnaagctttnagnaaacctggttgantgtttgcancntgtgtttcaatagggcaaggggnggttnctggcctccnnntngttttttccaaaaaaagggacccnaaganccngcccnttnt

SEQ ID NO: 133463 - DNA, 476 bp, Arabidopsis thaliana columbia
  unsure (1)..(476): unsure at all n locations
acaacaacaaaaacagtgccctttcgctcacgctttgagtcgtatctgctctcttcttaatccgccgtctctcactttttcgccggcgtggttagatcgtacaaagctcagagagaatgttgggaatcttgaggcaaagagccatcgatggagcttcgactcttaggaggacgcgattcgcattggtttctgctaggagctatgcagctggtgcaaaagagatgacagtcagagatgctctaaaattctgcaattgatgaggaaatgtctnctgatcctaaagtatttgtcatgggtgaagaggttggccaatatcaaagggtgcctacaaagattcacctaaaaggccttttttggaggaaantatggggnccctgnagaggagttttccgggtnaccccctnnttacctnnaggggntngggntttnccttggaattttgggggnttggntncttcccaatcnntgggtttaaa

SEQ ID NO: 133464 - DNA, 480 bp, Arabidopsis thaliana columbia
  unsure (1)..(480): unsure at all n locations
atgcaaacaagtttcttctgtcaagagggtcattctgacatcttccacggctgcggttctctctcgtcagcctcctattgggccaaacgacctggtggacgagactttcttctccgatccaagtctatgcagggagacaaagaattggtattcactctccaagattttggccgagaatgcagcgtggcaatttgccaaagacaatggaatcgacatggttgtgttgaatcctggntttatttgcgggaccactcttgcaaccaactcttaacattgtcggtagagctaatttgtggggtttcatnaaaatgggtaagaaccccttttcaantaaaaaggttccttncaaggttctccgggncgtnaagaanatgtcggccctntgggttcatattcaaaaagnggttngggggnctcccttcaagcccaattggaaggntccantcaatcggntggggncccaaatntttggggttnaaa

SEQ ID NO: 133465 - DNA, 557 bp, Arabidopsis thaliana columbia
  unsure (1)..(557): unsure at all n locations
aacaaccgtacacgccggagtcctcctcgtagtcaatcctccagatcttcttctcctcctgtagcgccgccgcttcctcctcctcgtgcggctgtctctgctttcgttccaaagggaacccttaagaagagtcttagcaataccgttgccgttagccaggtgagaatccttaagcgcggcgaagaaatccccaaggagacttcagatctggttgtggaaatntcagatctgggatctactcgtcggattggaccagatccgggtttgattccgggtcagatccngnttatctggccgcaaatngaaatcagcacccgtttttacgccgggtccctgtgaaccantaaccntcgccgnctcctagnagattgtccccgcttccaagatttttttcacggaggaaggnaacaaaatgatctnatnaaggngtccttttgcctagncaatagcctnanggnggttttttaaaccnntcaatttttttgaatttttttaaaaaaaattccgggtggttcnaaaangggtntccaaaaggggttaaatttccggattnaccg

SEQ ID NO: 133466 - DNA, 463 bp, Arabidopsis thaliana columbia
  unsure (1)..(463): unsure at all n locations
gaattcgccattagactctcttccgagaatccaaccagaccacacagaccttctccttctccacggaacaaagtcttcgtcaagaagacgacgagagacaccacgtcacacctcgattactccaatctggttaagctggagaaggcgggatcgcactcgggttcgaatcccgctccggcttcgggttcggatcctattaaccggggttcccctcgctcaggtcgtcgagggattgcggtaaacggttggttccagggtaacgntncaagggaagncaaaatctgggtgancgtttggtatgcaaggtnntttggttttgggcaaaattgttattttccaagccgggttaattggaaatnccctaaaaggttgggaaaacaaaaggggncggtgnttttngggttttancaaaaagnnttcaaaggnacctttggttcaatnaagnttttgnaaaagttaaggt

SEQ ID NO: 133467 - DNA, 518 bp, Arabidopsis thaliana columbia
  unsure (1)..(518): unsure at all n locations
aatcaaaaagcttttaacctcagccgttaaatctttctccgatcatgccgaccagaaacatcgccattggtggagtccaagaagaggtctaccaccccaacgcacttagggcggcgctcgctgagtttatctcgactttnatcttcgtcttcgccggatcaggctccggaattgctttcaacaagatcactgacaatggagccaccactccttccggcctcgtcgccgctgccttagctcatgctttcggtctctttgtcgctgtctctgttggcgctaacatttccggtggccacgttaaccctgccgttaccttcggtgtcttactcggtggtaacatcactctcctccggtggtattctctactggatttctcagcttcttggntccgtggccnttgtttncnccttaggtttgcaaccggtggggaggnacgnnantttnacttnttgncctantaaaaccggttnaganggggttaaatttgnttagaggaattncggtnccggnttntattc

SEQ ID NO: 133468 - DNA, 305 bp, Arabidopsis thaliana columbia
ttttttttttgaatttaaagtattgtaaccataaattaagttctcatagtaacacgcattacacattcaacaacttagccttcctaaatttaattagaactttgaaatcttagaagcaacatcgtgttgcctcgctttctctagaaaccttcataaatattttcagatacatttgttgtgaacaaccgtagagaatcaccctcaactactagaaatctccccgattctcttttttcagcatccattacctgtttgcctagaggtccgtacttgcaatcatcagcgtttctgggtcttcgcgcgtc

SEQ ID NO: 133469 - DNA, 305 bp, Arabidopsis thaliana columbia
ttttttttttaatgagatggacttttaacatttattactagaatcttatccgatttttctttacaacaaaaaaatgaaaaaatataaagggtgtgaatatgatccacatcaaattcggatccgaaacgaaagaaattcccgggtcattggagctccgtgttacaaaaaatctccagatttctccatgactccaaggaaaatctcacagttcgctctaaaaaaaatattatctttgggattcaaaatccacatcttgatctctaaactctctcctcgtatcttcgtgcgtaattctcgtatcgtcc

SEQ ID NO: 133470 - DNA, 217 bp, Arabidopsis thaliana columbia
atctggcaagcattgttatctgtgcgagctagcagacgcactagagatgagctcttcctcaatctcgttatggagtatgtacccaacacaccacattgtaccgggttttgaagcactatactagttcaaaaccccagcggatgcctatcttctatgtcaaaactttacacataccaaatcttcagaggcttggcttatatccatctgctcctggtgt

SEQ ID NO: 133471 - DNA, 212 bp, Arabidopsis thaliana columbia
ttttttttttccatattttgcatgaggtggattgtacattaaaggaattaagcagaaagcccgacatttgtatggatgtcaactagctccggtagtaaattacaagaccaagccagagatctttgcatgattacaaagagagcaaaaaactagcgattctaaagaaacaaagaaaacaacagtgagaagagataagaagaaaacaccctgcc

SEQ ID NO: 133472 - DNA, 305 bp, Arabidopsis thaliana columbia
ttttttttttcagccaaaatccactgaaattccattaatccgtctgttataatttagatcctacatacacacaaaccgttggggttgatgcaaatttctaagagtcgttgatgttcgaacttatacgagcttgttcaaaccttgataagctcgtctagttctaataaacaacacaagactcgaacctagcccaagaagagacaagcaacccccaccacacaaatgtcagtaataacaatctcgtccatacacacaccgactcgaggtcattgattgtccgtgaacatgtggtcatgcaatgcgca

SEQ ID NO: 133473 - DNA, 304 bp, Arabidopsis thaliana columbia
cttggaagattgctttctgcaacaccggattatatcgagcgaaggtttattttgcgagaaccgggtggttagcaatcgcgctattacccctaccccttcgcccttttcttcgttgcatcatcaggaaatgcatcagcattacaagctggaacacgctgatgggtttaagctccgggtttatctttgcacgagcggtttccatcacatcagagctttttggaccaaacagtgttggagttaaccacaatatcttaatcacaaacataccgaatgatcatgactattggattcttggctgcattgg

SEQ ID NO: 133474 - DNA, 304 bp, Arabidopsis thaliana columbia
actaggcttctcgagctgcttaggaagagaaccctcaagaagattctcttgctaatccaagtacctttaggctctcgcatccgctgatttcagacggaatcaatacccgagaatccattccgtcctgccctaatgatccggagctgtcacaattcgccatggaaggagggattacaccggtgcgcttattgctgtagatcacaagcacttggagtgaactcaaattaccgattgatcatggaatgacgaagataattcctagcatgatcagcattcttaggtgtgtcatgtgctgatcttcctc

SEQ ID NO: 133475 - DNA, 309 bp, Arabidopsis thaliana columbia
ttttttttttggaattcgatttttgtttcatttcaaggacaataatatcattatacaaatatcaactattacatgtgagatatatagttattctctctaatccaaggtcatgtgaacataaaatgtatattattatataggtacacaattcatcgtccttcctgtatttctcaaatataagtctgatatttggtcctactgtctaaagagaatggtagtacatcaatcttcttctcaatgaagcttgattacattagttattctgtgagttgtaattcttcctctcatcattcattagtctggcatttg

SEQ ID NO: 133476 - DNA, 309 bp, Arabidopsis thaliana columbia
ttccaggccgcttctgactctggttattgatgaaggtgaaaatctggacaaagaaaacaacagtttgctagcaaatgaaactgcatcaccacccctcagcttgccgacttcaagaactatcaaacaatttgaagtcgatatgcaaattctcaaaccaactatcagtacctgagaacatcaactcccttaactatattacaggtcggtccggaacagcatcatatcacagtgatattacgctgagctagctgttactatagactagacgtacggagaaacattgccttcgaactgctgctgcttagagac

SEQ ID NO: 133477 - DNA, 310 bp, Arabidopsis thaliana columbia
ttttttttttaaacgttatttcatatatattttttcaaaagcataaacttttaagtttgagatttatataatttttaaacaagggaataatatgtatttttaggtatatataaggaaaattagggagagaggtttggtgtagctaaagtgaaatcaagattgggagtttcagtctctggtcttgtccctgtaagccttgacgaatctgaacgacaaccgttcgttgcttggacatctcgattcttggattcattctcattggatgaatgtctaccctgatgatgcttcgttcactgacggcttcctgagg

SEQ ID NO: 133478 - DNA, 311 bp, Arabidopsis thaliana columbia
ttttttttttcatatgtgttcagcgatcactctgtgttcttaccaaagctaacttgtaaaaatgagagggaggatatgtttctttgggcgcaatagtgattctctgttctttctccttcatcttagtaagatccttaaacgaaagaagggcgtgtttcttctggagtttaaagctttccttaatgactccaatggctatctcgcaacgtctggaatcagttggattcaatccctgcaactggaccggaatcgcgtgtacatctcagaactgaactctgttgactaatggatgatgattgacaggtaaccat

SEQ ID NO: 133479 - DNA, 213 bp, Arabidopsis thaliana columbia
aataattaattagaagaggagtgtcttcattggacaaggagttagaggtgggagagtaggaagaggaagaggttcaggtcctatctggaagacgcctttccagtccaacaaaaccaacaaggtggtcgaggtggtcgaggcatccatgtaaaccaagtactatacaaaaggaataaatattcacaataaatcacataaatcaatcatctatct

SEQ ID NO: 133480 - DNA, 213 bp, Arabidopsis thaliana columbia
ggaaaggtagaattcgaagaagagtattcaagaacttcattccagacgttcactactatcattcacgatcgacgttattcctccctcttcatcttcgtcttctcagacccattgattttctttaccacggagctggtgtttcaaaagagacgcgtcgggatcaacgtgctcaccccaaaagcacgttctgcttctgatatcagaggatgaaaa

SEQ ID NO: 133481 - DNA, 305 bp, Arabidopsis thaliana columbia
ttttttttttgagttcaaacttaatattaatagcgcaaaaggtccaaaatatagctcataacaatccgaaaagataagttttaaaaacccaaaagtgactcattgaaaagctgcaaactaaagcatggtttgtcctgaaactggaaaacagagcatagtattaactatcaagcttgttgagcagaaagtctcttcctggcttcctcaatgatggtacattaatacctttacctttgaggacaccatggcatttgttccttcacgttgtgtaccatttccactgttgcactctgtctgtggtctga

SEQ ID NO: 133482 - DNA, 308 bp, Arabidopsis thaliana columbia
gagagaattaacctacacactgaaactcgagttaagaaccaaacagaatccaattcaaccaaaccgaatcgaaccgaaccggagtttttatccaatgggtgaagcaagcgataggaaggaacaggagaagaagagaaacacggcgatgcagtcaaagtacaaaggagtgaggagaggaaatggggaatgggtatcggagatcagacttggccacacagcagagacgaatttggttaggctcttacgacactccgagagtctgtgcgctgtgcatttgctacctgccgtcatttgtctcacgcttgcta

SEQ ID NO: 133483 - DNA, 211 bp, Arabidopsis thaliana columbia
acccctcctggttgccgagtaacagatagtcattcgagaaattatctcacaaatcattcaccaattctctcttcttatgggagcgcttttccccttcacaacctgacttgtacttgaagatcagccgaagaagagaagaagaacaagaaaaagaaagtcaagaactacaagaacaagagtcgaagcgagttgggtttcaggtaagcctcgt

SEQ ID NO: 133484 - DNA, 311 bp, Arabidopsis thaliana columbia
ttttttttttggcaaaaaagaaaaggtttacatttgtaaacaaacacctttgttgttctgggattatataaagtgaacaatacattaaactggattatacattctttaacataagaaaaacagagagatcgccatgtatgaattttgtcttctcatttctattattaaacgatggctgttattaaaattaaaataaagcaattgtatatataataaatcaggcaaggcattcttgatagatatcctggacagctttttgaattgttctctgtagcttctcgatgatgacggctcgtgagcgtttctggtgg

SEQ ID NO: 133485 - DNA, 303 bp, Arabidopsis thaliana columbia
ttttttttttaaattccacaagaggttcaacagaaataacctcaaatgacttttttatttgggcgtgtttttaaaatactcaaattttccttaaaaaacaaaacccaatcaaaatccaaaacacaaatccaaaaggaaaatgaagaaaaaaacacttataatccgataatgtcaagtagaaaacggaaaaatccctagaatatatccaggaagatgcaacgttcacaattcacccgtcccgtccagctgctctcgtttcttgtatccttcacgtgagtcctctcgcatgctcctccagcttgc

SEQ ID NO: 133486 - DNA, 305 bp, Arabidopsis thaliana columbia
ttttttttttagagagaaaaaaaaattgaatcaaaaccaaagcgacagagtcaatggcagcattcagacaagggaacaagaacatggtctctccagtttctatcttaattatacgtttctcaaaaaaaaaaagaccattcctttacgaccttcttgcatccaaggcaacaaacataggcgaacgtaagagcttagtaccgtctgaactgccatcatctcacaaccctctttacttcgagagcctcacgattagcgtttgcagcataggactcatgttgggcctcaatatgcgcatgagctagctc

SEQ ID NO: 133487 - DNA, 206 bp, Arabidopsis thaliana columbia
ttttttttttaaaattggaaggaagcaaatgaggaaggaataggaactaactgtaattagtacatgagtgcagagcaactaacaatcatgataggacaaaaatgaagactagtcacaagaataaggaactaatgcgtaaggaagaagagttataagagactacgatgccttgattatgtactgacgagcaagcggggcctccatgc

SEQ ID NO: 133488 - DNA, 210 bp, Arabidopsis thaliana columbia
gagcaactcctcctggatctttgcctccaagttcatcaagcttccatccgttgagaggtacaccgcaaactctttcttgtcgtgtcaaggccggagttgtgtccctcttctttaccaagtcctaaaggctgcaagcatgagttgaggttagattaagggaaggaagagcagtgaacattcatatgttctgtggtcgatgcagggtctgtt

SEQ ID NO: 133489 - DNA, 222 bp, Arabidopsis thaliana columbia
agcaatcctgaaattcacgcaaacactacggttatgttgagctagacaaatctgccaaacgagaagtagccgttctttacctggaaaggtgcaccagagagagaacaacctgtacctggtatcgaatcaacaatccttcttatcacgtccgatggaaacgcgttaggctaaattgaatctctaaggagatgcatgcaagttagtgatggaactggcatctat

SEQ ID NO: 133490 - DNA, 211 bp, Arabidopsis thaliana columbia
gacactggtatcaaggacatggggagaactacatctgttctacttcgtggctccaaccagcttgtctagatgaagctgaaaggaagtttacatgatgccttgtgtgtggttaggtgtctagtgatcaaaaggttcttgattgcaggaggtggttcaccagagattgagctctcaaggcagctcggtgcttgggctaacggtgctacatggg

SEQ ID NO: 133491 - DNA, 210 bp, Arabidopsis thaliana columbia
aaccgttgtttggtgattttataatctcaaagagtgtggacaacgagatcctgttgtgggaaccacaactgaaagagaattctcctggcgagggagcttcagatcaactattaagataccgggttccaatgtgtgatatttatcaagttttcttgagtcctccacccaagttctgttgcgataggtaatcaggaaggaaaggtttatgtc

SEQ ID NO: 133492 - DNA, 202 bp, Arabidopsis thaliana columbia
ataagaacagttaaggtttgggatgttaggagttatagagttcctttggctgtgcttaatggtcatggatatgcggtgaggaaggtgaaattctcggccgcataggaggagtttgagagctttctgctctatgatatgcagtgttgctttgggagtatatggtggaagatgcttcgcttggcagggagatcacaacagagtt

SEQ ID NO: 133493 - DNA, 210 bp, Arabidopsis thaliana columbia
aaggaattgagaggaaggtaaggaaaaacaaaccgcacgtgacatgatagtgtggattgaagaaacgatatatccagttcatggttttgaagtctactcttacaatagttgtacagaccttacttgacacggatcaaaaaagccccactctattttggcactgtcctggagcgatatggccaagtttttcaaagctttgtcctgataagc

SEQ ID NO: 133494 - DNA, 213 bp, Arabidopsis thaliana columbia
agcgtgatatactgtagcaacaaaacttccgacgctaagagaaatggcaacgtcctctgttctgtccaccttcgctgcggcggcaattacgttgcaactaatctcttatctcctgcttcagcttcccctcacatgaaatacatttgacgccatcttgcgaattcgttcccatgaccaagcttcttgcgttaaaacaaagactaccaatccccc

SEQ ID NO: 133495 - DNA, 210 bp, Arabidopsis thaliana columbia
cagcgaaaagagaggccagcgtaggattagaagtcgagcggaaacgaagctgggtctagggtgtgtgtcccgtcactgtgcgactgatgcaatttcaatgacttttggatactgatgatgagttgccgtgtgtattccgtcgtctgtataggagaattgacggatctcctgctgcatgtttgcgttgattgcaatgtacgtgtggacaca

SEQ ID NO: 133496 - DNA, 207 bp, Arabidopsis thaliana columbia
ttttttttttgcttaaccaagtttggattcacaaaaaaaaagttgaaaatacaagcaagttaggtgcctaggaatttaacctgaagaaagaggatcaagtaccatacaagattccggaagtcctaaatctcaccaatatgttgttttactggcctacataaaccaggtaatattccgcaaaatacacctaaatcgcataagtaactg

SEQ ID NO: 133497 - DNA, 302 bp, Arabidopsis thaliana columbia
gcacgagcccagttttaattcttggacgatcagggagtggtaacagatacaagtgggtgtcacctgatgagaaggagatcatcccctacagtgaaaaaaaagagatcgaaaccctggcagagagggatgatttatgcattggtggtgacagcaattgaaatgctacaggctacatctgctgttttgcgagtcattccgtttgttaaggttttcgcagaggttgctccacagcaagagctgtctgcacttcaagcgtggcaagagtacttgtgttgtagcggcatgtgtcggcctgcgcctcg

SEQ ID NO: 133498 - DNA, 214 bp, Arabidopsis thaliana columbia
ccgttattaattgttgcttctccaattgttgatgttccttatcatatcttcttcctagctacatgcagcaggaatcagaccgatgaatgtacgtagggaaagaagatatgattcctgctgcatttgtcactgtccgggctgggcttctcttggaggagctaaaaatcattgggagatctctatgacttcagctccatcgtgcgaccttgtctca

SEQ ID NO: 133499 - DNA, 323 bp, Arabidopsis thaliana columbia
aagtggaatagtgggcctcgttttaggaaaatatggcttgagatggtccatcgaactctggaaagagcaggtcctgcttttatcaaatggggtccaaatgggcagccacgcgacctgatctataccccaaggatttgtgttcacagctctcaaagcttcacagtaatgctcctgagcatagcttcgcctacactaagaaaactatcgagaaggcatttgcgtcgtaaactttctgagatatttgaggacgtttgatgaggtgcactgcatctgcgacgtatgccagtactcaggctcttacgttcagtcagtatcagacagtc

SEQ ID NO: 133500 - DNA, 304 bp, Arabidopsis thaliana columbia
cggacgagtgaatctgatccgttaaatagtttggactttgttggtttacaatccgattcttcttcttcaaacccaagagttcggttttgcggaagtgcaatcaactaaaaccttctcgttgtcatcattgttctgtttgtggtcggtgtgtgttgaaagatggatcaccattgtgtttgggcttgttaactgtgtaggagcactcaactataagtattttcttctttttcttgttctacacatttttagagacgaccctagtgacttggtcttatcacgcacttcattcttacgtgatgagcac

SEQ ID NO: 133501 - DNA, 310 bp, Arabidopsis thaliana columbia
atatggctaaatctaaggttgattgctggcctggagaagccacgcatagttctatccagctgaagatgttaacagaacctctccccaacaggcgcacggcaaaaaaacccaaccaagcttcagagcttagcatttacttccagggttacaggttggttgattattcctttgcttggttggtttcaagggaaagagagttgtcttcctttaaagccagcttcggtctggtttgccttctgactggaccattcagatcaatgtgttctttggacggttaccagcattttgcccttccagctacatcttgagt

SEQ ID NO: 133502 - DNA, 303 bp, Arabidopsis thaliana columbia
ccggggaatccgaaaagcaaagcagatgcaaagcatgtcactgttgtttgcatgcactcactccactcgctctgctcatgctctttggtgctgtcaagttttcaaaacaataaaaaattataaggggaagtaaaaattgtgtttcaaaaagggaggaaggttatgaggtgttatgaaatgtaaaagagagatttagagattagatgggatatagtgttatgttttatgatatagtggtattgttaggtggagtttgagtgagatgttaagtagttagtagtgaggtaatggatttacgttgtt

SEQ ID NO: 133503 - DNA, 317 bp, Arabidopsis thaliana columbia
aagcttatagatgagattttagcactaaggaggcgcggagatgaggacgaaagctgcttcggggaaagccataatagtgctgtgtctagccagctttcttttgggccaggctcactgttcatgagtcgaactttgagtcgctctttacatacctgaagaagaagatcaccatctcacaaagcatttgtccaaacatttagagattcaaaaaggactgcgatgaacataaacgcaattgatagaaagcaatcagagacatataggagagtttcggactccagcgtaaatctggggactgtcactgcgtggtgcgcgcc

SEQ ID NO: 133504 - DNA, 310 bp, Arabidopsis thaliana columbia
ttttttttttaaccacactgcttccttctaacgacaaataaatgttgtccacaagcattgcttaaattcatttgtgttcttcaaaatttccaacctacaaaatcatttgtctctcccatcgcatcccatgtatgaattccaaagccttcctagtttgttttctcattggctgtctgtgaagtcagcatcgatcacatcatcaccatcttcctcctttacttgaagatgaatctcctcatcagcacctcgcctccgggaaggactgcactgacttcagctcaggctgttgttggctgcatctgcatccttc

SEQ ID NO: 133505 - DNA, 205 bp, Arabidopsis thaliana columbia
acgatttacgcaactacccgacgcatttttcccagcaaaaactgaaaaggtttgacaaatgtacaatccttttgagagagttcatgatagagcttgaaataataacactacttaccgatacatataagaatccaactccagagagtcatggacaaaaaaaggatggctaacataaataacaacaacaatgaatggcagagagaga

SEQ ID NO: 133506 - DNA, 304 bp, Arabidopsis thaliana columbia
gtagtctcgtgtcttatgacggattacgcgaggagacttctgtggacaggggttacaagagaacgcctatgtgcttttttgggccccttcagtccggttgagtggggttgtacaagaggctgatgatggttccctttgagagttggaggagtgaagcaacacggagaaggttcgtagaggatgggtgttctcgatcgcgggagactacagtggtttcgatattcccgtcacctatcgattacgtctggtcaacgaagtgcagtggcacgtcaaaggctagatcaatgctggtgctaactttaca

SEQ ID NO: 133507 - DNA, 227 bp, Arabidopsis thaliana columbia
acagctgcaggggcaagcaggggggagagagcaggggccgggcgcaatgtatcagtcactgcgcattatgcagtagcagactaaggttgcactggtcttttacgtctcctttgaagctgttttattgcgctactttgccaaataaattgcttagttgccagacaatcccgaaagctaaagctgtttgattgttatacacgttcccaatattcacgggaaaaaaaaaa

SEQ ID NO: 133508 - DNA, 244 bp, Arabidopsis thaliana columbia
cgagatcaactgccgaactctcagactcaggtcctgtatcagctcaggaagcatctggaattccctaaagctctgggaatcttggggaaattactatggagacttatgtcaaatccctgcaactgctcacatgagcatcacctgtcaaggtaattccatcacggagcttaaagtcatgggggacaagctttttaaaccattttggtatgtttgaatgggtcttcacttccaaatcacactctgt

SEQ ID NO: 133509 - DNA, 234 bp, Arabidopsis thaliana columbia
gtgaacatgtgaggagcaagtacatgaactatgactattgtactgatcgctctaagtccaaactcctcctagagaatgttattgaagtaacatatatacgttaattatcatatacgtataggggatttttaaatctactttttctaattaagaaacaaaaaaattactgcttacgagttacaagagaagagagttaagttatagtgaaaatataattgtgtatgaaaaaaaaaa

SEQ ID NO: 133510 - DNA, 276 bp, Arabidopsis thaliana columbia
ttttttttttgttttgttgtagctttaatttttttatgcttatggatttttgaagaattataagacaatcagtaaccacaaaaaaaacagaacctgaaaaattgtttctccaatgtcagaaacagagcaagaacagaacatgaactgaatgattcgttattcgtagtgatgatgaatctcctgctgcttcttcttgacatcacaggtgcaagcatcaactgaataagaagaagaagaagaattcaaagcaaccaaacttcctcttcacttgccccc

SEQ ID NO: 133511 - DNA, 304 bp, Arabidopsis thaliana columbia
agatttcgagagtttgaagaaggtttatttgcaccttgcggcgaaggctaatcccagaggaagtggtggatagagaggcagagacagttgaaggagtgagtcagcttatgggccaaccaacagaacaacttatggaagactttagcatcgtgacatgcgagtcaagcggaatgggtttggttgggaacaggacaaaaaacttccaattcgcctccaacgactggacgatggaacaggtcggatccaaacacgattttgcgaggttctttgctatagagacgtcgtgtggctatcagttttgaaa

SEQ ID NO: 133512 - DNA, 264 bp, Arabidopsis thaliana columbia
ttttttttttagtgaaatatttgtatggattttagctttgacccaataatatggtcatgtaaaaatgtgccaacgggctttacaaaagagtttatcaatttatatttcctctatttatatatatccttccaccttaattgaaatcctcttagtagcttttagagatgcgaggcattgctcgattgctttgtctctcatcgtaaagccttaaaaccactgccgcagtttcctcaattgcactctctgtcacttcaatcactggcc

SEQ ID NO: 133513 - DNA, 204 bp, Arabidopsis thaliana columbia
acggaccgtctgcatacacggggtttaattgtgagtaacatcctcgaaaccctttccttacacatcatcatgaacagacaatagagaactttctcccggagctctatggaacgagatttcatttccttattgctgtaatcggatgatcggaagaaaaacccgtccgctttggacccttagttcagaagctgccaggcgtgtgta

SEQ ID NO: 133514 - DNA, 210 bp, Arabidopsis thaliana columbia
gaggaagttgagaaaaaacgaactcttatggctaagcttcgtgttggggatgttgtgaaatgctgcatcaagaaaattacctattttggtattttctgtgagctagaaggtgtccctgcattggttcaccagtcagaagtttcatgggatgcaactttagaccctgcttcatatttcaagattggtcagattgtggaagcgaaagtgcac

SEQ ID NO: 133515 - DNA, 241 bp, Arabidopsis thaliana columbia
ttttttttttgcgctcaaattattattacaacgttccaaatatatgaatacaaagaagagtgcagagatggttgttcaaaaaaaaaaaaaaagaagagtacagagataaattacaaaaaagcagagaataagtagcaacaataatataagatgaagtctctcaaatccagaaatactcacaaaagagaaagagagcagatcactcaaaaatgactaccacttttttcataaactttttttt

SEQ ID NO: 133516 - DNA, 205 bp, Arabidopsis thaliana columbia
gagaggagcaaagaggagaggtaaggggaagagaaaaaggaagagattgagccggaagctgagaatccggagacggaagcttggcttaggaagaataggaagagtccgtggtcgaggaagaaggaggtggttcagggagagttgacggaggagcagaagaagtatgcggaggatcatgccaagaagaaggaggagaaggacacaa

SEQ ID NO: 133517 - DNA, 201 bp, Arabidopsis thaliana columbia
acagcggcacgagctcaaatcatccatctaccttctctctagtttctgaaaaatcggtgaaacaacacaggaagcaatatggcacttacttggactcataaagacggggagaaattaggttcatgagaatttggaggaactaagcatagcctgcgttgattatatagctgagatatcagaaacatcaattaagactagtgc

SEQ ID NO: 133518 - DNA, 206 bp, Arabidopsis thaliana columbia
tcctctttcttccataaccgaccatgatcccggtgcagtgaaacctcaatcgccttttcactctgcgttaggaacacacgcggaatctttaggcaacaaatcacccggtgtgtaccctggacgtcaaacacatatagtggagacgtagcatcaagacaatctgttgcaatctcacatgtcgacacacagcgcgatctgacctgagg

SEQ ID NO: 133519 - DNA, 209 bp, Arabidopsis thaliana columbia
acgaggattaatgatgcagctggcagctcaagtggaaacacgatgaccccacaatgttcttcaatggattcactgtaagctttcagatggtaaaggtaaaaagagattaagagttaactatgctggtttaaaacaaagagaaaaagctttattccttacatagcatgtttgctcggtggtgagaaggctgattttgctagcacaatttc

SEQ ID NO: 133520 - DNA, 215 bp, Arabidopsis thaliana columbia
ccaaagagccaaaaagaaagtttctcgtcttcggtctctcatagaaggatcatcggccattcaaaaggctccgacaagaactcagtgaatttaaagaaatttctgaaggtggtaagggccctgccaccgatccgcccaaaggaggtggtgattaccggtgcctacctttgtttcctgccctgtctgccaccccatgtgtgccaacgctcaccgga

SEQ ID NO: 133521 - DNA, 234 bp, Arabidopsis thaliana columbia
aatcaatgttttggttatatttcattactagcaacccacccacaaccacatgacaatttacaagagaaaaacaaccaccaggtttggtttgtatacatatataacttaggttgtgttacaacttaaaacatcattgcacatcctaaaaatttcagcgaccagaatgtgtttttgattgtgcctctttctttatccacctcaagtaaccatcattcactataacttacccaatct

SEQ ID NO: 133522 - DNA, 201 bp, Arabidopsis thaliana columbia
aaaagataataaagtttctttattaatctggtaaaaaaggataaaacccgtcaaagagagagaatgtgtatacctagaggagagcagagattgtttcgcagagaagaggaaactaaggatcagtcgcaggtttgcaatgaaatcttcatagaggatatctctcaacagctaggacaggaagtgtctcgagtattggaatta

SEQ ID NO: 133523 - DNA, 321 bp, Arabidopsis thaliana columbia
ttttttgtataaacactattattgtgcaagattagaaaaaacagttatgtataagatacaccaaacacattaaaaaataaaacaacaatgagaagatttttaattaagccttcctagttatgacttcctttgtttaagaacactaattaattatttgttgatttacatttaatttatttatctatgtgatcttctatattcacgttctgttcaatgaagttcttgtaccatgtagctgattgctttggtgtccttttcaaagttgtaaaatcaacgtgggaatagcccaaatcgaacctgtatccgtacaaccatttcaaa

SEQ ID NO: 133524 - DNA, 321 bp, Arabidopsis thaliana columbia
  unsure (1)..(321): unsure at all n locations
ttttttgtcataaacaaaaactctcttttatatttgtctgtttcgattaaagatacaaattaaaagatgaccacttaaaacccctcttttctcttccctactaaaatcttgtttttttcttctgatgaataatgactcagggtttataataatgttatgactatgtcacatgtatataatagggaattacacaaggggttgatttcactgcccacctgtatcatcttcagcagatttcttgttttcaggnttaagctcaaatgtcccntggttcgatcccctctttattgtacacgcacagctcgttttagnatttctttc

SEQ ID NO: 133525 - DNA, 321 bp, Arabidopsis thaliana columbia
  unsure (1)..(321): unsure at all n locations
gagcggcgtcaaggctttgaggttagctacttgaacattggtggtggtttagggatagattattatcatgccggcgctgtccttcctacacccatggatcttatcaacaccgtaagagagctggttctttcacgagacctgaatctaataatcgagccagggagatcactgattgcaaacacatgttgtttcgtcaaccatgtaactggtgtgaagacgaatggaactaaaaacttcatagtgattgatggaagtatggctgagcttatccgtcccagtctttatgatgcctatcagcatattgagttggtctctnctaca

SEQ ID NO: 133526 - DNA, 253 bp, Arabidopsis thaliana columbia
  unsure (1)..(253): unsure at all n locations
ttttttaatatcatccagctccatatatatagcaaagaccgtttgattcaagagcataatcattatataaaacccatggtcataacangataagtattaagacatgtacataagaattttgacagtgtataaaaagggggtaagcccgcctttcacatatataacttaaacccccgacttatatgttacctgggcactatcatctttcaaacagacaagattgtccttcaagcaagagagtnctcgncaatcg

SEQ ID NO: 133527 - DNA, 188 bp, Arabidopsis thaliana columbia
  unsure (1)..(188): unsure at all n locations
ttttttattaaatgaaacaaataagcaagnaactctcaaaactagaagatgaaaacactctgggttctttttttgttgtagtcaaattacaaataaaaccnacataaagnttcttttattaataaaaactaaaaagnntaaattgcgntggttatttggtagggcttatnagntaaagacagtttttt

SEQ ID NO: 133528 - DNA, 333 bp, Arabidopsis thaliana columbia
  unsure (1)..(333): unsure at all n locations
ttttttgagcacggctnaagctatagttcgaanagctatggcagctggagctcccccccgggccatggggttaancgggatatcactcagcataatgttaagtgaccggcagcaaaatgttgcagcactgacccttttgggaccccaatgggttgaattagcggaacgtcgtgtagggggaaagcggtcgaccgcattatcgcttctccgggcttggcnagcgggaaggnttgtcaacgcgtcgaaacnttaccgcttaccgttttaacattcccaattataaaacaattttaagcncaatttaaaaacaattttagtcgactaaaaaattgg

SEQ ID NO: 133529 - DNA, 220 bp, Arabidopsis thaliana columbia
cggcacgagatctcttatatatcgtcagccaaagacttcaagttctctagcttaccaatttcaccccttttctctcatttcaataaaaaaaaaactacccatttcatcctcggcgagtcgctcttcgaacacatttcacattataataccaatggataagctacagaagatgatctccgagaagtcggtagttatctttagcaaaactcatgttgcatgt

SEQ ID NO: 133530 - DNA, 202 bp, Arabidopsis thaliana columbia
gtaccgggaccttcgactgggagtcaaaaagtatattccaggcgagctccggcgagacgcataatgaggtttcaatggtgaggaatcaatattaaaaaagttggtaatgcatcgttttttttggatggacttcgaagagcagagctttcgtcaaaatattgcagtcgtggaatgaagcgccgttcgctttggtgaatttact

SEQ ID NO: 133531 - DNA, 219 bp, Arabidopsis thaliana columbia
gtgttgtatggggaatggatgttggatcgacatgggacgaagctagaatgcaggctgctgagagagcactgtccagtgtgagatcaatgcttggtcaacctctgcataaacgacaaggatctccacgatcatttggtgggatgtcaaacaagcggattaaagccggactttcaacgggtctctgcaacgggatgccatcttcgggaagatactcttaaa

SEQ ID NO: 133532 - DNA, 420 bp, Arabidopsis thaliana columbia
agagccatagaagctgcagctgatatcttcggagttgattccatagcagcggatatgaaggatcaaaaattgacggtgatcggtttaatggatgccgttgcggtggtgaagaagttgaagaaggttggtaaagtcgatttgatatcggttggaccggcaaaagaagagaagaaagaagagaagaaggaagagaagaaagaggaaaagaaagaggagaagaaggaagagaagaaagaagaagaacctaagaaataagtgactcgaattgctattaaaaccctaaatttttgtcatattgatttcataattagaacgctgaatcattgaataatttaagatgtaaaattaattgttcaatacagattgtaataaaagctaagtatttgaaacttttattcttgtgggaacacaaaaaaaaaa

SEQ ID NO: 133533 - DNA, 244 bp, Arabidopsis thaliana columbia
aattcttgagcatagctttaacatgaaacataaatggaagttaacattgctaataaaaggttgaagttatgtatccaacaacaacctcaaggttctcaaaagcttaatttaaacactccctcatttgcaattgcattacatgcttagattgaagttatgacataagaactacgtaaaagttgagaagaaaattcgtcagatttaacgtggacttagttcttctatgccttggcttcaacagata

SEQ ID NO: 133534 - DNA, 249 bp, Arabidopsis thaliana columbia
ttgattttgcggatctatctactctggaacaaaggagacaaaaggcattttatgcttgtattgtacgtctcgcttacgttaccagatttttttatagtttttgtaaggttagtttcagttctaagcagattctcccaaatagttatatgactgtggtctctctctctgtttttggtctttcagtccttatgtctgtctgttgctgttggcaacgaggataataatagacctaaatgattaaaaaaaaaa

SEQ ID NO: 133535 - DNA, 201 bp, Arabidopsis thaliana columbia
ttttttttttgacagagaggaaacaattcaccgacacacatgagacaacaactaagtaataaaaagaggaattaagaaacatgcaaaaactgataaacaatgaaataaggaaataaaaaaacataacaaacaaacaacaaaccaagttaaattttgtaccttttgctgggaattccgccggttgggaggaaacttgctact

SEQ ID NO: 133536 - DNA, 207 bp, Arabidopsis thaliana columbia
ttttttttttagaaggaacttctctctttcgattaaagaatcaatccgtgttgttgaaaaggttgaccacacaaaactaaaatgtaaagaatcgaacaaacaaacctaaattcacacctactgaaggaaaggcaacacaatccgagaagaaagaagaaaaatgaaaaactaaaaaggtctagttattcataccaccagttgtgataa

SEQ ID NO: 133537 - DNA, 210 bp, Arabidopsis thaliana columbia
ttgaaagaggagttttattaggaagatgaagagtgcattatagtagcatataacattcaaacaaaggccaaagttattattgaaaccatataacattatttactataggtttatcatataagctactctagccgagaccatctccgatacgatatttagacgtcacgtatttccagaggtccagacgtggatcccgagccaatatcttat

SEQ ID NO: 133538 - DNA, 232 bp, Arabidopsis thaliana columbia
gattaaacgggttagctgttttaaacgtagccgataaccgaatctccggttcaattcctttttccgttagggaatctcctagcttaatgcatttagatcctccgtaacaacttaatctccggtgtaatcccgtctgacgtgggaagattaaaaatgctcagcccggtgcactttgttattccggtagtccgaataactggtttgttttcgttgaatccttaagccaatatct

SEQ ID NO: 133539 - DNA, 217 bp, Arabidopsis thaliana columbia
agcgcgaaagagctttacgtgtataatacttaacaggagttctagatgatatatttcttagccggaagacaacagtatttcataggtacagtaacagctatactggtcaccaaaaccacgcagagtgaacacaagagcaggacatgtatcaatcgtgggttcaactctgggccacccgatgtttttagtacgtcgtcctggaataaatcaccccgca

SEQ ID NO: 133540 - DNA, 215 bp, Arabidopsis thaliana columbia
gagaaaccgattcaagaaacagttgacgctgccgtggaatccaagaagcagaaggcagaaacaaccgccggcgaagaaaactcccggttaacgaaaaaccaacaaacgggataagcgaatatcaggagagggaattgcatgtccgttcatagtcatcatcagtagctacaattacactcgttcgtatctttgtagctacaattaccttcgttcgt

SEQ ID NO: 133541 - DNA, 256 bp, Arabidopsis thaliana columbia
tactttcttgtcgattccccatggaaaagagaatgttgtaactcattaaaataacgaaaatagcttttaagtatttctgtacattttgtaaatataaataaacattttggagattggactctaaagataaatagataatagtccccaataagtagtatttacaacagcaaatacaaattttaccgccaaaaaaggaaggaaagtaagaagaaaagcttcaaggatgttgttccactgttagctcttgtattagccg

SEQ ID NO: 133542 - DNA, 227 bp, Arabidopsis thaliana columbia
taagaaaatacaaatcagatttatgaaagagattcttacaggaaaaccatgttcacctagggaccaagataactaaactcccttatagagcgtaatcagtattatctacactatcctgatttgtaaatcatccatataccttatttcaacagggaggaagctcttcatcgacaaccggagtgtataagagtaatgattcagctttcggtatgtggttagccgccagt

SEQ ID NO: 133543 - DNA, 239 bp, Arabidopsis thaliana columbia
ttaaccaaaactaaatcaacatatgaaacaaaaaaaactgagagatgttgatatcacaagtcactagaaagaaatacaatcgcactaaaccacaaataaagccacttaactgcaatagcacatgttgcgaaagggagtctagttcaaaaccattgagcttgcagaacacatgaaaaaaacgaacaaaagcttagatagagcaatagagtgttctgggacctgttttgaagaactaccac

SEQ ID NO: 133544 - DNA, 272 bp, Arabidopsis thaliana columbia
catagagaataagacaaaatctccagaaagggttatcactgtggtacaagggtggacgttaacaaggctacaaagcatctcaaggtctcagggagtagcaacatgatcagaattacaataaaagaagtatctcatttcttcgccactcctaattcatcaattcctacaagactcagacgctacttggtaatcacgtcccagcgccatatagtccgtcctcgcagcaagcaagaagtcgtgacttccatcgacagacatggctgttgctgatt

SEQ ID NO: 133545 - DNA, 209 bp, Arabidopsis thaliana columbia
gagtaaagagcactaaggggaaacagattgaaaagagtttgaaaaacaccatcatcgttcttaaaaatcgtcttaccaactcaacaacataaatcccagataaatccaatacaacgagaactacgacctctttgccctagatataagagactttgcgatgacgagagcatcattactgcactagcgccagccacttggtgcgttatcga

SEQ ID NO: 133546 - DNA, 202 bp, Arabidopsis thaliana columbia
acaagactggtgttaaaagtttaaactcttgttttttgattcttatcaatttcctaataacttgaatgacgagaatcagaatctcataacaaaaaacaaaagagacggtttcattgagattgaagaggatgtggttgaagtgctaagatatggcttggagaagagaggtgcacatcttcacccgtgttcacctccgactcca

SEQ ID NO: 133547 - DNA, 208 bp, Arabidopsis thaliana columbia
atatgaaactttgaaaattaactgcaacaaaaaactaaaaacctgcttaaactgcataaaggataagatgcattgattcagaaatcacaagcatagaagatattagacaacaacgtgtaaaattgtcaaaacaaggaaaaccagatggtaaaagccgacttttgacgcatacgcaatcatcgctgcccttaaccttcatgactgcgcg

SEQ ID NO: 133548 - DNA, 218 bp, Arabidopsis thaliana columbia
agaggaatgtgtctatgatatgatacaaagaaaaggatacacaagcgatgacgagctggaggaactggaattctcctcttacatccatcattgaaaacgtctcgctgtcacagggcaggaagcttgagaaaaatagggccaggggatgacatttcaagatatgaagcttcttcgggaagatgatggtcattgatgagtggattgaagtcaatcttggg

SEQ ID NO: 133549 - DNA, 229 bp, Arabidopsis thaliana columbia
ttttttttttctgactacttttatggatattttttatatagtttaggcccataaacttaatgccaaggcccatgaaacctgtttgatctgcattcgagtacatttctccgagtaaagaaaacaagagagaacagttttatgattgattgatcttaagttcttaacattctacatgaatatacacaaagaggctgttgaatgctctgtttcatcatcatcacgtatttga

SEQ ID NO: 133550 - DNA, 409 bp, Arabidopsis thaliana columbia
tttttttcgggaataatttgagtttttagattctgaccacagagctaaatccataaagtcctttagaacgttttggtgctagttttcttatggttcatacaaaacaaagtagcaaagctgctttatacaccgtgaaacacacacataaagaaagaaaaaggtcagagacaagacacttttgtaacagactcgagagtgtttgctactgcttagtggaggctgcgcatgataccgtgtatgtatcctccggtcataatgaaagacatgatcgacacaactccagcaggaaatatcttcttcgaacgcatgtatcgggtttcccatttacgtacatttaacggcacccgccatcactaacaccaacggttggatgcaagaacaggttttgttgggagctgaactgaagact

SEQ ID NO: 133551 - DNA, 408 bp, Arabidopsis thaliana columbia
  unsure (1)..(408): unsure at all n locations
gagaaacgaatcagcgggactttactctcacttatgatacaatacgtctcaaatccggatctacctcagcctctgaaaaacgtcgactttatcctaaaactcccggttgatcccacattgcttaaggtttcgcctaaagcaatactgaacagaaccgatcgagaactgaaatggcaaattccggagattcctctgaatggaagtcccgggagactaagagcacggatgcctatcgattcagataacagcgaggaagaaccagatatcatctgctatgtggaaattctcggtacagggaaattacttctctgtctggtatccagtctnacgtggcagctgctggaggggaaatacagnttntttggaggtagatcacaggtaacgaaaccgggagttntatatgtggca

SEQ ID NO: 133552 - DNA, 310 bp, Arabidopsis thaliana columbia
  unsure (1)..(310): unsure at all n locations
gagaaagaatcatgctccgtgaaactcagatgcgggcattttattctacgactgaggagatctcggctttgtttgcaaagcagcaggaacagctcaagactatgcagagaactctagaagatgaggataattgtgacaatacttcactagatattgatcttaatccaataaacagaagtcccaacagagctaatacgcagggagataaaagagcaacttcccatttgaattttgctgccagggcaagctcgtccacttcagggncaaaggtctaccagaaatgaagttgtggatacgtcatgtgaggatg

SEQ ID NO: 133553 - DNA, 409 bp, Arabidopsis thaliana columbia
gagggggaagctcttgattatctacataaccaatgttctaatcctgtgatccacagagatgtcaaatcttccaatgttcttctctcagatgagttcgaacctcagctttcggatttcggtctttcgatgtggggatcgaagtcttgtcgatacacgatacaaagagatgtggtgggtacatttggatatctagctcctgagtactttatgtatggaaaagttagcgataaagtcgatgtatatgcctttggagtagttttgcttgaactcatttcaggaagaacttctatttcatctgatagcccaagagggcaagagagtttggtcatgtggggcaaaaccaatggatcgaaaaagggcaatggcaaaagagctcttgggatccgaatattggcggtactttcgacga

SEQ ID NO: 133554 - DNA, 409 bp, Arabidopsis thaliana columbia
gagcctgtctagcgttgacgacaccaaaattgaaaatttggcatcatttgcgaaacagagagagatccattcaattccaaaaggattctcttttgggaaaaccctaaatcgacccaccaaatttggagactgtgattgagcatgagcgtcagaagttgatgaacaaagtcgacgaaatcgaggatttcagattcgaggatctcgaaatggagacggagaaagataaggaaaggatgatgacgccgacgacgagaatgtcttattcatcttcgtcgtctccgtctccatcttcggcttcatcatctgctgcgtcctctctcgctggccaagggcaattcgagcatcttctgcgcatagagactcttctctttcttctggcttactcgtctccttcttctggctcctgttc

SEQ ID NO: 133555 - DNA, 409 bp, Arabidopsis thaliana columbia
  unsure (1)..(409): unsure at all n locations
gagaaccccttatgatcatcatcgtcatcgtaccgattcttttcactcttcttcctcgcacgcgtcatcttcccaagcttcactctcgaactatatggctcgaggccttcaagattgggtacaagatgatttacacgatgagacgtattctcagagttcttcccattcagggtcttactccaacctcaactacatagctgttgatgagtacagctcccaatctcctgctatgagcagaactcacaacatgacgaggttttgccccgaagaaagctctcatctacagtcagggacaagccaacgcgtatgcagcttccagttcaactaacagaagcttggcttcagacaaccggcacacttacaaggaaccgattcacttgtagacgtggcagagacagttactggcanc

SEQ ID NO: 133556 - DNA, 405 bp, Arabidopsis thaliana columbia
  unsure (1)..(405): unsure at all n locations
actgataagagagatgggaatggaacgacaagagtnataaattggtgcggatgcgttgttcaggatcctnatcctgcggttcgtgctcttggatttnttcctgaggaaggtcatggtgtctatgtcacaagatggtgtcacgggagtcccgctcaccgatatggcctctacgcgcttcaatggatcgtggaagttaatgggaagaagactcctgacctaaacgcattcgcagatgctaccaaggagctagaacacgggcagtttgtncgtattaggactgttcatctaaacggcaagccacgggtattgnctctnnaacaagntcttccnttaatgggccggctttgggnaattnaagggttcgaccccagaaaactttttnttttngngggngaaaatnttttt

SEQ ID NO: 133557 - DNA, 227 bp, Arabidopsis thaliana columbia
  unsure (1)..(227): unsure at all n locations
aaaagtttactaaaaaagaatctggggaagtaagtnagatgaaggaagaggaggagatcggaaaaccagcgaaaccaaaagccaagaaagatgttgctcctggnaggttgattganacctatnctgcacagtgcgataactntcacaagtggagggtgattgatagccaggnggaatatgangatatcagangtaaaatnctcgaggttccttttaactgtcagaag

SEQ ID NO: 133558 - DNA, 404 bp, Arabidopsis thaliana columbia
  unsure (1)..(404): unsure at all n locations
tggtaatgagtgaaatgttagaagttcacggagaagaagaagctgaatcctcagtgacagtaacatttaatcagttttnagccatgtncgacgatccaaattggggatttggtataatgtctacgatccttaaactggaggcaaacgatagaaaccgtcatggaaaccaagtttncncggtttgtnggtacccggtaatcggttcccggtttaaggaagtgaaagcccggtttagtttgtntaaccagtgttacagtgaagggaaggttcctccttcgtttaaacaagaggaatacaagtnccgtgaatatgagagtgaagctgaagccatgnaaagctaagtntgtatgtttctcgntgcaatctcataaaaagncggttnccncttgnttgnaggnccaagg

SEQ ID NO: 133559 - DNA, 332 bp, Arabidopsis thaliana columbia
  unsure (1)..(332): unsure at all n locations
ccaactcaaagaaagagatcagaagctatagctatacaccaaaactaggtatagagagagaaaccctacaaaatcaaaaggaagaagagacgnagatgaagaagatccagcttggatttcgttgttcatcattactactctctttcttcttctagctagctagttttgacagcaaantanggagcaaggaaaagggtcaactnaaaaaagatcttgttcctttaggtcactccttcttctttttttttgatnccaatttccnccattggantcattaggttcatggggtcccagtancaaatcttnaatnggttcncaaaggntttttnacc

SEQ ID NO: 133560 - DNA, 207 bp, Arabidopsis thaliana columbia
  unsure (1)..(207): unsure at all n locations
gatagatgcagtacaaggagtgccaaaaatcgtcggtctcctgataggaggacacaacaagacagtggaagcagaggagggagtttntnttccaaaggggaagaaaatgaaaccaccaaaacctcttctaattcctntnggaaagtacttntcccgncaaactcgactacaagcacaagcagcggacccatnttcatccagcgngtt

SEQ ID NO: 133561 - DNA, 377 bp, Arabidopsis thaliana columbia
  unsure (1)..(377): unsure at all n locations
aaaaaagaaaacacaaaaacaaagattataatggcttcctcaaccatggctttgtcctcccctgccttcgccggaaaggctgtgaagctgcngcatcaaatgtcctcggaagcggccgtgtgaccatgaggaagactgtngccaagccaaagggtccatcaggcagcccatggtacggntctaaccgagtcaagtacttgggtccattctccggcgagcccccgagctaccttaccggtgagttccccggtgactacggatgggacaccgctgggtctatccgnccgacccaaaagaccttttgccaangaacccntnnagctttgnaagtttttccnaagnaagnttggggccttttttnnggggcctnaagtttt

SEQ ID NO: 133562 - DNA, 518 bp, Arabidopsis thaliana columbia
  unsure (1)..(518): unsure at all n locations
aattccatcctaataattttcaaagctttaattctaagaaataatatctacaagaaaatattatctcatgtatggagactaccggagaagttgttaaaacaaccaccgggagcgacggaggcgttacggtggtgagatccaacgcgccgtcagacttccacatggctccgaggtcagaaacttcaaacacacctcccaactccgtcgctcctcctcctcctccaccgccgcaaaactcctttactccgtcggcggctatggatggtttctcaagcggaccgataaagaagagacgtgggcgccctaggaagtacggacacgacggagcagcggtgacgttatctccgaatccgatatcatcagccgaccaacgnctttttacgtcatcgatttttgncggcatcgggnaangtggcaaaatgaaccagaacttcacttcaagttattnatcaggcaaagtccaggtgngattnggtnatgnntcttcttncgcgtatttngcgattttngggttagna

SEQ ID NO: 133563 - DNA, 541 bp, Arabidopsis thaliana columbia
  unsure (1)..(541): unsure at all n locations
tctacttcaataaatctccaccttactttaagaacaagaaaaacacagtattaacaaatggcaggaatcaaagttttcggtcacccagcttccacagccactagaagagttctcatcgctcttcacgagaagaatgtcgactttgaattcgttcatgtcgagctcaaagatggtgaacacaagaaagagcctttcatccttcgcaacccctttggtaaagttccagcctttgaagatggagacttcaagattttcgaatcaagagcaattactcaatacatagctcatgaattctcagacaaaggnaacaaccttctctcaactggcaaggncatggcgntcatagncatgggcattgaaattgagtcgcatgagtttgncccgttggtcaaagttgtttggggcaagctttaagctttgttggttgccccaggcaaccgttntnnngagaggntagctgccagnccgttttcggcaaggttggggccagnttggtntgccctattggggntaaatccggtaaatttggccnctgnanttc

SEQ ID NO: 133564 - DNA, 456 bp, Arabidopsis thaliana columbia
  unsure (1)..(456): unsure at all n locations
aggaagaggatggatganttgcttaatcagtttnattgtcccgtctcctctatctnctccaccaaaaatcagaagcacaccacagataatnacttctttnagagcgctgagaaaatctccttctnctttnaagaaaaagcttttggtgatgatgggaaattgangcaacccaaacaactctctataaacaaagttgggcatgcactgcatgancttgacccattgtataaggatttcacatattcgtcaaagttttcaagtttggcatcatccttaggttacaggagaccagttgtcatgcagtctatgtatatttccaagcaacctggaattggaggcgaagttgtgccgaccaagntaattctttngtgtacacggntccacagagttgtacctggtctctggattgcccttgaaggttctccattngttaatgggttgnntttnggnnattcc

SEQ ID NO: 133565 - DNA, 530 bp, Arabidopsis thaliana columbia
  unsure (1)..(530): unsure at all n locations
tcttaaagcaactacacaaatcttgaaattttctcatatttnctatttactatataaacttttaatcaaatcaagattaactatggctgaggagtacaagaacaacgttcccgagcacgagacaccaacggtcgcaacagaggaatcaccagcgacgacaacagaggttacggatcgtggattgtttgatttcttggggaagaaggaagaggaagtgaaacctcaagagacaacgacgctcgagtctgagttcgatcataaggctcagatctctgaaccggagttagctgcggacaccggaggaagtnaaggnggacaaggttacttctgcttgnagggngtttcaaggaaaagacccccgggaagnttnnggngnaccaagcctngtggtcatccgaaaagntttaccgttcccaacagttttttttcctttttnggngcgntttaagaagnttttgggaaaaaangggggngatggangaagtcnctttttngggggggggggttatgaaaagcctttttggggaggc

SEQ ID NO: 133566 - DNA, 432 bp, Arabidopsis thaliana columbia
  unsure (1)..(432): unsure at all n locations
aagagaattgataataagatacgttagttcctccttgtccatctccaaggtggtgattccacatccaccatgacggcggatcaagaactacaaatcattgttcggcagggaaaagaaccaaatccaacagttcaagatgaaagaaattcagtcagtngcagccaagcagaagtatctcactctaacacatacaaaacgggtggctcagggtgacttttatatacattctttgtcatttaaggccaaccagttgctnnaattttgggcagagtttcttttgcaaccggnggaaccagtaattggttagcaacggtagttcaancttntttggctttccngggctancttccatattanaaanctttgncaattttaaancacatgcaacaacttgtttggggntgggaaaaagncccctnnccttgggncccc

SEQ ID NO: 133567 - DNA, 529 bp, Arabidopsis thaliana columbia
  unsure (1)..(529): unsure at all n locations
caccaactcaatatggctaccaccactgcagcagcagcctcaggtatttttgggatccggattcaagatcctagacctggaaccggtagggtccaagcccggttcgggttcagtttcggaaaaaagaaaccggctccaccgccaaagaaatcaaggcaggtccaagacgatggagacagactagtttggttccccggcgcaaacccgccggaatggttggacggntcgatgatcggagaccgtggatttnatccgtttggtttaggtaaaccggctgagtatcttcagtacgatttcgatggacttgaccaaaaccttgccaagaacgtggcgggtgacatcatcgggattcatccaagaatntttcggngtcaaaccgnnggcgttttagccgtacacttaagtttttnggntccaacgggttaanggatttaagctgtccatggaggtggccatntttgaactttnggggcattccntaggggttttaaggnttcntgaaacncgnaagtggattngngnngtnttg

SEQ ID NO: 133568 - DNA, 520 bp, Arabidopsis thaliana columbia
  unsure (1)..(520): unsure at all n locations
agcgtgaagattaactatgaggaagaagatgtttctattccccatatttatgtctctcctatgaatggggtcctcgctgtctcacactcgcctatcgatgttaacccggaagagtttgatagctatctgaactctcttgataacttgatgcagcaacctccagaagaggttgggcgagactcgtctgtncttgttagtgtaagctctccaatgagagaatacgaatgggctgaagcccgaatgaagatctcatctctcctggagaaggattttactactttnttcctctccaaggacgcagcagagatagcagcattagcaactaaactaaggaaagatccaaaccttactgctgaagagatagttaggttgaagctgatggaagagattccgaccttcagcgagtgttccaagnggacaaagggggtgnttaagagcagataggtcttctttctntggactaacaaagccaggtggangttaattcggntcaggccttaggaaactggggtcccatgng

SEQ ID NO: 133569 - DNA, 395 bp, Arabidopsis thaliana columbia
  unsure (1)..(395): unsure at all n locations
agacgatgacgacattcatggctcctcctccagcagcgacttcccttgccttccatcctcaagacaataatataattnctatcggaatggatgactctnctattcaaatctacaatgtcagagttgatgaggttaaaagtaaattgaaaggtcatcagaagagagtgactggtttagcattctcaaacgtgctaaatgttcttttttccnctggtgctgattctcagctttgtgtatggggcatnggatgggttgggaaaacaagcttgcaaaccaggtncaaatttccaaggcggggcatttancccaaatnccactttgctncattcaacggggttcnagtttccatncaaggnccnggttccatggnncttttttggcccatggccanccca

SEQ ID NO: 133570 - DNA, 491 bp, Arabidopsis thaliana columbia
  unsure (1)..(491): unsure at all n locations
agactggcaaatgggcgacatcatttacacacttaccaacagaaggtggtcagagaagtgtatctcttatgctgaaagtcacgatcaagctcttgttggtgataaaacaattgccttctggttaatggacaaggatatgtatgatttcatggcagtagacagaccatcaactcctcttatcgatagaggaatagctttgcacaaaatgattaggcttataactatgggattaggcggtgaaggttacttaaattttatggggaacgaattcggacatccagaatggattgattttcccagaggcgagcagcgtctttctgatggtagcgtgattcctggnaacaatttcagttatgccaaaatgccgccgcagatttgatctnnggggttcagatttntcagataccccggctncaanaattttnttcagnaattnaccantttnnggntttcggtcgagcnngtnggggatngtttcgaaanggggtncg

SEQ ID NO: 133571 - DNA, 361 bp, Arabidopsis thaliana columbia
  unsure (1)..(361): unsure at all n locations
caacaacaaatcttaaacgttttactttgtgctgcactactcaacctcaatggccgcctcaacaatggctctctcctcccctgccttcgccggtaagncgtcaagctttcccccgcggcatctgaagtccttggaagcggccgtgtgacaatnaggaagactgttgccaagccaaagggcccatcaggcagcccatggtacggatctnaccgtgtcaagtacttgggtccatttctcttgcggattaaccgagctaccttacccggagnagttcccgggagaantacgggntggncaaccgcgggantttcagntgacccggngacatttgnaangaaaccgtngaactnggaagttattc

SEQ ID NO: 133572 - DNA, 509 bp, Arabidopsis thaliana columbia
  unsure (1)..(509): unsure at all n locations
ccggtctactttcgttggttcgggtcaatatgcggctcactggaccggagataaccaaggaacatggcagagcttgcaagtgtctatctcaactatgttgaacttcggtatatttggagttcccatggttggttcagacatttgtggattctacccacaaccaacagaagaactctgcaaccgttggatcgaagtaggcgcgttttacccgttttcaagagatcacgncaattactactcaccaagacaagagctttaccaatgggacacagttgcagactcagctcgtaacgctcttggtatgagatacaagatccttccttttcctctacantctttaactacggagcgnatatnactngtgcanccatnggtagacccgttttttttttnaattnccngaatanaccgatntttnggaacagcagncagtttttnnttggaggagtttatgaatttccggttttggaaggaaaaccnngtgnggattttcccccggtttggncaat

SEQ ID NO: 133573 - DNA, 565 bp, Arabidopsis thaliana columbia
  unsure (1)..(565): unsure at all n locations
gacagatcatcggcaactaatctcgtcatcgcatgcatcataaaccaaattaactaaatcatccatttaatccatttgtncttatcagatcatccttttccttcctacacaagaaatggcgaattacatgtcggaagcagcacagctcagaagaggtctaaagcctaaagggaagacttatgggttgaccaatcagaagagacgagagatcagagagatctttgatcttttcgacatagacggttcaggtagcatcgatgctagcgagctcaacgttgctatgaggtctcttggatttgagatgaataatcagcaaataaaccgaattgatggcagaagtagggtaaaacccaaagtggngccatagatttcgccgnattttgtgcatatnatgacaaccaaanttcggngancgggncttccttagccgantttctnaggcgttaagtcnttgccccggcatnattggaggtttcncccgggttttaagttgttctaaggtttggggatttccngtnttnttggnattcccgggcgggccttcnagtgggggtccttngggttt

SEQ ID NO: 133574 - DNA, 549 bp, Arabidopsis thaliana columbia
  unsure (1)..(549): unsure at all n locations
ggagctgcagggataatagtctctaaccacggagctcgtcagctagattatgttcctgcaactatagtggccttagaagaggtggttaaagccgtggagggtcggattccggttttncttgacggtggggttcgccgtggaaccgatgtctttaaggcattggctcttggcgcttcaggtgtctttgtaagttcattcatcatatacacttagctcttgtcatttcccctgttttctctcacggttttcaaatcgctcctttcattttcagtttcattgcaataaccttgattatctcttcttgattttnacaaattgttaacattttgcaccaaacttctaaattttcaaaacaacccaaatatatccnctgttttattaaagtngttttaaatttgtcggaatgaagccaacaatgaacaaatgtgtgcccgtgctgcaatgnggatatcctggncaatnatnccaaggcatgngtaattcctgtccgtaggcggggccggcttttccggttangggttggaccggggttggngtcncantctagtc

SEQ ID NO: 133575 - DNA, 503 bp, Arabidopsis thaliana columbia
  unsure (1)..(503): unsure at all n locations
aacaatgaagatatcttctctgaagaaattcaaattctcggttccggttatactcatctcgacgataatctcactccaaccgggaaaatcctcgccgttaaaggaacacccttcgattttcgccaactccgacctattaaagacaacatcaatgagcttaagacagggtatggtataaatnattgtctagatggtgttgcaaataagatgagaaaagtcgtggagcttgtggacaataaatcgaagataaaaatggagttatctacagaccaatccggtctaaggttgaaaaccactaaaccaaaaaatggatcggttcataaagcttactctggtttatgtctagatcacatgcaatcaattaccnatatcgttcttcgcagntaatttgaccgggggaacttttaggnttctatgctcttaaggtttcttttgtccggaaccttggaacgntcttttntggaagtttgcccgaatttttttatnccntttatggngcnnna

SEQ ID NO: 133576 - DNA, 314 bp, Arabidopsis thaliana columbia
  unsure (1)..(314): unsure at all n locations
cagttacgatgggaagactttgggaatcacngcccgtaattctcctactctaagttcttcttcttcatcaatcagtctctcaggggtttnaagaatctaaatctactagattggttaacgaagaagtagaagtnagtaatnctccagaaatacattgtncccgagaaagaagtcgagcagcttggcagattatacaagattatttnacgccatttgtggaacgggnaagatatgaaattccaaaganttgtaggctgcatccngataatgatttatacaggggtccagggncntcataagggttcatggttgnt

SEQ ID NO: 133577 - DNA, 433 bp, Arabidopsis thaliana columbia
  unsure (1)..(433): unsure at all n locations
aaatgcctcgtcatctaattagtgacgcgcatgaatggattaacgagattcccactgtccctgtctactatccagcgaaaccacagccaagggaacgggcttggcagaatcagcggggaaagaagaccctgttgagcttgactctagtccgactttgtgaaatnacttgagaggtgtaggataagtgggagcttcggcgcaagtnaaataccactacttttaacgttattttacttactccgtgaatcggaggcggggtacaacccctgtttttggtcccaaggctcgcttcggcgggtcgatccgggcggaggacattgtcaaggtggggagtttggctggggcggccgtcttaggggtccaagttacgnancggntcattcnacngnaaaagcttttntntagngncnccnnaattaaattcnntgggccg

SEQ ID NO: 133578 - DNA, 489 bp, Arabidopsis thaliana columbia
  unsure (1)..(489): unsure at all n locations
atcaaatcaagattaactatggctgaggagtacaagaacaacgttcccgagcacgagacaccaacggtcgcaacagaggaatcaccagcgacgacaacagaggttacggntcgtggattgtttgatttcttggggaagaaggaagaggaagtgaaacctcaagagacaacgacgctcgagtctgagttcgatcataaggctcagatctctgaaccggagttagctgcgganacgaggaagtgaaggagaacaagattactttgctagaggagcttcaagaaaagaccgaggnagatgaggagaccaagcctagtgtcatcgnaaagcttcaccgtcccaacagctcttcttcctcttcgagcgttgaagaaggttaggaaaagaaggagagangnggagatctttnnggnggngaggttagaanggctttttggggaggncaangngagttcnagggaccncggcaagcancnagggtttttccntttt

SEQ ID NO: 133579 - DNA, 463 bp, Arabidopsis thaliana columbia
  unsure (1)..(463): unsure at all n locations
aattcacacatatggatatgtaccaataggacaaaagcaaaggcaagatggtgccaggattgtggccaatatcatcaagcaaaagatggagatggatgggtcgaactcaaagggacattacccttcgagagagcacataagattgaaataccgcgtgcttttntttgcncggagagcaaaatatttgacgtctcagaatgggccatttgtcagggaatggcttgtagaccaaacacgcatagaccaagctttcatgtgaacatggttgggttagaaaagncaacacagagatcaaactcaagtaggttcccatgggntctngatgtggagatgatggntgnggccgnnggaagagttttagcttttggcttcaacaagctcttntttcaggtctntttctgngaanccttaaaacgtgggaaagcttgggccctttcaagtttggcccnttnaannangaacc

SEQ ID NO: 133580 - DNA, 393 bp, Arabidopsis thaliana columbia
  unsure (1)..(393): unsure at all n locations
atgactttagtnatgaggacgagtttnagtcacccatcgatgaggtggatncctttttattctttgtcgatgcaatcagagttatgcaggcatcaaatgcgcagaggtttcanaacctgaaccagtcactggacttcacttaccaggcgattgcaaacggaatagcacagcatgcagagctgagaagagtggagatcgngaaggagaagcaaaagaagttagcagctgcttctactcctgtnactgctctatgattttaaagctttggttcaaagtcagagtctgntacacagntggtgtcatttttntaagagattctcgttcctaaaatattttggcatngtcgcttcttcggggttttcaaattgnnggngcngttttttgantttttgc

SEQ ID NO: 133581 - DNA, 512 bp, Arabidopsis thaliana columbia
  unsure (1)..(512): unsure at all n locations
aagagaaatgaagagataccaaaatctaaaggtaggagaagctttctccaaaaatcgtatttacccatttncttgcaatgaactaagctccatattgaatctngcttactctctatcacccaaaaatgtcaaagctttgatcttccaagataccctctccgcttttggtcttcttcccgacatcaatacatcagctgctgtttcagccgctaaccttctcctgaagagcgtggaagcggtgctccccaaacagaagaagaatttagccattgtagaattcaagcaggcaaaagtagcactaaagaggcgtagtaaggaccgtgaggaaggagntatagntataccttcacttccacaagatatccttattcacatcttcagtttcctcgngntatcgnccctaggttcctcagntcaaggggcttggtntttgnaccaggaacggatgnnanctctttttgggattacaattgncctantttaatcnnaaggttgntcgntgaagccgtntt

SEQ ID NO: 133582 - DNA, 394 bp, Arabidopsis thaliana columbia
  unsure (1)..(394): unsure at all n locations
cagactttaatttaaagcttttncaaagagtaaaacatgtctgcaaacgagttacctgcttcanctcaatccttgcaagaacaattccttggcagttttgtcactagaaagcttcttctgcacgacccatttgaccacaactntcttcgagtatttncggttgcaccatctcctctcataacacatgagaacaacctcaaagggaatgtnctgatgcttctntcagttctcatctgtggcatcatctgtngccttgggttacattacatcattcgctgtgcattcagacgttcttcacggttcatgatctctgaggcctatatccagtcttttaacancacggnggtcatcaancaanggnttcaggaggaaggctttgggttttccccagnng

SEQ ID NO: 133583 - DNA, 537 bp, Arabidopsis thaliana columbia
  unsure (1)..(537): unsure at all n locations
ggcagcaaacaaagaagaagaagaagaagaagaagaagaagaagaagaggatgagttgcgttacaccagcacttcctccntcactctttactaatgggtatctttcgtctcctcagaatatctccatgaccaacttgaacagttcggtaaaggttagtgattctggtgcttataaatggcgccttgtgatagcctacgatggcacccgttttgcaggttggcagtatcaggagtcaccaccaactatccaatcaatgttagaaaaagccttaattcagattacagagctcggtagnaaagagcttcagcttattggagctggcaggaccgatgcaggagttcacggttgggggtcaggtagctcattttgtcactcctttcaactatactaggtttggatagctttcacggtgctttnaacggnttcttcctaagatatccgtgtcaaggntnagtcagggttcntagttnngctggtttttccntggaggtntggtccgtttcacgnanttatggccgtcngggatgggtcncttt

SEQ ID NO: 133584 - DNA, 476 bp, Arabidopsis thaliana columbia
  unsure (1)..(476): unsure at all n locations
agcttgggtagataaacgaacaggtgggctctgtttatgcacatcagccaagggcttatccataaccggaattgatgatcggagatactggagtcatattccgtctgatgattctnggtgagattgtgtttctctctctcttgcttacccaaatcagattgtgtttgtnaagtttgggtgtacaaagttagttgagttaaggttgtagtggatagaaatcctaactttaatctaatgttgtgtgatgctataattctttatgtttgcnatgatcgaaaaaatgccacattgttcattgtattggntacggtcatacggatcctaacttttaaccgatgttttgcgttactatgatctaaatttncggtatccccntgtgtcagtttcntccagagntatgtcacaanctggggttcaagttntgggaatnnttcccatccngctgaccccagngtnctcaggtnnntggaacngga

SEQ ID NO: 133585 - DNA, 331 bp, Arabidopsis thaliana columbia
  unsure (1)..(331): unsure at all n locations
gtatcgatggctgctgccgctaatacctccgccgttttcgcctctccgtcgcagcctttatcctcgaaacgtagttttttgtacagttcaaggattggtccaatactaaggagatttccgaggaagaaanttgatctccaagttaaagctgttgccacgactcttgcacctctcgaagngatcaaagagtctgtctttatttnagttcancggggtgctttttggtcggtataactataatggatataataatnaancattaggtcantgnttgattaattttgggttggttcaagctttncctcnatggggccatntttcgngnatgggg

SEQ ID NO: 133586 - DNA, 531 bp, Arabidopsis thaliana columbia
  unsure (1)..(531): unsure at all n locations
gcacaatgcagcagtcttcagcttcagaatccaccttgcgagctcctttaagatcccagctgcaacaatcccgtgaactaaacaggtcggcgtcatttgcaaagtcacagtctggatttagtcaagtccagaattaccctccagatagcgataactctcgccctcctggattcgaaaccgctagtcctaaaccaggaatccggttcccagactacccccagcctatgaatcttatgcaaccgcccagcttgcccgttccaatgaatcaaaacccgggtttaccacagcagtttggttttccttcgtatccaacaacagagagtggatcatctcaacaattctttaacggtgctcagtacgggatgacaagnacagtgagcggnggtnagaacaaagtcattgntcgggatcccggcttaacaatgnggatttgatttcaaggttggatcctctccatatggatcccgnatggaccgcttaaaggccnnagtnnncgggntgggngtaaatttggngcaaggncctttgttc

SEQ ID NO: 133587 - DNA, 575 bp, Arabidopsis thaliana columbia
  unsure (1)..(575): unsure at all n locations
ggggagctcagatttacgagaaacaccagcgcgtgtggctcgggacattcaacgaagaagacgaagccgctcgtgcctacgacgtcgcggttcacaggttccgtcgccgtgacgccgtcacaaatttcaaagacgtgaagatggacgaagacgaggtcgatttcttgaattctcattcgaaatctgagatcgttgatatgttgaggaaacatacttataacgaagagttagagcagagtaaacggcgtcgtaatggtaacggaaacatgactaggacgttgttaacgtcggggttgagtaatgatggtgtttctacggcggggtttagatcggcggaggcactttttnagaaaacggtaacccaagcgaccgtttggaagctaaanccgtttggttataccngaacatcacgnagggaaacattttccgtaccntnaagtaacgnttccgtnaaagagtttttttgacctttaggccgtaacgggaattttgnggtccntaccncnnttggnnatagcaagttttttttccaaagttggcagnncttaaggganattcgcttgtncggttttttt

SEQ ID NO: 133588 - DNA, 560 bp, Arabidopsis thaliana columbia
  unsure (1)..(560): unsure at all n locations
aaatagaaagaagtaacaaaaccaaagcaaaaaatggtgaagatcgaagttggaagtgtgggagactcattcagtgtatcatctcttaaagcttacttgtctgagttcatcgcaactcttctcttcgtattcgcaggcgttggctctgctgttgcgtttgccaaactaacctctgatggagccttggacccagctggtcttgtagcaattgcaattgctcacgcgtttgcncttttcgttggagtttccattgcggctaacatttctggtggtcaccttaacccagccgtgactcttggccttgccatcgggggaaacataacactcatcacaggnttcttctattggattgctcagtgtcttggntccatcgtcgnttgtcttctcctcgnctttgtactaatggcaagagggtaccgnccacggggnttagccggtttaggagcgntcgaggtttggaatnantcgtntncctttnaatgggtnnaccgttggcaaaaagtntccaaaaaggccntgggcntgncatgatggtaagtggcaaacngntgcctagganc

SEQ ID NO: 133589 - DNA, 525 bp, Arabidopsis thaliana columbia
  unsure (1)..(525): unsure at all n locations
aaagaaagccaaagaaaacatgaaaataatagtctccatcttagtgttagcctctctncttctaatcagttcatctcttgcttcggctactatatcanatgcttttggtagtggcgcggtagtccggcaccgcagagcaaagatggaccggcgttagagaaatggtgtggacagaaatgtgaagggagatgcaaagaagcggggatgaaagatcggtgtttgaagtattgtgggatatgttgcaaagactgtcagtgtgttccttcaggcacttatgggaataagcatgaatgtgcttgctatcgtgacaagctcagtagcaaaggcactcctaaatgtccttnattctatttctttccaaccaaaaatttaaataaatggtaagggggatcccgtaaacctnntttaaaacctttaattgggtcttttgtttagnttttttttttnttttcncnnccnntttaccggtttncctggccttttgaggangtttaaatttnnaaggcctaattttnggnaaaaaaa

SEQ ID NO: 133590 - DNA, 563 bp, Arabidopsis thaliana columbia
  unsure (1)..(563): unsure at all n locations
caaaaccacctaccttcttcgatttctccagaaatcctccttcaagttcatactcatggaagaagctaaagtggaagcaaaagatggtaccatctccgtagcttctgcatttnccggtcaccaacaagctgttcacgatagcgaccataaattcctaacgcaagctgttgaagaagcttacaagggagtggactgtggtgatggtggcccatttggtgcggtgattgtgcataataacgaggttgtcgctagctgccacaatatggttttgaaatatactgacccaactgcacatgctgaagtcactgccattagagaggcatgtaagnaacttaacaaaatcgngttatcagaatgcgnggtttacggatcttgtgagncatgtccgatgtgcttcggngccatccatctnttgnggctcaagaggttnggttttgggcccaagccgaggagntttngncatcgggtttatgcttcaaggttatntttttggggccggggnttcccnaattngcttggnnaaaacaacgggttgnctcgttngggggttttccncnaagggg

SEQ ID NO: 133591 - DNA, 572 bp, Arabidopsis thaliana columbia
  unsure (1)..(572): unsure at all n locations
gacaaaaccaaagctaccttggaggaaaaggcggagaagatgaagacacgagaccctgttcagaaacagatggctacacaggttaaagaagataagatcaatcaagctgagatgcagaagagagaaacgcgtcacacaacgcggccatgaaagaagcggctggagccggaaccggtttaggtttggggacggccactcactcgaccactggacaagtcggacacggcactgggacacatcagatgtcggctctgcctggtcacggaacgggacaactgaccgaccgcnttgtggagggcacggctntnaccgacccgattggaaggacactggaacttggtcggacaaccgntcataacactcacgtttngtggtggtggtgccaccgggtacggaacccggcggggggtattcttggtaaacggtgttgttacttgtcctgtattttcnctgtttttnttaangaaatttgtgggtttttgctnncttcgggtctgtttttttttttccttcctnggntctnaaattnaggctcgcntttttaaaaaaaaaaggggccntttgggccctta

SEQ ID NO: 133592 - DNA, 572 bp, Arabidopsis thaliana columbia
  unsure (1)..(572): unsure at all n locations
agtacatgctcgatgttgactcccatatgtggagcatgaggaggagtaaagctaacttcttcagaatcatgaatgtnctgagtggtctcattgctgttggaaaatggtttgatcagatctgcaactggagaaacccaataaccacaattctcattcatgttcttttcattatcttagttctttacccggaattaatcctcccaacggttttcttgtaccttttcttgattgggatctggaatttccggtggagaccaaggcacccgccacacatggacacacggttgtcccatgcagacgctgttcancccgacgagcttgatgaagagtttgatactttcccgactttccgatcctctgagattntgcggattcgatatgaccggctcagaagcataggaggacgggttcagaccgtgataggggtctngcaacanagggggagcggttttatcgcttctgaccttgagancccnngggaacaaattntttggntttttgccaaaggncaatcgggttatntncgcgtnaggtttcncttttctgggctttntctngancaggtaagnnaa

SEQ ID NO: 133593 - DNA, 580 bp, Arabidopsis thaliana columbia
  unsure (1)..(580): unsure at all n locations
ttttgttttataaagtttcgtcttaagcgatcgattttttgtgcgaaagattgaaactttttggtaagataattgtgttgtgtggttggatcgtggaggtgggtcttctttggaatggcgcaacaagggcagggaagcatggaccctgccgctctcgatgatatcattcgtcgtttgttggattacagaaaccctaagcctggtaccaaacaggctatgctcaacgagtctgagatccgtcagctttgcatcgtctctagagagatttttcttcaacagcctaaccttcttgagctcgaagctcctatcaagatctgcggtgatattcatggacaatactcagatctattgagggctgtttgagtatggaggcttnccacctacagctaactatttattcttaggngttacgngncaggggcaanagaggtttngngcctatttgcttnctntttcttacaaaatnaataccctgngactttttnttntagggggaccccgattgcctcttttacaanatctttggtntttgtgatnaaacgccgtcattgtagccctgaaaggttaaagtcttaanttc

SEQ ID NO: 133594 - DNA, 606 bp, Arabidopsis thaliana columbia
  unsure (1)..(606): unsure at all n locations
tgcaaacaaaggaagaagaatcaagatggctctggaaatctgtgtgaaagttgctgttggtgctcctgatcatctcggcgactgtccgttcagccaacgggctcttctcacactcgaggagaagagtcttacctacaaaatccatctgattaacctctctgacaaaccccagtggttcttggacattagtcctcaagggaaagtaccagtgctcaagatcgacgacaagtgggtgactgattccgacgtcatcgttggtatcctcgaggagaagtatcctgatccacctctcaagactcctgctgaatttgcctctgttggatccaacatttttggtactttttgggncattcttnaagnggaaaagncttcaatgacgggntctgaacatgccttgcttgttgagctagaaggcctttggnganccatctnaagngtacgnttggnccttttatcgccggggaaanagnttccncggtggcttaagntttganccaagntttccnccttaaagtgcttttgcattttaaaanttggctttccctaagggtttcccatgcccaactnattaggtttttttgnngcttttagaacnngccggaaatt

SEQ ID NO: 133595 - DNA, 309 bp, Arabidopsis thaliana columbia
  unsure (1)..(309): unsure at all n locations
gatgttgagaaggaagttttatcctgcagccaacaagtttttgcaacaagctatccagaaatgggacggtgatgatcaagatcttgctcaggtctataacgctctnngagtgagttatgtacgagaggataaacttgacaaaggaattgctcagtttgaaatggcggtgaagctgnaacccggttatgtaacagctttgggacaaaccttggggatgcttaatgangagaagaaggngttgcccttttggatttgaantgcggttttnagaaggttttggntgttttnanccaanaaatnaagggggct

SEQ ID NO: 133596 - DNA, 427 bp, Arabidopsis thaliana columbia
  unsure (1)..(427): unsure at all n locations
gaagccacggggggagcggtagacttaaagatttgcaccgtttnctctctggctttgtgttgtgctagatgcgatgcaatagcaatattttcctggagtttcaagtaactagtggcttaggttcataatagtgtttctttgtaggacgaaagctgtgttagtattctctccactgtaaaggacaagatgtctcagaagcgaaatcttccttcttggatgagttctagggatcccgagattactccgagtaagtctcattgtangaagcctaaggntgaaggaccaaaccgangngcacancagtaggaaatgcccctttccaacaaagttcagtaccacggcgnngccaaagttcaaaatancncctgaattnctctaaaacnttttggnaaggcggttttttttttnannnttcggggggtttttt

SEQ ID NO: 133597 - DNA, 614 bp, Arabidopsis thaliana columbia
  unsure (1)..(614): unsure at all n locations
gtcatgtcaatccaagcgctgctctagaccctggtctcatctttnatgcaggttatgaggattatatagggttcttgtgcaccacacctggtatcgatgctcacgagataaaaaacttcacaaacactccatgcaatttcaaaatggttcatccttcaaacttcaacacgccatccatagccatctctcatctcgtcagaacacaaaccgtaaccagaagagtgacgaatgttgcggaagaagaagaaacatacacaatcacatcgaggatggagccagcaatcgncatcgaagtgagtcctcctgcaatgacagtaaggagcgggcgtttctagaacctttttcggtgactctaaccagtgagntcagtgaccttggggcttatagcttcggnccagggttccatttgaaaggagccgagggcattaaagtggctnttccctgtggttnctntngggcaaaaggcgntanggaaccttttgnggttttttnacatattattggaattattttggaaattncgnatnatnagggggtggnntttccttggaagaaagntatcnggttntnataggttaccttggttttancccaaaaaaaggggccttgggcgc

SEQ ID NO: 133598 - DNA, 352 bp, Arabidopsis thaliana columbia
  unsure (1)..(352): unsure at all n locations
aaactcacgagtcaagtcagagagttaaacgttttcaaagacacttaaactaaaaatgggagcgtgcgcttcacgtgaatctttgaggagtgattcagcgaagnattatttactcgacggtactttacaggagttctcatctccggtcaaagtttggcagattttgcaaaagaaccctacgagtttcgtctgtaactcagacgnaatggacttcgacgncgnagtttcagctntcgccgggcaaacgnagagcttccgatcaagggaacttctattttggnttaccncttacgggggttnaaccatccngttaaagggcggngggaaattggcnggcctttgnccttgaaaa

SEQ ID NO: 133599 - DNA, 526 bp, Arabidopsis thaliana columbia
  unsure (1)..(526): unsure at all n locations
cacatcgactttattgaatggaatgtcgtttgtcaatggttgggaacagaactttttcgtctctaagtggagcatgcatcagctgcttattgagtgtccatccatatatgagctgatgtgttgtcngtattttaaatgggagctccctcccgtcttagagctgtggagagagaaagagagcaatgatggagttggaacctctgatgttgttcttgagtcttaccgtagcctggagagccttgaagtttttacgaaatctctttcgaataatacagctgattattntggagagtcgatcgatcttccttttaactggaagatcaatggagtgggctcacaaaaccaagcaaagtatttaagcctcttncaaanctgccctcccgaaaagttaaaattcntattaccatatatgggnccaatctagnaaccccncaanagtgtttnctaatggggattnngaggttcccctaaaangtcttaccggttnnaaggtncntccagncggcaantatattnggtggatgnt

SEQ ID NO: 133600 - DNA, 616 bp, Arabidopsis thaliana columbia
  unsure (1)..(616): unsure at all n locations
gagagacccacctacaccaacctcaaccgtctcgtctctcaggttatctcatccttgactgcttctctgaggttcgatggtgccttgaatgttgatgtgactgagttccaaaccaacttggtcccatacccaagaatccacttcatgctttcctcctatgccccagtcatctccgcagagaaggccttccatgagcagctctcggttgctgagatcacaaacagtgcttttgagccagcatccatgatggcaaagtgtgaccctcgtcacggaaagtacatggcttgctgtttgatgtaccgtggtgatgtcgtccccaaggatgtgaacgcagctgttggcaccatcaagaccaagcgtactatttaagtttgtggactggtgtcctactggattcaagtgtngaatcaacttncagcancaaacttgttgttccaggggggtntctttgctaaagncagnggggtttgtgaatgatntaaaacttcaccagtgttctnaggngtntcccgaattgtcanaagtttgncctntgtncgaaaangggnttngtnactggatttgggtaggatgaaaaggggatttaaggnttaggnttaaattgnaggtcgggggc

SEQ ID NO: 133601 - DNA, 280 bp, Arabidopsis thaliana columbia
  unsure (1)..(280): unsure at all n locations
tgcaatgcttctcccatttntttcctcctctctcctcctccgtntctnttctccgatcatgtcccctgatcccaaatccaataccttcttctnctcttttnccagttgattaccggagaatttaagatcgcaatcnccgattnatnaataattacagaaaaaaataattaaacccnagagagagagagagatatatatatacatggggagttcattaggtttnatggcggttttggcngtctcaggaagcgttgtgttcttagcgggtcaatttcacaag

SEQ ID NO: 133602 - DNA, 563 bp, Arabidopsis thaliana columbia
  unsure (1)..(563): unsure at all n locations
ttcggtgtttggcctggagacaagttaaccggaatcactggaggagatcaagtggctgcagccatgggaatctacggtccacgaaccacttatgttttggctgttaagggctttccaggaactcatgagttcttgcttctngatgaagggaaatggcagcatgtaaaggagacaacagagatcgcagaagggaaaatgttctcaccaggaaacttaagagccacattcgacaactccgaatacagcaagctgattgattactacgtgaaagagaaatacacactgcgatacaccggaggaatggttcctgatgttaaccagattattgtgaaggagaaaggaatcttcacaaattgtggcttctnctacggctaaggcaaagttngaggctgttgttttaaggtggctccctttggcctgctcattagngattnctggtggttcaccagtgttggcacaagcccgnnttncaagncccttttnacttggcgttgaccnaaggtgntttggttaaagacgggtcnccnttcganaccctttngcnncaggcttagtttnctttc

SEQ ID NO: 133603 - DNA, 596 bp, Arabidopsis thaliana columbia
  unsure (1)..(596): unsure at all n locations
gaaactatggccggagtttgcgtcccatggggcggcgganttgtcgtcttatttccccaattcgccggcgttttccggtttcctcctccgtcgcttctcttgctcttccagactcctcctctatgatcgtcgacgacaatctcggcgcatttctcgagattcttccaaaagatcttcgtcaccgtctcttgaacgattcaagaagaaaccagctcgtagaggtcataatggatttaggaagaccacctgaagcacgttatctcggagaacctggaggtcaatatcttaggaacaacgagcttaggtatctatggaagagttagaggatgctcaagagcttgtaggtgagtttggagctgataatagagctggaatagaaggtacatttcacagggttatcaactatttcgtaatcggaaggggttcattgtcggttaacttgtcgtgttgggagnactnttagtggcaaattgccatgctttatnanctcttcaccntnggaaaanatttttncgttgncgcctgggtttgaanccctnttttcngganttcccnggcttnctataatccnnaaangggngantttcacncgatgg

SEQ ID NO: 133604 - DNA, 331 bp, Arabidopsis thaliana columbia
  unsure (1)..(331): unsure at all n locations
ctcaactnagtctacatctgcaaatgcaacgncttacccgaagttnctgagtactggaaacaagtcatcaagatcaacgactaccagaaaacccgatttnttaaccgcattgtttcttcaatgtttaacacagtctccaacaaaangattgcggttttgggcttcgctttcaagaaagacacnggagacactagagagactccagccattgaggtntgcaaaggtctgtnaggtgacaaggctcgtttcagcatctacggcccacaaagtcacttnngngcaggttccaaaggggccttaaccntggnccaaattcggcttggggcccccc

SEQ ID NO: 133605 - DNA, 312 bp, Arabidopsis thaliana columbia
  unsure (1)..(312): unsure at all n locations
tacaacaacaaatcttaaacgttttactttgtgctgcannactcaacctcaatggccgcctcaacaatggctctctcctcccctgccttcgccggtaagnccgtcaaagctttcccccgcgggcaatctgaagtccttggaagcggccgtgtgacaatgaggaagacttttgccaaggcaaaggggcccatcagggaacccattggtacgggttcttacccgtggtaaagtacttgggntccattttttttggngnaatnaccggggttacnttnaccgggagantttcccgggaggattnangggtttggg

SEQ ID NO: 133606 - DNA, 432 bp, Arabidopsis thaliana columbia
  unsure (1)..(432): unsure at all n locations
gagagtgaagctgcagtctattttaatncccgtctctnagtttnatcacgaggagaagggagatgcattgcatgcnatggagcttgcattgtctttggagaaacttacaaatgaaaagcttctgaagttacaaagtgttggtgtgaagaacaatgatgttcagctggttgattttgtagaatctnagtttctaggcgagcaggtcgaagctatcaagaaaatctcagagtacgttgcacagctaagaagaataggnaagggtcatggagtgtggcattttgatcaaatgcttctcaatgatgaggtttaaggaaggngagttcagcttctgaggtttgatgncaaancttccctgngctntatggcnccggtcctanctctntaaccgccggctcnaaagttttggccggngaaaagtttccttncccggcc

SEQ ID NO: 133607 - DNA, 536 bp, Arabidopsis thaliana columbia
  unsure (1)..(536): unsure at all n locations
cgaagagcattacaggagcttccaagcaactgtagtgagtttcagtctgttttgagaaagaaagggtgggtatgtaatgaacttggtcggaaccgtctcgggagcaaagagctcaacaaagctgaagacgcctttnctgatgctatagtggcattcaaggaagtttgcgatcatactaatgtcatactcatcaactgcaacttgggtcacgggcgacgagctctagctgaagaaatggttccaaagatcgaagctctcgaactgcatcgtgcttttgaaaatgcttaccaaaaagctctggggactgcaaaacttgaatacagcaagtcacttaggtattacatggcagcaaagnccagnactcagtgttgccacttcagaagctagttcagtttcaggcaatttgaaagttgaggcttcacacaggttgccaatnccttttcagatttggnntcttttggaattngggtcancccctgancttttncngggncctnttggaanccncntgtttccttntttggaaccccgctttc

SEQ ID NO: 133608 - DNA, 543 bp, Arabidopsis thaliana columbia
  unsure (1)..(543): unsure at all n locations
ggcatagaaaagtggccttatgaagcagctgccattgctttcgaggctattccacgtaccctggctcaaaactgtggggttaacgtgatccgtactatgactgcattgcaagggaagcatgcaaatggtgaaaacgcatggactggtattgacgggaacactggtgcaatagctgatatgaaagagagcaagatatgggattcgtacaatgtgaaggcgcaaactttcaagacggctatagaagcagcgtgtatgcttctaaggatcgatgatatagtgagtggaatcaagaagaagcaagctcctgggtctggaccttcaaagcctaccattgngacagaaggagnttcagncaacggacaaattcttcccgcctaagcnnagggggaacacttttgnctcagcataactcatctctgtttcacttgtttaatggtgcncncttttggtattatctccctnnnatatctttaatctcaggtttcttggggntaagntttccgggggggtttttttgttntttggaatagcttttgattcgnc

SEQ ID NO: 133609 - DNA, 386 bp, Arabidopsis thaliana columbia
  unsure (1)..(386): unsure at all n locations
gttttcatcttcgattaggttaatcntatctgggttccaccggactcaacccctaaaatcgccggtaaattctccgagcgtcttcatctccgtacctaaattcttcaactctgagtcaaaatcgacgggaactggttcaagatccgtagcaatgagcagcgttgagaaaanccgggtcggattctggagcaaatagnggantcgagcgagcaggatgaggagagaagcttcaaaaagngctcgaacccagtgggagttagtgantcnnagatgtttcgtatcagcacggttggtcaaggccggantttaaaggtngggnccccccggttagancgggntttcaaatntgaaaggtccgtttntaaaaggtttccggggggattaaa

SEQ ID NO: 133610 - DNA, 552 bp, Arabidopsis thaliana columbia
  unsure (1)..(552): unsure at all n locations
caaacatgaagactgacaaaattgacgtcgttcaacggcgggttgatcttatgaccaaagaaggtatcaactttgtggtcaatgccaatattggaaaggacccatcttactcccttgatggacttaaggaagagaatgatgcaatcgttcttgctgttggttccacaaaaccaagagatcttccagtgcctggtcgtgatctatctggtgttcactttgccatggagtttcttcatgcaaacaccaaaagtttacttgacagcaatcatgaggatggcaattacatttctgcaaaaggggaaaaggttgttgttattggtggaggtgatacccggcacagattgcatcggnaccatctttccgccatnggntnntcccaacattttnaanccttggacctttttcctaagccacccttaacaagngctcctngggancccttnggcaaagtgggccccggggtntcccggatttgcctcggggcataagggggtncccccaanttngggaaagnccttgggcctttggggntttacggggggttanngggtc

SEQ ID NO: 133611 - DNA, 358 bp, Arabidopsis thaliana columbia
  unsure (1)..(358): unsure at all n locations
caaaggaaacaatggaaacagaggatcttcttcttctggttactctgcagatttgttggtttgtttcccttcaagaacccacttagctctgactcctaagcccatttgtagcccatctcgtncctcagactcttccactaancgtcgtnctnagcaccgtcgccagctcagtaaactctccggcggcggtggaggaggacacggtagtcctgttttgtgggctaaacaagcaaagtagtaaggattatgggnaggtgacggaattagcagnacccaacttcttcctaaaggtaacttncgnaaggtcaantcaaaagtccgncaagttaaattcngggggtngggggnaanacctttg

SEQ ID NO: 133612 - DNA, 307 bp, Arabidopsis thaliana columbia
  unsure (1)..(307): unsure at all n locations
ccgaatataactttgaaaaaaaaaacaaatggcttcaaagaactcagcctctcttgctcttttctttgcgctcaacatcctctttttcaccttaaccgttgcaacaaattgcaactgcaagccaagtcctaaaccaaagccagtcccaagtcctaaggccaagccggtccaatgtcctcnttcaacccggtccttcagtcccaagncctaattcctagggccggttaaaacttccangganccctngggttatccgggaaaaagnttgtccnatttgatgggttttnaaggnttggggggntnntgc

SEQ ID NO: 133613 - DNA, 547 bp, Arabidopsis thaliana columbia
  unsure (1)..(547): unsure at all n locations
gggttctgaatttggtgcatttttggntccagtggcagataagcttatggtagcagctacattgatattgttgtgcactaaaccaatggtcgccgttgtcttaggaccagttccatggttagtgacagtaccttcaatcgccatcattggtagagagattactatgtctgcagtaagagaatgggctgcatctcaaaacggcaagctttcagaggctgttgctgtaaatagcttgggaaagtggaaaactgcaacgcgattgatagcgctaaccatacttcttgcaagccgggatagcagttttgagagactattaccgtcgggtattgggntgctctatgtatctgcagggctctctatatgggcctttagttgtttatatgagggagntatggggngnccttcttaaagagtngcaccaaaaaactcttttttcgggntttttgcatcaggttttcccanggattgggggtttccccntnttctttagaagnggcaatttccctggnaaaanaaatagtngnagccttagccnttttngncnnnt

SEQ ID NO: 133614 - DNA, 539 bp, Arabidopsis thaliana columbia
  unsure (1)..(539): unsure at all n locations
acccaatggtgctgctgctggtgttggagctcaacattctcagtgctatgcagcgtggtatgcctcagttcctggtttgaaagtccttgctccgtattcagctgaagatgctcgtggtcttcttaaagctgccattagagaccctgaccctgttgtcttccttgaaaacgagttactatatggtgaatcattccctatttcagaagaagcccttgattcaagtttctgtcttcccataggcaaagccaagattgaacgagaaggaaaggacgtaacgatagtaactttctcgaagatggtcggtttcgccctcaaggcagctgagaagctcgcagaagagggaataagtgctgaggtaataaatcttcgntcaatccgtccgnttgaccgagccaccatcaatgctttagtgaggaaaccgngtgnttgggaacagttaagnaggttcccnaacatggggctntcagaaatttttcgccgntttggagaggtttcgancttgnttaccgtcgagggttcaggntntntccatncgtngc

SEQ ID NO: 133615 - DNA, 533 bp, Arabidopsis thaliana columbia
  unsure (1)..(533): unsure at all n locations
cgtccttgttcttcttctgcttctcccattccttcgatttttgcttcaatggatgtttgatttgctctctgactgcgtttgtttactatactatggaccctgagagtatcatggctgctgatgggactgattctgctcctgcaaatggtggtttagcaatggaaaatgtatgtnttaaagaaaatggggctgtttctgtcgaaaccgtggacactacttcagaaagtcagaatgagaattcggcaaacagttccactttggatacaattgaacacgtcaaggaggcagctgagggacacaagttgaacatgtagntgnttcaaagtgtatgaaaggcgnaaaagctcaacgggagccaaggcatgagnaactntcaggtggtaaggataattcatcggttcacatccaaaagggcaagngggcaaagtccaggttntaagtngcanctcaaatggtnctgttnnccaatttcnggcaacaatccntnaggcaatcttcatngnggnggccagtncanggagggggtgctttcc

SEQ ID NO: 133616 - DNA, 592 bp, Arabidopsis thaliana columbia
  unsure (1)..(592): unsure at all n locations
ctggagactaggatttaacccgaaaggntctggtggaggaagaccacatgcacttccaatcttcctatatgctcaaggccataaggcaaacgcagttgttacaaacacttggggagcggttaatctgcggttaaagaatcaacgaagctccaaccacaaacaattatattctgcagcttggtacccgattcgaagcgattatggtgtgggagtgaacaatataatattgatgtcagagctaaaagatgcatcaaaagggtatatggtgaatgatgccattatctttgaagctgaaatggttaaggtctctgtgacaaacatagtctccgtttaaatatcactacttctttttcaacaacaaccttanggataaagtggnctttgntgaggttaatttgttatacggcaacgttgttgntgcttgtagtgtaatcgttggttctgcctcccgggtttcggtttaccttttttttcanngntttgcntcaatggaataaggggtaaacccccttggtttaaaaaaaaaaaaagggggcccccntngggcccgntncgncggtnttgcggntncctcttggnccatnatcctgnc

SEQ ID NO: 133617 - DNA, 555 bp, Arabidopsis thaliana columbia
  unsure (1)..(555): unsure at all n locations
ctttgcctcactctcttctctcatngtttttcatatttctnctttgattcacgtttctttncttttcctctcattgactattctccctcacttctctctctctcaactcttgtnatatttattcaaagatgcttccatgaaattnggttttggtcagtgagtgaatctnctcttcttactccatcatgagtgactccactaacagcgtctctccttcctctgattacgcctccatctcctccggcgaccagagtcttcagcggagtcgaaggagtggagatggaaaccgagccgttgtgcgtgagtcccgccattggcatgatgtattctgataggntaaacatcgataggtacactcaagggttcttggagaatcataaaggtctaacagagggttnnctggncnctctaatgctgntncttggtggaattgggnctttatcaagttgggtttggcattgctgcttnggtcttacgccaanangtgattaaagtncgggtcaaatttaaaaccatttagtgnagtagggnccatnttttngggaagctttcttt

SEQ ID NO: 133618 - DNA, 562 bp, Arabidopsis thaliana columbia
  unsure (1)..(562): unsure at all n locations
ctacaacgtctccgattggattaaaactcatcccggaggcgacacggtgattctcaatctcgttggtcaagacgtcaccgatgctttcatcgcatttcatcccggaaccgcttggcaccatctcgaccatctcttcaccggttaccacatcagagatttccaagtctccgaagtctcacgcgattaccgtcgtatggctgccgagtttcgtaaactcggtctcttcgaaaacaaaggtcacgttactctctacactctagccttcgtcggcgccatgttcctnggagttctctacggtgttttggcttgtacctccgtcttcggtaaccaaatcgccgccgggcttctcgggtctcctctggatccagagngnttacatagggcacgntnttggtcattacggtatcatgtngacaaatctnttaacaaggttcgntcagtttnttccgggnaactnttttaccgggatntaaatgngggggtgggaatggcnncaaatggntaacaannngggtttaaaacctnggtttgggcccggttttaaaaaaccntgttttggggt

SEQ ID NO: 133619 - DNA, 444 bp, Arabidopsis thaliana columbia
  unsure (1)..(444): unsure at all n locations
gaaaatgtggagacccttgatcctgaaatcaggcaatatagcgatttgccaacctggattgatcagaatgccgagaaaatgaagggcaaaaacgtgctcatgtactgcactggtggaatcagatgtgaaatggcatctgcatatatcagatctaaaggtgctggatttgagaatacttttcagctctatggtggcatacagagataccttgaacaatttcccagtggtgggttcttcaaagggaagaactttgtgtttgatcaccggatctcagttgggagctcaaaagaggntataaatagggcagctgccttctcttgcaaccaatacctttgacggcttattnntccacggtngccgtttgcagnnttttnncccgggntnctttnttttaggccncnaatcaattttccgggttaaaaggggggtttnttnttttggggg

SEQ ID NO: 133620 - DNA, 619 bp, Arabidopsis thaliana columbia
  unsure (1)..(619): unsure at all n locations
caacaaacaacagtgaaagataaattcagcataacaaaacaaaatggagtcacggaagattaacctaatggcgacanaatagctttaatagtggtggctatggtggtggcagctgctgatgataagacgaaagacaaggaggagtgtacggagcagctggtcggtatggccacgtgtcttccttacgtgcaaggacaagcaaaatctccgacgccagactgttgctccggtctcaaacaagttcttaattcaaacaagaagtgtctttgtgtgatcattcaagacaggaatgatcctgatttgggtctccagatcaacgtctctctagctctcgcacttccttctgtttgtnacggccgctgctgacggcactaaatgccctgctttgcttcacttggntccggattttccagntgccaagtcttttncngcttgctaaagggttaaacaaaaccggccagcctttgttccaattggtngtccctnggcctntagnntttttccgnnttagggnccggtngttggacaanaggnggtggcngcctttttcnagggggnncncggttaaggtttttaaaatggtnggcgaggtttgcccttctcggattttttttncccg

SEQ ID NO: 133621 - DNA, 394 bp, Arabidopsis thaliana columbia
  unsure (1)..(394): unsure at all n locations
gtttcttttttaaagcctcttgttttgttcttcttctcttgtttctnctttnccaatcttcatttttccagtcaaattcagaaaacgcttttaataatggatgatcagagtaatcgtggtaatgataatnataataatgatcatcatcatcatcatcttggtgtgaataagatgggaaaaaacattcgtaaagatccaccaaaccaacaaaatcaacaacaaaaccntcangctttggtttacaacatcancaaaaccgatttcngatccattgttcagcagctaaccggcctcggttcaacgttnttcngtcaatccttccggaaaccaanccatcccaaaccgtcnnantttcacgggttgggtaaaggttnggccggggtccttttgnccc

SEQ ID NO: 133622 - DNA, 641 bp, Arabidopsis thaliana columbia
  unsure (1)..(641): unsure at all n locations
tctctatctgtcattcatcatcatcacaatcatcatcatcaaatctcaggatcttcgaggtggttcttctgtttcgcaactagcttctagattgtaatttacaatcttcgaactctcggtgagtttctaggtttagggttttatctctctttacacgacaattgttatggccaatcgagaaagagatcgagagcttctgattcccgtcgctgatttcggcgacaaagacgatggttcttcttcgaagccttcttcttcttcctctgcttcttcttcgcatcaatccggccacgagactttaagcttgttcattaggggttgggcgtcaaagaagttcatgacagggctgtgttatcctacttcctattgcaagtcacttttctatacaacatggtgggtttaattcaactttgtcgatggnttcttctctccaatatatgcacttcttgggaatcaacatatttgggtttcgggttttttgacttccattgaattcatcttnttgggcgggggtgtcaatgccttcgggggtttggggnacngggtcntnaccttggggggnggttannaagnggttcnattttncgaaaattnaangcncagaatngnctncnacccgcnaaaaaaagtttaagggnggc

SEQ ID NO: 133623 - DNA, 569 bp, Arabidopsis thaliana columbia
  unsure (1)..(569): unsure at all n locations
cacttttctnatatctgctttccaaaacagagaaaccccaagaaaagaaaaagaaaaaagaaaagagaagaaagaagcaggaggagactttttggaatggagagacaaaagagcatggaaaaagggttactcaggaagagcttaagcatacgtgagagaaagttccctaacgaagacgctttcttagaatccggtttatcgaggaagtctccgcgagaggtcaagaaacctcaaaacgacgatggtgaatgtcgtgttaccgcctctgttttcctcagcacctttgttgccgtatcaggctccttctgtaccggttgtggcgttggtttttcatcgggtgcacaagcagggatttnccaaagatttatctctctccgttgnaanatactcaatgttcggggccgatcttgacattaggaggcttnatccgggtgcagnattcaacggtaaagtcgctnatntctttggnaagaaacgggccgttttgttttcgaatntttccttnttcnaaggntggtttntgtaggattnnctanatcaaatttgntgcctttgnagtttnnncttga

SEQ ID NO: 133624 - DNA, 604 bp, Arabidopsis thaliana columbia
  unsure (1)..(604): unsure at all n locations
cacaacctagctagctagtgaacagtattttctatataccaaaaatggcttcaagttccatagctcttttcttggctctcaatcttctctttttcacaacaatctccgcctgtggtagctgtactccgtgcggcggaggttgcccctctcccaagccaaagccaactcctaaaccaaccccaagccctagctctggctcgagcaagtgccctaaagacaccctcaagctcggtgtctgcgctaatgtgctcaacggcctcctggacttgacccttggcaagccaccggtcgagccatgctgcagcctcatccaaggacttcgctgatgttgaggcagccgtttgtctctgcaccggtcttaagggctaacattcttgggatcaacttgaaccttccaatatctttaaggctacttccttaatgttttgaggaaacaaanttcctcctgggtttcaatggtaaaaaccatnttggttttaatttaannncaccttatgggggganaaatnacctncttggttaaaggggaaggggggtttnntnnncnttaaatggggctnaaaaanttgnctnggggtttcnncnngttncctgggntatgggg

SEQ ID NO: 133625 - DNA, 512 bp, Arabidopsis thaliana columbia
  unsure (1)..(512): unsure at all n locations
cgatagtacacttctacgtgcaattttctcctttctcttcctggacatctgtctgtttatnacatttncttgtaatctttcttttggggatttgaaatatctatcccctaaagtttcggaaaatnctgtttttctgttctcattcttcgtgatctttttcactttcttctaaaaaaacatgtgtggaatacttgccgtgttaggatgttccgatgattctcaggccaagagagttcgtgttctcgagctttctcgcagattgaggcacagaggaccctgactggagtggnttatatcagaacggngataattacttnggcccatcaaacggcttnccggcaatcggtccctgntttccggtgatcaaacctctttttcaacgngggcaaaggaccctttnttgtcaacgggtgaacgggggggnttttnttaacccctgngggggctttggaaaancgcctttngggtnncaaaggtcccgaacctggnaggagttttaaagnnatttcccc

SEQ ID NO: 133626 - DNA, 419 bp, Arabidopsis thaliana columbia
  unsure (1)..(419): unsure at all n locations
agcacttcatggcgtttggtggaggtatgaggttctgcgttggaaccgacttcacaaaattgcagatggctgcgtttcttcacagcttggtaacaaaatacaggtgggaggagataaaaggagggaatataactcgaacgcctggattacagtttccaaatggttaccatgtcaagctccataaaaagagagactagagaatgtttttnaattagtaaagaattggtaggntacatacgctatacattttccgagactgtaataaacttgaacaccctaataagtgnaaagggggaagattttgtttttaggttaaaggctnagnatcggctccaaaggggggattncncaaatttttttttagtaggcttctngtntnttnggncagaaancttntaaatgntttngggttttttttg

SEQ ID NO: 133627 - DNA, 481 bp, Arabidopsis thaliana columbia
  unsure (1)..(481): unsure at all n locations
cactccgtatcacaaacactttacagttattgatagtgggtatataacaaactnttntcttttttgtagatccnactgcaaacctactgacatctggaccatacgccctcgtattcgcttctttngtacccttctncttggatatnccagttacaaagaggtttggtgtattgggcgtccacttctctgataaatcattcatataccttgcaggtgtccagcttttactatcatcatggaaaaggnccatctttactggaatttgcggtataattgctggttccttgtatcggttgaacatctttggtattcgcaaggcaaagttcccggagttcatggcttcggtattctcccggttttccttacccgtccttgagcagncattctcaaccanccaagnagggccatcacccaacttaggtcggcaaagnagtgagngnttatnggggntcaatgccggcaaactaccagngncnanaag

SEQ ID NO: 133628 - DNA, 563 bp, Arabidopsis thaliana columbia
  unsure (1)..(563): unsure at all n locations
cgaatccatcgtttcaccaatcaaaaccctccgattactaagaatcaacggatcgtttccatcatcatctcccaacggtgatctaatcgcattgaactccgatttcgacatcaacggtggaatcaaagtatctaaatccgacggttcaaaacgatggacgttgatcaaagaccgtacagctttctacaattcatggagtccaacagagcgtcatgtaatctacacatctctaggtccaatcttctctccggcgagaatcgcggttcagatagctcgaatcaagttcgatccatcagatctcaccgctgataaagaagntcttccatgtgatgtgaagattctcactcttggagnacactggggataacgnttttccgtcttgctctccggacggtaaatcaatcgtgttccntctggtagtcaggtcataaaatntttncattttggcngcgttacgggntttaacggcggtggatcgcggttacgggttggcctggttgcactatccttntggctccgaangggtctatnggtttannnacggntatccggaccgcgttgtc

SEQ ID NO: 133629 - DNA, 581 bp, Arabidopsis thaliana columbia
  unsure (1)..(581): unsure at all n locations
agaagaagcagaaaggtaaagctacaagtagtagtggagtttgtnaggtcgagagttgtaccgcggatatgagcaaagccaaacagtaccacaaacgacacaaagtctgccagtttcatgccaaagctcctcatgttcggttctctggtcttcaccaacgtttctgccaacaatgcagcaggtttcacgcgctcagtgagtttgatgaagccaagcggagttgcaggagacgcttagctggacacaacgagagaaggcggaaaagcacaactgactaaagacggtgaaacgtgtgagatcccggtttgaaggttaatgaaacaggctttgcttactctcttctgtcagtctcttttagctccttgtaatcctctgtgtctctgnctgtttctccatattaccngtaatcaaagtntctgntaaacctcggcatnggtnaatnaatgcattnggcttaaaaaaaaanaaaaaaaaaaagggggggcccgtttnggggtccnnggtttggtccgggtnattnggcgggattgnnttcttttggnncccnaatttattnctggccgngtttaanggggctggtc

SEQ ID NO: 133630 - DNA, 355 bp, Arabidopsis thaliana columbia
  unsure (1)..(355): unsure at all n locations
aaaagaaaaaaaagctattgtttgaaagaagaagaagttaactatggcaaagnatgtggaagccgttcccggagaaggatttcanacaagagactatcaagatccgccaccagctccgtttattgatggagcggantaaagangtggtctttntacagagcagttatcgccgagttcgtagccactctcctcttctnatacatcaccgttttgacagtcatcggttacaagattcantccgatactgatgccggtggcgtagattccggcggagttggaatcctcggtatcgcttggncctttggtggtatgatcttcatcctcgtctacnnnancgccggtnatntttggtggt

SEQ ID NO: 133631 - DNA, 573 bp, Arabidopsis thaliana columbia
  unsure (1)..(573): unsure at all n locations
cgaatccatcgtttcaccaatcaaaaccctccgattactaagaatcaacggatcgtttccatcatcatctcccaacggtgatctaatcgcattgaactccgatttcgacatcaacggtggaatcaaagtatctaaatccgacggttcaaaacgatggacgttgatcaaagaccgtacagctttctacaattcatggagtccaacagagcgtcatgtaatctacacatctctaggtccaatcttctctccggcgagaatcgcggttcagatagctcgaatcaagttcgatccatcagatctcaccgctgataaagaagatcttccatgtgatgtgaaggttttcactctaggggacactggggataaccgcttttccgtcttgctctccggacggtaaatcaatcgtgttccgatctngtaggtcaggtcataaaaatnttncattgtggcgccgtaacgggggatttaacggggggtggatncgncgggtacggntgggccatgnttanacnattncttctggccnaagggtctatnggttnatntatgnatatcggncagcgttgggttttc

SEQ ID NO: 133632 - DNA, 539 bp, Arabidopsis thaliana columbia
  unsure (1)..(539): unsure at all n locations
gcaatntcctccttacagttacattgatctgcattgtcgtcgccggtgtcggtggccaatctcctatctcttctccgaccaaatctcccaccactccttctgctccaactacttcccctactaaatcccccgccgttacttctcccactacggctccggcgaaaactccaactgcttctgcttcttcaccggttgagtcaccaaaatctccggctcctgttagcgagtcgtctccaccaccgacanctgttccagagagctctcctccggttcctgcaacaaaggtttcttctccagtgagctctncaacggtttcagcaacagtagntgatttcttcctcaagcttccggtaggccggttcggtttctgaatgtaacgggttcttggttcaaggaaagnntaaggagggttcaaagggaatngaaaaaggattaaggttgaacctgttccgggtccggaannttttggggccaantnnaacancggtttgattttncgggcctaattnnggggttttttntggggctttngnngnggt

SEQ ID NO: 133633 - DNA, 512 bp, Arabidopsis thaliana columbia
  unsure (1)..(512): unsure at all n locations
ggcttgatgtttgtatgggaggccgggtagccgaagagttgatttttggggaaagtgaagtaacttcgggtgcatcttctgatcttgagcaggcaaccaaactcgcgagagcaatggtcacgaaattcggtatgagcaaagaggtgggtcttgtggcacataactacgacgacaatgggaaaagcatgagcaccgagacaaggcttctcattgagagtgaagtgaaacaacttctggaaaaggcttataacaatgcaaaaacaatcctcacggtttacaacaaagagcttcatgcccttgcaaatgctttgcttcagcacgnaactctgtccggtaagcagnttaaagaattgcttaccgntctcaactntccactgntgcaaaagnggtcaagaagtggttcaangcaagnaacccggttcctccatnancccttgcttagnatnatnggagccgagatttccgaantnangccnccgccgccnaaaattttaacancgganccagggtaa

SEQ ID NO: 133634 - DNA, 536 bp, Arabidopsis thaliana columbia
  unsure (1)..(536): unsure at all n locations
ctgagaagcgattatggcgagcaagatgagtctccgttactctctctttttgatcttcttctctctcatttcactccaaggttttgccaagaagaccggagatgtgtcggaattgcagatcggtgtcaagtttaagccaaaaacatgtgaagttcaggctcacaaaggtgatacgatcaaggtgcactatagggggaaacttactgatggaactgtattcgattcgagttttgaaaggggtgatccgtttgagtttaaattaggaagtggtcaggttatcaaaggttgggatcaaggtttgctaggagcgtgtgtaggtgagaagaggaagttaaagntaccntcntaaactttggtattggggaccaaggntttncacctactatcccccggtggggcaacacttgntcttttgncacaanggcttnttccggtnaaatgaaaaacccccttgtngttaagnaattccgggggggtttaatttnttgggnttttgnaanccgggttttnccnggncccggnttttaaagggtttt

SEQ ID NO: 133635 - DNA, 491 bp, Arabidopsis thaliana columbia
  unsure (1)..(491): unsure at all n locations
tgttattaaccacgaatggagctcagctgatttnntcatattcaatactggtcaatggtgggtgcctggnaagcttttcgaaacgggatgttactttcaggttggaaattcactgaggctcggaatgtcaattcctgcagcgtatagagtagcattagagacatgggcatcatggatagagagtacagttgatccaaacaaaactcgggttttgtttcgtacatttnagccatcgcattggagtgatcatagatcatgcaatgtgacaaagtatccagccccagacactgaaggaagagacaaaagcatattctctgaaatgntccaaaggaagtagttaaggacatggncggtttccgggtatcaataattggggtgtnacttccgntgtcagccgttttagaagccgattggncatttccggnttnttggggcggtaanccctttgggccccnntttttnnggcaattggggncttcccnggggnccct

SEQ ID NO: 133636 - DNA, 471 bp, Arabidopsis thaliana columbia
  unsure (1)..(471): unsure at all n locations
ctctcaacgttgccagtnaagttcgccgtcgccggagctcatggattgaccaccgtcgtttacacactatcaaaatcctaattcgaaattcttccaccacgcttctccttttcaaaatcgtaacaattttacnccatcgctccggcggcgattcgcgagctctccgcttcatggccctgaagaaggaattgcgccgtgatgagaaattggatttataaagagaataacaaatgcaaagtttcctggtggagctgaacacttgtacttggntctcaaaagctttggttgttctttgacggtggtgtgttcggccggagggggtcgaagcaaatcttcccgatgnggncaaaggcgaaacggancttnggnccattggaaatttttaacaatcttgnanccccataattggtgctttnttcgtngnaatttcatttttaaactnttnttccaacccttaaaaagnttttttng

SEQ ID NO: 133637 - DNA, 376 bp, Arabidopsis thaliana columbia
  unsure (1)..(376): unsure at all n locations
aaacaaacgaaaagaagcgacttttgcctcttttggtctctccccttctccggagagatctgctctctctatctatctctcaatctgtaagaagaagattcccacttcagtaaaagccctaactttacttgggaaagttcttcatctatcatccttcaatcgtcatcatccatggctgatcaacaaaccctagattcctctactnctcctgctactcaatccgatgatctatctcactnccactctacttnctctantacttcaggtttcttcttcctnagatccatnaacttcttgangggnctcttctccctaaggcggcctnaaaacggccgggaggnttccttgaggttcggttccctgggnnggnaantna

SEQ ID NO: 133638 - DNA, 307 bp, Arabidopsis thaliana columbia
  unsure (1)..(307): unsure at all n locations
atcgcncctcataatnatcaagaaagtggtggaattctnctaatgtnaggtaaagttcagtttgagcttaagaaactcgtcgacacttatcgttctcaaatattcaagaccattacacgaccttcagagtcacttctnagtgaccttagaactgttgaggatatgangcaacaatgtgaagaaaagagagacgttgttaagcacatgctaatggagcatgtgaaagacaaggtacaagttaaaggcactaaaggggngagcctttttcgccgtcagcttgggccttctcgcngtnggnttccaagnt

SEQ ID NO: 133639 - DNA, 362 bp, Arabidopsis thaliana columbia
  unsure (1)..(362): unsure at all n locations
agaagaaggagaccaaattcgctagcaggattcacatgagaatatgtttggaaggagggtatcacgttctcgatgagtctacgcattacagcagtnatcttagaccaacagcgaanaactatggaagcctaatatcggtgtactggagttggggatactgaatgctacaggtctgatgcctatnaaaaccaaagacggccggggaaccacagatgcatattgtntggcgaagtacggacagaaatggattcgaactcggacaatcattgacagctttacaccaagatggnatnagcaatatacttgggngggttttttnatcccgtgnaccggttgttancttnttnggnggttttttnata

SEQ ID NO: 133640 - DNA, 422 bp, Arabidopsis thaliana columbia
  unsure (1)..(422): unsure at all n locations
gcatatatnaacataaatacattccattgcctgcaaaatcatcccaacattaatcttatcatgctctttnattcattttgcagctctccaaagactatcatgcatggncttcgggagacacttcaaggcaacctcttgggaccggtgagatctgatagtaaagcaaaagctaccgtacgtacctggttcaacgatcctgtgcctcctcgagttcaaataggggatgatagcaaattctcgatctttttcaatgtggtattcgggtaaaataatcacaaaggatctgtagtcactgggatttcaacccttttcaataggatanggttgtttgtttggncccnctgtaatctcangggtgtgtcatggttaatggttccanccggaagttccttaacggggtccccctttgtccccaaaaaana

SEQ ID NO: 133641 - DNA, 404 bp, Arabidopsis thaliana columbia
  unsure (1)..(404): unsure at all n locations
cacagaacccnccctctctagctctaaaaacatcccacaaactatctttnaacaacacaagacatatcacgaaacaaatcaaagcaaagatcatgaacacgattccagccgaactcactggatacttccactatctaccaccagataaatataataaccaaacaccaatcatggagtctgagtacttcaacatgccctcttctcctacttctngttccnccttctaccacntcaatggtctgatcaacaacaacaactactctttcatcatccaatggtcaggntctaatgacgngcaacaacttcaactttcagacgggggatcacccnncaaagttttgggncatcgntgggggggggatncaaanggggggnttgttnttttttacaggggtntttgttcc

SEQ ID NO: 133642 - DNA, 387 bp, Arabidopsis thaliana columbia
  unsure (1)..(387): unsure at all n locations
tgcgttttcttagccaagaactcaaacttgtgatattncttttnattctnatcatctctgcatttnctgaattggctcagacataattncttcggtgacttccatggctccgcctgtntctnatgattccctacagcctcgagatgtttgtnttgtgggagtggcgcgaacgcctataggggacttccttggctccctctcgtctttnactgctacaagacttgggtccatagccatccaagccgcacttaagagagcacatgttgatccggcccttgtggaagaggtcttcttttggcaatgtcttaaactggccaatnttgggcaagcaaccagcaaagncnagggntgcaactttggtgcttggggattncccattcctgtgnt

SEQ ID NO: 133643 - DNA, 403 bp, Arabidopsis thaliana columbia
  unsure (1)..(403): unsure at all n locations
ctggtaaacgcctccaaatataatctctttncttttcctcgcttccttctaatttttnagcgtgtggctgctcctggattcaagacaattcaatggttcatgattatnctacaacaactaatgggacgtccaagcgttgctcggcgttaccaacaacaaacacagtggatgtntcttcggtgtcagatctttttnaattcatatgctcgggtcctctcgtaaacaagattggtatcactcctcaaagagttggccagtctattgacaaatggttactctncggggtcacaactttgtagactgtttcagcntaatgagncttaaggttncaaattccccngaaaggntggggnttttccccttnttaaaaaacccggtttttttttgggggggnggnncaaat

SEQ ID NO: 133644 - DNA, 380 bp, Arabidopsis thaliana columbia
  unsure (1)..(380): unsure at all n locations
aacactatctctgtctatnagactgagactttcagcctaatagacaagaaatccatgaaggttgataatgttgtggatatttnctggtctcccactgattcaatcctttnattgtttgtncctgaacaaggtggtggaaaccaaccagccaaggttgctctagtccaaatcccgagtaaggtagagctgaggcagaagaatctcttcagtgtgagcgactgcaaagatgtactggcagagtagtggagagtatcttgctgttaaggttgatcggtacacaaaactangaagngtacatactctgggtttnagcttttccgtattcaaaagaaangggtnttcccantccgnggttcttnanctgggttancaaggnccgg

SEQ ID NO: 133645 - DNA, 527 bp, Arabidopsis thaliana columbia
  unsure (1)..(527): unsure at all n locations
aattcaacaaaatttccccattattcaagtaagtcctatacttatacctttacctcataatccgttttaataattgtnccctaaataaaatcggaatttntnctttcacaggttttcttttaaaaaatgaaataaaggaagggtcaaagtcaaagagaagaagaagtgaaccaaataaggttcgtggcgtggaaatcagaaacaaaacatctctaacaacgntccacatcacttcctcttcttcaatgtcgctcatcttccacttgtgcatcattatctttgcgtcttcgtcaagtcaaattgtttccaagacccttttagatcgtatcatactcctctttgttcccttttggttgttaagtggaaaaatgggttttgggaattaaattgttgtgcatcatttccaattgggnttntnccggtaatgnatgnagggtttttggctttaaancaaggtcngttaanananaaaaaaaaaagggggggccgnttnggggccnggtttggccgggggattnnggggntag

SEQ ID NO: 133646 - DNA, 418 bp, Arabidopsis thaliana columbia
  unsure (1)..(418): unsure at all n locations
agatgttgctttccccgctgagattgttggaaagcgtactcgctaccgtcttgatggttccaagatcatgaaggtctttttggatgccaaggaaaagaacaacacagagtacaagctcgagactatggtcggtgtgtaccgtaaacttactggcaaagatgttgtttttgagtacccagtcgaagcttgaaagaagatgatgaagaaccatcaggntagtgaaagagagcttttgtttatgttttgtggtatttaggatgaaggaaactctncttgaattcaagttccttgttcacaatccttttaattgttcctatttancaattgactacnttttttgnggttttttcaaatttttgaaaaccctcctnntggattttcaaaaaaanaaaatccnattgcntnnnnnntaaaataa

SEQ ID NO: 133647 - DNA, 362 bp, Arabidopsis thaliana columbia
  unsure (1)..(362): unsure at all n locations
cgaaccagagagctgagatgggttagtgaactcgaatcctgatgacatgtgagtnctntnggtgtcacatctatgagaagacatgaatgagttcgttgctgagactngtggtgacggcgcaaagtttatcgttgacggtgctccgtttgcgagcatcggnggagatgaagaagacgaaccgttctttgtttgattctgattgttgttgttattgtgtgatagaggaggacgacgntgaattggtgttggacaataaactctaaacgcagatccaccaccgtgatattnctctgntttctgtttttgttaacaccggagcttgtttctnggcttcttntcnttcaactncanctccntgctca

SEQ ID NO: 133648 - DNA, 477 bp, Arabidopsis thaliana columbia
  unsure (1)..(477): unsure at all n locations
gcgaagaggactctttcttccactgctcagaccaccatcgagattgactctctatacgagggtatcgacttctactccaccatcacccgtgctagatttgaggagctcaacatggatctcttcaggaagtgtatggagccagttgagaagtgtcttcgtgatgctaagatggacaagagcactttcatgatgttgtccttnntggtggttctacccgtatccctaaggttcagcaattgctccaggncttcttcaacggcaaagagctttgcaagtctattaaccctgatgaggctaattgcctacggtgctgcttgtccagggagctattctnaagcggntgaaggaaacgtgaaggttcaaagatctttctaattgctcgaatgtcactcctcttttcccnttgttttgnaaacntnccggtggtggnaatnaccanttttnntnccaaagnnccaaanccattccaanccaagg

SEQ ID NO: 133649 - DNA, 413 bp, Arabidopsis thaliana columbia
  unsure (1)..(413): unsure at all n locations
gcgaagaggactctttcttccactgctcagaccaccatcgagattgactctctatacgagggtatcgacttctactccaccatcacccgtgctagatttgaggagctcaacatggatctcttcaggaagtgtatggagccagttgagaagtgtcttcgtgatgctaagatggacaagagcactttcatgatgttgtccttgttggtggttctacccgtatccctaaggttcagcaattgctccaggncttcttcaacggcaaagagctttncaagtctattaaccctgatgaggctntttgcctacggtgctgctgtccaggggagctattctcaagcggtgaagggnancgagaaaggttcaanannctnntaatttnctcgattgtnantcctnctntcccttnggttttg

SEQ ID NO: 133650 - DNA, 418 bp, Arabidopsis thaliana columbia
  unsure (1)..(418): unsure at all n locations
ccagttgctttagcggtgtttgggtttgaagcaagcaaattgtatacagcgaacaaaaagaggttaaacagtggcaacactgaatgtatctntnaagctacgatcgantggactcctctgagtctaatcttctgtggtctctgtggtctcattggaggtatcgtaggtggtctccttggatccggtggtggatttgtnctcgggcctttgcttcttgagattggagtcatcccacaggttgctagcgcaacanctacctttntaatgatgttttcttcggccttatccgtagtcggagttctatctcctcaagnagatttcccaaatacccatacggaaaatgtaccttaantttcggggnatcggntttntttgcccggttttttggggggncaaanccttttttaaagnaaaannc

SEQ ID NO: 133651 - DNA, 421 bp, Arabidopsis thaliana columbia
  unsure (1)..(421): unsure at all n locations
aatcggtcattctctctttagtctttaccaagaagagctccaagaatcagaggtacataagatattgggatcattataaaatggcgagtgaagcacctagttgggcggatcaatgggggaccggaggaattggggtgatggctgcggaggagacaactgacggcaaaaaagacgtcaccgggaaaaagtccggcaagaccaaagcagggattaacaaagccaagattgttgtatttattggtgtcaattggatgaagaatcttgttcagaggaagaaggaaggattctacttcttcataggtttanaaacatgattttttcccttcttccttttttnnaatgtcaacaaatcnttcttatgggtnnttattanttccttaaaantcctttttnaatngggtnnaaaaanttnantaagana

SEQ ID NO: 133652 - DNA, 371 bp, Arabidopsis thaliana columbia
  unsure (1)..(371): unsure at all n locations
tcatagtaaacgtgcttgtaatatgatttcatcaagaggatgcaaggctttagctgattggnttccaccttctctnagggaatattcagatgatgagattgcagctcgtgtagtcattagagaaatattgagttcacctcctgtnattagaaaganctctaaaattnctttcatgttttnaacncctggtacattgcctttngagaggctttgggacagattttccctgggccatgaagggaaatnntctgtttatatacatgcatcaaaggaaaggccagttcactacagtnggttactttctcaacccgcggaattngtagtgatgaggtggtgtggggaagggttatcantgggttgncgcagagagg

SEQ ID NO: 133653 - DNA, 602 bp, Arabidopsis thaliana columbia
  unsure (1)..(602): unsure at all n locations
acgacacttctnatgatcaacaagacatcaccagaggcaagggtatggttgantctgtcttccaagctcctatgggaaccggaactcaccacgctgtccttagctcatacgaatacgttagccaaggccttaggcagtacaacttggacaacatgatggatgggtttnacattgctcctgctttcatggacaagcttgttgttcacatcaccaagaacttcttgactctgcctaacatcaaggttccacttatttngggtatatggggaggcaaaggtcaaggtaaatccttccagtgtgagcttgtcatggccaagatgggtatcaacccaatcatgatgagtgctggagagctttnagagtggnaaacgcaggaggaacccggaaaagcttatcccgtcagagggtcccgtgaggcaagcttgcctttgtcaangatggggaaaggatgtgttgtntcttcatccaacggtcttttgccggttggttccgggtccggttggggtgggtcctnccttaagnncanttgnaacnaatnanagttgggttancggaancccnntttgccatttnttggtacccaaccaacgggccnngntccc

SEQ ID NO: 133654 - DNA, 438 bp, Arabidopsis thaliana columbia
  unsure (1)..(438): unsure at all n locations
gtactatcaagaagcagaagatggcccaaaaggtggaagcacaaggagggaaaggagccaacctatggnacgatggatcgacacatgacgccgtgaccaagattcagctcgcagcaggcatagacggaattcaatatgttcagtttgattatntcaagaacggacaacccgaacaagctcctnttcgtggtaccaaaggccgtgttctcccagctgatccgtttgtaattaaccatccagacaagcccaagatggaatctnagctgttaagtttgtntacggcaaaagccctnaggaggtcacaggagaagaacatggnaagagtactctactcggattcgaagagttcgtacttgacttatccaagtgaatacatcaccggagtcgntggnacttntgnttaantctttgggagtnntggtnagtcataactttggt

SEQ ID NO: 133655 - DNA, 412 bp, Arabidopsis thaliana columbia
  unsure (1)..(412): unsure at all n locations
ccaaaaaaaagaaaacacaaaaacaaagattataatgncttcctcaaccatggctttgtcctcccctgccttcgccggaaaggctgtgaagctgccgcatcanatgtcctcggaagcggccgtgtgaccatgaggaagactgtcgccaagccaaagggtccatcaggcagcccatggtacggntctgaccgagtcaagtacttgggtccattctccggcgagcccccgagctaccttaccggtgagttccccggtgactacggatgggacaccgctggtctatccgccgacccaagagaccttngncagggacccgtgagtttgaagttntccacaagcagntgggccatnttcggagccctnggnttnggttttcccttggnctatttgtttggnccggggttgnntttng

SEQ ID NO: 133656 - DNA, 294 bp, Arabidopsis thaliana columbia
  unsure (1)..(294): unsure at all n locations
tttgtcaccgtcggcgtcccgtctgtnaccgtcgccgtggctctttgtcgccgttaacccttgtnaaaaaccctaaaattttaatgggttgagccttgtnaattcgggttgggccttgtaaatttaataattgggtttgtaaatttntnaatgtatttnaatggtgtaataagtttggnctttgttttcagcctatttgntttttttttttgtaattcaatttaaattaaccgaaatagaaaacatttggtttaaaaaaaaaaanataaaaaaaaataaaaaaannggggggcc

SEQ ID NO: 133657 - DNA, 315 bp, Arabidopsis thaliana columbia
  unsure (1)..(315): unsure at all n locations
tcactccacgcattatagcgatgggcttcccgtcggaagatgtggagtcgatntatcggaatccgtacagtgaggtgtataggctnttggagagggagcacagggagaggtatacggtgtataacttgtgtagtgagaggaggtatnatngggcgaagttncatcaacgggcgttcaggttcccgttcgatnaccataacgngccacagctcgtcacggtgtggtcgttctgtcaacatgccacggactgttttgagtggagacgcgganggttagtggccatacactgtaaangcgggtgaaggtganngacaa

SEQ ID NO: 133658 - DNA, 512 bp, Arabidopsis thaliana columbia
  unsure (1)..(512): unsure at all n locations
caaatgcctcgtcatctaattagtgacgcgcatgaatggattaacgagattcccactgtccctgtctactatccagcgaaaccacagccaagggaacgggcttggcagaatcagcggggaaagaagaccctgttgagcttgactctagtccgactttgtgaaatgacttgagaggtgtaggataagtgggagcttcggcgcaagtnaaataccactacttttaacgttattttacttactccgtgaatcggaggcggggtacaacccctgtttttggtcccaaggctcgcttcggcgggtcgatcccgggcggaggacattgtcaaggtggggagtttngctggggcggcacatctgttaaaagntaacgcaggtntncctaagatgagntcaaacgggnaccaggaatnctcgtgtggaaaaaaaagggcggccgtnttgggggtnccaagcttncgnccgngtcattcgacggtanancnttttntgggncnccaaatcaattnactgcc

SEQ ID NO: 133659 - DNA, 491 bp, Arabidopsis thaliana columbia
  unsure (1)..(491): unsure at all n locations
agcttctcgttttctctgccgtctctctcattcgcgcgacgcaaacgatcttcagccatggccaccgccgcagatgttgacgctgagattcagcaggcgctcactaacgaagtcaagctcttcaaccgctggacctatgacgacgttacggtcacagacatcagtcttgttgactacattggagttcaggcagctaaacatgctacctttgttccccacaccgctggaagatactctgtgaagagattcaggaaggctcagtgccccattgttgagagggtcaccaactctctcatgatgcacgggaggaacaacgggtaaaggaaatttgatggctgtcnaggatccgtcaaagcaacgncatggggggtttttccnccnctttgttttnactttgaaccccaattttgggnaatnanttntcgggcantttnaaaaanngggncccgggaaggtnnttccacaatttgggccnncnggggttttttggg

SEQ ID NO: 133660 - DNA, 540 bp, Arabidopsis thaliana columbia
  unsure (1)..(540): unsure at all n locations
tgcttaaagaacatccaggaagtacagtagtgactgacgcaagancgagtatggggctaactaggtttataacggagcgaggagggaggcattgtttgtatagagtagggtatagaaacgtgattgacaagggagtagagctgaacaaagacggcatcgagactcatctcatgatggaaacttcaggacatggtgcggttaaggagaatcacttcttggatgatggtgcatacatggtggtgaagatcataattgaaatggtgagaatgagactcgcgggatcaaatgaaaggtatccggtagttttatcgnagaccttnaggagccnttagaagccggttgagctttcggttgaatatttttttcaggagcccaaggggnttcccaaagcaaaaaggcatttaagnccctttnnggcttttcagggcaattaccattttnggggngggaaacctntaagggntngggattntggcccncttttggggttttttngggttaccttaaggntnctttggggggncnaaaattncccccccc

SEQ ID NO: 133661 - DNA, 469 bp, Arabidopsis thaliana columbia
  unsure (1)..(469): unsure at all n locations
catcgaaagttgatatgtgggcgatgggagctattatggctgagttgttgtctcttcgccccatttttcctggggctagtgaagcagatgaaatctacaaaatctgcagtgtcataggcaccccaactgaggagacctggttggagggacttaatcttgcaaacacaataaactatcaattccctcagcttcctggtgtacctctttctagcttgatgccatctgctagtgaagacgcaattaatcttattgagcgactttgctcgtgggatccatccagcagaccgactgctgcagaggtgctgcagacccgtncttncagagttgcttttatgtcccacccatctnttngtcccaagccttctgttgnaagaactccnnccgcctgtggggcctaggggancatttgggcaccatncagttaangggaacccanttgttttntgccaatnncnaggcaatncantng

SEQ ID NO: 133662 - DNA, 482 bp, Arabidopsis thaliana columbia
  unsure (1)..(482): unsure at all n locations
cctgccttgatgtggttcttctggactaggctcgagagcatgttgtactccaagattcaactcggtaaagccgatgatcacgacgatgtgatgcaaggaatcaaaaagatactaagctacgacaagcttggaggatgggcactactgagcaaaggacctgagatagtgatgatcgctcacggtgccatagagaggactatgagtntttacgaccggacctggaaaacccacgtcccgaccaaaggctacaccaaagcaatgtccgaccaccaccacgatgaggtcctccgtgaaaccggaaaaccttgcggccactttgattttccacatcactgntcggagcggtcgggattccggagaaggatgaattncttcgagtgtcagcgtcccgntggggaggacatnnggtttnttttntttttaacgntgnaaaagctccnccggngcggggnctttcaacttnttnatngtgnaaaaagnna

SEQ ID NO: 133663 - DNA, 488 bp, Arabidopsis thaliana columbia
  unsure (1)..(488): unsure at all n locations
caacaacaaatgtcaaattggcctgagcttcctgttaactccattattaattggctattgtctaatagctcttctttagttgtggctgattttggctgtggtgatgcaaggattgctaaaagtgtgaagaacaaagttttctcctttgatcttgtctcaaagaacccctctgttattgcctgcgatgtcaaatacttcacttgagtcttcatcagtggatgttgcagttttctgtctttcattaatgggnacaaactattctagttatatcaaagaagcacatcgagttcttcgtccaagtggtatgcttcttatagcgggaagtaaagngcaggtttgatcccaancaatggggggggcaggccccnaaagnccttttgtgaaagccgtttttgatcttggggtttccttcgggttttaaaggngcaanctttnctnctnccttttntncantnccccttttagnaagnancccatttngggtcntt

SEQ ID NO: 133664 - DNA, 444 bp, Arabidopsis thaliana columbia
  unsure (1)..(444): unsure at all n locations
ttttgntccaaaattggaagaagagaaaaacaacattccggtttcggtccattgtcgattcaaagcaacagttttttctctcctgtgattgcgggtaatcccgtaccccagttccacgcaagantcgcatcatcagaggctgtagagccaagtccgagttcccggagtcaaaaagaagaagaagatgaggaagttcttgagggtaacatcagaatttcaagtgtttactcacaaggattagtgaaaacactgagagaagcattggagaattcaggagtggacttaacgnaagcaagcatctccgttgaaatcgagctcgctaaacaatcctcggcttcttccttcaaggntccatgnagttcggtgaaccggtttntnggaccccgaaacggcaattttcaagnaaacttggnaanccaaacgggtnaangcngggnccntnng

SEQ ID NO: 133665 - DNA, 363 bp, Arabidopsis thaliana columbia
  unsure (1)..(363): unsure at all n locations
ccatcttggatgcctgcnatcctggttggntcaaggtctaaatnaggtttatncttgtcctacatgtcgtaagcctctttncgttggtagaactgaaaatnaggtgaaccctcgcacagtggaagtntcaagtaatgagcagttagcccgtcagcttgaaagacaaaacaatcctgtacatgcactagccactggattatttcctgctgaggtgccagattctntcgaaaatnatacttcgaggaatttaggattggttccaagttggctgcagacatggtcaagtcagggttctnatgtcgctggtccttctaccacttccagggcagttggnccttngggcgggttcagntgntgatgggg

SEQ ID NO: 133666 - DNA, 403 bp, Arabidopsis thaliana columbia
  unsure (1)..(403): unsure at all n locations
cacggagatcctgcacggcgagccgcagctgtcctacctccgcaccatggccgcctccaagatgggccacagctggggcaagtcgttccttaagggcatcggatgcaacatgatggtgtgcctggngctgtggtgcaactcactgcgggtnacactctctcaaaagtcatcgccacctaccttcccatctngtgtttcctgtggatcggctgggagcactccgtggccaacatgttctcggtcaccatcgcctgctacgagggggtgcccggnaagacctngggtgacgttttggnattggaatttnatcccggtaaggttcggaaacatgttngggggnatccttttnggtttgggncaatttntggcctacggtnaatnacggcaagnccaaancttggga

SEQ ID NO: 133667 - DNA, 354 bp, Arabidopsis thaliana columbia
  unsure (1)..(354): unsure at all n locations
gagaactatcttggatattggatgtggttatggtagctttggggcacatctattgtccaaacagatttnaactatgtncatagcaaactacgaagcttcgggtagccaagttcagctaacactcgaaaggggtcttcctgcaatnattggctctttnatatcaaagcaattgccatatccttctntttcctttgatatgtngcatngcttaanatgtggcattgattggnaccngaaagatgggcttctccttgtagaaattgncagggttctcaagcccggtggttactttgtatggncatctccggtcacaaaccctcgtaacaagggttcatcttaaaannttgggccttt

SEQ ID NO: 133668 - DNA, 412 bp, Arabidopsis thaliana columbia
  unsure (1)..(412): unsure at all n locations
gatgtngtggctggacctcagcctgaccgtggccttggccgcctccgtaagatcaccacccaacccattaatatccganatataggagaagggagcagcagtaaggtggtgatgcataggtcgttnaccatgccggcggagtnagccctggaactccaacgactccaaccactccnacgacgccacgtaaggataacgtntggaggagcgtntttaatccgggaagcaacctcgccactagagccatcggtccaacatctttaataaacccacccatccaaattttccctccgtntacggctgctttgataatgaagctcaaaggaaggacatttggcactgttttttagtgggcgctttggttaaggtgaattngtttnattcttnttttnccnaantaancntccttttt

SEQ ID NO: 133669 - DNA, 549 bp, Arabidopsis thaliana columbia
  unsure (1)..(549): unsure at all n locations
gaagaatacttctcaaaccatcttctccaacttttttnttctccttctcctttcttcatgtgtctctgctcagctccggacaggtttctaccagaactcatgtccgaacgtggaaaccattgtacgtaacgctgtccgtcagaaattccagcagactttcgttaccgctccggccactcttcgcctcttcttccacgattgcttcgttcgtggatgtgatgcgtcaataatgatagcatcaccatcggagagagaccatccagatgacatgtcattggccggagacggattcgacacggtggtgaaggcgaagaagcccgttgatagcaatcccaattgccgcaacaaagtctcatgtgctgacattttggctctggcactcgtgaagtcgtcgttttgaccggaggcccanntacccggtgggntagggagnagagttgcagatttcncgnaggcagcgtnaaagcaattnnctagcccggttaactaaaccagttacggatntttgcgaacggctttttaaccgtttgnttccctttggggnaangc

SEQ ID NO: 133670 - DNA, 310 bp, Arabidopsis thaliana columbia
  unsure (1)..(310): unsure at all n locations
tagtcattgtcctcaaggngcaaggnctatatcgttcagctggngcaataacgttctactaagtggtctatcgtcgtttaatagccagaatatgcacgtcacggttcatcattcttctaatgntcggattgaaaacgtaagaattagggctccaagtggaagccctaacaccgatggtatccacgtacagtcttctnctggagtcaccattagtggcggaaccattncgaccggtgatgactgcattgcacttagtcaaggntctnggaacattttcgatcgaacgtgtcaattntggaccgggncatng

SEQ ID NO: 133671 - DNA, 455 bp, Arabidopsis thaliana columbia
  unsure (1)..(455): unsure at all n locations
caagagagagagagaaagaaagtatgggaaagaaaggagaagggttctttgtgagcagattaagggctaatgtaagagtccaaccaccgacaactacgagccagcatggctgcagccacgagccaccaactacctccatagagataaaaggaagaagaataattgttgtggttgattcttgctcggaggctaaaaacgctttgctttggacactctcacattgtgctcagcctcaagattccattctncttctccattttcttaaagctaaaaccctctcaattcagggtgatctagctnaccaaaggangnagggggaagnccggattcttttttgccaaacccntgtnttgagnnttaaaaanncctttggnttaaaaaccagaagttggttttttttaaaaangtttccgggaaggggnccccccctttgttaaaagggncaaggnnncggg

SEQ ID NO: 133672 - DNA, 501 bp, Arabidopsis thaliana columbia
  unsure (1)..(501): unsure at all n locations
gatttttggtgggaattggagttggtctcattagctacgtggttcctgtatatattgcagaaataacacccaagcacgtaagaggggcttttacatttagcaatcagcttttgcaaaactgtggagttgcagtcgtatattactttggaaatttcttgtcatggagaactttagccataataggtagtattccatgttggatacaagttattggtttgtncttcatacctgagtctccaagatggctggcgaaaaaaggtcgtgataaagaatgtgaagaagttcttcaaaagttaagaggnngaaaatacgntattgtgccctgaagcctgcggaatcaagnatttcagttgaagcttcgaagaaaaaattcgnatatcaccattcgtaggcttttccgaaaagggggtatgcccatcaactttcaaatcggcattgggttttnttgcctcttcaaccagnttttngggnccnccnngnntnaagtnnttccgggggcnc

SEQ ID NO: 133673 - DNA, 437 bp, Arabidopsis thaliana columbia
  unsure (1)..(437): unsure at all n locations
caacaacaaatcttaaacgttttactttgtgctgcactactcaacctcaatggccgcctcaacaatggctctctcctcccctgccttcgccggtaaggccgtcaagctttcccccgcggcatctgaagtccttggaagcggccgtgtgacaatnaggaagactgttgccaagccaaagggcccatcaggcagcccatggtacggntctgaccgtgtcaagtacttggntccattctctggcggatcancgagctaaccttaccggagagttccccggagactacggatgggacaaccgccggacttttaagttgaccccgagncattngnaaggaacccttgaggctngnaagttatccncaagaaggtggggaaatnctttggnggccctaggnttnggttttcccttaagtttttggnttngggaacggggtnaa

SEQ ID NO: 133674 - DNA, 501 bp, Arabidopsis thaliana columbia
  unsure (1)..(501): unsure at all n locations
ggcgaggaaggcaggttattgctgttgcaaagtcttccgaccttgtattgatggttctnnatgcctcaaaaagcgaaggccacaggcaaatattgactaaggaacttnaggcagtgggcttgcnactaaacaaaactcctccgcagatatactttaaaaagaaaaagactggtggaatctntttcaacactacagcacccttgactcacattgatgagaagctctgtnatcaaatcctgcatgantacaagattcacaatgctgaggtgctattccgtgagattgccccagtgggtgncttttttgatgncattgagggcaccccaagtnttnttaggtgtgtttaggccttcaccaaataggatgtttttggatttgatgntgtggntggcctttccgggagccaaatcccttgttatttggcngaatntttaggttantttggcaggcttcttncttggttttgggcggattggccctttnngggtttcncggggccga

SEQ ID NO: 133675 - DNA, 575 bp, Arabidopsis thaliana columbia
  unsure (1)..(575): unsure at all n locations
ctccacgtgaagttgaagcatatattcatcgttcaggccgaacaggaagagctggcaacacaggagttgcggttacactctacgattctagaaagtcgagtgtatccaggatcgaaaaagaagctggtatcaaatttgagcaccttgctgcacctcaacctgatgaaattgccagatctggtggtatggaagctgctgagaaagttaaacaagtgtgtgacagtgtggttcctgcattccttgaagctgccaaggaattattagaaacttctggtttatcagctgaagtactcctcgcaaaagctcttgcaaaaactgcgggcttcactgagntaaaggaaanggtcacttcttacatcaattggggancttttgtgncacttccatcttgnaagcagggnaacccaatnttactcggccatcatttngtttttggcctnctnagggggggtttttcccggtttgcaagggtggaatganttgaggggtttnttttacngcnggttaaacangggntttgttcgttgtaaggatcangcctggcttntnanttaggggccaaagggntggngttt

SEQ ID NO: 133676 - DNA, 255 bp, Arabidopsis thaliana columbia
  unsure (1)..(255): unsure at all n locations
ggagataaccgccataagaaccgttttggagtctttccttcctcagattgcgctcattgttttcttggccatgttgccgaagcttctcttgtttctctccaaagncgaggggattccttcacagagccatgccattagggctgcttcaggggagnacttttaattctcggnctttaaatggcttcantgggggtaaccntgcttggncttttnttcaaacacagtgaaggntntcgcgnaaaaatcccaaacttg

SEQ ID NO: 133677 - DNA, 437 bp, Arabidopsis thaliana columbia
  unsure (1)..(437): unsure at all n locations
agaaggaacaacaagagaagagcaggaaaaagccacaaaagggacattgtttataccattctcacagttccccctcaagcagttacgtagagattgtatctatcataccacaccagcattgatagttccaaaatctctggtgaatgtccactcctgtgagaactggttaccgagaaaggcgatgagtgcaactagagtggccggcatattgcacgccttagaaggatgggaaatgcatgagtntggcacatcccttcttctctcggatttggaccaagtattggggagcctgtnttaagccacggtttccagcnttttcctnctttccanaatntttnaaaacntccaaccctttgganggtttttggggggatttgngggcccacacgcttttgngtttttttccccttanngncccanttttttncggggnaaaa

SEQ ID NO: 133678 - DNA, 430 bp, Arabidopsis thaliana columbia
  unsure (1)..(430): unsure at all n locations
cagactactaaagagtaaagactagtaacaacaaacctgaactcatgccaagttagaattgagatttggagtttcgacaaagcttgagagagatcgatgtcgtcaaagatggtgaagtcttcagaaatcgtcggaaaacttaatctcagggtacaccaagaaggaggctttttcgctgaaactttcagagattctnctgttttcctctccacctctcagctccctccaacctttaaggtggacagagctgtgagcacaagtatctacttctttgcttccatctgggaggcggtttctcgtctttcatcngaataccaattggttgaaaccctgggacttttantttgggngganccccttnanttaaggnggnnncttttccggtttttgggnantnaaaattncaantnttttgggcccccaccttttt

SEQ ID NO: 133679 - DNA, 536 bp, Arabidopsis thaliana columbia
  unsure (1)..(536): unsure at all n locations
acacctttcgctaatgtcagtgagcaagtttccacatctctctcatggcgttcacactatcaatttcctcaatgaaccagtgtttttaagtgtgttgctcccatctccctctcggattcgagtattctcgtccatttccacctccgggatcggcggcggggtcgccaagtgccatggaacgagacatagcggcgccggtggtagaggtgataacgggttgaggagagatagtggattaggtttcgacgagagaggagagagaaaagtgcgttgtgaggttgatgtgatctcgtggagagaacggaggataagaggcgaaatctgggtcgattctnattctcaatctgtttggaatgttcttactgattataaacggcttgctgattcatacccaatctcgtttngagtggagaattcctntccacatccaggcggntatggcttgngaacggggccttnaaangncctttattgcaantttangcncntntgcccttaccncatgagtgntanattnccaatggcngagntnnctt

SEQ ID NO: 133680 - DNA, 526 bp, Arabidopsis thaliana columbia
  unsure (1)..(526): unsure at all n locations
gcatcaaaccctaagaaactgaagatgaggccgatcctgatgaagggacatgaacgtccattgacgtttctaaggtacaacagagaaggagatctgctttnntcctgcgccaaggaccacacacccaccctctggtttgccgataacggcgagcgccttggaacttaccgtggtcacaacggtgctgtttggtgctgtgatgtctcccgagactcgtcaagattgatcactggtagtgctgatcagactgcaaagctgtgggatgtaaaatctggaaaagaattgttcactttcaagtttaatgcccctacgaggtctgtggatttcnctgttggagatcggcnttgcagtgattaccactgatcanttcgnggnccgtaccgttgcttttcatgtaaagggtnttcgggaantccttnggacagnattctgggtttggnnttnccctaatnccccttttgaaaaaaggggccaanagngcttttttgggnccctgancaaattttntagggggggaanaaaagtt

SEQ ID NO: 133681 - DNA, 493 bp, Arabidopsis thaliana columbia
  unsure (1)..(493): unsure at all n locations
ggaaatactaacccgtgaattggacgacaaagtcaggttcaggcagaaaccagttgagaggcccgggtctggtgcaggtagaaccggaacatattcagaaagaacacattcccgggctggctcaattgatgaaaccaggagttttgaatctacagagagacccagatcacgtggtgccgtcgatgcctgggttagaccagccaatgagcagcgaagaaactttcaaggaaccaaagagcgcggattcttcagcaacaggtcttcctctaggganggatggtaagaaggaaacggagnacaaccaaatgtgggntatctttaactcctactncacagttcccagatttttaaggaggcctttgagcancgttatttcattaataaaatnttcntaaaaanccctnattcttgnccctttttttgttgggccntcttcgggattcgngcttttttnttcggtttggcttnttncttanggnggggtntttaagng

SEQ ID NO: 133682 - DNA, 366 bp, Arabidopsis thaliana columbia
  unsure (1)..(366): unsure at all n locations
aactaaaagagagttatcaagttattattgtctgattagctcataccttacggcttagataagtagattctggaataattcatgtagctaagtnctttatgattcaccnggtaaaaatgacacttganatgatgattgcnacgcatttatattttgttgggatccaggtgattgtngagaaggctgagaagagtgatataccaaccatcgacaagaaaaagtaagcatattaatggcatcagtatccttttcattcggacctgacttgttaataatagtgattgntaactaagctttttncaatttgcaggtncctagtcccggctgnnctgcctttggggcantttttgnatgccnttcgncaaa

SEQ ID NO: 133683 - DNA, 510 bp, Arabidopsis thaliana columbia
  unsure (1)..(510): unsure at all n locations
cctttccttgtaaaagctgaaacctttgagaacggagttcctttctcagacattcgagtacacctcgacaagctagaccagaaatggactgatcagtacatcaatttcgactacgttgtcatctccggtggaaaatggttcctcaaaacaacaatcttccatgaaaacaacaccgtaaccggatgccattactgccaagggaagaacaatatgaccgaactcggttatctatactcgtaccgaaaggttcttcgtttggttttagactttntcgctgaaccggaccataaagctcaggttctcttcaggacaacaacacctgatcatttcgngatggagagtggggcttttggtggttntgtaaccggncaatgccgtttcggagggagcnaggnggtntnagngcggggtttntcgtgcgggntttggccttnagggtttttangcttctcttcnnaacaagagggtccatttaanattgttttttgnaaactnattgngtttcngccc

SEQ ID NO: 133684 - DNA, 276 bp, Arabidopsis thaliana columbia
  unsure (1)..(276): unsure at all n locations
ctctcgtctctatcttnctctcacactcatgggtcttcctacagatttcaaagagcttcagattccaggttacgtactaaaaacactttacgtcatcggtttctttagagacatggtcgatgctcttttgtccttacatcggtctaccaagttttctngaccacaacgagacctctcgaccngacccgncccgactcgntctntccacgtcagcaactcttgccaacgagttaatcccggtggtttcgtttcnccnganctcttgacccgatncng

SEQ ID NO: 133685 - DNA, 585 bp, Arabidopsis thaliana columbia
  unsure (1)..(585): unsure at all n locations
accaaagtggcttaaagagtgttgatcatagtgggttcatcagatttgttgttaatggtcgacaagaatcgtcaaaggagacgttgacagacgaggaagaagaaggagtttttattttaaggtcaatggataggtttcttgaaaagcaaaatgctgaatccatcagacatacaatgcaagcccaagaagatatttttaagcaacaggtacgagagctacatagagtatataatacacagaaaatgatgatgactcaactcaaacatagaagccactattggactgttaacaacaaagnccaacccggttcaagagagagaaccggaagttgttcaggcatagncctcgaaaatntggttagagcaacacaaacggcggcgggttcatatcgaagagagcggacctcgaatttncattgggcattggtttgnttcttcatctnctccttttgcccncggcaacggccangggcattggcttctntgnaannacgncantgggtcatcatcggntaattntattttcnggnattntanccttttttttcccggattttnccngangtggggccaaccgctttggggt

SEQ ID NO: 133686 - DNA, 403 bp, Arabidopsis thaliana columbia
  unsure (1)..(403): unsure at all n locations
ctcaaggntcaagttgtgatacgtacagtgctaaacatcctacagactaatactagtgctgttacttcactgggaacatacttcttatcccaaatttccttgatnttcttggatatgttgaatgtatacagaatgtacagtgagcttgtgtcaaccaacattactgagggaggaccatatgcttccaagacatcttttgtaaaactcttaagatcggttaagngggtaacacttaagctgatagaaacctttttagacaaagctgangaccagccacacatagggaaccaattttntgccgccaaatgattgggatcagtacttgggtgactatgcgaggnatgtgncctnatgntagggnattccgaagttcntttcacncnttncaaccggtttttannca

SEQ ID NO: 133687 - DNA, 556 bp, Arabidopsis thaliana columbia
  unsure (1)..(556): unsure at all n locations
ctacacttccatataattaaaacacagagagacgaagaaaatcgagatctcgaataatgcgaatctgaaggatctttacgaattccataatcttcagatcgaaaggtttctatcgattcgttggtcaagaggagattgtgcgtgtnattcgtgagcatgggctgttcgtttcaggattgaacgcactttacgacgccgtcaacggtggaggtgacgtatggttcaatgagaatcgattcaggatccggctcatctctccgctgacggaacttatgctatgaagaaagttttgattcagaacaaggagcaattggaattggtgcgtgaggagatccgtgtttcttcattgttcaatcanccctaatttgcttccactccttgatcatgccattatttctgttaaggacggnccagaggggnctttgaacacggggcctcttgctgttccngtcacttngntgggccntcctggnaattcnctttnatgangntaaaaagaactttttaacaactnttgtttnaaaatccgcantttttntgnttaaaangncnntgg

SEQ ID NO: 133688 - DNA, 570 bp, Arabidopsis thaliana columbia
  unsure (1)..(570): unsure at all n locations
cagcttcgaaatcaaacacattctcatcaggaggtagcttcaatgcttcaaacgttgattttggtgtgcaaccaagtggtccacaatcttcgagtgcaaacgntgatccattaggaatgtnctctaattccaaaccctcagctgcaccacctacgccacagaccgaagattggggatttgaaagttttgacggtggggctggttccaccaccgagcttgatggtttgccaccgnctccaccgggtgtatcagctacatcagctaagaacaagggcattgataaccagagagctggtgatgaagctggatcagccgaggttctttcaacaagggcttcgtgttacaaagaagttggagagtataagaaagctgtagccgncttcacaaaggtacttgatcacggcaagaggatgtgnccattcttggttcaacgggcactntntncgggngcattgggaattcaaactcggggctnaggcctaagnttggtctaagnttttncccggnttgnatccctgnagncttttcccccctaccaaatgntggtgcccnnaatttcggtntnaagaa

SEQ ID NO: 133689 - DNA, 437 bp, Arabidopsis thaliana columbia
  unsure (1)..(437): unsure at all n locations
tacttgtttgttttcagttgctttctgtatgctgtgagtcgatgccagtgttcaacaacgttaaaaagttacttatttacagtgacgaggatcgaggatggcaagcagtgccagtncttctacggaattgtccacgtttagaaactctaatatttgagggtatcgtgcaccatgtgacagataaatgcggggatgcttgtgactgcattttccgaaaggacaaaggccgttcgctcaaatcttgtccagtgaaagtggtagagattaatgggtttggagtaacantgnaagagaagtacctgatagagcatttcttggnttaccttttccgtgtttaaaggnggttgaagnnctatattaatttgtgaagggggntgggtnttacacaaccaggtttttgaagnccccgtgaaggtgtctaaacntttttnttnggg

SEQ ID NO: 133690 - DNA, 411 bp, Arabidopsis thaliana columbia
  unsure (1)..(411): unsure at all n locations
cccacgcgtccgcacaacaatcaccatgaaggttttatgaacttcatgcacagagatgaggagatcaattactacccctcaaagtttgatcctgtccgctgcgctgagaaagttcccacccctacaaactcctacactggaattcgaacaaagtgcgtcatcaagaaagagaacaacttcaaacaggctggagacaggtacagatcatgggcaccagacaggcaagacaggtttnttaagagatngggttggggttctntnggaggcacgnnttaaccanggggttcccgggaattttgntttttttaacttggtttaaggtttntncgtnccttgggccangaatttttaaagccggtttttaccgntngggcccaagggntttttgggggcccaatttcccttttaggg

SEQ ID NO: 133691 - DNA, 518 bp, Arabidopsis thaliana columbia
  unsure (1)..(518): unsure at all n locations
agagagaaaagagaagacagagtcaattcaatttctgaaaaaagttcaaatttttctaataaattttgatttcccattagtcagaaacatcttctttctcgtgcccggngctcaatttttcaaatttcattgaaaaatcgaagctttcctggaaaatttttgcattctctgttacatcgtcttcacctaatttnccattaatgggtatctcaaaagacaggatcaaattcaacgttggtggacgnctcttcgaaacgacggcgacgacgttagcaaacgcaggtcgtggatctttccttcggagcattgttcganggcggattgaattctttaaccactttaaggattccattcttttccgtaggcaagaaacctcaggntgnttncgaggtcttccttgatcctnttccgnacggggggccttaaaggttccggccaaaatcccttgggggttncctcaaaggngaggttttttncngggttnnttttcccntntngggcccntnaatggggccctt

SEQ ID NO: 133692 - DNA, 536 bp, Arabidopsis thaliana columbia
  unsure (1)..(536): unsure at all n locations
cattcacaaaaccatcttaaagcaactacacaaatcttgaaattttctcatattttctatttactatataaacttttaatcaaatcaagattaactatggctgaggagtacaagaacaacgttcccgagcacgagacaccaacggtcgcaacagaggaatcaccagcgacgacaacagaggttacggntcgtggattgtttgatttcttggggaagaaggaagaggaagtgaaacctcaagagacaacgacgctcgagtctgagttcgatcataaggctcagatctctgaaccggagttagctgcgganacgaggaagtgaaggagaacaagnttactctgctagaggagcttcaagnaaagaccnaggaagatgaggngncaagcctagtgtatcgaaaagcttcaccgtccaacagtttttttcctctttgngcgntnaagaaggttaggaaagnaggngntgagnagaagnctttagggggggngtnaganggcttttgggnagtcaagggagtcccgggncccgnaagcaga

SEQ ID NO: 133693 - DNA, 544 bp, Arabidopsis thaliana columbia
  unsure (1)..(544): unsure at all n locations
atcagaaaaggagagaaaaattaaaaaagtctctcttttctctttttcttcttcgtctcccatattctccgatcaaaaatatatttctctctcactttccttggttttctcggcggcttcttcttctcctatttctccctcaaatcgttttctccagttttcttgggataaatcttcctcctttctgcagacgccatgtcggacaaaggtcgtcccttgccaaaatttggtgaatgggatgtgaatgatccagcatcagcagaaggttttacagtgatattcaacaaagctagggatgagaaaaagaccggtggcaaaccgggatcacccggtaaatccagtgagggcatgttaaatctggaggaggggtcctagtaaacctcagcctaaaaatggctttctgcatgnagctccagctttggcctttgcagcacaaggtgggtttcttnctgtaaaaaaagcncaggggtncnatttaaggatggtcttttaggtttttgcgctttttgaanncccncccaaaaaanggcntngnnttgggcnt

SEQ ID NO: 133694 - DNA, 395 bp, Arabidopsis thaliana columbia
  unsure (1)..(395): unsure at all n locations
gcaaaggttgctgatttcggtctctccaaacttgtgggggaccctgaaaaagctcatgtcacaacacaagtnaaaggaaccatgggctatcttgatcctgagtactacatgacgaatcaattgacggagaagagcgatgtgtatgggtttngtgtggtgatgcttgagttattaaccggtaaaagtccgatagatagaggcagctatgttgtgaaagaggtaaagaagaagatggataaatcgaggaacttgtatgacttacaagaattgttggccacgncaattttccaaaccagcgggaatttgaaaggggttcgggaaggtntttagnttgtggctctnaantgccgtggccccagggggntnttattanggcccacnaatnggntngggng

SEQ ID NO: 133695 - DNA, 515 bp, Arabidopsis thaliana columbia
  unsure (1)..(515): unsure at all n locations
aaactcaaactnagtggagaggctgcagaagtttcagctccccgtttacgttgaagtgttccgaaatnagtttgtttctcaaccatgggatttcttcgctgatgcaactgtcgagataaactcgcatgtnactggagctggtatcaatggaaccatcactgagttccctctcacagccgcgagatacaaaaggaactcgtgcttgacccggaaaagacgtggctccttacatgattcccagttcaagncccgttgggccttttaaaccattggtgagtncctgnttcggttaccttccagccggaaggaaccaaggccaagtttttaanaagttgcttgattntaacttganccacccnttnacctccagtttttaggccaagggcccaaaccaacaacccttggggccttaattaaanaggggaaaaagtttcccaanggggaaaacccgggggggggtttttnnttttttttntttnnnaatttggaaggggttttgggncttttttaatttt

SEQ ID NO: 133696 - DNA, 504 bp, Arabidopsis thaliana columbia
  unsure (1)..(504): unsure at all n locations
tgatcactcactgcatcaacaatggccagagagaagattgtggtggctggtggtaccacaaagagctggaaactactcttggggctgagaatatttgcattcatggctactttagctgcagccattgtaatgtcactaaacaaagagacaaagaccttggttgtggccaccattggtactgttcctattaaagccactttaaccgctaagtttcagcacacaccggcttttgtgttctttgttatagctaatgtaatggtgagcttccacaacttgttgatgnattgtgggtccagattttccagccggaaactgggngtacaaaggtctttcggcttcctcttctatcgccattcttgncaatgctaaaccggaacacttggtatnttccgggttgaaaccggggngggtttttngtggnaanaccttggggaagnccgggaanaaagncncggccaattgggnccaaangtttttcgcaagggttnccnttttntnnngttc

SEQ ID NO: 133697 - DNA, 280 bp, Arabidopsis thaliana columbia
  unsure (1)..(280): unsure at all n locations
acataactaacaaacgacgccggagatggccgccacttcaaccgccgctgctgcttcttcaatcatgggtacccgggtggtttccgacattagctccaattcaagccggttcacagcccggttcggattcggaaccaagaaagcatctcccaaaaaggctaagacgggttatctcagaccggcctcttatggttccaaggnggnaaatnaaccggatttattttggangggtnaatttttttggggncttanggggttttnanccctttttggggtnang

SEQ ID NO: 133698 - DNA, 579 bp, Arabidopsis thaliana columbia
  unsure (1)..(579): unsure at all n locations
aaaaaaccccaaaaactttacattcttaacaatttcaaccctatgggcttacttgatcatctctgggatgatactgtcgctggtccacggccagtgaacggccttggcaagcttcgtaaacaccataccttcagtttccgacctagctccggcaatgatcaatcggaagctggaagtgcgagatcgtacggtgaggattcgctaccggaagaagcagtgaaagttacacgtagtatcatgataattaaaccaccgggttaccaaggcagttcagctccagcttcgcctgccggttcaactccgccgctatcacctttctcttccgccgctgtctccgttctctggtgagtttttatttttcattagttggtgtaggtgaacagtacacttcactttaattcgttgaaggntattttcggcaattcttttaaagggtttgtttttgcaattccanggtttnnggcaatttnggngatagtgggtaggttagggctgnanggtttttgccagngncttanaaagtttttngggaaanaacaaggtttnccnnnggggccntnngttggtatttggcanttt

SEQ ID NO: 133699 - DNA, 463 bp, Arabidopsis thaliana columbia
  unsure (1)..(463): unsure at all n locations
aacatggactcctccaaactctcatctctctctctttgcctcttcctcatttgcattatctatctcccccaacattctagttttgtaccggggaaggaattatgatccgaagagtcgtcccatcattccactcatgttatggaagcctcatccgccaatatacccaagacttgtaaagaatgtggctgatgggttagaatttgaagagaccaaggagatgagaaatcgtgggcttcattctcctgccttaatgaaccttcttaggaatgggngttaatgtaaatgtccnttggaaggagtnagggaaggantttaaaccagaggggtttttaggcctngntttncnctcattttggggttgggtcccttnaaaacggntttgggtgtnaacctaaaagggggntgggcccccatnggtncccattnttttcnaaaggttgggcangctcaaacttttggnggg

SEQ ID NO: 133700 - DNA, 334 bp, Arabidopsis thaliana columbia
  unsure (1)..(334): unsure at all n locations
attacatctggaaaaccgagtgctactgagctgcctattgaacgccttattagagccgtgaagtccatctcaccacaagccctttcttctgcagtaagtgacatcggatctgttgtaagcatggttgatcggatagctggttcagcaccaggaaacggttcaagagcttccgttggtgaagacttggttgcaatgactaagtgccgtctccaagcaagaaacttcatgacccaagagggaatnatggcgnctaagaaaatnaagggtcacanaaccggaatgccncttaagggttnnttcacntggggggaaagttttgggggananccnnang

SEQ ID NO: 133701 - DNA, 417 bp, Arabidopsis thaliana columbia
  unsure (1)..(417): unsure at all n locations
cnaaaacgcttccgactacgaggttgtaaacttcctctacgccacagctcgtgtttctctccccgaaggtttgcttctccaatcacaatcaagagattcttgggaccgtgagtctaactggtttggctacattgctgtcacgtctgatgaacggtctaaggctttaggacgccgtgagatctatatagctttgagaggaacgagcaggaactatgagtgggtcaatgttttgggtgctaggccaacttnagctgaccccttgctgcacggncccgagcaagatggntctngtggtgtanttgaaggtacgncttttnataagtggcagttaaggttaaggaanggtttaaagggngnttntctggtgggtcacaaaattttacttttttataaacccccaatcngaatncactnata

SEQ ID NO: 133702 - DNA, 422 bp, Arabidopsis thaliana columbia
  unsure (1)..(422): unsure at all n locations
aaaaagctccgttctctctcttgcccagaaagggcgatttcagaagccacggttatctctctnatctcttcatatttnccagagagaaagtcgattgcnctcatgtccctttctccgtcgtccggagtttttcggcaaggccgtccaaatggtttcaattggctttagccgacatccatggatggttggtcggtttctcttccgacatcttccggttctgttagcggagatggttggctttcgcccggcaaattctgctcccacatgagtttttggccggtttgctgtttttnttccacnaagactgagttctaaacgnggtttctcttgtttttaagtttctnanagttttttttaanaaangctttagatatgagttggggnatgaancttaaggnttntaaggnctaaaaattttnaaa

SEQ ID NO: 133703 - DNA, 457 bp, Arabidopsis thaliana columbia
  unsure (1)..(457): unsure at all n locations
ancaacaataataattatgatgaaaacgaggaaacactcaaacgcgagcagatggaagangaggagcgtcctcctcgacctgtatgcgttctcaacaaagaagctccattacctcttctgcaatacaaacgtagacgccaaagcgagtccaacaacaactcaagcaggaacacacaggaccattgttcgtccacaacaacaactgtngacaatacaaccactttaatctcatcatctgccgctgccaccaacactgccatctctgcattgcttgagttctcactcatgggtatctccgncaagaaaggaaagccggagcaaccgctacgnnctcacaaggaaccttttgcctnctcaaactccactttgcatcttcctgaaggggagggttaatnntttccagagggggtttcnccagatnntttttgaaggggaactttnaagnttnaattntnng

SEQ ID NO: 133704 - DNA, 529 bp, Arabidopsis thaliana columbia
  unsure (1)..(529): unsure at all n locations
cacgatctagcttaaagttctgtaacctaagcgataatcacttagctactccaagtttcttcttaatttctctcacactagtagttctaagctttagaaatggcaacagcatcgttcaacatgcaatcagtcttcgccggtggattaaccactcgcaagatcaacaccaacaagcttttctccgccggtagcttccctaacctcaagaggaattatccggtgggagtgagatgcatggctgagggaggacccacgaatgaagactcttcaccagcaccatctacctcggccgctcagccgttgccgaagtcancatctcctcctcctcctatgaaacctaaggtgagcacaaagtttagcggcttgctagcgtttagggtccagcacagagaggnttacggcggttngcgtggttggattcgttncgnggtggttnngngtttccaagggngaaacggtttggtcantctcgccggggggttaatggtnctgganaaagggtnttnnattngnggtttncgtttaaggt

SEQ ID NO: 133705 - DNA, 421 bp, Arabidopsis thaliana columbia
  unsure (1)..(421): unsure at all n locations
gcaagttcctcgcactttacagcaaactcagactctgcctctccaaggaggaggagctgctcctaccaaagatgagcctcatatggttaatncccctnttgaggaccagaagaacttcatctacggcggtggaattggcggtgttgccggagttggtggattcatggggatgccaggtggtggaagtggtggctctggcatnactttcccactcccgagtgggacgccgcttcttggtggggctggtgggcttggtggtttgggtggtgcaatgggggttccctgggtggactcggtggtggacctagttggtngttggtgttccaagttcaaagcgggtggttctccataaaggcaaannncantgatngtttaaattggntcccaattnnangatttaaaannccaaagattnttttgg

SEQ ID NO: 133706 - DNA, 528 bp, Arabidopsis thaliana columbia
  unsure (1)..(528): unsure at all n locations
ggatcgtgttgcttactgtatttaaaaaccctagagttcatcatcatcttcctctcattattgattgcnctaatcaggttccgacgagactaataatcctttctcagatcgataacaatgtctcactctgctgtttctcaggctggtgctgtctcagtttcaattgaaaaccaacgttctcttagaagatccgtcttcaaagcaggaccaataggcataaggtttaaccagnaaagtcatggtcaatcttctttagcattgaaccagaaggcaacaagcataagagatgggaaacgggtacccgagcacgncaatatgtatgtcgggttcaacaaacaagtngttccaaggttactggntttcctttagngttggaaggccntaaggtcccccttggaactttntccaaaccccagggggttttcccngttaagtttntttttttgggggggttngttgnccnaagccctnggggaaattngnntttnggannggncaagtggaccttctttttggggggcaggttgc

SEQ ID NO: 133707 - DNA, 481 bp, Arabidopsis thaliana columbia
  unsure (1)..(481): unsure at all n locations
tcaacttttgctttctggtatcttctctaattaaatacttcatatattcctcctaaagttgcttcattattctctaaccctttagttctttaaactctctattatttcgaaaagtccgctttctacgtttttaatttactgtngtnatggtgagaaagcgtgaaaccaatcccggtgttagagttgtcggaaaaagaatttatgactcccaaaatggcaaatcatgtcaccagtgtcgacagaagactcttgactttnctgcaccgtgcaaggcaatgaggaggaagaagctatgtcccataaagntttgttacaaatgcttatcaatcaggtatggtgaaatccagnaggagtngcaaagttgggttgattggtntnncccctntgcagagggatttcatcntgtagggntttcagaaaagccccngggcttnggcccctggggtttttggncccggggntangccccnggggtttcccc

SEQ ID NO: 133708 - DNA, 615 bp, Arabidopsis thaliana columbia
  unsure (1)..(615): unsure at all n locations
gggatccaaacccctgtttttntcaccgtcgcttctcttatctagtctcccctttnattttctttcttttaaagcttttcccctttgttttccttttgatgaaactttttcaaacccttccaatcaatgttcctcaccctgcgtcggtttcagattggttttcaaaaccaatagaagaagataagttgagacattgtgctcttcccttctcccactctttcctcgcatctccttggacagaccctttttcggatctggttccttgtgtaggaaaggctgtgaacccctggaacctcaccccttacccgaaccacggctagagcctgtcctcatcgatccttcattcatcgggggagatccatgtgctgcaaatntttttgggcatttttcggacggntgccgnaaccactctctgttttggaatcntgagggntcctaggggtttcccaagtgggcnngggtttttaagttggccattatcaaaaaggccaagncatttnntggtnaaancntaaagtttttcctaanccaatngctaccggtttgngatttacccgngggcccnatttttttggttaaaaacccnncgttnagacaagtccgaaagggtngaat

SEQ ID NO: 133709 - DNA, 457 bp, Arabidopsis thaliana columbia
  unsure (1)..(457): unsure at all n locations
agcaaagttgaagggaagatggggtatgaggactttntctatttnattcttgcggaagaagataaatcgtcagtncctagcctagaatattggtttaagtncatagacttggatgcaaatgggattatnacgcgaaatgagatgcaattntttnatgaagagcagttgcatagaatggagtgcatggcgcaagaggctgtncttttcgaggatatcttatgtcagatgattganatgatcggacctgagaacgaaagccatataacgctgcatgacctgaaaggcctcaaagctctctggaaacgtcttcaacatcctatttaatctcaacaaatttatggcatttgaaacccgggatccattcctcattcgtcaggagcgngagaccctncattgacagntttgggccggttttcacatagggnggtttnttagnctntcattggaggangttntt

SEQ ID NO: 133710 - DNA, 415 bp, Arabidopsis thaliana columbia
  unsure (1)..(415): unsure at all n locations
gtagctactggtcgtnatttagctgagctttgtngtgatgagtatcctacttgggctaggtatgtnctttggtctatggcggaacttgctttgattggtgctgatattcaagaggttattggtagtgctattgctattcanattctnagccgtggcttcttgcctctttgggctggtgttgtnatcactgcttccgattggtgagtcctttcgatactcgattccttctttagagatgttggattcatggaatnagtagagacttggtttggagaatctaatgattcaatctgaaattnagaaacttggctaagatgatatgaattccgaaagaanttcgtatcatcttagcgggtattngannttcgaatnagggancgaattcgaacnccataaaatcantagaaacttggtt

SEQ ID NO: 133711 - DNA, 437 bp, Arabidopsis thaliana columbia
  unsure (1)..(437): unsure at all n locations
ctaagactggggttccaggaggttgtggtctgtggcctttnacgagatgggaaagtaaatttccacccaaatnataacgaagagctcatggaaaccgacaaactattgtttatcgcacctntcaattggaaaaagaagcaactattatatacagacatgaaacttgagaacattacagtaccgactgatactcggaagcaagtntttgagaaaaaaagatcacggctatcgaagattataatgcgtcctcgtaagtccttatcaaagggatcagattccgtcaaagggcccacagaatctatacttttacttggttggcgtggngacgttgtncaaatnattgagggagttttgataactatcnttggtccaggnaagttnaatggaanattnntcgggttgtttcgttanggggcanaagnangggtgggtggtag

SEQ ID NO: 133712 - DNA, 456 bp, Arabidopsis thaliana columbia
  unsure (1)..(456): unsure at all n locations
ggtatttgggcggttgtggatntctctttggacagcctaagaccaagtccgatcactagaagcagaagaagaccctctggttgtntgattcaagaattgcagaatggttactccaaggtgacatgggtagagcatattgaggtggatgatagatcggttcacaacatgtataaaccgttggttaataccggtttagctttcggtgcaaaacgttgggtggctacacttgaccgccaatntnagcggctcgccagttccatgnncagcaacattccggcttgtaatctttccgtgataacggagtccttnaggggagaaagagcattcttgaaacttagcgggagaggatttgttgactgagctttctntncccggagtcgggcgcgtcaaactnncgcatncnttnggccttnaatttttcggcccccaaggatnccnacggccgtttggnttaat

SEQ ID NO: 133713 - DNA, 431 bp, Arabidopsis thaliana columbia
  unsure (1)..(431): unsure at all n locations
cattatactagcgtccaatgactttnatcaagagaataagtctgtacagaatccaccattggttgagacaaagaaactggatacgtcattgtcgatgaatctacgtcctccaccatctgagcgacataagtcgtttgatgacgatgattcaacaatgagaaaacctattgttgcaaagaaagctgctgttgttgttccntcaaatgtgaacacatatacggtttcanatcttcaagtagctaccaacagtttcagcgtagataatctnctcggtgaaggacatttggaaggagtatacagagctcagtttgaaggatggaaaaggtactttnctgtgaaggaaatcggcttnatcttgnggtttnccacgggntnccnngctnatggattttacccggaattntttccggnaatagcgcatttggtcncng

SEQ ID NO: 133714 - DNA, 284 bp, Arabidopsis thaliana columbia
  unsure (1)..(284): unsure at all n locations
acgaatattttaatttctcggtaattggaataaatnatggtctcaatgtaattttcctagttatatagtacgtaaattnctattgtccgaggaaacaattgcagaaagttaaaagtatcgaggagcataatgcttctttatcttgacatattgattncnatgtnttggggttagttaaatgagagtcttcatgcgcctttctatatatctnngttatgaaaatngtnagtncgaggnagagatgcagaaagtcgtcattaagcatcgaggggcatagttttggt

SEQ ID NO: 133715 - DNA, 419 bp, Arabidopsis thaliana columbia
  unsure (1)..(419): unsure at all n locations
gaagaataaggtggataaggttgtggttctctggacgnctaacacagagcgttatagcaatgtggtcgttgggatgaacgatacaatggagaatctcatggagtctgtggatagggatgaggctgagatctctccttcaacactttatgcgattncttgtnttcttnagggaatcccgttcatcaatggaagccctcaaaacacctttntnccaggtttcatgtagttaagttttaatcactcattgatcaatcaatattggaaatcatgactgatttcnttgggggtttgttgtaggtctaattgatatggcggtcagggacaatgtttttnatcggtggnggtgatttcaagngtggncaanccaaggtggaatctgtcttgggttgattncctagttgccgcngaatcaaggnttt

SEQ ID NO: 133716 - DNA, 522 bp, Arabidopsis thaliana columbia
  unsure (1)..(522): unsure at all n locations
gtgaatgatcctaatccgtttagctttttaaaaaataagaagacatatttatcaacttgagcaagttgcagcagatattttcctcggccaagatctagagttttgagaatggcgatggtatcaggaagacgatctactctaaaccccgacgcacctctttttattccggcagctgtacgacaagtggaagatttctcaccggagtggtggcaattggtgacaacttcgacttggtaccctgattactggatcagtcagcagcagcaaggcgcggatggtttctatgacaacggngagaatgagaatggtggaggtcatatcgatgtngctgatcttcttccagaatcatttgattttnnatgatatggnagatttctttgacactgatgctctgaggtttanccaaggattcgatggaggattgattaccaagaccctcccnanttggttttgnaaaaattgtgggaggttanaancaagngggacaagggncccgnncngttttgngccnnctaagatttc

SEQ ID NO: 133717 - DNA, 443 bp, Arabidopsis thaliana columbia
  unsure (1)..(443): unsure at all n locations
aaagattttccatcctaatgttgcttctaatggagagatatgtgttaacacgcttaaaaaagattggaaccctagtcttggattaagacatgttctctctgttgtaaggtgcttattaatcgagccatttccagaatctgcattaaatgaacaagctggcaagatgctacttgaaaactatgacgagtatgcgaggcatgctaggctttacacaggtatccatgctaaaccaaaacccaagttcaagacaggagcaatctcagagtcancaaccgctctaaatgttggccagacggancaacgagacggcctggtgcttgcttactgcantaaccctctttcaattgccaggcattaagggggtnccaacggngttgncccaggncccancaacnangnggggtaaattnccgtttttgggagcccttcncaaangtnngggg

SEQ ID NO: 133718 - DNA, 466 bp, Arabidopsis thaliana columbia
  unsure (1)..(466): unsure at all n locations
ggttaatccccgggctaaagtcccggttcaactcgtcgaaaagacttccatttctaatgatgttcgtaaatnccggtttgctttaccggttgaggatatggttctaggcttaccggttggtaagcacatttccctttgcnccaccatcaatgacaagctctgcctcaaagcttacacaccaagcagcaccgttaatgtggttggctacttcgagctcgtggtcaagatttactttggcggtgtccacccaagattccctaacggcgggctcatgtntcagtacctagactctttgcctatagggtcaactttggagnttaaaggnccattgggtcacggtgagtatctcggaaagggtagtttcacggttcaagggtaaaccaaaggtttcctgntaaattggaaatttttggaaggtggancgggnntacntcggnttcccnanntttccntggcnttttnnagg

SEQ ID NO: 133719 - DNA, 432 bp, Arabidopsis thaliana columbia
  unsure (1)..(432): unsure at all n locations
gntctacccaaaaaaaaaaaaaaaaagagatggttctgctagagaagctttgggatgatgttgtggctggacctcagcctgaccgtggccttggccgcctccgtaagatcaccacccaacccattaatatccgagatataggagaagggagcagcagtaaggtggtgatgcataggtcgttgaccatgccggcggagtnagccctggaactccaacgnctccaaccactccgacgacgncacgtaaggataacgtgtggaggagcgtctttaatccgggaagcaacctngncactagagccatcggttncaacatctttgntaaacccacccatccaaatttttcctcccgtntangctggtaactacaattttcctgtaatttntttcatntggancntgttttnaanaagttttaggcntttggtttttt

SEQ ID NO: 133720 - DNA, 354 bp, Arabidopsis thaliana columbia
  unsure (1)..(354): unsure at all n locations
caaccnctgcccaacttgtagacaagagctcggtgatatccgttgtttggcactggaaaaagtagccgaatcanttgaactaccttgtaaacacatgtnacttggatgtcctgaaatcttcccttattacagtaagctcaaacatgagactgtatgtaacttcagaccttatagctgcccttatgctggttccgagtgttctgttacgggcgatatccctttttnagttgctcatctgagggntgatcataaggtgggtatgcattctgggtgtactttcaaccaatcgttatgtcangtctantcctcgtgangtcggnaaacggcncatgggnngttaactgtaaggncant

SEQ ID NO: 133721 - DNA, 554 bp, Arabidopsis thaliana columbia
  unsure (1)..(554): unsure at all n locations
aggggatcaaaagtcttctgagtttagtaaatttgttgtggttcatggcgctggttcctttgggcactttcaggccagtagatctggggttcacaaaggaggacttgagaaacctattgtcaaagctggtttcgttgctactcgtatatctgtgacaaatcttaatcttgaaattgtacgagcactagcccgagaggnanttcctacgataggcatgtctccattttcatgtggttggtcaacctccaaaagagatgtggcttctgcagatctagcaaccgtagctaaaaccatagactcaggatttgtccctgttctccatggagatgcagtgctggacaatatactgggctgcaccatattgagtggtgatgttatcatccgncatcttgcagatcaatttgaaggccagatatgttgcctttctcacaggtgnccagggnntncgntcggccaccttaacttagagccgaggtntctntttaangatcgttttgggaagtgaanttgnaggtttgatcnctttggnnnnancaagaagttnntctttttac

SEQ ID NO: 133722 - DNA, 358 bp, Arabidopsis thaliana columbia
  unsure (1)..(358): unsure at all n locations
caaacctagcgacgaccntcttgctctgtgccgcacgtnacctctctnanattcctcccaagcaatctcgttttcaaattcttcgtatggtttcgtgagttgtctttnattcctttccgaattcatcgtcgatctcaaagtaaatagtcttgacctagatttattggggtacaaacatatttnttttttgttgataatcacaacttttncnggttttaaattaagataatgggatggtttctagttagggtatcgtcagattattgngactatgggatttatnaggttaggtagatgtgccctgtgccataacaccaaaccctntgacctntagggagcttgttttcatggnaaatcc

SEQ ID NO: 133723 - DNA, 472 bp, Arabidopsis thaliana columbia
  unsure (1)..(472): unsure at all n locations
ataaattgttgaatcaaagcagagaagaagaagaagacgatcatnaatccagattccaattatcctcatctccctaacatcaagatccaccatccttnatctcctcgtnactctcaccaccactcttcctccactccttccgccgctactcctaccccaaccgccggtgctcgcngtaagatcggagtcgccgttgacctttccgaagaaagcgctttcgctgttcgctgggctgtcgatcattacatccgtcccggagacgccgtcgtaattctccacgtttctccaacctccgttctnttcggngncgnttggggacctcttccctntccaaactnctccttctncntccgcggttaccgattccgggagtcagccgaagcttagttaggaagatttggnttggnttaattttttcnaagaaggggntttttgtgaaggttttanggaagttgggtttcctaaaaangtc

SEQ ID NO: 133724 - DNA, 390 bp, Arabidopsis thaliana columbia
  unsure (1)..(390): unsure at all n locations
caaagggaaggttctcttgattgtaaacgttgcttctcaatgtggcttgactaattcgaattatactgagcttgcgcantgtatgagaagtacaaaggccatggtttcgagattcttgcgtttccgtgtaaccagtttgggaatcaagagcctggtactaatgaagagattgtncagtttgcttgtactcgtttcaaggccgagtacccgattttngacaaggttgatgttaacggtgacaaagctgccccagtctacaagtttctgaaatcaagcaaaaggcgggctcttttgggnncggcattaaggnggacctcngaaaaagttcttgggttnncaaaaaattggnaaatttttttggnccnnttttggaacnaaanaccctccccc

SEQ ID NO: 133725 - DNA, 577 bp, Arabidopsis thaliana columbia
  unsure (1)..(577): unsure at all n locations
catcgactgtgagcatgcctctgtaaatnatgaagtcaacatgtcttcgagagtgtctagatcaaaggctccagctcctccaccagaagagccaaagtttacatgtccaatctgcatgtntccctttacggaggagatgtcaaccaagtgcggtcacatcttctgcaagggatgtataaagatggcaatatctcgccagggcaaatgccctacttgtaggaaaaaggttactgcaaaagagctgattcgagttttccttccaaccactagatgagtggtccggcaacatcaccagccaccctgtctaatggtttatcagactatcctcctattcactttgggacattgaagggacttcgttgacttggtatttttgnatattttgctttgttggaagggaaatattcagtggtcaagagccagaaggccnntcaatcgatggtatcatttgggccagcntaatttggnggggnaccancccagagttctggtntttggggnaccccacttttgnncccaaggggancctnccttagngcctnttgtngggcccnaagggnttggttcgggnttttnc

SEQ ID NO: 133726 - DNA, 598 bp, Arabidopsis thaliana columbia
  unsure (1)..(598): unsure at all n locations
caaaccaaacataacactcacaatttaactctctctgtctctctctcatatctctcacttcttctctttctttttaagtccccaaaataacctcgagatcgatggactcaaatctgttcataactcccacttcttctctcaaatcccaagccttggtctcttcatcatcctaactatataagaaaaagaaaaaacaacgtaaagtttctgccataaatcatgagaccaatattagacctcgaaattgaagcttcatcgggcagtagtagcagccaagtggcctcaaacttgtctccggttggggaagnttacaaaccaatctcgctgaatcttagcctcagtttcaacancaacanccaancaataatcttgggtccttgaatcatcggtcttttgacggtngccacttttcgggcaccgagttntgagtaggtaaccccggngcaggaagcangaatcaacaaaccattttgtattcaaaggggggntttnnngttgtaacttntnccaaagggaggtcttttgggttntaaggggttnggnggcanccaaacnggttnaaacngngggggnccattgcaaacgggtttgggttggg

SEQ ID NO: 133727 - DNA, 426 bp, Arabidopsis thaliana columbia
  unsure (1)..(426): unsure at all n locations
gaagatgttgttgtgaagtatgaatataactcccaggtgtctggtagtgttaatgacggttcgaggctcaagattggtatcgtcgggtttggaaattttggacagtttctaggtaaaaccatggtcaagcagggtcacactgtgttagcttattccagaagtgactacactgatgaagcagcaaagctcggtgtttcgtatttttcagatcttgatgatctatttgaagagcatcctgaagttattattctctgtacgtcaatcctttcgactgaaaaagttctcgagtcactaccgtttcagaggcttnagngaagcacacttttttgtggntggacccccccgtaaaangagttncccccggggnntttttttncttcnaaaanntccccccaagaanttttgnaattttntgcccgnnncccc

SEQ ID NO: 133728 - DNA, 495 bp, Arabidopsis thaliana columbia
  unsure (1)..(495): unsure at all n locations
cacgatcatatcgtcttacggtgaccagtccctggtcctctggaatgcttgctcgtctgtcgacaagctctcgaggcatctttcgtccagcattactcaggtcttgggcagcgccaggggtaactggtactcctctaacgcctcagccagtcgtcgtagtcgccaggaggtgccttactgcacgcaaccccactccgacgcattccactggagagaattcacggaagacaactcttaaatgggctgcaggcctagcaacggttggcgcccttggattgggcttgacctatctcttccagggccatattgaagctcggtatttatgctacaagtacggaaagctcgtcggtgacccgcaanntaggcccgaaaanctttnaagngtcgnaacaaaaggaagggcctcgggttnnggaaaaaactttttnnacgggncccgattttttnctttttncanaatggnaagggttttnancggcccggttaaaangtnta

SEQ ID NO: 133729 - DNA, 571 bp, Arabidopsis thaliana columbia
  unsure (1)..(571): unsure at all n locations
gagccatcatattatgaaactcttgagacctatcaaggcctgccttgtccttatggtggctactatggatactactatccaggtcttgatggttcagttggagaagcaaaggataatggatactatggctatggaacagaagttcagtacccggtaatgcaaggggaaaatggatctttgatctacgtgatgccagggtttcagtcttatgatgcaagccaaacttatatgcctataagcccggttggtgtatcgagtcaagcacttcattcgccgatgtatgctgctcagggttattatcagaaccaatttgggtatgcagatgtttcatcgnccacatatttatggggcccctgtttgggncaaagtattgtgtatnggngttgcttcanatnccccancccttgnaacaggacaanttttttttaaggcatacccccacaatttttttttaaanggggaggaccctttncggggncgggaatgggnctgccctaaaaacccggaagggtcnaggcnngnttnccnccccctntttccaggaaggnggtttttnccgtgccgaagaatc

SEQ ID NO: 133730 - DNA, 570 bp, Arabidopsis thaliana columbia
  unsure (1)..(570): unsure at all n locations
aaacccttcattttaagcattctgtttccttcttgagaaacctagatattttggtttcttgtatccggtgatgaagatacagtgtgatgtgtgtnagaaagctccggcgacggtgatttgttgcgccgacgaagctgctctctgtcctcaatgcgacatcgagattcacgccgctaacaaactcgctagcaagcaccaacgtcttcatcttaattccctcctccaccaaattccctcgttgcgatatctgccaagagaaggcagctttcattttctgtgtagaggatagagctcttctttgcagggactncgatgaatccatccacgtggctaattctcgatctgctaatcaccagaggttcttagccactggggtcaaagtagcttctgacctcaactatatgtagtaaggaaattgggaggatcaacctgaggcttccacaaccaacagnagggtatnaggttcctgcaaatcccaagccagaggacaaaaacttttttttgntctccacttcctggggtttnangttttttaactcntnanttntccccgcaagaagcagtttnttt

SEQ ID NO: 133731 - DNA, 231 bp, Arabidopsis thaliana columbia
  unsure (1)..(231): unsure at all n locations
ccggaaaatctccttttcccaaaattttccgattatctnacgccggattgtttttaaatcgcngtcttcataatctccggcgactnaaatnagtctggtaactatttnaatttnnatggagtgggacagtggttccnatctaagcgccgatgatgcttcgtnactggcggatgatgaagagggaggtctttttcccggaggtggaccaattccatatcccgttgggaattt

SEQ ID NO: 133732 - DNA, 320 bp, Arabidopsis thaliana columbia
  unsure (1)..(320): unsure at all n locations
ctccgagtaaggaatccaggtccaaagcctcttctnttcctcctcctcgcttccttctcacgcaaccttggatccaccgcagctatgaagatcaccgccttgctcgttctcaagtgcgctcccgaagcttctnatcccgtnatcctctccaacgcttcggacgtctctaacttcggttatttccagcgatctagcgtcaaggagttcgtcgnctttgtcggtcggaactnttggttagccgaancccttcnttccaaagggaaantttnttaaaaagggggggttcaaagggtttaanggttttnaaattggaaantggg

SEQ ID NO: 133733 - DNA, 296 bp, Arabidopsis thaliana columbia
  unsure (1)..(296): unsure at all n locations
agatcatctaagttcaaaaagaagaccacaaaattcttagaaactctttactagaaaatcttgacgaaacttgaagaatacaagcatggaatcaatgatcaggataattctnctaagcttgataatcttcattaccatcctctttttcataaaacagaaaaaagggaagaaaagcaacacacctgcgtcaccaccgagacttccgttgataggnaaccttcatcaactnnggtcggcacccttanccggtcactatggtnttntcangaaattggttanggggccccctttnnggg

SEQ ID NO: 133734 - DNA, 260 bp, Arabidopsis thaliana columbia
  unsure (1)..(260): unsure at all n locations
aaaaagacagagaggcacggtgacacgctgctttcacagaatttccccaaccgacagacaagcttcgcggtattcagatggcgtcatgctaatatgactaaatgagattctggggattaagtttaagtgggaaggctgtaatagttcctaatggggataaagtacttgcccgtntccgtagcatcaacagctctcagcttttgttgggncttcaagtcttgncagagtttntctctnggnnagacttngngcaaaattng

SEQ ID NO: 133735 - DNA, 317 bp, Arabidopsis thaliana columbia
  unsure (1)..(317): unsure at all n locations
aagaggaggaacctctggtaacaagttcaggatgtcactgggtcttccagtggcagccactgtgaactgtgctgacaacaccggagctaagaacctttacatcatttcggttaaaggaatcaagggtcgtcttaaccgtttgccatcagcgtgtgttggtgatatggttatggctactgttaagaaaggtaagcctgatctccgtaaggaaggtgcttcctgcttgtcatttgttaggcaanaggaangcttttggggccggaaagggaccggtngtctttcaaggtnnttncgganggtaaaannccntgngtcna

SEQ ID NO: 133736 - DNA, 369 bp, Arabidopsis thaliana columbia
  unsure (1)..(369): unsure at all n locations
ccggaaaactttttactcggtcaaccaggaacagcagatgagaaaaaactctaccttatcgatcttggtctggcatctaaatggaaagattcacactcaggccagcatgttgaatatgatcaaagacctgatgtgttcaggggaacgataaggtatgcaagtnttcatgcacacctaggtcgaactggaagtaggagagatgatctggagtcgctggcttatactttaattttcntttttgaaggggagnttgccatggcaagggtatcagggtggccaccaaggggtttntttgtttcaaaggaaaaggtnntaaacnttnccccggaaattgnnggnccnttttttttccccccccccgtttnangc

SEQ ID NO: 133737 - DNA, 542 bp, Arabidopsis thaliana columbia
  unsure (1)..(542): unsure at all n locations
aacgacctgaggtcttcatacttttcggtaaaggactttcctttatccaaggtgatgattggattcgccatagacgaatcttgaaccctgctttctccatggntcggctcaaggccatgacacaaccgatgggagattgcaccttacggatatttgaggagtggagaaaacagagaagaaatggtgaagtgttgatcaagattgagataagcaaagagttccataaactgaccgctgacattatagcaactactgcgtttggaagtagttatgccgaagaatcgaattgtgtaggtcacaaacagagcttgagaagtattatattagttctctcactaacgttttcatccccggaactcaataccttcctacggcttaccaaccttaaacctatgggggntccataagaaagtgangacctcgtnaaaaggatcataggttcaaggcnaaatnaaaatgtnagccctttggctntgggncgtntttttagggncatntnactctcgnattnacgggttggggaagttggtggtnncncttnt

SEQ ID NO: 133738 - DNA, 430 bp, Arabidopsis thaliana columbia
  unsure (1)..(430): unsure at all n locations
accgntagcagcagcagtaaccaccgtcggcggccacagaataccggtgttagtggctgcatcaggcaagaggtcgatggcttcgaattcgggttcattcacgacactaaaagaaaccgtatccgtggagaaagagataaagaagagcaagttcatcgcaatcgctggaccaatctcctccgagcaatcagctcaaatgtttctntctcaggtccgtgatcctcgcgcttctnacaattgctgggcttataagatcggtgatcatcaccatcgatgtagcgatgangncgagccatctggcacagcagggaagcccattcagtctgctattctctctncctggatttagacagtgttatnggttgnggtnaattaggtattttggggngnatcaaacnttggactggnaggntttttnanagcnttttgg

SEQ ID NO: 133739 - DNA, 433 bp, Arabidopsis thaliana columbia
  unsure (1)..(433): unsure at all n locations
caatcaaaagatttagtttgctcctatctctatagataaaacacctactccaaattaattgacataccaattctntttccataatattttngtaaacnacgagagaagtcaaccctgtagtatctcgatgtgaatncctaccgaggttgaccagatcagccagtagaatttatcatatatatatttncataaaaagatatgtagacttgccatctttgcaactgttgtaggtattggatacgtcgataaaatcactaaagtggagatttctcccgatgatccntcaactgtnattacaatctccggtcttacaaggaggaggactcgtcctatggctgggaacttgtnggccgtgggccagtgggaattggggggttttaannaccccctttaaaanccnnccgggctttttncaantggtnaaaacgccctt

SEQ ID NO: 133740 - DNA, 456 bp, Arabidopsis thaliana columbia
  unsure (1)..(456): unsure at all n locations
caaacacaacaaggatagatcatcctcataggcgatgttgtttagtggttcagcgatcccattaagcagcttctgctctcttccggagaaaccccacactcttcctatgaaactntctcccgctgcaatccgatcttnatcctcatctgccccggggtcgttgaacttcgatctgaggacgtattggacgactctnatcaccgagatcaaccagaagctggatgaggccataccggtcaagcaccctgcggggatctacgaggctatgagatactctgtactcgcacaaggcgncaagcgtgcccctcctgtaatgtgtgtggcggcctnngagcttttcgggtggnggtcgctttggcggttttcccaancggnntttgccttagaaattggtnaagggggtttnttttnatnaaaggggggcctncccnttttttgggcgggggnttntttttt

SEQ ID NO: 133741 - DNA, 483 bp, Arabidopsis thaliana columbia
  unsure (1)..(483): unsure at all n locations
tcttgttttccaagattcaaatcaagaattaggtcagagatcaacgagtaaagacacatgtctaggtaagattatgatgaatccaaaacagagaagagagacacgaacaaaccttggntctagatccaacggcactgatttgacgactagtagcttcgtaaccatcgacataaccagatggagaagaagaagaaccaccacaaccaccactccaagatagtggtgtacttggactacatctagattcagattcttttcttggacaccgagaccttggctgttggattccccaccggagcgctgttacaatcggattcttgattactttggcttctttaaggttcaccaaaaggtttgccaccatttttccatctttnatggaaanttggnccaatnatcngntggaaccattcntttgatttnngggnggnggttggggcaaacaagggntnagggtctggggtncnnncttttggggggggg

SEQ ID NO: 133742 - DNA, 462 bp, Arabidopsis thaliana columbia
  unsure (1)..(462): unsure at all n locations
aggtcaggcgggattacccgctgagtttaagcatatcaataagcggaggaaaagaaactaacaaggattcccttagtaacggcgttcgtaaagagtttctcacacgtgtgatctcacaccctcaaggtctcgctcagtgtgagcacacgctcacaaagctcggacttaatgtcgcacgtgaggcagttgatgacaccgcagagccgctgagttcatcgcctctaacaacctccgcgacacagccgctatcgcgagtncacgcgccgccgagatatacgggttggagattttggaagatgggattcaggacgacgtgagtanacgtgacgngctttngtnatgcttggcgcgtganccaatcatacctagnaccagttgacccttnaagactagcattntttttccnancggnaaaggnccagcgtgttttaaaggtcnntttnntttcgccttaanggcatt

SEQ ID NO: 133743 - DNA, 355 bp, Arabidopsis thaliana columbia
  unsure (1)..(355): unsure at all n locations
ggtgaagaagtctttaccggaggaatatagaaagaaggcacaatcgtctctattaacagctgttctctcagctggtattgcaacactgacatgttaccctctagacactgtgagacggcaaatgcaaatnagaggaactccatacaaatcaattccggaggcatttnctggaattatagaccgtgatgggcttataggcttgtaccgcggctttttacccaatgcattgaaaacttctaccaaacagcagtntttaggnttncaaacttcggcaatggtnaaagggccttnttggncccaaatnggnagcggcttnaaaaaggtnccccgttgttaatccggatttggggncncc

SEQ ID NO: 133744 - DNA, 328 bp, Arabidopsis thaliana columbia
  unsure (1)..(328): unsure at all n locations
tacaaaatgtcttggacatcatgagacttgctctcgtnatcatanntgctgtgatgcttttcnntgcgtttatcggatttnttctctctatctttggactgcaatnccttgtatatacgtnggtgatccttggttggattctngtcacggttaccttcgtcttatgtggtggattttaacttctacacaacgttgtaggggatacgtgtgttgcgatggaccaatgggtccaaaacccaacagctcacacgggctctagacggtattctaccgtgtgttgataatgcaaccncgggagaaacattgnctcggcctaagcttnnaacat

SEQ ID NO: 133745 - DNA, 552 bp, Arabidopsis thaliana columbia
  unsure (1)..(552): unsure at all n locations
agaaggactaagacatcacgaggaacacgatgggtgaagcggtcaaggatgggagagaagaagtgattcaagcttggtatatggatgatagtgaagaggatcagagacttcctcaccacaaggntcctaaagagtttgtatcgttggacaaacttgcagagctgggagtacttagctggagacttgatgctgataactatgaaaccgatgaggatttgaaaaagatccgtgaatctcgtggttactcttacatggacttttgtgaggtatgcccggaaaagcttccaaactatgaagtgaaagtaaagagctttttcggagaacatttacacactgatgagggnntcccgttaactgcntttgcaggaacctggttactttnaatgtnagagtccgnaatgaagctttggntaggggtntttgtaaanaaggggggtttgaaagcttanccccctgggcnctttaacggttcacttnggccttnaaaacttttncagggcanttaantttttntncccntttttttaaggttngcctcctanaattaaaatc

SEQ ID NO: 133746 - DNA, 545 bp, Arabidopsis thaliana columbia
  unsure (1)..(545): unsure at all n locations
atgtatctcccactaaggcacaaattactaaccatataagtctcagtactctctgttctgcaaacttcatacacaaaaccaacattaagagatggcgagccactacagaaacacaagcgctattgcttatctattgctttgtctcttcattacatctgccactgcacattccttcatacgacaaatcactgatgacctcaaaacaaatctgcagcaggaggtaggagcagaaccaatccaaaacctggacgtaggacattacttacaagaaaataaggagatctcatcacgtgattataaagtatcagcttcaaacgnagtgaaaggtttgagagntcgtcctccatcgtcttnctctctcaagnttggggctttcaacangttccttaagncaactttcacggggnaatntgtatntggnccctttnagttggnngggtacacctggcactttttntttcccaatngggccaggnggttggggtcnggggcccttttttttnggggccctggnaacttancttttggcacaaggggtttcnggc

SEQ ID NO: 133747 - DNA, 526 bp, Arabidopsis thaliana columbia
  unsure (1)..(526): unsure at all n locations
cttctncttcttctttctcgttttgagagaaaacaaaaaaattctgaatctacaggtttcacgaaaaggagaagaaaaaaacaatggcggatcagctcaccgacgatcagatctctgagtttaaggaagctttcagcttattcgacaaggatggtgatggttgcattaccaccaaggagctgggtactgtgatgcgttcccttggacaaaacccaaccgaagcagagcttcaagacatgatcaacgaaggggatgctgatggtaacggtaccattgatttcccagagttcttgaaccttatggctcgtaagatgaaggacancgactctgaggaagagctcaaggaagcattccgggttttcgncaaggaccagacggtttatctcagcagctgagctccccatgtgatgncaancttgtggnagtncttntgagnagttatgngtgtcaaggagntnnttttatgngtggcaanttactcgngggtttttaggcatntggnaaggntctttttnngccacaatgg

SEQ ID NO: 133748 - DNA, 212 bp, Arabidopsis thaliana columbia
aaaatgacgatttgggtgctcgacgtgtccttgtgactggaacaggaccaatgggttggcgtcccggccgagctggcgcaacgtagccgcaacgcgagtgtgctaccgaactccaacgagccgcgtcactattcaacccacaactattcaaatgatacagactcacacgagtgatatagctcatgcgctatatataatgcatgactcatacg

SEQ ID NO: 133749 - DNA, 209 bp, Arabidopsis thaliana columbia
agcagaaaacgaagctctggcctggagatggaactggcgaaaagccaaagagagattgaaagtctcaattcagagcataattatctggaaaaacaactagcttccctggagccgcatctcaaccaaagacagatgagattgacaggcttaaagagctaaagaaatagctcaagagaaggtgactggagctacctggatgctggcccctg

SEQ ID NO: 133750 - DNA, 207 bp, Arabidopsis thaliana columbia
ttttttttttgaaagcaaatcttttgaatccaatccgtacttttagacaaagaagacaagcacaagaactctgatatttgtctactaaggtacaacaaagatcggtagctttatcttagttttacaattctttccgcataaaagaaaagacgtttcgtgtacctttatttcacattggacgtaggagataaagtggatatatgcagc

SEQ ID NO: 133751 - DNA, 219 bp, Arabidopsis thaliana columbia
acgaggattgaagaagaatggagctgggagactgcaaattctctgtccaccgaaaacaaacctactcttgagctttcaaaactagtcaaagacgaagaaaagctccggtgaaaacgaaacagcgaaaacccccttacacttgtgaatcatggtgcaaagatgtggcaagagaacagggaaaatggggagatcatctcgacaagaaaacactgcaagatc

SEQ ID NO: 133752 - DNA, 212 bp, Arabidopsis thaliana columbia
aaaccgccattgacgaatcagctttagtgcttaatcgcactgagaaatcggcagaggcggtcctgcgaagtagcatcaatggctctaagtattacgggtctcgtcatccatgatcaagaactctatctccaacgaatttggctctgtttcttactcaaatctttgacagctttcatgtatttggtgagtgctatgcgttggcgctatctctc

SEQ ID NO: 133753 - DNA, 223 bp, Arabidopsis thaliana columbia
tctcgtgccgaattcggagagaaagagactagagagacaagtgagaaacgcaacagcaccaccgaaagagagagtccaaattcgaaagagaaaaagaatcaaattccttcttcttccttttttgattttcaattattactttaatcttctttccgctctctattcttcttcttctttaggacatcacgttagcttcttcatacgtctcgttacgacagtataa

SEQ ID NO: 133754 - DNA, 208 bp, Arabidopsis thaliana columbia
acggattcaagacaaaaccagaagagtgagttggtgggaggtgatcaagggaatacttctgagaaatgactctcgactgagccagtcttccacttttgtgcagtctgagcaaagagtggaaccctcagaagcagaaaactacaaacgaccttctcgaccagccaacactcgagcagggaaagattatcatactctgtacatcagtgag

SEQ ID NO: 133755 - DNA, 225 bp, Arabidopsis thaliana columbia
agcggcacgagcggcacgagcggcacgaggcaccatggaatgccgagatcgtactctgctaatgtcagaatcacgccggtgcttaatgttccggtttgttctctgaaatcagggcttttcttcggccagcttttctcatcgtcgtcttcatcgtcttcttcttctccgtctccgggaacaatctcagttacagagcacgaacagacgatatcgacagctgacgat

SEQ ID NO: 133756 - DNA, 232 bp, Arabidopsis thaliana columbia
acataaatcgcagaacattgcaattctcttaagagctctcaatgtaacacgtgtaagaggtttccgaagctctcacggatggtaatccagagagcttaggtgctgagcttctagagactttggtgaagatggctccaaccaaggaggaagagatcaactgcgagagtactctggtgatgtctctaaactaggaacatctgaaagattcctcaaaccattctcgatatccttt

SEQ ID NO: 133757 - DNA, 233 bp, Arabidopsis thaliana columbia
ccgagaaacaaaacaaaaatcttcaaatcttgggccaaaaaaaaattggcctaacaatttccaattggattattcgttcaacgacattattccttccgattaccagcaaaaactcttagttcgttgccgtgctctctctaagccatgtatcatctaatcacgatccagatttcatcgaatctcatctcattcgaattcttcatctcatcgcgttctcaacgtgacactcatga

SEQ ID NO: 133758 - DNA, 222 bp, Arabidopsis thaliana columbia
acaaactttaaatcctcatcatcctttttgaatcatcaatcatgtcgcaacaacaattcaaaccgtggacagaacagaggccaagctcaagagaaagctgagcaatggaccgagtctgcgacgaaccgcacagtccgcacgtgacaagactgctgatttgacacatcagcacgtgacaggctgcagattgacacatcagctcggacatacgatgatgactca

SEQ ID NO: 133759 - DNA, 215 bp, Arabidopsis thaliana columbia
cacgagcttcaacaaagagccatggcttatgcaacttcttacctatgcccgaacctcatgcattatcctacccaaaatggaaaacagttgacagtgatttacggataacacgaaagtgcatttagaagtgataacagcaagaagagtgaagatgtattatgtcacagagagttgactaaatcggcaaaaagtaatatgcatggatgtagacacaa

SEQ ID NO: 133760 - DNA, 221 bp, Arabidopsis thaliana columbia
aaggagggaagctcttatatgctcttagattcccttctcatccggatcaagcttcaaaattttgaatgctttaattttcgatttaatgtcattgatacacttgttcttgattgttgggatcgctagagccttgaagctgcagccttcgattttccacccgggattactctatcgatacttccgggacacttgcagtaacacgccgatcacaagacaacgta

SEQ ID NO: 133761 - DNA, 209 bp, Arabidopsis thaliana columbia
acgagcaaaccctaaaacacacataacaatcacaaatgaagaatccttcagtgatctcttttctcattcattctcctgttccctgcaactatttgccacccacggaaatgaaccggtgaaggatacagccggaaatccacttaaccacccgctcgaacaataccttcatccagccggttaagtatcccgagagtaaacgaggtgtgtca

SEQ ID NO: 133762 - DNA, 241 bp, Arabidopsis thaliana columbia
ttttttttttaacctaaagatttgtatgtgactggcttatatgatagatattagatacagtagacgtagcatattcgttatcgctcaaaacaaattctgaatcttctctgtaagtgccatcaaatacctatcaaatacgcacgattacaagaaacataagaaaacgtaacgataatcagcaagctcaaggttgatgatcttcaacattctactggatctcttggctctggcacgtaactgt

SEQ ID NO: 133763 - DNA, 203 bp, Arabidopsis thaliana columbia
ttttttttttctggtgttcaccctgcagacatgctcatccggtccaggtggccctctataggccccctttctccgaccttgcaccctctacccccctctctttgcccatactctgggggccggtggaaatgccctcaggagaatagcgtatttccgcaatcctgtcacttcatcaactcaagctcgtcatcacgtacgtccag

SEQ ID NO: 133764 - DNA, 210 bp, Arabidopsis thaliana columbia
ttttttttttaactttaaccacctagctaaattaaacttgaaaattaccaaaagtgattaattaataacttaatccagtcattacgaggggtatcacaaaagttattaaaaagagccaataaacacccacaagggcctggaaagatgaagcccttaagccatggaaaacggctacactgtaccagctgattgcgcagccagcctcactaa

SEQ ID NO: 133765 - DNA, 222 bp, Arabidopsis thaliana columbia
ttttttttttgaacttaaattgattggattagaataggatggaaattgagagagattattacatatctgaaaaccaaacagaaattaaaaaaaaaaacaaaaaaagaagcaaatagaatataagaaatacatcgaaattcttagttctttatagattctctcaaatcttcctcttcttgatgaagccatttattaagtgtctttcattagtgtacgacatgg

SEQ ID NO: 133766 - DNA, 206 bp, Arabidopsis thaliana columbia
ttttttttttgtgaaaaatgtagaaatatatctacattatattataggtataccaggaaatctctataaaaccccacaaaagagatctctgtgtggtatattctacaaaagcgcttatccaaagcgacattaattgagagggcttatatcccctgtcgcaggaaccttaaaattggatctacaaatctaccatgtgattcaccacc

SEQ ID NO: 133767 - DNA, 209 bp, Arabidopsis thaliana columbia
ttttttttttataggctacaaaaggctacaaaaatatcacggataaatctccttataataggataaacacaatcgttctcattataaatatggatcagaaaggtttgaggcgcccaaatatttcacaaggtttcggtaaattatcttgtcgcaaaccaaaaaccaggctcttttttcgcttcctggaattttatttggaaaaaggtcag

SEQ ID NO: 133768 - DNA, 206 bp, Arabidopsis thaliana columbia
ttttttttttctaacaactgtgttcttcttcagaataatcattgtaacaaaattcaatacaattaattgcaaacaataggattactgataggtgtttatgtggaacttcaagcctttgcataagggaggaccaatgaggcaatttgactaagaagctgtcgtggagactaggaggatcaggtatgagatgtcattattgaagtatg

SEQ ID NO: 133769 - DNA, 213 bp, Arabidopsis thaliana columbia
ttttttttttgggacacatatatataaacaaaaaggagaatatattcttatattactacagagagagagagagattctcagagaggtgagaatatatcaacaaagtagagatatacaccaaaggtatcagagaagcgcttctccttatatttaattgagaacacccttataattattgtgtttcttaaagagaaaagcgcaaaggattggttt

SEQ ID NO: 133770 - DNA, 208 bp, Arabidopsis thaliana columbia
ttttttttttagtttatgtaaccttttctcaataacctttgaaatcagtcaaaacctaaacattactagtagacagtaaaaatttacaagtattaaatcaagctcttaatgttgtagtgaaaacaaggactgttaacctatggaaactgcagaaaaagctttgtgggactttacagcctgagacagctaagcttcatctagctactgg

SEQ ID NO: 133771 - DNA, 216 bp, Arabidopsis thaliana columbia
ttttttttttctctgtctctcatctgattatatttgctttaattttcaacattcttagtttctactggctgagatttgtcctctgttcttgatcaacatctaagacaagacccattgtttcaacgtttcaaaactaagcttaacaagaaattgcatgattgagactgatgctatataaaccgaatgtagactgtagacaaggacatgcgacttaca

SEQ ID NO: 133772 - DNA, 211 bp, Arabidopsis thaliana columbia
ttttttttttataataataatgtcatctaatagaaaaaactcaaatataacatataaaaaaatcaaatttttcaaacaagcccattaaaaggtttaccacaaagacgaatcgattaaacataaacagacccccgcttcaagatggatcaagaaacggagacataaccaggatcatccacgagaatggattggcatagatcaatgaacataa

SEQ ID NO: 133773 - DNA, 222 bp, Arabidopsis thaliana columbia
ttttttttttggccaaggagattggcgagagacagaggcaaaggaccaggaagaaaaagaagacgttggaaagtagaagggagacaaggcagctgttttcgaacagggaggtgctttatgaaacgccttgaagaatgagataggcgtgttctggaatttattcagattgttgaagtgattcaaattccgagacagattgagaattcaaaaccacaataacaa

SEQ ID NO: 133774 - DNA, 213 bp, Arabidopsis thaliana columbia
ttttttttttaaaacaaaactcacaaagctgttactacaacattactgtaaattttagatctgaatacattcccaagaactagaagagaatcatagtaatcaaatctaagaaatgatgaaatacaatgacatatactatagtctatatataacttaaggattcataatctatacataaaacatttgcttaatctatgatttaaccagatgaaa

SEQ ID NO: 133775 - DNA, 207 bp, Arabidopsis thaliana columbia
ggcacgagtgcagaggccggtgtggcccgccggagagccagacggccgagatgaaagaatcccgcagattcctcccagcggtaaaatcatgcatattgtcttggtgcggcccgaggctagagcctaacgaagaagaagacaagatggttctgccctcgaggaggcctgagacagagacagtggagacgctcgattgaggtagagtag

SEQ ID NO: 133776 - DNA, 214 bp, Arabidopsis thaliana columbia
ttttttttttgatgatgatgagcattaaaagttatttttacacaggtaaaaaaaaggtttccccttttgggggaaatgattcaaaatgaagtcctttttctgacttattatgactctctgttggagaaatcagaatctgagaatgggttgaaacttgagagacccaaaaaagccagaatatttttgtgtacagtactgactcttttattctctg

SEQ ID NO: 133777 - DNA, 317 bp, Arabidopsis thaliana columbia
gagctcgtgcaattcggcacgagaagaaagttacagaaaagggtgatttatcaatttggcaaaagcctatcaatcacgttgagtgtaacaaactcaaacgagttcacaaaactcctcctctatgcagtaaatcagatttacccgattttgcttggtacaaagatttggaatcttgtgtaacaccattaccagaagcaaacagttcagacgaattcgcaggcggtgcattggaggattggccaaaccgagctttgcggtgccacctaggataatcggggggaaccattccggacattaatgctgagaaattcagagaa

SEQ ID NO: 133778 - DNA, 314 bp, Arabidopsis thaliana columbia
ttttttaacagaaagcaagcttccttattattttacttcaaccatcttacaacactagtccagtcaccaacatcaaacatggaacatcggttttaataatttgaacttaaaaaggttttgggaatcgagcaacaggagtgcacttaaggggatgagccaaggtcaggttcagtcctccaatggcctctttcatgtcaaccttttctccattgattctcctgtcaaagcattgcaccatcattccaatcgcggttcctacaaagatataagctacatttgctcctgggcagcctctccttccactaccgaaagcg

SEQ ID NO: 133779 - DNA, 318 bp, Arabidopsis thaliana columbia
  unsure (1)..(318): unsure at all n locations
ttttttaacggcttaattgtagttgacatcttatatcaataatctttacttccaatcggatttctcaaacacgacaaacgaaaaacttaagaaacaaagttgcaacatttaaaaccatacatgaaaaaagaaacacacatatatatgtagagatactaattcacaagctggattttaacgaaagccttatcaatctttcccttcttcttctncacttgttccatccttnacattcctccaagacgnatgttaggttccgagttttcctgtctcagcccngaagattncaagtggctgttggaggctcncatggacttc

SEQ ID NO: 133780 - DNA, 206 bp, Arabidopsis thaliana columbia
ccccctcttgcggttggatgtctagtccttcctctgtcccacatccagctgtgtctggaggacccattgctcttggtgctccatccatccaagcagccttgaaacacccgagaactcctccttctaattccgctgtagactatccatcaggtgactcagaccatgtctcaagcgaacagacctatggaatttgacgagtgagtcta

SEQ ID NO: 133781 - DNA, 204 bp, Arabidopsis thaliana columbia
cgagggaaaagctctgaaatcgtcattgtcaagttctgtcttaatacaaaatgataacgtagctcaaggagttatttcatcagaaactggagatgtacctagatgccacatgtaaagctcaacgtaccagaaagttggttatatttgatttaaatggaatccttgcagatattgttcagggtttacaggtacatttcttcagat

SEQ ID NO: 133782 - DNA, 244 bp, Arabidopsis thaliana columbia
caaggtaggatcacattgatgcagatgttttgtcaatattatcttatgaaaactctgttttcttgcgtttgcgattagatgataaagatacaataaatggtatgatggatgagtaacagaaagatccagaaatgtattgatttctagttcagagatatttccttagctttattttggttgtttcaaattgaatctcttttgtttattattgttatacactgttgcgtttgacctaaaaaaaaaa

SEQ ID NO: 133783 - DNA, 210 bp, Arabidopsis thaliana columbia
ttttttttttatcgactgcatttgtattgataaattcagtgattacaatgcaaggcttttgttatgtaagaaggtacatagtaatgaaaatacaaatcatcttgagatggtaaactgtgttttgctagaaggtctgctggttggttatttgttcttggaatcagttgaaactagtctctcgagcgtttctgcagtcttcttctctgatca

SEQ ID NO: 133784 - DNA, 207 bp, Arabidopsis thaliana columbia
ccaggaaaatagttagctccatcgatttcttccttctcagcaagaggacctcaacgaataagtcccaacattcctcaagcctgacatatcatcaccgggactaaacattctcgcaggcatactcgaagctagcatcggtaaccggttatccagaccgacaatagacgaacgactgttctccataatgtcaggaactgcaataggctt

SEQ ID NO: 133785 - DNA, 219 bp, Arabidopsis thaliana columbia
actgcctgcgtctagggtccagttagttacaggcttgcagtaaatgatggtctgaggacagattgaagaatagtgaggggatgttaagctgtatgatgaatcgcgaataggggattagcctgaagtcatattaggacggaattgagtttgtcgagtgtcatgtgtgtatgcagtgaaataagtaactacgtgagttctaggtgagaaatcgtatatccg

SEQ ID NO: 133786 - DNA, 219 bp, Arabidopsis thaliana columbia
cgtacttaatagaggatgaggagaaatctgcagtgttgaccttagtctcaaccttttgttaatggttttggattccttttggttatcaaatggttctttctaagagatgttcatcacattttctccggcattgtgattgtttattttcctttagtgatattggcagttgttggaaaagtaccttttaagaatgcctttactgcaagttaagaagttttt

SEQ ID NO: 133787 - DNA, 213 bp, Arabidopsis thaliana columbia
gaaaaaccatatccaacacctccggccaccggcactggctccgtcgtacaacactcctccggcaaatggaagtacaagtgggcagagcagttagtgtgttcaggttgcagaaaccttcttgatgtatcccgtggaagcaacctccgtactgttgcactgcacgtctctaactgcactgtacacggcactgttcctcctgaccggaacgagatt

SEQ ID NO: 133788 - DNA, 207 bp, Arabidopsis thaliana columbia
ttttgatgaaatagaagaagaagttagagagataatgagtagatctagttagtgaaacttatcaatggtcattttgctaactttttgtatattcttgtggcaccgaactagttatgtctttgatttctatgctatgaatatactgtttctctctcactataaatagaaaagaaaagggaaggagaattaaagtaagtgcaattgaaa

SEQ ID NO: 133789 - DNA, 218 bp, Arabidopsis thaliana columbia
  unsure (1)..(218): unsure at all n locations
gtttgtacagaatgctatttttcgataccttgttaatgcctttccaaggagcctcctagcttaaagtcctcaaagttatagcgagatgaagatttttttttgattgtaactaaaactccacaagagaagtgtgtaaaatgagtaaccaagttagaagataactaaattagatgtagaganttagtagttcggagttacggtctccaacgttgtgtaaa

SEQ ID NO: 133790 - DNA, 226 bp, Arabidopsis thaliana columbia
gaaccatatgactcaacagaagatgatcatagatatgaggaagatggatgaccccgacgaagacataatctatgtaaatgtaagtgagatcctgaaagccgtaatgtaagcaacgagtgcatattaactctgatagaacgctaccgttgtaagagacaatgactaatgtgtactggaaagtcatggaacgtaacgttctggtagaagatgaaagtacctgatggta

SEQ ID NO: 133791 - DNA, 209 bp, Arabidopsis thaliana columbia
agataaagaacagatttttggttacagagaggaaattgcagttgttgaaagtcttcttaagtcaaagcctcgatctgcaatcactctgttaactaatatacgcattgttggcgattgcatgatatgatgaagttgatgtcagtcataactggcagagatatgattaagcgagatgcaaagatataccacttgttaaaaaatgagactgt

SEQ ID NO: 133792 - DNA, 242 bp, Arabidopsis thaliana columbia
atggaactttcttctgcgatttttgagaaactggaagcgaaaacagctgcgtcgtggagctcgtggtctctgctcgtgcaggcatgggaatgtggagtgaatgcttgttactattccttggaatgtgtagcgaaacgaatttgaagaatgaaatgaatcaagccgtgaatggttatgcattgcactctcttccgctgattgcacaacaccggttgcacactcaatctaggaatgagcatcat

SEQ ID NO: 133793 - DNA, 219 bp, Arabidopsis thaliana columbia
aaaatacgagcgacccaagatgcatatccttacccggcaccggaaattacccgcaagtccgccaccgccggggagtaccgccacagtattatcctccaccaccgccaccgcctcctcctccaccaccaccacgaaaagttggttttcttgaaggactattagcagctctgtgttgttgctgcttggtggatgatgtgctgtgaccaccatatatgctta

SEQ ID NO: 133794 - DNA, 219 bp, Arabidopsis thaliana columbia
cagcgaggagatcgaagaatctctagggatgtcacgtgccttggaaggattgaacattatcaatgaggtgaatcgtgaagatagcattgacacgttctttcaaggtcaagtatgaaccacacacagcagatgttttatatagaagaaagcagaagaaagcacatctgatcgactgactgaatgtaactactgaacgcaactggacctgaaatgttaaac

SEQ ID NO: 133795 - DNA, 246 bp, Arabidopsis thaliana columbia
ttttttttttctcatgatacagtatatggatataacaaatagatagttcatcatatctgtaaatgttttcacaactcctaaagatttaatttcataccataatgaatctctcctttgttctttgtcaatctagttcgtggcattgttagattcttctaatccgtaaaggccttcatcgtaccaaatatcgacaagaaagttccaccatctcgggtaaaggaatcgactcagagaaaggtcatgagt

SEQ ID NO: 133796 - DNA, 229 bp, Arabidopsis thaliana columbia
ttttttttttattgcgaaccatagagccaatatataaatataagtctttttataaaggagtaaacttagagatacaaagccttcaatgatttattattcctcttcaagagttctacaaagtttgatatgagggatatgtagagccaaacagaagtcaagaagccagaagtgaagctacttctctccgcagaatgtgggcaaagcaaatgcgctctgtgcatatcagagt

SEQ ID NO: 133797 - DNA, 207 bp, Arabidopsis thaliana columbia
ttttttttttgtacaaatagactaattatataaaaaataaactaactccacaagaaaatattacttagcaagaaattaacttcaaagtaatcaaactcttatatggttaaaatcgtgcaatcagttctaaggtctcaggaacccaaaataaaacccgacacactggcttcgctcctaaatgactttataatcagctcgagagtagtt

SEQ ID NO: 133798 - DNA, 205 bp, Arabidopsis thaliana columbia
ttttttttttaatgcaattaaccgagaaatgaaattgttaaaccgtatttacatatttcagctcccaaagaaaacttcagtttacaaaacgaacccagtaaaaataaattgcgttaagattccccctaaaatatagcggtaactgctgactaaaccggttacttctctaatcagtcgaatacggttcaagccaggtggttcgatt

SEQ ID NO: 133799 - DNA, 225 bp, Arabidopsis thaliana columbia
ttttttttttacgaaattttcatatatatatatatatatctatctatatttaaattgctgacaaataaaaaactaagaaaaaaaagccttatttgttacgaaaatttgatcatttatagactttaatgtgtttgttactctataaacggccggttctccgactaaaccaactcaaatgctgaataattctcctccggcttgaagaaacaccaatttaattcttcg

SEQ ID NO: 133800 - DNA, 206 bp, Arabidopsis thaliana columbia
ggaagaagaaagagaaagccatcttacgaggaaatgggttgtttcgatcccaacactccagcagaagttactgtggagagtagcttctctcaagccgaaccaccacaccaccaccgcaagtctggttgccggaagcacaagcaacagcaactgcagtgttgaggtagagagctttgaatcatctcagccacagatgctcacgtctc

SEQ ID NO: 133801 - DNA, 227 bp, Arabidopsis thaliana columbia
ccgagacccccaattgcaaggagaaacgattaggtggagaaatcaacatgagagaagtcagggctacagctgactcgtatagatggcatcctgtagcggcagtagtgaactgagcattatgtaggctcaccggagcgctatattctcagcaacctaggtaccgttaacactgaattagaagccatgtaagtcaagagatgaaatttaagtgcaagaagaagacatat

SEQ ID NO: 133802 - DNA, 207 bp, Arabidopsis thaliana columbia
cgagaccgcttagtcatccggtaaaacaagagatatatgtcatctctcaacatggcttcccgttaacgatgatgagaagagcaatgaacactgacttgaagcacaaagagagtggtagcctatatatagctacctgtgaaacaaagcaatcaagaagagggatggcaagaatcattgcacgtgccaatggcagcgtgtcgaatgaag

SEQ ID NO: 133803 - DNA, 217 bp, Arabidopsis thaliana columbia
ggagcgtgacgagagacaaaggagaagaccctagaatggattactaatggattagtaaggagagatgattgatagcaagttgattgcagatggtgatggtagagttcaattagtcgaagatgtttgattcagattgatgaaaggtggtggctttacgagcagtaattgatctttaactagggttgatttgacaaggaaagagaagtgtgatgtattc

SEQ ID NO: 133804 - DNA, 319 bp, Arabidopsis thaliana columbia
ttttttacaagctggagattgtggaaggagctgatcattgttaacagagacctcgacttaataactttgttcactcagtgattcagactacttttatcttttatgcaacaacattgtattgacatctctctgaatttagtagtatcaaacagaaaatagattccaagtttgtttactggatgagaatataatcagcatcaaagacatctccagcagtaggagagaggttgtttctacggagttgggcatgagtctctgcttcgtgttgaaatatcttaaccacgtcttgatagctccagctttctaacttctacttgtt

SEQ ID NO: 133805 - DNA, 310 bp, Arabidopsis thaliana columbia
  unsure (1)..(310): unsure at all n locations
gaggaagagcaaagtgatattacatgggacgtggataagcacatactcaaagagggtcgaaatcgctcttaaactcaagggtgtactctacgagtacctcgaagaagatcttcagaacaaaagtgaatcgctgattcaactcaacccggtgcacaagaagattcctgttcttgtccatgatgggaaaccagtggctgaatcacttgtgattcttgaatatatcgatgagacgtggacaaactctcctcgtttcttcccagaggattccttatggaaaaagggcccaaggtcccgggntcctggggtccag

SEQ ID NO: 133806 - DNA, 359 bp, Arabidopsis thaliana columbia
  unsure (1)..(359): unsure at all n locations
gagcacgccactacagagttcaccagaaaggtggtgaaacaagcaccaacagcatagcctctatttttgcttggtccagaggccttgcccacagggaaagctggacagcaatgccgcactcttgagctatactgagaaactagaagcagcttgcatggggacggtggagtctggcaaaatgaccaaggatctagctcttctgatccacggagccaaggttaggagggatcagtatgtgaatacggaagagttcattgatncggtgggcatgggagttaaaaagaagattgttaangcaacaactcccaggttgtgagaaagaaagaatggaaaatctgaaaaagccaaagagtctcagc

SEQ ID NO: 133807 - DNA, 419 bp, Arabidopsis thaliana columbia
tttttaaatgaaaatcatcatcagacataattttcacttcaatggagcaaatccaaatcttgttttatatggtgaagctatagatcttacatggtgaataactatctatatttgaatacaaactcttcatgaagcattataactccctgaaaagcatcagcacaacacaacaacatatgaaaacactcttgacacattctttgttaccatcatcatcatcatcacagaagattccaagtttcagacttgaatgttcggacttagacccacatatcttcacctccttcagcccacattccccatttccatctcactctcgggttactcatcatacatgtcgatatcagattgcttcttactctaggatctttgtcctggtgaatcatcagtctcatgtctgtcaaacctctgtacttatt

SEQ ID NO: 133808 - DNA, 351 bp, Arabidopsis thaliana columbia
gaggatcctcaaatcctcattcccaccttccgccggcgagtttcaaccggatctactcgattcgctaactccgatcttagaatttcaccggaaaactgattctccgttcttaatcaacgcgtatcctttcttcgcttacaaaggaaaccctaaagaagttcctttagatttcgttctgtttcaacctaatcaaggaatcgtagatccggccaccggttttcactacgataacatgttgttcgctcagatcgacgctgtctactctgctttagcgggcggcggggtttaaatcgttgagagttgagatatcggagactgggtggccatcgaaaggtgacgacgatgaggtcg

SEQ ID NO: 133809 - DNA, 351 bp, Arabidopsis thaliana columbia
tttttttataaaagaaccaaaacccaatcctccattttatttcaactttataaagtggatttacagttaaatccaaccactgaccttcgtgattgtaataattctataatcaacaataagcttaataacaaccaaaaagtagtgaaatcttaaagatatgtagaaacagaaatagtatcctgttggtggaaagaagtttggtgaatttcaagaaaaaaagcaacttaacgccgtcaaactttctaaacgttcacactgcatttattagccaacgtgtacttaacggcgttatcaccgacaagaacaccagcagctttgtttccaagattgatgaacgcctgacaccgaaca

SEQ ID NO: 133810 - DNA, 351 bp, Arabidopsis thaliana columbia
  unsure (1)..(351): unsure at all n locations
gaggttctcataaatgctgaacaatccaccagcatgaatcaaatcataagttctcggatacgtagagaatccttcacaccaatcttgataagtccctataaatcctcgttcaaagataacccctaacgtttgcttctcagcatccacaggaaccacattcataacccaagatggatatttcatcattgccgcagcaaatcctcccaagtatgcattcatgtccattatgttcctaaatcttcntcttgaaagctctggcattatctgtttgtaatatgatattctctccttccacacttnaantggnccttccncggannttctcaggcattaaatgtccggaatggttcc

SEQ ID NO: 133811 - DNA, 351 bp, Arabidopsis thaliana columbia
gagtgaagagaaaccagataatgagcatcaagatacggacatgattgatgcactattggcagcttatcgagacgaaaaggccgagtataagatcactaggaaccagatcaaggcgtttttagtggatattttcattgcgggcactgacatctcggcgctaacaacgcagggaacaatggctgagatcattaacaaccctaacatatttgtgagaattagagaagaaatcgattctgttgtagggaaatcaaggctgattcaagaaacggatctaccaaagctcccttacttgcaagcggtagtcaaagaagggcttagattgcacccgcctacgcctctcatggtaagggg

SEQ ID NO: 133812 - DNA, 300 bp, Arabidopsis thaliana columbia
  unsure (1)..(300): unsure at all n locations
tttttttcgagtaaaacagataacataacaatgaagagaggtcaagatacacaagtacacaaaaccttacatgacacataccaaaaaaaagaataactctcaacaaaggccaaactcaagaacattagagaaaattataaacaatgtaaatcttttagagagaaacttttatcaattgcacatatagactccggtttcgtacctgtgatctacctcaaagaaatctgtatttccctcagcagctgcacgtagactgataccngaccgnggagtatttccctgtaccgagaattttcacat

SEQ ID NO: 133813 - DNA, 351 bp, Arabidopsis thaliana columbia
gagatgaaatgaacagcctaatgagctataaatcagactttttgggtattaatcactatacaagttacttcatacaagattgtttgatcactgcttgtaattctggagacggagcttctaaaagcgaaggattagccctcaaattggaccggaaaggaaatgtttccatcggagaactgaccgacgtaaattggcagcatattgatcctaacggattcagaaagatgttgaattacctaaaaaataggtaccacaacataccaatgtacatcaccgaaaatggtttcggacagttgcaaaaaccagagacgacagttgaagaacttctgcatgatacaaaaaggatacaat

SEQ ID NO: 133814 - DNA, 593 bp, Arabidopsis thaliana columbia
gagaaaaattatactcttcttcttcaattcaatctctctcaagttttgatctctaaatctcacaacacgatccatgtcttcatctttctgattcacctacctctctattttgatttttcccttttcgaatttctccatagatggccgcaacaacaaccacggcggcgagtatcaacgccgaagccggaggtggtggtgggggagctgaagaccgtgttctcgctacggcgcaacagatcatgaaaagcctcaacacaccaaaagaggttcgtgaagatatgttacttatcttctcaagcttcgataaccgtttatcaaatatcaaaaccgcgatgacgaaccaggaagagaatcaaaacgacgctcttgtggcgcgtttagaggctgcagaatcggttattcatcggtgggatggtggtaatgattcttctcgtcactcgtcttcgtcttctggtaactatcgttcctcttcgttttctctttcgtttgatgaatctccggagaagctaccgagtttctttcagctggttgatgagattatcctttgcttgaggatctttcgctgagaataagcctgaatggtggatagagct

SEQ ID NO: 133815 - DNA, 350 bp, Arabidopsis thaliana columbia
gaggcgattgcgtctctagagaagcaagaacaactactatctgctacaaaaagagaaggaaacaaaactcttgaatcctccattccgttggctgctactatacgtgagttgttgcgccttaaggcggcagggaatgaagcctttcagtctggacgacacactgaagcagttgaacattacacagcagccctggcttgcaatgtggaatcacgtccttttacagctgtgtgtttctgtaatcgtgcagctgcatataaggctcttggtcaattttctgacgctattgcagactgcagccttgctattgctcttggaccaaaattactcaaaggctatttctagacgggcca

SEQ ID NO: 133816 - DNA, 321 bp, Arabidopsis thaliana columbia
  unsure (1)..(321): unsure at all n locations
ttttttaaagccaaccagtagttnacataacatttcataggagtcntgacacaacaaagagtggccaaatgttttcaaatattggaatttagtttgcataaacaggaaaatgaagtcaacatttgactcttttgtagtaagcaagaaaccttacttgtatgcggctccattagacatgaggncttataatccaagggaagctatagattgccgtatcgttgatctnnagtttnatcattgngnaatccgnttncgttntnttnnagtcgggttttcttgtcttaaagtattccccattcggtaattattttgntgtnttgg

SEQ ID NO: 133817 - DNA, 304 bp, Arabidopsis thaliana columbia
  unsure (1)..(304): unsure at all n locations
gagtctttctttcctttttttgttgaaaatcaaatctaagaaatgggtaacgcgattaggttactccggaaatgcttgaattctcacggcgtctccgcctcttccggcggcgtctcagctctttctcgtgatctcttaaacttcgagaccacttctnaggttcctgagaagcttgggagttacgttgtctcttcccaaaaggntcaagcaaactggtatagaaaaatacttnaggcatgggagcaaagctaaagnctcggccctaaaaattcctggagggaagcctnccaggttttgtttattc

SEQ ID NO: 133818 - DNA, 350 bp, Arabidopsis thaliana columbia
gagaaactcggagactttcacacaatgcctaacctcaaactccgaccccaaacatcccatctcccccgctatcttcttctccggaaatggctcctactcctccgtattacaagccaacatccgtaacctccgcttcaacaccacctcaactccgaaacccttcctcataatcgccgcaacacatgaatcccatgtgcaagccgcgattacttgcgggaaacgccacaaccttcagatgaaaatcagaagtggaggccacgactacgatggcttgtcatacgttacatactctggcaaaccgttcttcgtcctcgacatgtttaacctccgttcggtggatgtcgacgtgg

SEQ ID NO: 133819 - DNA, 300 bp, Arabidopsis thaliana columbia
gttgcgttaaatcttctctatatccgagaattgagattatgcaaggcaagcagcaacatattgttgtacagaggatgaagggcatcgcgtagccaatacagctaaaggtaagaaacactaaacataacctgtacaagttaggagcctcggcagcagatgaatgccctccaaatatccatacattacctaccacaaaccacaccgcaaagaagcaatccagagccattttgaagtattccacgataactttaagtctggcagcacttataaacccaggatatctactaccacgagagagtg

SEQ ID NO: 133820 - DNA, 293 bp, Arabidopsis thaliana columbia
  unsure (1)..(293): unsure at all n locations
ttttttttttgttaataatgatactacagtgtcttctttatttgaaatgtaacttttgttaantagtagttgataataccatcaccacaaggacactcttcatttcataaacatgaatatgaaaataatcgtagactaatgaacacaaacaaacaactaagagatataagattgatttttttcgggtaaggaaaaaaaatcggaccagtaaccttcgattccccagcagcaagcaatgcaataatctcgctctccccagacttacatttctatgaagagcgtaactatggcaa

SEQ ID NO: 133821 - DNA, 310 bp, Arabidopsis thaliana columbia
ggaaaacatacatacccaagaggctcggagatcgatattatatagaattctttcacattcccctaagtttaaaaaaatcacatttgcccctcaaagtcatactaaactccaaaccccaccccaaattgtttgtcaatcgcttgtatatcatttgctaatacacaatcatatttacttaaaaaaaaaaaaagggacataacctccttgaccctttatataagacccactcatcattcatacttttgcacattgcctactatatcaatcttcttcttcttctttaatttgctgcttttatataaccaagtct

SEQ ID NO: 133822 - DNA, 271 bp, Arabidopsis thaliana columbia
ttttttttttggtctagaactttggataatattataataacgggtccagatttcatttccggttaaagcatttttaaactgtttaaatttaatacacaaaaacactacaaacaaccactagcaagtagcaatgcttataagggatcactcaagtggattgaggttgtatataccaataagtagacacacgaaatatagctccggtaagctggaaaattgagcaaaccaaactgtatggttaatgtcagtcatctccccaagcatcttcccg

SEQ ID NO: 133823 - DNA, 364 bp, Arabidopsis thaliana columbia
tttttttttcataagacagtggtttgatgaaaattgatcaaaacaacaacgctcaaatcaattggatcacattcacttaagaaaagaaaaacatcaaaagaagcaaagaacaaactaaatgagtaaatctcaactcaatagcaaaaagctcacaaatctacaaaagtctatatgccaaacaaaatccataacttgtttaaccgatttaacattatcatcacaaaacgatacgctaattgttgacctaaaaacatgaaatatataatttataacaagagactccatcagaacttgatatttcgaaaatttggctcggagaaaatttctcactgatctccggcgaaaagaagcctccgagagacgg

SEQ ID NO: 133824 - DNA, 212 bp, Arabidopsis thaliana columbia
  unsure (1)..(212): unsure at all n locations
tagagattgctgattttggactcgcaacgattattgatcctaatcacacacggtcaatgactagtcgagtggttacactatggtatcganctccagagctnctncttggggntactgattatggagtaggtattgatctttggagtgtcggctgttttttagctgagcctattggcgggaagtactattatgcccggctcggacagaggtag

SEQ ID NO: 133825 - DNA, 350 bp, Arabidopsis thaliana columbia
tgtgaggctaaggatcaaagatggttttgtgggtatttggatatggttctttgatctggaacccaggttttgattttgatgaaaaactcattggttatatcaaggactataaacgtgtcttcgatctagcgtgtattgatcatagaggtactcctgaacatcctgctaggacttgtacgctggagcaatccacccgagctatttgctggggtgctgcttattgtgttcgcggaggaccagagaaagagaaactagcaatggagtacttggaacgaagagagtgtgaatacgactcaaaaacacttgttgagttttacactgaaaatgacacttccacgccaatcgctacc

SEQ ID NO: 133826 - DNA, 215 bp, Arabidopsis thaliana columbia
ccgtatcaatcattttattttataaaataatcaagtattatatactaatacaattttaatgtaatattgtaaaaccaatcagaataaaactattttgtgcaaaatctggattttacatatatcttgacaaaacttttatttaggataatatgaattcgtgcaagatttgggtaaaatgatttcgtgcaaaattagggcaaaaccatgaacaattt

SEQ ID NO: 133827 - DNA, 339 bp, Arabidopsis thaliana columbia
  unsure (1)..(339): unsure at all n locations
attttttttaagaaccatgtttacttatcgactcatggttcatagtacttattttctattattgaaacaaaacaatatgagccgatcgatgattatagtatagancggtaaaagcatgttttcaatgattcaataaagaagagaatcatgcttatcatttgtttctataattactatccgcatgattcaatgattctacaaagaaaatcgttaaagaagagaatcatgcttgttaattgttaatttttgtgatttactattacaatattgaatatataaattaccaattttataattatattaactaattttgtaactattcatagcccggtggtgggt

SEQ ID NO: 133828 - DNA, 377 bp, Arabidopsis thaliana columbia
aaattttccaatttcctttcgatttcgcccagaaatttcggtaactttcagattctgttcagaacgaagaaacttgttatttttggctacttctctccgattctgttcttcttgtagtagctgatcgcattccatgggtacttctcagagtcgtgaagatcgaatcagcgaatcggatacagaatccgattcagattactatgaagaagaagacgaggatcaatacgatgacgcgaagaagcaaggatcatcatctgtttctggtacaagaccgcctgattcttcttcttcttcaggaccaactgattcatcgcctctcgatattgagcagaagctaataagccttgaagttgaaatacccatcttcttcttccgtc

SEQ ID NO: 133829 - DNA, 424 bp, Arabidopsis thaliana columbia
ttttttttttgagtaaaaagcaaaatgtcactcattcacaaaccttcacacgatgacaaaaagccaaacactacaatcaaatttcattacaaaaacaaaagaaagctttacgatacaaactggttatttaaagtcgttttccagagaggctgatggagctgactttcaaaggcgtggcaaccacaagcggtgcttctggcgatttgttaccggagaaggagaagttatcgtgcatgaatcggctctcaacaattgactcatccttcaacaaggatcttgttgcagtaacagctcttgagtccttgttggttcctatagcattcgtgtgcactgttcttcacccgctccaagtcccatatcacactgaatttccccacttgttgctactatgtgtctctcttgcttttccactctcaagtcaccc

SEQ ID NO: 133830 - DNA, 337 bp, Arabidopsis thaliana columbia
ttttttttttgaatccagattctgttccacagatgctaatttcaatcatagtatcaatctcaattgaaagtttctggcttgggatgaattaattcaaaataaatttgagtattgatgatctctccacaggctgctttcattgattcggatcaaactcagcacaacattcttatggattcccaatcaactgtctccggtgtaagcaaccaacatttctcaaactttcatcttcgctgtgttatgggattatctttgtattgttgttgtaaagctgtctgttcaaaggctttgtattgattcattgttgtgcaggtgaaaactgtcaagattagcaatg

SEQ ID NO: 133831 - DNA, 270 bp, Arabidopsis thaliana columbia
ctcgtgccgaatcggcacgaggcaaaataccgttaagagcattgcagtttcagctccttgtgaatccttaaaagtaacatatgcgacctgactctcttgtgtctcactgagatcattagagtaaacattagagatattggtaaagatcatctttaacaagaagatgataatttacaacaagttatttttcataccttcgcatctcgacgtattgaatgtcaccagagaaagaaaagaactctttgacatctttcttagaaacaattagtg

SEQ ID NO: 133832 - DNA, 366 bp, Arabidopsis thaliana columbia
ttttttttttatcataattagattcatgtatcatatatttttaactctaagtctaataaccaaagttttcatggcctgtaactaatatataactagagaactatattaaaaaaaactcaaatctcactaacggcgacgttgaaacaccgtctctaaatcagaaggaggcgtaaaaaactctctaacgacgttactccgacattttaacgccggccgtcgttttctcggtgctggtggacattccaataactccggtatcttcgtttccttcgctgtcggtgtcgtcgaacactcttcctcttcgtttgtagcaatcttcttcaacttcggtcactatctccggcggcgctctgagttccgtcttga

SEQ ID NO: 133833 - DNA, 343 bp, Arabidopsis thaliana columbia
cattcttctcaacaacaaaaaaaattcttcctttcagaccaaaaaatttgaccaaccacaaatttttaatctttttccccactttcattttattccgattcctcttcttctaattggaacaagtctctgtttttatctctctgttttctttttgggtttactctgttttttcatttatcttggttttgagttagttaaagagagatgggtttttcgaagaaatctcaattcgaaggaggtttagaatccgacgggaagaaatgggttatcgccggaatttcgattcgggcttcgtttgaaaccagtcaagacgaaactcagagcgccgccggagatagtgacc

SEQ ID NO: 133834 - DNA, 364 bp, Arabidopsis thaliana columbia
ttttttttttaaaaacttagctagtctttgaattgaattataatatttgaaatttgaaattgaacaattcaaatgtcaataactgaaaatgattttaccgaaggaaaatcacaactgatcctccactaaattctgcattaaatttgttcataatgtgaaggcaaaaaacaaacgattgagatatacatggaatctcagagattatagagtttaaactaaatcaaggcccactggttgtttaagaggtaaaagagtcggaaatgtcttccatcacacctttcccatcttcaccatcatagtagaagaagtttttcaacgggtctcctttgcctgatactgcttgatcacctcctgtgctaatatt

SEQ ID NO: 133835 - DNA, 324 bp, Arabidopsis thaliana columbia
gaatttgggaatggacggagtaagagcttaccgagcaggagactgccttgtacgaccgccagattagggtttggcgcgctaatgctcagagaagattgaccaaagctcatatcttggtatctggaattaaggggactgttgctgagttttgcaagaacattgtgctggcaggagttggttcagtgactttaatggatgatcgtttagcaaacatggaggccttgaacgctaactttttgattccgcctgatgaaaatgtttacagtggcaaaactgtggctgagatttgttgtgattcactcaaggatttcaaccctatggtcc

SEQ ID NO: 133836 - DNA, 210 bp, Arabidopsis thaliana columbia
ttttttttttggaaacaattcgtaattattttccaaaagattttaagaaggttgggttcttcaatcttaattcttaattaaaattacaggaagtccaaaaaaatttggaaaagggcaagattatttaataaagggatccccaatggtggtggttggttggaggttcaacttttaaaagaacccaggaacgaaaggggttggctttggccc

SEQ ID NO: 133837 - DNA, 285 bp, Arabidopsis thaliana columbia
tttgaatgctcttaacgagtttgatcctaagtactctggtgttgattggagacagaagcttgaaactcagagaggtgcggttttagctacagaattgaagaacaatggaaataagttggctaaatggactgcacaagctttattggctaatgctgatatgatgaagattggttttgtctctagggttcatcctcgtgatcatttcaaccatgttatattatctgttttggcgtataagccgaaggatttcgctggacagattaatctcaacacttctaacatgtg

SEQ ID NO: 133838 - DNA, 331 bp, Arabidopsis thaliana columbia
atcgacgagcttccttccgccgccgccggaaacctaacctcccagcgtctgacctatattaatctcactcccattgagccacttccaatggaaacatcatcaatcgaaatcaacgagcttccattagccaccaaaacccaaacacctcctgcttccgtcgagccaattccaatggagacatcatcaatcgacgagcttccatcgtccgattcgaatgcaacggataacattgaagctgttggtgagaaacggaaacgcgccgatgaagacgagaaaaccaatctcgaatcgtcagacacgaagattactactccttcaccgtggtggaaga

SEQ ID NO: 133839 - DNA, 335 bp, Arabidopsis thaliana columbia
aatgagaatgcattttgaggttcttgctaaagttgatggtgagaatgttatcccggagaacgtaatgcgagttgatccaatcccactggaggacacgatagcgcaaaatgtgattactggaaatgtaaccatgtcgaaacttccaatcattgagtctcctccaagcccttttaccttgtaaatcatgttctatgagaaaaagtttcaaacttttgatctcgtctttgttttactttactaatcaccatattgcagaagaagtgtatatgttaatcttcactgcaacttgtaattattcctgtttgggtgaaaatcaatacatattttaagtgtgc

SEQ ID NO: 133840 - DNA, 216 bp, Arabidopsis thaliana columbia
ataaattttggaaacgtgttaaacattcaattaacaaattttttttttgacctgttttttatcgtaacaaaataccacttgtttgccttctcgttacagtaggaaaaagaaacgttttcattgtcgacgactcaaagagtagaacctgaagtccgataacaatcgataggtagtaagatattttgaccaaaacatcgtgaatttattgaaatgctg

SEQ ID NO: 133841 - DNA, 300 bp, Arabidopsis thaliana columbia
aacagttatccctgtctgaggattttaatccctttgatgattcatttgtaatctgacacaaccttccagttcatatcgttttgggttttgcttgttgactatttatttcagaccctaaattatacaaacacgaagatttgtcattgaaacaacgcagcttcattcaaaaacggattttaaaattggaaatcagacaaatgactaagcggctcccttttgactttagcatcaatattcaatattaccgtgccagtaataagagttctcgagtccatgaaatgatgttgtatcagttttcgt

SEQ ID NO: 133842 - DNA, 315 bp, Arabidopsis thaliana columbia
  unsure (1)..(315): unsure at all n locations
gacagaaagtgaattattaagatgatttacaaaaaacataaattaggaagggcatgtatttgaaattcatgcaaatgatcatggattaaggcacggctttgggtgcagagcttgagagccacatactcatcattcgctaaatctgagcaattggtctcattgcagtctgcaaaatacttcncacttaaccctttggtttcgttgctcaatgccacataacatgttgtagctgcgccctaatcccattagcatatttttaagaaatttcatgttattattataaatgagtcaatgcatgaataatgatgatgacaa

SEQ ID NO: 133843 - DNA, 344 bp, Arabidopsis thaliana columbia
aaaatcttctcattcgattttctctctttatttctctctctaatgaagggaactctaagatacttagcaggaatcgctgggccaaatgggtttggctcaagatccacagctgaacaagttacacaacatagcttttttccttgttcacatctcactgccataatcactggaggaacgtctgggatcggtgcggaaactgcgagagtgttagcaaaaagaggggtgagagtagtgatggcagtaagagatatgaagaaagcagaaatggtgaaggagagaataataagagagaatccagaagctgacattatatattcgagattgatcttagctctctatcttcc

SEQ ID NO: 133844 - DNA, 292 bp, Arabidopsis thaliana columbia
agagaaggaaattttgtttacccctaatacaaaatactcgagactcacataattgataacccttcgtgttacaaactaaaggaaacaaacaaagaacaaaagcctacgactctagaagtgttaggatttcagacgaatgacaaaagtcaagattctaggcacgtgatttacatttttcaagtaaagaaatcttactactgactcgtagtcccaccgcaagtgtcctcggacaagcacggcgagtccaccgcagaattgatcccatcattgcacggcgaagcctcagagccac

SEQ ID NO: 133845 - DNA, 298 bp, Arabidopsis thaliana columbia
gagaagagaagcttcttgtttatgattacatgcctaatggtagtctcttctggcttctccatggaaaccgtggaccgggtcggactcctttggactggaccacgcgccttaagatcgcagcgggggcggcgcgtggcttagctttcatccacggttcgtgtaaaaccttgaagctcacgcacggtgatatcaaatccaccaatgtgctactagaccgatcaggcaacgctcgtgttccggatttcgggctatctatcttcgcgccatcgcaaaccgttgcaaaatcttaatggctacc

SEQ ID NO: 133846 - DNA, 276 bp, Arabidopsis thaliana columbia
aaaatttcgaagaagattatattttcgattttttgttgttatgtaaattttttgaatatacttttgtgttcttatggcattacatcaaaaaaagaagatgcgatctttggagctattagctcaaactcacaaaagaaacgaagccaaagaacgaacaaaaccgaacgaatcttaagatgaaaaaaagattgttgagagaaactcttaaaccaaacaagtgacttcccgaactaaaaagctactgtcagagtcttttggtctcatcttctgatcaag

SEQ ID NO: 133847 - DNA, 330 bp, Arabidopsis thaliana columbia
  unsure (1)..(330): unsure at all n locations
aattggtcttcttccgcccgagttttggagattttggtcttgttatcgctatcttctttaactctgttttaggtagctgaggttcttgatagaaggtaggcataggtgtggctttgaagttcagactcttccttagcatcttaagctcagcttcttgagtttccttggacttagcttgtacggtattcttttctncttctttcgcatggatcttttcctcaagctttgaatagaactctcttcttttttcagctcgttggtcacatctaaaactgaatccataatttggaagtgcactagctcgacgaggtttgccatcatcttcttttg

SEQ ID NO: 133848 - DNA, 314 bp, Arabidopsis thaliana columbia
caggatttgatgatatcaaatgtccattgaagcagaagtacactgtctcaatggaggagaaggatttgttctgacattttttttcttttttttttttccctttgctgttcacgaatggactctgaaagcgtcgtagctgctgacggtgcggattgtgctattgcaaatggtgaagtgacaatggaaggagacagtagtaatggaaatggtggtacttcagagaatttggaatgtttgttctactcagcatcctatggaggcatctgagggcacacagaatgacaagtggatgattcaaacagatgagaggacaa

SEQ ID NO: 133849 - DNA, 254 bp, Arabidopsis thaliana columbia
  unsure (1)..(254): unsure at all n locations
cacttcaaaccttttgttatgatgaataaaatgtaaaacttatgttttgtaatttgtccattgcttcttcattcttgtttgcaaagttaatgttttacagtacatncagaattacatggtacacgctgattgtggaacattgtcagaaacacttggcaaaccaaattgtagattctacaaaggagatggctatgtgcaagcgatttgttatgtgcagagataaagtttgttggcattgatcacgtgtaaagccg

SEQ ID NO: 133850 - DNA, 416 bp, Arabidopsis thaliana columbia
aggtcgaattttctgaaattaagattcattcctccatggaagaagctctgtttttattctctttagcttagcttagcttctactgatctgtttttgctacaaaatcccatctttttctttaaaactctttatctctgaatcttgagtttcttgtagaagaagaagcaattttgaatctttcgtaatcataaagattcgtggaggatctctactgatttgtcggaatctctcactacagaatcacttgatcttatgtccggatggaggagagagaaggaaccaacatcaacaacaacatcactagcagtttcggcttgaagcagcaacatgaagctgctgcttctgatggtggttactcaatggacccaccaccaagacccgaaaaccctaacccgtttttagtcccacccactact

SEQ ID NO: 133851 - DNA, 304 bp, Arabidopsis thaliana columbia
ttttttttttgcaagatcaaaagcatagtacatatattgaatttgcttatctaacgcacagtgaccaaaattattacaacaaacagtggtatgttacatcttcatatctaagagaccaagaagctactcataacaaaaacacaagaccttaatcaattatgaaaatattagaggttttaacgaaaacacaaagtctaaacagtgtcttgattagtattgttcttcttcagctttttcaaagctttcgttgagggctttcgagacatctcgagctcttgtttcatgctcttcttcttcatcatcg

SEQ ID NO: 133852 - DNA, 335 bp, Arabidopsis thaliana columbia
acgaatctgatgttgaacaaacagaagattcgtctaatgaagaagagaagagaccaaaagagaggaaaatcatgaagaaggctaagaacattgctatacccatggcagctaaggcgaattcgcttgcaagagagcttaaaactataaaatcagacctgagttttatccaagaacgttgtgggttgcttgaagaagagaacaagagactcagagatgggtttgtgaaaggtgttagacctgaagaagatgatttggtgaggctacaactggaggtgttgcttgcagagaaagctagactagcgaatgagaacgcgaatttagttagcgaaaatcag

SEQ ID NO: 133853 - DNA, 307 bp, Arabidopsis thaliana columbia
ttttttttttaaaaaaaccgatagatttgagattgacagaatgagagcaaaacatacacaagtatccagtgtttacaaaaaacataaagaggaaccaaacacactgataccaacatttcttatcaagcgtctaggactagtttacttcctggacacctttagagagaacttaaacataagccgcctacaatatccagcggatcttatcgaactgacggtagaagagcttaccatcttatgaaagtactctcaagacatgttggatgatccttgttgcaggactcgaatgactgacaacgagaggcgg

SEQ ID NO: 133854 - DNA, 284 bp, Arabidopsis thaliana columbia
cgacgatctctttcaccggacttctcccgtctctgtttcctcaagagagattgagtgataaaggagacaaaaaaaaaaaaagaatgagtggttttagagctttcaaagcacaagtgcctattgaatggagccagagcttgtacataaccttagtaagaggtctccctggaacaaggaagcttcacagacgaacacttgaagctatgggacttcgcagatgtcatcgtactgttttgcattcaaacaattcatccattaggggaatgattgcacaggttaaaagg

SEQ ID NO: 133855 - DNA, 285 bp, Arabidopsis thaliana columbia
gaaatgtcttgccattatggagaagcacttttcagctgtgacttcaattgctctatcagaggatggattgactttattcagtgctggaagagataaagttgtgaacttgtgggaccttcatgattatagctgcaaggctacagttgcaacgtatgaggtactagaagctgtgacaacagtttcttctgggacgcctttcgcttcatttgtagcttctttggatcagaagaagagtaagaagaaggaatctgattctcaagcaacatattttattactgttggtga

SEQ ID NO: 133856 - DNA, 296 bp, Arabidopsis thaliana columbia
gaatgaccgtcaaatgatttatgctcagaaaatcaaacttcagcaaatccaaatacaactaacatttacgaaacacaaacaaattgttacacatgtccctcgttcattcatattttccatgcaacaaaggttacggaaaccaaaaatgaaactatgatagctatttataaaactgattcgaccaacaataataattagattattctcttgggttagttataataattgtaaccataattcttctcttcttcttcacgctgctgttgttgttgtttgtagctgctgttgctgcgtcc

SEQ ID NO: 133857 - DNA, 351 bp, Arabidopsis thaliana columbia
gaagtctcaaaacaagtgatataataattgattgtcagtacacagagtgctcgctaataacaacatatactcgattaggcatctagcgtttccactcttgcttgcaactactagtaaaacattctaaagaaacttaaaatctttcatcagtaaccgtagcctgagctgtaatccgtagcgtatcctccaggcgggtttgttggagccgctgcgtaaactgagccgtgtgttgcgtatggattatagccttgctgctctggtgctacagtttgaggctgtgctggtgccggcgctccagcttcagccatgaagttctgaataagctgcacggcagtttggacttgtgagcca

SEQ ID NO: 133858 - DNA, 294 bp, Arabidopsis thaliana columbia
atcgttctgctatttcaccaattcaatatatcaaagaaaaacgagtaatacaagactgttggtagcatgctttcgttttgaaataaaggagaatgtcacaaatgaggaaacatgtctagtggacggaatctttaggtaagacatgggaccctttggcaactatacatcaaccacatgacaaaagaattgactgtgtcatattcatctgtaatgatgcctaaacaacactagcttgcttaatccttttcaccacattacgcagttcaagcaagccttgaggatctcttaaatttg

SEQ ID NO: 133859 - DNA, 339 bp, Arabidopsis thaliana columbia
ccttcttctcagacccgggttcctcttctttctcctcttccttatccttcttcttcttcttcttagaagacttcaccttctcttcagcctcttctccttcaacttctttggttttagatttcttggttgttacaggagcagggctatcactgctatcatcatgcttacgcttacgcgcttcccctgcttctccattctcagcgtcagcctttatctcctcaggagcagcagcagcaccagcaattatagcatctccaccggtaggcaaaaccacattcctgctccactcaaccggagtcttctcattaggcttcccatgcttatccaatttcccatcag

SEQ ID NO: 133860 - DNA, 277 bp, Arabidopsis thaliana columbia
caaaaaatgttggatctgatattaaaaaaacaaacaattacaaacacacagttactatccttcagttacatcatatatatgtattacgtcgttgctttgtgctatatagctgacctcttgctgatatttatattttcggcaactcttgatcaaacacagatgtcacgtcgtttctatactgactctcctcactctctattatctcctccaacatcttcttctctgtccgactctgcattctcctcttgcttaactaagctaatatcaccacccttgc

SEQ ID NO: 133861 - DNA, 237 bp, Arabidopsis thaliana columbia
caattagaaagtatgccatcaaagtttaattatctttctactgtcagagagtcctccctcagtcttctctaatatatctgaattttctttcaattaaagatttgattcttcaaacatgattgtatgatctctcacgcacgttctttgttataaatttgagatttaccctatttgactttcgagaactagctcgtgggctgatctatttggtctcggcaataaaatctgcaaaaacgt

SEQ ID NO: 133862 - DNA, 495 bp, Arabidopsis thaliana columbia
cgaagggacttgcatcgagcttcagcttcagctagaaagtgttgaaacaaagaaaccgacgcagagtaaacaaaaacgggtgggatatagcaacagcttctgtgaagttatcagagtgtcaagaaacgattaccagtttacggaagcaactaagagcgttatctacaacagaaacaagcagcaccattaaatttctacacaaaagatcttctctccgggaaaatatagcagaggatgatactaacagagttgctcaagatgatgatggtaaccgttacaacgctttgatcgtgtacgaaccagtgaaggcgagaggtgagaagatggagatggtaccgagaaagaagcaaggattagggttcttgaaaaaactgttgttcaggaggaaaagagtgagcagcaagaaatgtcttgccttgactatgtgatgaagaaaactaaactaaaaaggcttgtgtgtgtgtaatgagtgaacagtgaaaactgcttttgggt

SEQ ID NO: 133863 - DNA, 320 bp, Arabidopsis thaliana columbia
caatcttatgcgtgtgctatcgaactctcccgttgaaacccctccctctgttgaatccaactacgacagctacaaagttccccttatttcttccaaggaagaagaaaacaaccaaaaggctgggaggtgggaaaaagtcaagcggagattggtttcactgtcacaaaaagtcaaccttaagacaatttttgctccatcaactattgctgcgatgattgcacttgtgatcgggctcattactcctttaaggaagctaataatcggcacggaagctcctctccgggtgcttcaagactcagtaactctagtgggagatgggg

SEQ ID NO: 133864 - DNA, 333 bp, Arabidopsis thaliana columbia
acacaacataagataatagtatcatttggttcatcaaatgaattcagttttagttacaatcagatagatacagagtcattgcggacctaaaagcgagagggagcgcaaaccaaacctacttacgcacatgacgattatacgggtctatgctaaaatccttattgatcacttcacatctgcacctcaaactctaaggagctgcattttgttagcaaaagcaataccaatccaatcaggctgcgaagaagaccactgcaactgattaatctccgaaccagccgaataaaccgacatcggatcaatcccattgggtccagcaacagtaggaagctc

SEQ ID NO: 133865 - DNA, 371 bp, Arabidopsis thaliana columbia
cgtcgagccaatctcggttctcaacaacagcaaaacgagcgagttttgtgcgccgttgacttccttcgattggaacgatgtagagccgaaacgtctcggaacttgtagtattgatacgacgtgtacgatttgggatattgagaagtctgttgttgagactcagcttatagctcatgataaagaggttcatgacattgcttggggagaagctagggttttcgcatcagtctctgctgatggatccgttaggatctttgatttacgtgataaggaacattctacaatcatttacgagagtcctcagcctgatacgcctttgttaagacttgcttggaacaaaacaagatctttagatatattggctacgattt

SEQ ID NO: 133866 - DNA, 493 bp, Arabidopsis thaliana columbia
gcgcggtcaagacactagatcgagcttatctctacaactattcacctcttcaccagaagaggagagtcgaccaaaagttgcatcttcaacaaagtattattcttctgcgagcagtaaccctgttgaggatagatcaccatcatcatctccagtcatgcaagagttattccctttgcatacttctcctgaaaccaggaggtattacaattacaaagacactagtaccagtcccaggaccagttgtttgcccctagagctctttggtgcatcaaatagaggagctactgcaaatcctaattacaatgttttgaggcatcaatctggttatgcttcatctggttcggattattctcctcctagcttaaactctaatgctcaggagcgcacaggaaagatatcttttcaaactatttgaaaagatcctagtcagctccctaacacattgcgaaccgagatctttagatggctttcttagttttccatcagatatgga

SEQ ID NO: 133867 - DNA, 522 bp, Arabidopsis thaliana columbia
ttcggcacgaggaaacgccttgctgagaggagaccccgcgttaagggtcagtttgttaggaagatgaacggcgtgaatgttgatttaaatggacagcctgactctgctgactatgatgacgaggaagaggaggaagaagaagaagaagaggagaaccgggattcatctcctcaggatgatgctttgggaacttgaagatacaccaagaactgaaaaccgctgtgttatacgtatttgcttgcatcttatcaaacaacagaagatgttgatcgactgacacgaaaaagatgaaactgctacagccaaaaaaacatcgaatatcgagttgtctctaaggcaatgttggctcttgcggctcaactttttgacagagcattgaaaagctctcattgggtttaacttagttcgttggaaaacaaataatgtattttatcatgttcactcacattctctcagtaagtactcagatgtattaacctttcttccccctccagtatcaattacttggatcttgtttttccc

SEQ ID NO: 133868 - DNA, 356 bp, Arabidopsis thaliana columbia
aagtaaatttaatttttgtttattataataggaggtgaataaaaggattcacccctataaatgaatctgagtattgttcaaaaaaacgcaaatagagtaacagaagttgcataatgttttagcaaaaactactccttacatctccataagaataacaaagatattattaaaaaaaatcaagcagaagcaaataaaaaaaaagaggattatgtaaaaaagggaaatgatcatcttcattagcttccctttcggctccatggaggaaaacagcaacccttgggactagaaggtatggtttgatgatgttggtccgatgatgggtcgagtcggggtgctatgatccggtccattgtaga

SEQ ID NO: 133869 - DNA, 329 bp, Arabidopsis thaliana columbia
gaattaggtagaacaatcggcgaaggtactttcgctaaagtcaagttcgctcagaatacagagaccggtgagagcgtcgccatgaaaatcgtggatcgtagcacaatcatcaagcgcaagatggtggatcagattaagagagagatctcgattatgaagcttgttcgtcatccttgtgttgttcgtctttatgaggttctagcaagccgtacaaagatttatatcatcctggagtacattactggtggtgaactgtttgataagattgttcgtaatggacgacttagtgagtcagaagctaggaaatacttccaccagcttattgatgg

SEQ ID NO: 133870 - DNA, 254 bp, Arabidopsis thaliana columbia
gtacattgctcgaaaatctgaaggctcttcgggaagattgcgaagtgctcttgtctctcaaaatcattcccgcgtagaacccagtctcgaaccacaggtcttacttgtgtgccctcccgataagcagcctccaattaaatacaaggatcttcattcatttatgctgtcctggaggcattgaggtccatgctgttgagagaactcctcccacgagcgagttgagtgagattattctcagccaggaacatcttaga

SEQ ID NO: 133871 - DNA, 601 bp, Arabidopsis thaliana columbia
caatgtcataccaatgggaactcttcaaccggctccttgcaaacgcgatgttccaaagctgtcaccgatcatagcacaccgagttcacacagagcccctctctggcttgatgttcacacaagaatcagtcgttacggcttgtcgagaaggccatataaagatctggacacggcccagtgaatcagaaacccaaactaacagctcagaagcaaatcctacaactgccctcttgagcacaagcttcacgaaagacaacaaagcttcactgagcagcaagatcatcagtggctctactttcaagcaatgacagagagaatgctacttgtctgaaaatcaatcaggtgctattatttagtcatgtttctccttctaaagtgaaagaaaatctttaaagaaaagccctgtgaataaaattcgactgggttttgtttttgtttttaatattttaaaagaaggatcaaaatctgaattctgactgtaaattggaggctgacaaattaagtttgtgagaggggggggggggcatagaagagaaaatatgggagaattttcggatgtaattataagaaagaaaacaaaatctgtttacataaaaaaaaaa

SEQ ID NO: 133872 - DNA, 429 bp, Arabidopsis thaliana columbia
ttttttttttctaaataatgatatagatttccatctaatatgttacagagagtccaatgttacttcattacgtttacagaactcctgccggtacttaagatgcagggccattttgctagacacaaccttggtccgtcatggcttgagctatgttcaaaaatgctgcaatcgttgctccatgaagtagtgcctcaggactttctttttgataaccgaaatcatttgctgctttaagagctttttcataagtctgcttcagtgcttcctgtaatcttagactcaaaatcttctgctgaccattgcattgaattagattcacggaagtacttcgatttcaccagcagcaactcctccagctccagcagcaatggcaggagcaatcagaacattcgcctttcttgaaaacatcgattgcttcagctttgtaca

SEQ ID NO: 133873 - DNA, 368 bp, Arabidopsis thaliana columbia
caaagtttcatgaatgagatgtacagatatatgggtcctgacaaagatcttccgtcagaggaggttggtgttggtactcgggaaatgggatatctttttggacaatatagacgacttgctggtcagtttcaggaccgcggatatattgggctgcttctagcctcagaactgaagctagtggctatggcgtcggtgtactttgcacgacttatacttgcagatatgaataaggaaataaagggactaagatgtgtcgtgagtggttgcgggaagattgcgatgcatgttgtagagaagctaattgcttgtggagcccatccggttacttgtttcaagattcaaaaggatattgggcggacgatgatggt

SEQ ID NO: 133874 - DNA, 383 bp, Arabidopsis thaliana columbia
ttttttttttcgaatttaaaagtgtactcgttataaataaacacaatcatcattacttaagacggctcagccaagtttggaactttaaagagaaggtttttttaagaagtatacacatatatgtacggctgagacatctgatctctgaggtctttttaatgtctctttaaagttaagactccaggaaaaataataacatggtgatggaggttggcttttagcggagcatcgaggacttcatatttgagtttggcattgaggaagacgtgtgagcaatgctccgtagattggcttaccgtcttctgattctccgcgtgggtggaagctcgtctgctgcagtttcggatcacagatacgcctgatggatcagagagatggaatat

SEQ ID NO: 133875 - DNA, 381 bp, Arabidopsis thaliana columbia
ggtttcttaataaacgacgcagggtttaattcttctccgtctcttacgttttctcagcgccattgatccttcgatctcagcaaaacttccgccggcaaagtgatttgaattcgtgaagcactaaattgtataatcagatacggtgagatgaagattgatctgaacaaggtggctcgtgaaatcgaagtggataatcgtattcctctccgtaattactaccgcatcgccgataatctcctccgacaggccagtatatatcgcgaagagaagaatgtggtggatctgtatatcatgcttcttagatattcaaagtttggatttcttgaaacaattcctttccatcgagattaccaggcatcgcttccacaaagaaagacttgg

SEQ ID NO: 133876 - DNA, 315 bp, Arabidopsis thaliana columbia
aggttgttgaaaaggaagagagcaatgatgatgattaggaagatgaaaaagaagagagcaatgatgataaggaagacaaaaaagaagatatcaagaagtctaacaagcgagggaaagggaagactgagaagactcgcgggaagacaaagagtgatgaagaaaagaaggatatagaacctaagactccttttttctctgatcgccctgtccgtgagcgaaagtctgttgaaaggcttgttgcggtggttgataaagattcttcaagggaattccatgttgaaaagggaaaagggacacctctcaaagatattccca

SEQ ID NO: 133877 - DNA, 383 bp, Arabidopsis thaliana columbia
aacatgtctacttctcatcatcatcatcaccctccttatctcatcaccacattattcttcttgtttcttaacttctcctgcctccatgcaaatgaactcgagcttctcttatcattcaaatcctcaattcaagaccctctaaaacacctctcctcttggtcttactcttcaaccaatgatgtgtgtctttggagtggcgtcgtttgcaacaacatctctcgtgttgtctctctcgatctctccggcaagaacatgtccggtcaaatcctcaccgccgctacttttcgcctaccttttcttcaaactatcaacctctcaaacaacaacttgtccggtccaatacctcacgatatcttttaccacttcggtcttccttctctccg

SEQ ID NO: 133878 - DNA, 388 bp, Arabidopsis thaliana columbia
ctcgtgccgctgatttccgtgatattttaatcgatgacctgccggatggaggagctaatgctcttaaccttaacagcttacgggtagagtttcacaggccccatagtgttggaacatctgtagagaaccagcccacacagcttgattgggatgatttagaatcttatagatgtattatacaggagttagtaaaaattaacttaacaaagttagaagaaacaagggtatcttctgtaagacccatcagatgggaactcggttctacctgggttcagcatctacagaagaaagaaacagacgtctgtggaaagcctgcaactaatgatgaaactgaactctcagttaaaggcttgggaaaacaatttaaagcatcttaaagagcaaacgt

SEQ ID NO: 133879 - DNA, 239 bp, Arabidopsis thaliana columbia
atttagaaaattttgaattatttattgattgaagggtttgaattcaattattcccaaaaaaggaggaggaggtggttttggttaaaaaaagattaaaattccgttcaacaaaaccaaacccaaaaggaaggaacaaaatttggaaaaccccatttggtttaaggaaaaacttccttcttcccagaaaaagggggttaaacttgggttttgggggggtcccgtttcggattttgggttta

SEQ ID NO: 133880 - DNA, 204 bp, Arabidopsis thaliana columbia
ctcctatcgtttacaaaacatcgagaaggaggtggatccagtaccgggcaaatcttgccctcaagatgaacgcaaggttgggtgggaagcaatgtcgagcttatggatactttctctttcttcaaaaaagaggatgagggtcaatgttcattgggggttgatggtcaatcatcccgctgctcgggacaagatgagccccgtcca

SEQ ID NO: 133881 - DNA, 367 bp, Arabidopsis thaliana columbia
cgatatcaacactgattctttttatgaagctttggacaggtttgcacagttctttatccagccactgatgtcaactgatgccaccatgagggagatcaaggcggtcgactctgagcatcagaataacttgttgtctgactcttggcgtatggcccagttacagaagcatctaagtagagaagaccatccatatcacaaatttagcacagggcaatatggatactcttcacgtacgacccgaagaaaatggagttggatacaaaggagtgaactaattaaattttatgacgaacactattctgccaacatcatgcatctggtttgctttatggcaaggaaaatctttgataaaactcaaggtcttagt

SEQ ID NO: 133882 - DNA, 538 bp, Arabidopsis thaliana columbia
  unsure (1)..(538): unsure at all n locations
gggatgtgtcagttcatcctgaatctggtgagaagttttgacacgcacaagcaacctaagagtgagcttggagatctggtggaaagcatccatataattgtaggccttatggaaaaccttcaagggcgtggaactttgagggtatgtaactggtttcaaaaaaatcaaggaaagcaagaaagaaaaaacccaagggaaataaggaggccacagtgcataanctgtctgaaaatcatccaagtacttcaaacgaagctagcacagcaaaaagcataccgatggttgattcaacagtttcaacagaggatggaccaatggatgtncctcccaataaaccagaggcatcgaacctagngnctgaaactgatgnaactcaacaaatgcacagcccgagtcaaataatgtggttgatgatctttttggggcagtgntgttctnctgattggggagggcaacttcaccagttnaggtggtttaaggttcccatttnttntgntttccnnacaggttttaancttgtgtnttagtttnaagntgc

SEQ ID NO: 133883 - DNA, 552 bp, Arabidopsis thaliana columbia
  unsure (1)..(552): unsure at all n locations
tttcacggtttcgcgggcaaccatgttaattccattggagcttacttcgttccaaaatcctccaccactcctgttccttcaacccctttnaagctgaccgcagaaggtggtgagacaggagctgtatggnacgatggttctnacgatgatgttaagaaagtttatgtaggacaaggcaggttatagtattagcgtttgcagtaatcttactgatgcaggtgacgatagtggtgctactgaaaaaaggaggaggggggcaagtggagtatcatgagaggtacggcgagtacagtgtaaacggtggagacttttgggtggttagagaagngaatgcatttcctnagggaagagattnttnntggttgaggatccntttncaanaggnttcggccaagnccattccggccttnaaggcttcaatttcccccattttggaaccgcttcttccgccgaaccaaccagtaaanttttnttcacctncctnttttttttttccagattcggggttggttttttcattnnttgaatgaaantttttcggcggtncttcaa

SEQ ID NO: 133884 - DNA, 532 bp, Arabidopsis thaliana columbia
  unsure (1)..(532): unsure at all n locations
catcatggtgtgatgcaaatccgtgggaaccgccaatattcttgtacgctcaagtttaaggagcaatccattcttgagagaaatccccaccaggtaaacggttttttagaagacgtagcagggcaaaaagcagcaacaatatttggtaaatgggatgatagcctttactatgttgctggtgatggaatcaacaagtcgaaagtcagtgatcctgcatcaaatgcctcgttactgtggaaaaggaccaagccaccgcctaatgtaactagatacaacttaacctcatttgccattactctgaacgngctaacacctgggttacaggagatacttcctcctacagnctctaggctcagaccagatcaacggcatctngagatggtgnataatgngaggcgnctttgggaacaccggtttgaaggaggcaaanatntngggggactttagaaagcggttgggccnnntggtttnnggcaaggtnaagggccctnagtcccgggggttttggnncggggnntgnctgggttttccc

SEQ ID NO: 133885 - DNA, 267 bp, Arabidopsis thaliana columbia
  unsure (1)..(267): unsure at all n locations
cacaaacgagtaagantacaaacacaaatagcaaaaaattggcaaacaagctcttcctcgtntgcncaactttngccctctgcttcctcctcaccaacgcttccatctaccgcactgttgtngagttcgacgaagatgacgccagcaaccccatgggcccaagncagaaatgtcagagggngtttcagcaatcacagcacctaagagcttgccagnaattgntgcgcatgaaaatgtggcanggccgtggtggtggtccctccctcg

SEQ ID NO: 133886 - DNA, 381 bp, Arabidopsis thaliana columbia
  unsure (1)..(381): unsure at all n locations
acaacaacaaatcttaaacgttttactttgtgctgcacnactcaacctcaatggccgcctcaacaatggctctctcctcccctgccttcgccggtaaggcgtcaagctttcccccgcggcatctgaagtccttggaagcggncgtgtgacaatnaggaagactgttgccaagccaaagggcccatcaggcagcccatggtacggntctgaccgtgtcaagtacttgggtccattctctggcgaatnaccgagctaccttaccggagagttcccggagactacggatggggcaccgccggacttttnagtttgccccgggaantttngaaaggaacccgttnggctttgnaggtttttcccnagnnagtnggggaattnttt

SEQ ID NO: 133887 - DNA, 388 bp, Arabidopsis thaliana columbia
  unsure (1)..(388): unsure at all n locations
ggatgaaccggaagccgggttacggtgcccaactgcgcgctaacctagaacccacaaagggtgttggtcgattaagacagccttcgaattcaagaaggacggtcaaaagatagttggtttccatggaagagctggtgatctacttcacaaatttggagtccatgtcgcgccaataaccaaataattatggagattttaagtatcttttgatgatagtttacacactttgaataagctgattctactttattnctctctgtttgtttacngcttcagtgttttaagtcttctctttgtgtttgtngctgttgtgtctttnatggattttggtnatccgttttaataaaagaggtgtnttcaaagnaaaaaangnaanngttnntnnaat

SEQ ID NO: 133888 - DNA, 532 bp, Arabidopsis thaliana columbia
  unsure (1)..(532): unsure at all n locations
aaacactgtctcttttctccgatacatatcccgccgcttcccctgtgtttttcttcgccgtccgtcgttcttttcaactccttagctgcgatattaaagtctagacacaatgagaggaaggagctacacgccatcaccaccaaggggttatggaaggaggggccggagccctagccctcggggccggtttggtgggagtcgtgacagtgatctcccaaccagtctcttggttcgcaacttacgtcatgattgcaggcaagaagacctcaggaggccatttgagcagtttggtcccgtcaaggacatctaccttcctagggattactatactggagatccaagggggtttggattcattcagtttatggatcctgctgatgctgctgaggctaacataaaatggatgggtaacttcttccttggccgtgagttactgtcgaatttgctgagaaaccggangaagcaactaggttggacaagggtcgaggtgnnggnaacagttcaggcananngtntccctganttggtnttc

SEQ ID NO: 133889 - DNA, 529 bp, Arabidopsis thaliana columbia
  unsure (1)..(529): unsure at all n locations
cacacatcaaaaacgattttacaagaaaaaaatatcagaaaaaatgtcagagaccaacaagaatnccttccaagccggtcaggccgctggcaaagctgaggtactctttctctcttagaacagagtactgatagattgtncaagttataactcattgaaaacagttgaaacttgatcacngctagaacttccatttncttgtttaatttagtttgtcgtaatttgtgttgaccatggttgtnatataggagaagagcaatgttctgctggacaaggccaaggatgctgctgctgcantgngagcttccgcgcaacaggtaaacgatctatacacacattatgncatttatgtaaagaatgaaaagtcttcttagggcatacatttacgnagatttctgatatttcatatggtttgtgtaatngtataggcgggaanngttntcggttcgnagtgggaggtgttacttcgtgaggcaagnccgnctgncagtgcgtccggcacttngggttatccctnnatatgtggttc

SEQ ID NO: 133890 - DNA, 543 bp, Arabidopsis thaliana columbia
  unsure (1)..(543): unsure at all n locations
caacgtagcgttncacctcaaatattttnatttgatcaaatcatctccacactcgccaaatcgttgtgtcctcgttcatatcgttatcgtatcagctcaaaaatctcaatctctcttccttacattcttctgtttctcgaatccttgtctccctccatggcttcctgtagcctaggagttcctaaaattaaaatctcggcagtagaccttagtagagtaagatctggaagcttactgataccatacaatcaaagatcattgcttcgacaaaggccagtgaagtacttgagtctgaagacaacatttggntctgtgaaagctgtccaagtgtctactgtcccaacntgcagaaacatcagctactatagnagnaaaagattctaaagngatcaagtcatctcgnttaaccgntcagcttgttccaagccttctgaggtggagccttgtactgaatatgcgttctcatcaatgagggttgacctgaactggggggttccgctnttttggaggncatggtgcatgtgnttaacncgcactctgtgt

SEQ ID NO: 133891 - DNA, 533 bp, Arabidopsis thaliana columbia
  unsure (1)..(533): unsure at all n locations
tgtttctgtgtcgtcttgtcagtttcatttcggcttccgtnaggtttctcctccgtcggtaacttcttatcctagacgattcgaggtctctaatcggagatttcctgcgattccnattaaatgtncttcatctgagccggaaaacggtgaggattcggcaccgtcgctgtcttcctcctcctcatcgtctacaagtgaagtatctactagtaacagttcgacatacaactggtacaccggaatcggcggtattgggatgttagacactgcgtatttgacttacctcaaggtcactggctccgatgcgttttgccctattggtggtggcacttgcggtgatgtcctcaacagcgattatgccgtcggtttcggtgttcctcttccagtgattggatttgtaatgtatggcgagaaccgctctaaggtcaaganttgggaagggaactaccttttggatcagnagngaatggnggttcgggtatttgggncacngctnaatggatntcaagnnaaattccngatncctngcaatc

SEQ ID NO: 133892 - DNA, 544 bp, Arabidopsis thaliana columbia
  unsure (1)..(544): unsure at all n locations
agcgtttggtgcgcatcgatggatggctgcattacaacgtcaatgcgaatgcctcacgattctnatgtcctccactgtttccacttccactaatccatcccctataaactgcaatgggagaaaaagcatgctaaagctagcgaagaggatgactgataattnctgtggaggggtttgtgcttcgtcgttacagaaatggagcaaactcaacgttggcaacgtcgacgaagacgttaggataatnactaggaagagtgtaaacaatcctggcgagccgcctgggataattctaaatgcggcgacgtcagttttngatgcccggtatctccgaggcggttgtttgacttccttggaaacgaacggcttagatcggaatgggatatcttatccaacggtggaccaatgaagaaatggnccatatagctaaggcattgaccgttccaactccgtttccctcctcgtgccagcngntaaattcggtcanagtggtttcctgttttccaggggcannatngccntcagncngtttngttcgcnctttttc

SEQ ID NO: 133893 - DNA, 470 bp, Arabidopsis thaliana columbia
  unsure (1)..(470): unsure at all n locations
ccacagagaaaacttcgtctctnttctctgcttcgccctctcatttcctgtnagataaaggcggagtctctctccagtnattttgctcatccatcgattctnagagttcaaaatggttgatcaagttcagcaccccactattgcgcagaaagctgccgggcagttcatgcgttcaagtgtttccaaggacgttcaagtgggttaccagaggccttctatgtatcaaagacatgcaacctacggaaactactccaatgctgcatttcaatttcctcccacatcccggatgttggnacaactgcttctcccgtgtttgtccaaaccccaggngagaaggggtcactaactttgcccttgactttntgatgggtggtgtttctnctgccgttccaagntnctngntgtcctattaacgggttaagttttatccgacccgggtgggtgttaagntgggaggttttaacctnagt

SEQ ID NO: 133894 - DNA, 503 bp, Arabidopsis thaliana columbia
  unsure (1)..(503): unsure at all n locations
tgtctgaaaaatctagaaacagcagcaatttggtttctctatccgattcgtctctctcacgccctcacgtttctccacctcatcctcaaactaaccacaagacctcttttttagagtaaccaatcacagagagatagagagagagaacagagtcaatgtcaatggcgtctatagcttctncttcttccaccaccctactctcttcctctagggttcttcttccttcaaagtcttctcttttatctcctaccgtctctgtccccagaaccctacactcttcctcggcatcatcctcttctctctgttccgggttctccagtctcggttccctcancancagccgttccgcctnanggcggaacttcgccgtnaaggttcaggctgatgatttaccactggtcggtaataaggggcctgntttaaaggagaggagtttttgatcaagggtcanaaggtgaggttntgggncattggaaaaggatgtatnnttttcnccttggntc

SEQ ID NO: 133895 - DNA, 485 bp, Arabidopsis thaliana columbia
  unsure (1)..(485): unsure at all n locations
agagttagggttttctaatgtgttttactacaaaccaaagtggcttaaagagtgttgatcatagtgggttcatcagatttnttgttaatggtcgacaagaatcgtcaaaggagacgttgacagacgaggaagaagaaggagtttttattttaaggtcaatggataggtttcttgaaaagcaaaatgctgaatccatcagacatacaatgcaagcccaagaagatatttttaagcaacaggtacgagagctacatagagtatataatacacagaaaatgatgatgactcanctcaaacatagaagccactattggnctnttaacaacaaagnccaacccggttcaagagngagnccggangttnttcaggcataggcctcgaaaatttggttagggcacacaaacgcgcgggtcatttcgagggggcgncctganttgcattggcnttgnttgcttttcaactctcnttgcccgcacgncaggctg

SEQ ID NO: 133896 - DNA, 506 bp, Arabidopsis thaliana columbia
  unsure (1)..(506): unsure at all n locations
gctcattagagaacagagaaaaaaaaaacaatggcaactcaagccgccgggatcttcaactccgccataacaaccgccgcaacctccggcgtcaagaaactccactttttctcaacaacccaccgtcccaaatccctctccttcaccaaaaccgcaatccgcgccgagaaaacagattcctccgccgccgctgctgcagcccccgccacgaaagaagctcccgtgggattcacgncaccgcagntagacccaaacacaccgtctccgatcttcgctggaagaccggtggtcttctacgtaaagcgcaagtggaagagttctacggttatcacgtggnacttaccgaagnacagattttttgngattgccgacaggngggngcagcgntncatggggagaaggtcccgatttttttaaggtttgcggggaaangnctttttttnagnttnggggcaaggttttggtccantnaaggncttttccatttttnaggnttttcctacggt

SEQ ID NO: 133897 - DNA, 477 bp, Arabidopsis thaliana columbia
  unsure (1)..(477): unsure at all n locations
catccaagcaaatcaaatacccaactctcacacgttctcaaacaaaaacttcaaagagagagagagagagagttttgtnaactcaagaaaataaaaaaagttatagttaatgggattcggcttagagagtatcaaatcaatctccggcggatggggcgcggcggcggttcctgtnacgcttgtaaatcagttaccgccgccgtgttctgtcgagttgactcagctttcttatgcatagcatgtgacacaagaatccattccttcactcgccacgagcgcgtgtgggnttttnaagtttttgacaagttccggcgccgtnanttgnaagccgcggcgcggtcttttngncagttntnttccgtattcacttttgctaatcctntggtagccgtaaaggacggttncccgtngaaattttttgggttagccgaaccgccgtgcaaaatttagtttttnggcttttggntcctnggtnnc

SEQ ID NO: 133898 - DNA, 479 bp, Arabidopsis thaliana columbia
  unsure (1)..(479): unsure at all n locations
aggagaaaccagttcagaaaatgatcccgcttcagaaattcagttctggcaaaaggaggctgcgattctaaagcgtcantacataacttgcaagaaaaccaccggcaaatgatgggggaggagctctctggactaagtgtagaagctttacagaatttggaaaatcagcttgaattgagccttcgtggcgttcgaatgaaaaaggatcaaatgttaatcgaagaaatacaagtacttaaccgagaggggaatctcgttcaccaagagaatttagacctccacaagaaagtaaacctaatgcaccaacagaacatggacctacatgaaaaggtttcagaggtcgaggggtgtgaaatcgcaacaaggatttctcttctnacaaatggttttgcatgngngttccttgacggacatgtcnttttnagttnnccaccgagctnttcctgggcggtttaaggtttcncntacttttttcctnt

SEQ ID NO: 133899 - DNA, 487 bp, Arabidopsis thaliana columbia
  unsure (1)..(487): unsure at all n locations
caaactgaagaaacgtttctttgtgtctaaatagataattaacagaactgaccttaacttaacttcttctgatgatgacagtggactcgtgaaggaatggctacgcttgcagctctcaacgtcctcgtatgtatttncattccaagaaaactcattcttataagattcaaaatgactaaattctgatcagcctctgaaaatgtttaacagggaagagtcaaagggtacccgatttggcatgacccgaaccgagtcgatccattcttgaacggaaacgnttcaccgcccaatgccagtccaagcatcgtcaactcaaagggccttagggtactncacaacacttncacttatggcctcagattgttttaaaangttaattnatggttgcntttccngttaacaaaatttttaancnttnccgggcccaaaggggcctttggntatnccctttaacaaatttggtcccntttctcctttaaanttnccc

SEQ ID NO: 133900 - DNA, 459 bp, Arabidopsis thaliana columbia
  unsure (1)..(459): unsure at all n locations
atttcttctcccttgtactgttttttgtttttaaccaaagaccaaccgttcacaacaatgatcgcgcgacggatctggcgaanaccaggtttctccgcccattcagctcgtaatctgtttgctctccgccgttccgggtaccgaggtatctttctaagtcgtcttcctctccggcgtcgcgcccattctttgttcaccctcccactttnatgaaatggggtggaggaagtagaagctggttttcgaacgaagccatggccactgattcaaattcagggttaattgatgtgccactagctcaaactggggaaggtattgctgaatgtaagcttctcaagtggtttgtcaaagagggggttctttggaagagtttcagccacnctgtgaagttcaggcggtaaagaactttggggtcaaaagcggtttaaagggaagngntntnattcnnatttnccggta

SEQ ID NO: 133901 - DNA, 518 bp, Arabidopsis thaliana columbia
  unsure (1)..(518): unsure at all n locations
gagaagctggtctgattataagaatagataacgaaagtttcacagcttcagaattgtagtagcggaattgttgaagctagtggctggttactatgttgatcctccatgtgtgttgttgttatgcatttttgtggcaggttatggaatttnaagtaaagagtcttcttgatactgttaactcgattcatgaagagatgtattatcttagagataggtactttcctttctctattgtttggtattatgaagatattgtttatatgacttgattgtggtgtggtctcagggaagaagagatgcaagacttgaaccggtccactancacaaaaatggcgtggttgagtgtnctctcgtttttccgcctgcataggagttncagggtncagtttttncncttgaagncgttttcnngaagaagaggttacctnaacncctcctncggggttggtaccnccttccngtttcttagcccacaacaactnccnncttttgggggtnccataggcaatgcatgccnt

SEQ ID NO: 133902 - DNA, 530 bp, Arabidopsis thaliana columbia
  unsure (1)..(530): unsure at all n locations
cgccctttcttcttcttctctccttctttgaattttgattttggttgaatggagatatcagagagagttcgagctcgattagctgttctctcaggtcatttatcggaaggaaaacaggattctccagcgatcgagcgatggtgcacgtcggcggatacgagtgtcgcaccgcttggntctttgaagggaacactgacgatcgtcgacgaacgcaccggaaaaaattataaagttccggtctcagatgatggtaccgttaaagccgttgatttcaaaaagatagtgacggggaaggaagacaaggggcttaagttatacgatccaggttacttgaacacggctcctgttcgatcttcgatttcttacatcgatggggatgaaggggtccttcgttaccgtggtacccaattgaggaaatgctnagacagacttttcttggaggtggntatcttctcatggntngnatttcccctgaagcaantatnttnttggnggttcagtntaagatcaantttcccaaggntntagna

SEQ ID NO: 133903 - DNA, 485 bp, Arabidopsis thaliana columbia
  unsure (1)..(485): unsure at all n locations
atcaaggatccagtacgtccgggtgttagggaagccgttcagacttgtcaagctgccggaatcaccgtccgtatggtcactggagataacataagcacagccaaagcaattgctaaggaatgtggcatatataccgaagaggcttagctatagaaggttcagaattccgggacttgtctcctcacgaaatgagggccattatccccaaaattcaggtaatggctcggtctctgccattggacaaacatactttagtcagcaacttgaggnaaattggagaggtagttgcngtnacaggggatgggacaaacgatgcccctgcgttgcatgnggcagacattgggctngcaatgggnatagcttgaccgaggtttcgaagagattctgtgtgatcatatggcggtncttcaaacantgtaatntgcttgttgggcgtctnttntttaacntccgngtttcntnccctactgtattgggncnntntg

SEQ ID NO: 133904 - DNA, 497 bp, Arabidopsis thaliana columbia
  unsure (1)..(497): unsure at all n locations
gatgatgactcgagaatttcgtgcaggagaagaggaaccaagtgaactagaaatgttgtgtatcgaagccaagagattaaccactgaacaagacgttttgtctcccaagtcagatggagaaggagagacagagtttcagtttgatatagactacaatgagctagactcggtttatggctctgagacagaaaccgatgagttcttcgccaagaacccattttcaaacggacgttcttcacttggagagctcaaagagagcattgctgaagaagaagaagatgacgaagaggaggcaaaacttactctatctctctcaaagctttccacatcaatgaaggacaatctaagcaacaccatgggntccgggtacctgaaactccgaaagncaaccaaccggcaagcattngtagtacaaggngcgacgtcagtnccgctttgngtaacttttaagttgccgcatgnagagtgntggtttttttgngggttcagngtctttt

SEQ ID NO: 133905 - DNA, 517 bp, Arabidopsis thaliana columbia
  unsure (1)..(517): unsure at all n locations
ggaaggaaaggttgaggaggtcgatgaggagaaagagaaggaggagaagaaaaagaagaagattaaggaggtttctcatgagtgggatttggtgaacaagcagaaaccgatttggatgaggaagccagaggagatcaacaaggaggagtacgctgctttctacaagagtttgagcaatgactgggaagagcatttggctgtgaagcatttctcagttgaaggacagcttgagttcaaagctatcctctttnttcccaagagagctcctttcgatctctttgacactaagaagaagcccaacaacatcaagctctatgtccgtcgtgtcttcatcatggacaactgtgaagncatcattcctgagtaccttgggttttttaagggattnttgactctaaagtcttccnctcacaantngggngaacatttnagcaggccaagtncncaagggnatccgaaganccttttaagaggccttngcnttttttngttctngacangggctcacaanttcggt

SEQ ID NO: 133906 - DNA, 536 bp, Arabidopsis thaliana columbia
  unsure (1)..(536): unsure at all n locations
taaaggaagaagaagaagaagaagaagaagaaaggattcgtcttccttcttccacaccctttctgacacctcatctcccctcccaccttctccgtcccgttccgtttctccatcagatcctcgattccnatccaacagttcgaattcagtttccgattctaatctgatcgaaccaatactcactgagatttgatcggcgattatggagtctatatctccggtatcgaatcagcttcttcagccgacgacgacgagctctaattccgatcgctctcgtcgtaagcgtaagaagnaatcatcgccatcatcggttgagaaatctccatctccgtcaatatcgttggngaaatggngatcggtgangcagcaacagatctnctcaacgagctagttcatgctttaagagagtacgnatcagccaacaaccatcttnatcatcatcttnttggttccncgtggggtnggncgnnggtaagngccgtagngtttagagttcgggggggtaaacgtntgggtggngtctttaaagtgnaata

SEQ ID NO: 133907 - DNA, 404 bp, Arabidopsis thaliana columbia
  unsure (1)..(404): unsure at all n locations
caatcatcgggccggacaatttaaagggcacgaaacacgtccttcaagatgctaagaccattcctnttccngtcgatggaccagagagcctagagttcgatccacaaggtgaagncccttacgttggcgtcaccgacggtcgcattctcaaatggcgcggtgaagaactcggctgggtcgatttcgcctacacttctcctcacagagataactgttcgantcatgaggtagtaccaagttgtgggagaccattggnacttagcttcganaggaaaacaggngatttntacatatgtaatggttactttggggtcatgaaggtcggccanagggaggcctngccgngttagttttttnatgangccgaagtcggtaaagttntgttttnccaccaaggggtnttg

SEQ ID NO: 133908 - DNA, 404 bp, Arabidopsis thaliana columbia
  unsure (1)..(404): unsure at all n locations
gttatatcttctcggttacttattcattttcaaaaaatggactccggagactcgtcctttagcttccagctgtttaatctccctcctccacggcgtctccgccgtcgtcctcgccacgaacgccttactctccgatcctaaccgtggattctcctccgtnaacacccaatctcaaaactcaattctcgatttcagctccgnttatttcctcggtgatctcggtccaacttgccgtgtttncttnttccggcggcggagactcggtttttggcggttantaactnggcggtgnttttcggttttcctaacctgccgtaanatggttgcttaaagggggcttnggtttngtttggnnttctaagttggtcggggaggccaangngcgggggtttaaaaaaagnngg

SEQ ID NO: 133909 - DNA, 425 bp, Arabidopsis thaliana columbia
  unsure (1)..(425): unsure at all n locations
agaagaagaagaacagatcaaatacgaggagagatctctaaagagatttatcgtttcaaatttnttcacgttgagaagtttaatttagattaaacaacaaaaagatgggttactggaattccaaggttgtnccaaaattcaagaagttattcgagaaaaatagtgctaagaaggctgctgctgctgaagctaccaagacctttgatgaatctaaggaaacaatcaacaaggaaattgaggagaaaaagccagacnccaaccaaaggtcgtggaacctatgaaggcacggctgcagnaggtcaaggctttngtgagagnccctaaggtggctggtttgaaggaaaactcancggctntccagaagtncctcggggggnttggccaaattgntttccccggttcaaaaanngggtnnttnaggnttt

SEQ ID NO: 133910 - DNA, 542 bp, Arabidopsis thaliana columbia
  unsure (1)..(542): unsure at all n locations
agaaccttacaacagtgttctctcaacgcattcccttcttgaacatacggatgtagctgtcctcttggataacgaagccatctatgacatttgccgcagatccctagatatcgagaggccaacctacacaaacttgaacaggttgatatcacagatcatttcatccttgacaacatctttnaggtttgatggtgccatcaacgtggatatcactgagttccagaccaatcttgtcccatatccccgtatccatttcatgctgtcatcttatgcaccagtcatctcagccgccaaggtttaccacgagcagctatcagtccctgagatcaccaatgccgtttttnagccagctagcatgatggcaaagtgtgacccgagacacggnaagtacatggcctgttgtttatgtaccgaggggtgttgttccaaaggtgtaatgntgctgttggaccatcaaggcaagnggcttttcagttntgnctggnncactgggtnaatntgggtaactccacctcaaagtttccggggncccgnagtanggc

SEQ ID NO: 133911 - DNA, 540 bp, Arabidopsis thaliana columbia
  unsure (1)..(540): unsure at all n locations
tcgaatttgaaagactattgtnagcttcggggaagtctcgagtacacaaaaggaagaagctaagaaccaatgtgtttctttattttnatggaatgagttctcactaatgggaaacttagatgaggcaaatctacctcataagcgaaagacagacatctgcacaataatgtacacaagcgggacgactggagaacccaaaggtgtaatcttaaacaacgcagcaatttcggtccaggttttatccatagacaaaatgcttgaagtcactgatcgatcgtntgacacgagcgatgtgttcttctcgtacttgccattagcacattgctatgatcaagtcatggagatttactttttatctagaggctcctctgttgggtacttgcgtggggcattcggtacctnntgggtgatgtcaagctcttaaacctcctgtgtttttcggngtcccgggntncggcaaccntntncggntattcaaaaantcaccagtgnttntcggagaacnnttgtttnctttacccaattggnattngaaggttc

SEQ ID NO: 133912 - DNA, 357 bp, Arabidopsis thaliana columbia
  unsure (1)..(357): unsure at all n locations
ctttttccaaaacacaatcccatctgttgaggttgccaagacattgcctcctcctggcacttatctttcgaaaatggaccaagctgctcgagctgcaatagctgcacagggtggtccaaatcaagcaaataatactcctctgcctgatattggtcttcccgatggtggtgttcctcaacagtatcctcaacaaccaagtcaacaacctggtgcgccattttcagactgttggacttcctgacggggggtgttcgtcaacagtatcctggtcagaaccaggtgcntnttaaggtncccgnttntacaanaggctttttgntncttagggntctttggnggtcccaatnaccggngnnt

SEQ ID NO: 133913 - DNA, 537 bp, Arabidopsis thaliana columbia
  unsure (1)..(537): unsure at all n locations
ctttctctctctctttttctccgcggaaggaatctcttcttctggttgcgtttgagtccgtacgaaaacaaaagaaaagagagagatggcggaagagaagaaagctccaatcagtgtctggactaccgtgaagcccttcgtcaatggcggtgcctctggtatgctcgctacttgcgttatccagccgatcgacatgattaaggtgaggattcaacttggtcagggatctgcagccagtataaccaccaacatgcttaagaatgagggcgttggtgccttctacaagggattatctgctgggttgctgaggcaagcaacttacacggcagcccgtcttggatcattcaagttgctgacttcaaaggcaattgagtctaatgatggaaagctctaccgctgnatcanaagganctatgtggtctnacaactngtntattggtcttnnncggtagncagccgntctngactntnagatnaggccgtaanatttnccgnagttagnaggattttccaatgtttcatgggtncccgnttggg

SEQ ID NO: 133914 - DNA, 409 bp, Arabidopsis thaliana columbia
  unsure (1)..(409): unsure at all n locations
cttcactctctctaatcaaaaagcttttaacctcagccgttaaatctttctccgatcatgccgaccagaaacatcgccattggtggagtccaagaagaggtctatcaccccaacgcacttagggcggcgctcgctgagtttatctcgactttaatcttcgtcttcgccggctcaggctccggaaattgctttcaacaagatcactgacaatggngcaaccactcctttccggcctcgtcggcgnttgccttagttantgctttttggggctctttgtcgntgtntctgttggcggtaacaatttncgggtgggccacggtaaanccctgnccgttaacctttcggggtcttnactcggtggggaaaanttanttttccnccgggggggatnttcnaacttggntttgnt

SEQ ID NO: 133915 - DNA, 551 bp, Arabidopsis thaliana columbia
  unsure (1)..(551): unsure at all n locations
caagaagaacacacgaataagaagaaaaagaagaagaagaagaagaagagaagcttatggcaggaggaggaacagaagcgtttcctgatcttggagagcattgccaagaccctgattgcaaattactcgattttntcccttttacttgcgacggctgcaaattggtgttttgtttggagcatagatcatacaagtcacataactgtccgaaatccgatcatgggagcagaacggtttccatctgtgaacatgttcaatagcgattgaaacaactggttttgatgaaaaaggatcaaatctttgcttgagaaacacggaagatccggagattgtgatcccaacaaggaaaaggaaccaacgtgtcctgtaaaacggtgcaaaggnttctgactttttgcgnataaccttcttgcaaatatttttggggcaagttcttgtttgaacaccggnttccgcagnccatgctttaacaagngggccnttattccccgggccaagctcgnggtggccgngggtttttggagnttttggttnagancccaagggtttgt

SEQ ID NO: 133916 - DNA, 512 bp, Arabidopsis thaliana columbia
  unsure (1)..(512): unsure at all n locations
gctcatccccgtgaaataatgacggaagtcctgaaagccctgcaagatttgaatgtatgttggaagaagatagggcactacaacatgaagtgcagatgggttcctaacagcagcgcagatggtatgctcagtaactcgatgcacgataacagctactttggagacgagtccagcataatagagaacgaagcagctgttaagtcgcccaatgttgtcaagtttgaaattcagttgtataaaactcgggacggcaagtatctacctggntttgcagagagtacaaggtcctcaagttcttgttcttggntctgtgtgctngctttntttgctcantccgagtcctctgaatactaaacccggcccttttcaagaataatccccccttattcctttttttttttttcaaaatcggntnaggantttttttgnaaccggaccctttcttttttnccctttntncnaattcnaaaanggggctttccnaaanaccntttaaactnaatnaaggcttg

SEQ ID NO: 133917 - DNA, 482 bp, Arabidopsis thaliana columbia
  unsure (1)..(482): unsure at all n locations
aagaacatgtaattccacaagatgacaaaggaaagaaaataatcgagtacaaatctgaaaccgaagaagatgacgatgacgatgaggatgaggatgaagaatacatgagagctcagctagaagcagcagaggaagaggaaagacgggtagctcaagctcaaatcgaggaagaagagaaaaggagagctgaagctcaactagaagaaacagagaaactgcttgcaaaagctcgattagaagaggaagaaatgaggcgttctaaagcccaactggaggaagatgagctacttgncaaggcccttcaagaaagtatgaatgtgggntctcctccnncgatattgntccngggaatnttctttanccatatcccttcctnaattcttttggtcncaagggtatttttcggtttccnaactttggtttgggccttngnaggtttttgngtttccntgggtgncgtttgcancccnatttttnttttt

SEQ ID NO: 133918 - DNA, 438 bp, Arabidopsis thaliana columbia
  unsure (1)..(438): unsure at all n locations
gtttattcttctctgctgtatcaatcaaatcaacggagtttgagtttctttnccgattccggcgatggggtcagtccccgatccaggcgagttaactgagttagctcagccgagtttcgaggagtttcagaaacagacgtcgttgatgactagctgtactcttctatggcaagagctctccgatcacttcacttctctagagcagaatctgatgaagaaatctgaagcgttgaagcagatgattgaaactctagataaccagactcagacctcgntcgagtctctgaagcgtagagaggtaacaatcgaccataggcgttgagatccgtagctggggaaagtaggtgaacgagcttaggcttgcnnttnaatccttngggaaaantttnagatangttttgggggannggnncnaaaaaannantccccgggtttttt

SEQ ID NO: 133919 - DNA, 522 bp, Arabidopsis thaliana columbia
  unsure (1)..(522): unsure at all n locations
ctctcactgtaatcccttagatcttcttttcaaatttcaatggcgtccggtgatgttgagtatcggtgcttcgttggaggtctagcatgggccactgatgacagagctcttgagactgccttcgctcaatacggcgacgttattgattccaaggtctgttacacgccgagatcggactccgagtgatatcgatgatctcatcctcgacggatctgttccgatcttgtgtttctctgttacttgattcgattactctgttactattctcgttctttgttactactactactactactgtaacttgtatttnccccaaatcggtacgntcatcttccctggcttctggtgagccccggagatcgnttcgggatttttttgnattttggnatatttgtggtaggnccaaaatagcttttnttcaaggtttngttgggatntnttttcctgancnggggtttngaattantttgggaaacaaggccattaacgggncggagnncttgnangncaaaggggggttgg

SEQ ID NO: 133920 - DNA, 614 bp, Arabidopsis thaliana columbia
  unsure (1)..(614): unsure at all n locations
cgaggctgnatatcagagatcatttctcgattcgaacgcaagggattcaagctagttggtatcaaagtcattgttccttctaaagatttcgcacaaaagcattaccatgatcttaaggaaagacctttcttcaatggtttgtgtgacttccttagctctggtcctgttattgccatggtctgggaaggagatggtgtgatcagatacggacgtaaactgattggagccactgatcctcagaaatctgagcctggaacaatccgaggagatcttgcagttactgttggcaggaacataatccatggaagtgatggaccagagactgcaaaggatgagatcagtctgtggtttaagnctcaagaacttgtttcttacactagtaacctctgagaagtggctctatgggtgnaacttaaatccctnttncctcttgnctttttgnaatcaaatcacattgggtttcctttccttttcttacccnttcaattaaaaccaggaccagttgtancgggttcaaanccattccggggtttngtttnccccggggacctagnaccagggngttnnannaaggttggggtncttggttttaacntnatgccaattaaaanttc

SEQ ID NO: 133921 - DNA, 459 bp, Arabidopsis thaliana columbia
  unsure (1)..(459): unsure at all n locations
gattaatgctcacactgtcaaagatgatgttgatgataaagaacaagatgccaaaagacaaagtatgctagatgcaattgaacgtgagtttgaagccgttaccgagagttttaaacaacttgaagatatcgccgataacaaagctgaaggagacgacgaatctncaaagaggcaaagtatgttggatgagattgancgtgaatttgaagctgctacaaatagtcttaagcaactaaaccttgacgatttcagtgaaggagatgacagtncagaatttgcaaggagaaatagtatgcttnaaggctatcgaacgcgantttgaagctgctacaaaanggtcttgaagngcttaaagggctaatggtttcanccgggcgnccaaggggttgttgttnancncgtttncaagggggaaaattttttnctttnnggctttttgncccgggttttttaagnccg

SEQ ID NO: 133922 - DNA, 500 bp, Arabidopsis thaliana columbia
  unsure (1)..(500): unsure at all n locations
caccggagaaaaaataaatctcaccgacgacgaattcgatcatggaggtgttatctacttcctcacctctaacgcttcactcccaccgactcctctctgcttctncttcttcttcacatgtnacctccatcgccgcttcttcactttcttcattcgcttcttcatatctcggaatctccctttctaaccgcacgatccaccgcttctccacaactccgacgaacttaagacgatttcctcaaagaaaacggaagaaattcactccgatttcagcggttttcgaacggttcaccgaacgagcgatcagagctataatcttctctcagaaaggaagctaaatcngttgggnaaaggatattggtttancacggaggcatcnttctcttagggttttnttccgcttgnggatcggnnatccctaaagggtttccttngatcccgggtttcaccnntnggaaaaggnttcgtaaaagttntttnggggnttttgggccggngnt

SEQ ID NO: 133923 - DNA, 586 bp, Arabidopsis thaliana columbia
  unsure (1)..(586): unsure at all n locations
agtgccgttccatggagtatgatggctttcacaggatacattgctggtttttggtcggatttgttgatacggcgtggtacaagcatcaccttaacgcgaaaaatcatgcagtccattggtttcattggtcctggaattgctctcattggtctaacgacggcaaaacaacctttagtggcatcagcctggcttagtttagccgttgggcttaaatcattcagccatttggggtttcttattaatcttcaggaaattgctcccgaatattccggtgttctacatggaatgtgtcttactgctgggacattagctgcgatagttggcacagttggagctggtttctttgtaggactattgggctccttccaggggttcatcccttnttncagcaaataattggatctccctttctgctctcttttncaaacatatacgnaactggggaaagggtagnttttnccacaacagcagntttaaggtgcccncaaaggcacttaataggggggccancttgaaaannggtccaaccncttnnagnncannttttcnttccaggaaacccgggcaagccnnggttttananaac

SEQ ID NO: 133924 - DNA, 508 bp, Arabidopsis thaliana columbia
  unsure (1)..(508): unsure at all n locations
gaacgtntcttgagatggaggattcagtttcttgaaaagagtatcaggaatcttgattttntagctggtggtgtttccacgatatgtcaagtaaatnatcttaagaattctccaggacctggtaagactgagcttaggttagctactaagcaagctcttcatcttcttcaagacaattaccctgagtttgtctctaaacagatattcatcaatgttccatggtggtaccttgcgttctatagaattattagtccttttatgtcacaaaggtcaaagagcaaactagttttcgcaggtccttcaagatctgcagaaacccttctcaagtacatatcacccggacatgtcccggttcagtatggtggnctaagtgtggtaattncgngtgtactcgggatttcacacagggtggntcggttccgnggttcctnttaaccactcntanaaaccggcggggttnttntttcggggatnnncaacctntgggggnagggnantgggtgggggt

SEQ ID NO: 133925 - DNA, 497 bp, Arabidopsis thaliana columbia
  unsure (1)..(497): unsure at all n locations
ataacttgtaatcaaccaaagtcgaaaaacagagttattttgtcggatcaaaatggtgaagattgagataggaagtgtgggtgactcctttagtgtagcatctcttaaggcttacttgtctgaatttatcgcaactcttctctttgtgtttgctggcgttggctctgctcttgcttttgccaagctcacatccgatgcagccttggaccccgctggtcttgtcgctgtcgctgtggctcacgcctttgcccttttcgttggtgtttccatagccgccaacatctncggcggacaccttaaccccgccgtgacactcggtcttgncgtcggtggcaacatcacagtaaataaccggtttctttttactgggttgctcaatgccttggtccancgtcgngngtntcctcctngtcttcgtaccaatgggggagggnaccgntcatgggtnggggccggttagggnttttnagggtagtntgggnnttgggncnttnntt

SEQ ID NO: 133926 - DNA, 502 bp, Arabidopsis thaliana columbia
  unsure (1)..(502): unsure at all n locations
taaagatggaatagtgaaagntacaatgatgcgaaaaaagagtggggatacggaaaattgattcctcttacaacattccttgacacgaacgaaggttatcttgagcaggacattgcttcttttggtgctgagatcttcagcggcacagcggtccaagtacaagagaaagtcacattcatatccaaccctccaaacaatgttttcacttggaagatacttcatttctctaacttggaagataaattctattactctgatgattttnttgttgaagaccgatattggagattaggatttaacccaaaaggtactggtgatggaagntcacaagcgatcccaatcttcctatatgctcaaggccataagccaaacgnagttgctacaaacacttggggagcggttaatctgcggttaaaggatcaacgngntccaccacggacaaatatatcttcagttngnccctctngaggggttatggttngggtaccttnattngtgnagt

SEQ ID NO: 133927 - DNA, 557 bp, Arabidopsis thaliana columbia
  unsure (1)..(557): unsure at all n locations
ctctcactagccgatgtagatccaatgctcatgatggaagatgagagcctcgtgtgggcgagcagtgatgttgtcattgtncttcagcatctaaatgagaaaatacctttnagttatgtttctgaaacagagagacagcatgctgtcccatcacaggtacagcgacatgtacttgcaggtatagcttctnctttaggcggtgtaagtncaccatatgaaaagacctcacacgcgcatgaaagacctatcaccaattggctttgggcagccggttgtcacccgtttggaccattctcaaacgtctccctgatcagtcaaatgcttcaagatgttgcactgnggatactatttatgctcngggttgattctgctttcggnaaatcccgtgaacatcaggggagttcaaactttgatccgnatncttanggttccanttgggggccattaangttaaagggcaaacccaaaggggttttgggcgggnggttttaaaaaggcaacaaaatttnctnggtttcccaaagggtttntnaagtttgggattttgcnttggggta

SEQ ID NO: 133928 - DNA, 378 bp, Arabidopsis thaliana columbia
  unsure (1)..(378): unsure at all n locations
ccttctncttcttcttcttcttcatcctcctcactgtttaacgcagagcgcctccgtttctnctcttctcctcctctctcttttctntctacacaaatattttncccttcttttttnattctctttattcaatataatccttttaattcgctggtgatcggtacgagaaacttagaatcacacgaggaagctgtgtttngttnatccncgtttaatcggaatcgaaattngtcctggagaagaaatttaacgaatcatagattcctgatacaaaaaaaaaactatcacagatcggaatcggaaacgtaaccattacataattngaatctggntntnacttgggtataatgatgaggtatcagagngtaagcccngttg

SEQ ID NO: 133929 - DNA, 413 bp, Arabidopsis thaliana columbia
  unsure (1)..(413): unsure at all n locations
caacaacaaatcttaaacgttttactttgtgctgcacnactcaacctcaatggccgcctcaacaatggctctctcctcccctgccttcgccggtaaggcgtcaagctttcccccgcggcatctgaagtccttggaagcggccgtgtgacaatnaggaagactgttgccaagccaaagggcccatcaggcagcccatggtacggntctnaccgtgtcaagtacttgggtccattctctggcgaatcaccgagctaccttaccggagagttccccggagactacgggatgggacaaccgccgnanttttaantnnccccgangacaattggaaaggaaccgtgaattngaagttntccacagaaggnggggcattttttggggccttnggtgggntttccccanggttttttggt

SEQ ID NO: 133930 - DNA, 402 bp, Arabidopsis thaliana columbia
  unsure (1)..(402): unsure at all n locations
cactactctnactgtaatcccttagatcttcttttcaaatttnaatggcgtccggtgatgttgagtatcggtgcttcgttggaggtctagcatgggccactgatgacagagctcttnanactgccttcgctcaatacggcgacgttattgattccaagatcattaacgatcgtaagactggaagatcaaggggattcggattcgtcaccttcaaggatgagaaagccatgaaggatgcgattnagggaatnancggacaagatctcgatggccgtagcatcactgttaacgaggctcagtcacgaggaagcggtngcggcggaggcaccgtgggagntngtggcggtggatacncagcggcgttggtngaggtactccggtnggnggtgttnctccgnggtt

SEQ ID NO: 133931 - DNA, 277 bp, Arabidopsis thaliana columbia
  unsure (1)..(277): unsure at all n locations
atttaaaggtttatcttgtttatacatttggtgtttatatgtttggaatctcgtnatgatgtctttaattgtaacaatttcntggtttattnctcctttaagtggctcttnctncatcnccttgcttacaagcaaatctctcacagcttgactcgaatgtgtcgtcgttaacagagaacatcagccactgancaatatcnctccatngtttttaatctatatnatanctgtggtgtagcttcttaatggaaaccggtgaaggcatcacgggccatta

SEQ ID NO: 133932 - DNA, 339 bp, Arabidopsis thaliana columbia
  unsure (1)..(339): unsure at all n locations
cagcagcaaagagtacgantttacattgttgctggggtgacagaagatacagtttttncaccacttacaaagaaggaaatcagtgaaatcacatggcatcggcttgatcatcttcagccancaagtaatgaggtgataactcatggagtttctggtctcaaattgtacatggtggcacctttcctttcgtcattgaagtcgtggatattaaagcatccttcanctgtagcacggagncctaacaagccccttaaagcactctgcgtgtggaatgcaaggnctagtgtttnagggaacggggncagcancagtggaaagccaaaatngnaaagtctnncc

SEQ ID NO: 133933 - DNA, 546 bp, Arabidopsis thaliana columbia
  unsure (1)..(546): unsure at all n locations
aaaacaaaacactctcctgtgacttctcttctcttcttctctctcgatctcttccccaaaaatcttcagatctctacatcaccggagagacgagaaacactcaccgtgagaaaaccatgattccttacgctacagtcgaagaagcttcaatcgcactgggacgaaacctcacacgtctcgaaactctatggttcgattactccgccacgaagtccgattactatctctactgtcacaacattttgttcttgttcctcgtcttctctctcgttcctctccctctcgttttcgtcgaattggctcgatctgcttctggtttgtttaatcggtataagatccagcctaaggttaattactctttatctgatatgttcaaaatgttacaaagncggnaatganggatgtttatccccggcgttggnccattgnaactnggttcttatccttcgnttcagatgnttganntacggtctgggtnccatttccaacaattcagggntngtgnacaggtagaggcncttcttgaaggggntcnctacnctngnc

SEQ ID NO: 133934 - DNA, 450 bp, Arabidopsis thaliana columbia
  unsure (1)..(450): unsure at all n locations
tggnatcttgtttcgcttacggttcaggtgttccttcgaagccgacgaagctttacagaggtgtgaggcaacgtcactggggaaaatgggtggctgagatccgtttgccgagaaatcggactcgtctctggcttgggacttttgacacggcggaggaagctgcgttggcctatgataaggcggcgtacaagctgcgcggcgatttcgcccggcttaacttccctaacctacgtcataacggatctcacatcggaggcgatttcggtgaatataaacctcttcactcctcagtcgacgctaagcttnaagctatttgtaaaagcatggcggagcttcaggaaccagggcaaaatcggcgggaatnatngnaggaangttanaaanaagggttttttttcccnaannttttttcgggnaaaatttnaagncgggggnaaattnntttttncc

SEQ ID NO: 133935 - DNA, 556 bp, Arabidopsis thaliana columbia
  unsure (1)..(556): unsure at all n locations
gnaatataatccggttcaaggaggtggtgttgactccaacccatcttgccattgccatggaatatgctgctggtggtgaactattcgagcgtatatgcagtgctggaagatttagtgaggatgaggcgagatatttcttccagcagcttatatcaggtgttagctattgccatgctatgcaaatatgccatagagatctgaagctcgagaatacgctcttggatggaagtcctgctccacgtctgaaaatctgtgattttggttattccaagtcctctctgctgcactctaggcccaaatcaacagttggaactccagcatatattgcacctgaggtcctttctcgaagngaatatgatggcaaagatggctgatgtatggcttgtggtgtgactcttttatgtcantctggttggngcanacccattttgagnccaggagnccccaagaacttcaggnaaccattcaaaaaataatggntgccagncaagancccggcttaggccantnttnaaggttgaaaaacncctccccgaaatttgngcaatcncctntc

SEQ ID NO: 133936 - DNA, 353 bp, Arabidopsis thaliana columbia
  unsure (1)..(353): unsure at all n locations
aaaggaggtttcatggccaagggtaaagatgttcgagtaacaattattttggaatgtaccagttgtgttcgaaatgatattaagaaagaagccgcgggaatttccagatatattactcaaaagaatcggcataacacccctagtcgattggaattgagaaaattctgtccctattgttataaacatacaattcacggggaaatcaagaaatagatcaaattgagtgcttgtatgtcaactttnattttaaggacagggataatgctagtatcctatatatttgttgccatntatntangtgttggcccagtaanttcnnttnggaggggantcntantncccggttnttcnaa

SEQ ID NO: 133937 - DNA, 342 bp, Arabidopsis thaliana columbia
  unsure (1)..(342): unsure at all n locations
cttatngcctattcgcgcacaatcttctagacccggntctgaataccattactcggatactagatgtatccngggtcgggcgacacacccgaactcttctntntnattacttcttggagacggcaaacgctttctngctttgcacgcaattactaaaaaacattcatcatcttcgttctaaatacgagtctttgaaaccaaaatttcattcggaaaatcataattnattggctttaatagaccaattcanggngatatcaaaatggttcgncccgtttatntcgtcggggtctagggtccagctaatcagatccgggcggtttatacttgctaaaacgggnt

SEQ ID NO: 133938 - DNA, 482 bp, Arabidopsis thaliana columbia
  unsure (1)..(482): unsure at all n locations
catttaaacaaaaatgtgaacggggctgttgagacctgcatggagaccttccaccgctaccacaagtacttgaactattctcatcctctcatacgctcccactttgatccagatgcgtgtgggtgggcgtttggaatgaacgtntttgatttagttgagtggaggaagagaaatgtgaccggcatataccactactggcaagaaaaaaacgtggaccggaccttatggaaactgggaacactacctccaggacttctgacattttacgggttaacagaggcactagaggcgtcctggcatatcctgggattggnatacacggatttggatgctcgtntgatagagaaaaggagctgttcttcacttnaatngggacttaaaagccattggttnaaagttcgggnttagngagngacaaaccttttttgggntgaaaacggtgntnannntttcccnttttttgaacattgnattttnnattg

SEQ ID NO: 133939 - DNA, 564 bp, Arabidopsis thaliana columbia
  unsure (1)..(564): unsure at all n locations
cttctttctatctctctcgcgtacgccgcaccgtagcgaccaattgantccacgaggaaatctcagtaaatactatggcgaccaacgaacccgagcacgagnacagagacgaggaagaggccggagctaacgaggatgaggacaccggagctcaggtcgctccgntcgtnaggcttgaggaggttgccgtcactaccggcgaggaagacgaagatgccgtccttnatctgaaatcgaagctttatcgattcgataaggatgcgaatcagtggaaggagagaggagctggtactgtnaagttcttaaagcataagaacactgggaagattcgtctcgttatgaggcaatctaaaactttgaagatctgtgctaatcacttcgttaaatcgggatgaggttttcagggacacgtttggaatgaaagtcatgtgtntggcacgntcgtaactttcctgattggtgacctcaaggntangttttttgntccgntttnntcttttngggattcaaaacatttttnaaaagtttanggaagttccttngcnttangangggaagangggg

SEQ ID NO: 133940 - DNA, 541 bp, Arabidopsis thaliana columbia
  unsure (1)..(541): unsure at all n locations
catctttnaatctctcttgattccaatccattcttcttcaagtgccgggttctcgggtcggntcttctaagtctagctagggataatggctactgtnactactcatgcctcggcctcgattttccgaccttgtacttcaaagccaagattcctcaccggttcttccggtaggttgaaccgcgacttgtcgtttacatcgatcggttcatcggccaaaacgtcgtcgttcaaggttgaagctaagaaaggagaatggttgcccggtttggcatcgctgattatctcaccggcagtnttgccggtgacaatgggtttnacccgttgggtctagcagaggatncagagacttgaaatggtcgtccagggaganttgtcaacggncgntggggtattnncggtgtcgttgggtgttttttccggaagtttnacccaggtcgggattaataaaagtccctagtggtncggttcttggaaaaggaagtttttcaatngggggggcattttncggngcngggttaaattgntnaatcgggnagganaa

SEQ ID NO: 133941 - DNA, 250 bp, Arabidopsis thaliana columbia
  unsure (1)..(250): unsure at all n locations
agaatgaagaagaagctccagcntctaaagagtacggatttnntaactntggccaaatcatcctccaattgtcctatccggnatggtggtcgacggcggctctagggcgaaggaaaaaaaaaattccaaaanttaattccaaaaagactcttgagagtnttgattccccatttnccatcttcactgtatttnatgaggatttttttncccttttaagtttttttttttacttgttgcagaggcattttta

SEQ ID NO: 133942 - DNA, 483 bp, Arabidopsis thaliana columbia
  unsure (1)..(483): unsure at all n locations
ccttaatccatggcagtacgatctcnctccctccctctctttttgtctccatcttgttcaatctatgaatcttgatatntcctgtttcttctgtttctagtttcacatcttttgattttgatgtttctgtggtttcttatttttggtggaattgttaaagtttgattcttttcttttggttgtncgcctggatttgcttcgagattgatcatntcnctcgtttttnctttgtggncctttattcttttggatttattcgtatgtgaaatattttgacttggttttttgcttgtaaggaaatggagcttccttgtccttgatcttaacaaaaggtttaananggttttggaaaaattttcaagtaacgggttgggaaaaaanccaaaacttttaaggttncaaaaattttggggggtnnaaaaaagggtnggggttaaaaacnttcaaaanggggccnggcccntaaaagnggggtaatccaaa

SEQ ID NO: 133943 - DNA, 527 bp, Arabidopsis thaliana columbia
  unsure (1)..(527): unsure at all n locations
tanggncgagctcactcagtgagctccaanncngncgntngcgtggtgtgcaggtcaaagatggcngtccttgttggattcaaatgatggaccgatcaaccccaaccttctcatatcaagcttggaggcgagatcctgagaatgggcctccccagtaccgtagcagaactgtgtttgaggatgccactcccgagatggtcagggacttcttttgggatgatgagttccgttccaagtgggatgatatgcttttgtattcttctactctcgagcgttgcgaggacacgggcactatggttgtgcaatgggtccgaaagttccccttcttttgtagcgacagagagtatattataggccgtcgtatatgggatgctggccgagtctttttaactgcattaactaaagggggtncaatacccatcttgtanccaagacaaaacaagccaaggggantcgacttntactattnaaactggntcatccgggcaatttaatcgaaanaagnnattggtnaaatgnancatttg

SEQ ID NO: 133944 - DNA, 500 bp, Arabidopsis thaliana columbia
  unsure (1)..(500): unsure at all n locations
agactctgaaatgtgcgttatctcttcttgctttgacaaggatatggaaaaatgaaggtgttactgacgacaacaggttaagcacaacatttgatgaagttaaagtctttccaattcccgcagcattgtatctttttaagaatttgttacaggtggggtgtcctgagtttgtnattttttnctgtggctttggtcgattttccttaacttatgtttttcatgttaatatgtctctaactacttgtngtgtcaccttttacgtggcagtattatattttggcatatgtagacgncccaggctatcagatattgaaggacttgaacatcataagnacccggtgtctttgtacaggaattatcctganggggaagtagggtttttttaaatcatncccaatngggtttaaccagttcccattggataggttnttntgggaanccaccagtnggntggtccgttnccctcaatncttgcangggnacctgctttnntacaatnt

SEQ ID NO: 133945 - DNA, 441 bp, Arabidopsis thaliana columbia
  unsure (1)..(441): unsure at all n locations
agaaatatacaattttntgcaagatgatttaactactgaagatgtatttctattggactgccaaagtgaagtatatgtctggattggttcaaactcaaacataaagtcgaaggaagaagctcttactcttggtctgaaattcctagagatggatatactggaaganggtctaaccatgaggactcctgtatatgtngtcacagaaggccacgagccaccatttttnacccgtttctttgagtgggttcctgaaaaggcaaacatgcatggtaattcatttgaaaggaagcttgctagttttnaagggaagaggcaagncctaggggtcttttggagcccttttggncccggcaagggtntncncccggggttttaaaagggtntttggnccnaaggtncgggggggggttccccttnccggaaaatttttttttncncccc

SEQ ID NO: 133946 - DNA, 438 bp, Arabidopsis thaliana columbia
  unsure (1)..(438): unsure at all n locations
ggggaaatgggctgctgagattagagatcctattaagaaaactaggacttggttgggtacttttaatactcttgaagaagctgctaaagcttatnatgctaagaagcttgagtttnatgctattgttgctggaaatgtgtccacnactaaacgtnatgtttctncatctgagactagccaatgctctcgttcttcacctgttgtncctgttgagcaagatgacacttctgcatcagctctcacttgtgtcaacaaccctgatgacgtctcgaccgttgctccaacngctccaactncaaatgttcctgctggtggaaacaaggaaacgttgtncgattttggcctttactaatnctacagntccctgttttgggttttttggcagaggggcaacaagnccttggccttcgnttgtttcctnggggtnancagttnatg

SEQ ID NO: 133947 - DNA, 536 bp, Arabidopsis thaliana columbia
  unsure (1)..(536): unsure at all n locations
gctgatcggagcttacaaaacagagaaccctgagcctttcatcgacgagagagtagcccggtacgnttcggttttnatgacgcatctttttggtgaaccgacgattttntcagctgacccggaaacgaaccggtttgttcttcagaacgaagggaagctttttaagtgttcttatcctgcttccatttgtaaccttttggggaaacactctctgcttctnatgaaaggttctttgcataaacgtatgcactctctcaccatgagctttgctaattcttcaatcattaaagaccatctcatgcttgatattgaccggttagtccggtttaatcttgattcttggtcctctcgtgttctcctcatggaagaagcaaaaaggtaacggttgagctaacggtgagcagttnatgagctttttccnggggaattggggtangttttaaggaagggttcttcttttaannggagggtttttnttttccnnnccnnttttttncncatttccnaaagcttcagggggggnggngggggggngc

SEQ ID NO: 133948 - DNA, 557 bp, Arabidopsis thaliana columbia
  unsure (1)..(557): unsure at all n locations
gttaaaagagtgagagagaaagaaagagagaagatgaaggtacaggagggtttgtncgtggtggctgttttctaccttgcttatacgcagctagtcaaggggcaacctcgcaaggagtgccaaactagatgtggcaatgtcgcagttgagtacccttttggtacttctccaggttgttactatcccggagatgaaagtttcaatcttacttgcaacgagcaagagaagctcttctttggcaacatgccagtcatcaacatgtctctcagcggccagcttcgtgttcggctagttagatccagagtttgctacgntagtcaaggaaaacaggctgactacatttgcccggcggnccaccctgggtaatttcactctctctgaactttacagatttnctgtagtngggttgtancagttcggatttttccgaaatctggggttgaaattcnacctgggtgnattcannntggnttntcccncggaaanggccatttntggnaggttnttcnaacccttccctggggccntttttcagggaacccctngttcaaccccgt

SEQ ID NO: 133949 - DNA, 582 bp, Arabidopsis thaliana columbia
  unsure (1)..(582): unsure at all n locations
gccacaaaaccgaaaaaaacactaattgtgctttccctttagattcatttgtatttncttttggagcttttgaacaatggagtcatcacaagcaacgacgaagccaacgagaggagcaggaggaaggaaaggtggagataggaagaagagtgttagtaaatctnttaaagctggtcttcaatttcccgttggtcgtatcgctcgttacttgaagaaaggtcggtacgctctccgatacggttccggtgctccggtttacctcgccgccgttctcgaatacctagccgccgaggtacttgagctagctgggaacgcagcgagagataataagaagaccaggataaaccctaggcatctatgtttagcgntaaggacgatgtggattggggagattncttcatggagttactatttctagtggtggtgttcttccaaacattatccagttcttcttcctaggaanaacagnttnttcttttaagnggggaagcttttctnccaatntcctaggagggttnttaanangntncgtgtccttttnggantcggcctnggtagngggggngngacactttttttttc

SEQ ID NO: 133950 - DNA, 522 bp, Arabidopsis thaliana columbia
  unsure (1)..(522): unsure at all n locations
cactatcaaatgaaagtctgaagacaaattcttccattagaagaagaagatggctcttctctgcttcaattctctcccttctctctcttctctttcttcttcttcttcctcgcgccttcttcaatctccgtctttcgcttctccagttttgagccttaaacccaacgctgtcgagtccaagaacagagtctctctcagtgcttacagcttgaactctagccatggaagaattgtggtgaaggcggctgcttctggcgtggacggggctgagcctgagagcaatgaggaaccaaagactggttggttgctgctggtccagtggataaacaaccggtgggatcgaaagaagctaaaggggaacnggcccttggaattaagntgaanatgaagctggccaaaagattngnttccaggnaaggntnggtcgnancgtaaatnnggaaaagggcatggcccctcccagntgngaaacagatggntagggnccacggttgngnttcggaccgtttgaaggctttggtc

SEQ ID NO: 133951 - DNA, 515 bp, Arabidopsis thaliana columbia
  unsure (1)..(515): unsure at all n locations
catgaaattccaagagagttgttaaatgaggaggatccccagctggtgattgatggcagaaccgaagctgtacaagtaggcgaaatggcaaaagatacagtatcactgcacttggaggaatgcggaaatgaatcaatgaaactggatgagacatttgaatggacgtcagggagaactttaacgtttcgtcgccatgggtatgaggtagagacaaagcttgaagcagacgaggatgctgatggaagatcagaatctagttcaaggggttccttcaatgatccgtggaagttcaaaagagagagctgtacttcacgaggatgggtcttggctggtggatgattatgaaaccaaagcgctaaaagtaggcgtaatngcngaagatggtcatcgctgcagttgggaaaggcgaattggaaattggntttgccggncccttnacccaggggttgtnttccnggccgnccttntgccccctttccanaaggtncgtccctttantgccngttnccgggtct

SEQ ID NO: 133952 - DNA, 514 bp, Arabidopsis thaliana columbia
  unsure (1)..(514): unsure at all n locations
ctctgttttcatggctgtttacaataccaaactctgtttggcctctgttttcttgctcttagggcttctcttggcttttgacttgaagggtatagaagcagaaagtcttaccaaacagaaactggactcgaagatacttcaggatgagattgtgaagaaagtcaacgaaaacccaaacgctggatggaaagctgctataaatgatcgattttcaaacgccactgttgcagagtttaagcgtcttctcggtgttaaaccaacaccaaagaagcatttcttaggtgttcctattgtgagccatgatccatctttgaagctacctaaagcttttgatgctagaactgcttggccacagtgcactagtattggnaacatcttagggttggtttaatgcttttagcttttccccacaatttaggggcaatggattccggnntancccngggtttnggggggnggtnccgcccntgacngncnggaattncaccttgggnccggacttnngtggcngggg

SEQ ID NO: 133953 - DNA, 525 bp, Arabidopsis thaliana columbia
  unsure (1)..(525): unsure at all n locations
ctttaccttcgtcatcttcctccaatgtctaaatcccaccggagctgccacgtgtcatcctgatgatgaagcgggtcttctagctttcaaagcgggtataacccgagatccttcgggtattctcagttcttggaagaaaggtaccgcttgttgttcttggaacggtgtcacttgtctcaccactgaccgtgtctctgcactctctgtcgctggacaagccgatgttgctggaagcttcctctccggcactctctcgccgtcgttggctaaactcaagcaccttgatgggatttacttcaccgatctcaagaacatcactggttcttttcctcaattccttttccaattaccaaatcttaagtacgtatacattgagaataancggctctctgggcctcttccggntaaaatcggtgcgtaagccagcttgaagcgtcaanctcgagggaaccggtcaacggccgatcccganccgaatcnatttncncggtaacnaaccaaatcggaaaactcaacgnctacgtc

SEQ ID NO: 133954 - DNA, 204 bp, Arabidopsis thaliana columbia
  unsure (1)..(204): unsure at all n locations
actgagcgtaaacttaaggatgagttccgtncctttggagttgtaaggagtgtttggnttgcccgtagaccacctggttacgcttttttagatttnaaagatcctaggnatgcccgtaatgctatccgtncttnaaatggcaagaatggctggagggttgancagtctnacaatcgaggtgagcgtggtggcggcggtcgtggt

SEQ ID NO: 133955 - DNA, 500 bp, Arabidopsis thaliana columbia
  unsure (1)..(500): unsure at all n locations
gctcaatcctcaatctcagtctctctgttgactccgactgttatataaaaccatacaaataccttcagattcactacttcaaacctcaaagcaaccactgaatctcgactttnatcaattgagagagaaatgaacaccggcggtggccaatacacggattttccggcggtggaaactcacggaggacagttcataagttacgatatcttcggtagtttattcgagatcacatctaagtatcgtcctccgattataccaattggtcgtggagcttatggaatcgtttgctctgtgttggatacggagacgnacgagctagtagcgatgaagnagatagctaaatgcttttgataatcatatggatgctaagcgtacggttcgtgaggtcaagttcttcgncaacttggtcatgaaacattttagttttagngnttttnttccccncccctangaggcagtcagngtggttnattcccccggatantggtncgnctcacatg

SEQ ID NO: 133956 - DNA, 281 bp, Arabidopsis thaliana columbia
  unsure (1)..(281): unsure at all n locations
gtaatatctaaaatcactaaacctatctncttaaccaaaagatcaatagattacaaaaatgcagggagctctgtttatcaaaccaactattcttcttcctcttccttcttcagtttcttctccaaaactcacttttcttcttcctcacggaaccaaagnttcaagnctctcatctctcaggtcaaacaactcatcatcatnatcatccttaacggntgaccctaacancgnnggctataacnncttcatcctttctggttttccagctgaaggatgcgnag

SEQ ID NO: 133957 - DNA, 487 bp, Arabidopsis thaliana columbia
  unsure (1)..(487): unsure at all n locations
caaactattcatggtacgttcactgaaacctttggtgttttgtagcaatgtttgtgctaatattgtggtttgaatgtctttggataagcataaattcattgtagctccgtcatgtgtagataaatggattaaggcttttgtggtagtaccggaattttatctgacattattatgcctctctagtcaaatagttggcttaaatgcctaaatatgtatatncctaggaggaactgctacaggaattaaatacctaaattatgttctagaggtaggttagcattgtcatcggttgccgtaattcattattcatgaatcttgcttcgactctatttcaagtagatgcaatgtgacccaccatacttttgnttctntnggtttcnccattanntttccctttgttngttatgttttgcntcctttctnactnnccnngttacagttntcagggcntttgttttcgaggagntcccnaaggtgggtggnggcg

SEQ ID NO: 133958 - DNA, 512 bp, Arabidopsis thaliana columbia
  unsure (1)..(512): unsure at all n locations
gttgggagtttgaagcagctagtgttgttgaagatgttaagaagaatccagattctnctacgaaaggaatcgtgttgaggaaacgtttgcaattnatgatgtataacaatatgtnccgtatcatgttcgatagaagatttgagagtnaggatgatcctctttnccttaggcttaaggctttgaatggtgagagaagtcgattagctcagagctttgagtataactatggagatttcattcctatccttagaccattcctcanaggctatttgaagatttgtcaagatgtgaaagatcgnagaatcgctcttttcaagaagtactttgttgatgagaggaagcaaattncgagtcctaaggcttcaggtagtgaaggttganatgtgcctttgaccacatccttgaagcttngcaganggggnaatcancggggcaatgttctttcatcgtcggacctcaatntgcnnggtttancaacatttggctnccggngggnttcaagctggaccccc

SEQ ID NO: 133959 - DNA, 466 bp, Arabidopsis thaliana columbia
  unsure (1)..(466): unsure at all n locations
gacttgagtatttgcacaatggatgcaaaccactaatggtgcatagagacatcaaaacaacaaatatattgttgaatgancaatttgatgccaaacttgctgattttgggctctcgagatcattcccgattganggtgaaactcatgtttcaacagctgttgctggaactcctggatatctcgatcccgaatactacagaacaaattggttgactgaaaagagtgatgtttatagtttcggagtcgtattgttagagatcatcacaaaccaacccgtgatagacccaagacgtgaaaagccacatntagcagantgggttggggaagtgcttacaaaagggggcntaaaaattttatgggtccaagtttaaatgggggttttggttccccttnttttttgaaannttttgggcttggggntnttttgttttaaccntnaccngttggnggccnaccttttnnnagg

SEQ ID NO: 133960 - DNA, 433 bp, Arabidopsis thaliana columbia
  unsure (1)..(433): unsure at all n locations
aatcttccttctccgatcttcaaacattccggccgccaccgagttcttagccgttacaatgtcttcctctatgaacgtagcgacgatgcaagcactgactttctctcgccggcttctcccttctgtngcttctcgttatctctcttcttcttctgtgaccgtnactggatactccggtagaagctcggcttacgcgccttctttccgttcgattaaatgcgtctctgtttctccggaagcttcaatagtaagtnatacaaagaagttggcagatgcttctaagagtacaaaccttataccaatttanccgctgtatattnctctgatcaagttacncctgtccttgcttanccgttggttttggcaaagaaggntgccctnaaggtccanggtttttttttngngggccccttnagcncgggtnaaanntttt

SEQ ID NO: 133961 - DNA, 458 bp, Arabidopsis thaliana columbia
  unsure (1)..(458): unsure at all n locations
aagaaaagggaaaacaaaggatcttccatgggcgatcgctgagaagatccgcaagaacaaacacatcaaattccttgaaatcaggaatcttattcgatagtctatttgagcccttgatctggttttatatttggtggaagttttgaaatggtgctggtattggcattgggggatctccatgtaccccatagagcggctgatctacctcctaagttcaaatcaatgcttgtncctgggaagattcaacacatcatctgcactggaaatctctgcatcaaagnaatccatgactacttgaagnctatctgccctgaatttgcatataggttcggggggggggtttttacggaagatnccggggnnnccctgggnatnaaaaccctttgnctttttggggnaattccaagncgggggttttttttnaanggccccncgggggttncccctngggggttttt

SEQ ID NO: 133962 - DNA, 214 bp, Arabidopsis thaliana columbia
  unsure (1)..(214): unsure at all n locations
aagcaagccgaggcacagaaagcgcaaggnactgcggnctttctactcaaagcagaaagaagcagagggacttgttgccttagctagtgcgcaagggacttatctaagaaccctcttagacggctgttcagaatgnctattctngtcttagaggctttcttggatgatttanaatggtatttntccaggaggtccnttaaggcctatgcgnttg

SEQ ID NO: 133963 - DNA, 330 bp, Arabidopsis thaliana columbia
  unsure (1)..(330): unsure at all n locations
atttataatggctccaccacctccggcaccaccgtccgtnacgttgaggacagtgctccttctccttagggttttnaccgcggctttcctcctcataacggtggtcctcatcagcaccaacaccgtcactctcgaaatttcaagcacgtctatcaaattgcctttcaacgatgtctatgcttatagatacatgctgtccgctgccgtcatcggactagtttangcggttgtacaaactgtnctaacaattntcccanttngcaccggaaaaaaacatcctctaactttataagttcggtttttncnggggnttaaggnantttnatatta

SEQ ID NO: 133964 - DNA, 479 bp, Arabidopsis thaliana columbia
  unsure (1)..(479): unsure at all n locations
agaagatctccttgacttctgcgtacgcaagnaatattcacttggtctcagacgagatctactccggctccgtcttccatncctccnagttcacaagcnttgccgagatcgtagaaaacatagatgacgtgtcagtaaaggaacgagttcacatcgtctacagtctctccaaggntcttggtcttcctggtttccgcgtgggaactatatactcgtacaacgntaatgttgttcggacagcgagaaggatgtcgagcttcacggttgtcttcggcttcanacacaaccatatgctggctttctaatgttttccgggatgaggagttttcgggtggaagtccattnagggttaacccggggaaaagctttngaagccgggtcgggttcccatttttgggagggnctttaanaagggcangggttttaggttttttaaaaagggacccncangnnntttttttttgggnaaantttggggt

SEQ ID NO: 133965 - DNA, 500 bp, Arabidopsis thaliana columbia
  unsure (1)..(500): unsure at all n locations
cttaaagcaactcaaagctcaaatcgaaatttctagtttctctttatcattcacgctaagtgttcaatcgaatcaagattaagtatggcagaagagtacaagaacaccgtccagagcacgagacccctaaggttgcaacagaggaatcatcggcgccagagattaaggagcggggaatgttcgatttcttgaagaaaaaggaggaagttaaacctcaagaaacgacgactctcgcgtctgantttgagcacaagactcagatctctgaaccagagtcgtttgtggccaagcacgnagaagaggacatangcctactcttctcgagcagcttcaccagaagcacgaggaggnngnagaancaagccaagtttcctcggcaacttcaccgntccaacagntctttttccccttcgngtgntaagaggttaagccggtnggagagaggaggggnanagagaggttttnaggggnctnnaacagtgngagggntcagggtttgc

SEQ ID NO: 133966 - DNA, 444 bp, Arabidopsis thaliana columbia
  unsure (1)..(444): unsure at all n locations
tgctgtcgagaagcgtatcacgtcgccattgctggaaccgagcagtgtggagaagattatggaaattgatgaccatattggttgtgctatgagcggtttaattgctgacgcgcgcacacttgttgagcatgctagagttgaaactcaaaaccatagattctcgtatggtgagccgatgactgtagagtccacaacacaagcactgtgtgatctggctttaancggttttggtgaaggngaggaaggatcaatggtctcgggccgtttngnagtatcccctnctcaattncttggccatgnattgaaaattggccccaggtttttancttnnacttgatcccttnagggaccaatttttggcaagtcaaattgcaaagggcaatttgggtncaaggttcttnaagggggcttantangncctttttaaagggcaatttaancaaa

SEQ ID NO: 133967 - DNA, 301 bp, Arabidopsis thaliana columbia
  unsure (1)..(301): unsure at all n locations
cctcaaaanccccttctnatggctatcaaacatcagatctatgangttacacaaagcaggatgttctacggaccaggaggaccatatgctttgtttgcagggaaagacgctagccgagctcttgcaaagatgtcatttgnggagaaagacttgacttgggatatctntggtcttggtccctttnagctagatgctcttcaagattggnagtacaagtncatgngcaagtatgctanggttggtactgtcaaagtggctggttcagaacctnaaaccgcatctgtttctnaacccacaggga

SEQ ID NO: 133968 - DNA, 551 bp, Arabidopsis thaliana columbia
  unsure (1)..(551): unsure at all n locations
caaaaaacaaaaacagagccaggaataatgtcagttttcctctgtttcctctgcctcttaccccttatcttaatcttcttgaaaaatctcaaaccatcgaaatggaagcttcctccaggcccaaagaagcttccgatcatcgggaacttacaccaacgccgggaattacatcccaggaacagtcggaatctttccgaaaagtacggaccaatcgtntttctccgatacggattcgtccccgtggtcgtgatctcgtcaaaagaagcagcagaggaagttctcaagacccacgatcttgagtgttgtagccgaccagagacggttggnnccagagcaatcttttacaactttaaaggcatcgggnttggaccgtgcggttaaggtttngagaacgttncggaagttntcggtggtggncttttnagtcgnaaaggttcatntttcagggttttcagngggnggnaccgctttttttnagaaccttttntttggtttgggnggcttttgnaatttttgaaaccctttttttggggggttngtttnggnnggtt

SEQ ID NO: 133969 - DNA, 413 bp, Arabidopsis thaliana columbia
  unsure (1)..(413): unsure at all n locations
cccgactctntgctccggcgccgcgaattaggttttatcattctacgatccgatttgctcatttccgaagattcacaacggcttctccttcaatnagccagcagactggcgaaatcnatgccgtcgtcgatgcttcgtcggcggagaaacccgacgacgtcgtggtgcaatacgttgtgcttcgacgagatctaatcgattcgtggccacttgggagcgttgtaacacaaggatgtcatgcgtcagtggcagcnatctggtcgttcaaagacgatcccggtcacgnttcagtactgtnatcccgcagcacattgattctatgcataaggtgactctggaagttaaagggggaaacgcagntggnngaattttttcannagaaggctgaatttaagggggnntnttcncnaaag

SEQ ID NO: 133970 - DNA, 436 bp, Arabidopsis thaliana columbia
  unsure (1)..(436): unsure at all n locations
tgctttcaatgaaacaaccaccttggatgatgtcgataaactttttaaagtttttncttcgggcaagcccgttcaattnacggctgagtctcttgcaccgnagtttaacaatgctattccctctagcctaacaagagagagcccttatctnacccatccaatcttcaacatgtaccacacggagcatgagttgcttaggtacatccacaagtnacaaaataaagatctatcattgtgccacagcatgattccacttggntcttgtacggtgaaattnaatgccaccactgaaatgatgccagtcacatggccangtttcaccancatggacccttttggtcctgttgacaagcccagggtttttcnggaattttttcggntttnggggngggcttttntgtcggccntgggtttgggcttttttttnttgaancct

SEQ ID NO: 133971 - DNA, 496 bp, Arabidopsis thaliana columbia
  unsure (1)..(496): unsure at all n locations
tctagagatagatcatgaggccgagttgcttgtgcttgcaagtnacggtttatgggatgtggtaccaaatnaggatgcggtagccttgctcagagcgaggaagagcccgaagcagctgcccgcaagttaactgacactgccttcagccgtggcagtgcagacaacatcacgtgcattgttgttaaattccgtcatgataagacagaatctcctaaaatcgaaacaaacgccatggctgaatcggaacctgaactgaaccccacaactgaactggaacctgaatcaaaccccagtactgcattggaaactgaatcaatccccaaagctgaactggatccgaacctgatgctatacctgatccaaaacctgaaaccgaccagngnccagggtgagaaagttgtggtaggtgcancgggaaaggtgtcctncttttgggnatttggganagntgntttaatttcttngaagttttggttttggncccttacggtnggta

SEQ ID NO: 133972 - DNA, 564 bp, Arabidopsis thaliana columbia
  unsure (1)..(564): unsure at all n locations
agaccaaatctnagctctagggctttgcttcctccacgaacatcaatcgcttctnctcatcctcctcctcctcgattcctggtaatgaattctcaatctcagcatcgtccatctatctcctgcgcttcgcctcctcccggagataacggttttccggcgattaccacggcttcacccatcgaatcagctcgaataggtgaagtgaagagagaaacaaaggaaacaaatgtatcagtgaagattaatttggatggtcatggagtttcagatagctccactggaatccctttccttgatcatatgttagatcaacttgcttcacaatggcttgttccgatgtacacgnaagngnttactggtgntactcacaattgatggtcatcatacctaatgaagnttgttgctnttgccattggacctgctttgttaaaaggcactttggggacgggaaggggttaaccggttttggnggttttnnaaggtccccttttnttgagncctnantaaangttccccggggttattctngntggccnnatcttggganaccttngggttccaccg

SEQ ID NO: 133973 - DNA, 280 bp, Arabidopsis thaliana columbia
  unsure (1)..(280): unsure at all n locations
gagaacgtcgagagtgaagatgatgatatcatggaggttgaaaatcccatgatggtgagcaaaaagaagataagagttgaatagnccccttttttgaaagatctgatccctaaatncttgctttatttatnagcttctttttacntcgatctaactttctactttctgaaatnatnccacaagaatnacaaagtatgatttagggattctttgatgaagaagaaaaccgcctcagattggttaaatatttaccnaggncagggtnccttttggattnagg

SEQ ID NO: 133974 - DNA, 492 bp, Arabidopsis thaliana columbia
  unsure (1)..(492): unsure at all n locations
ccagtcacaaccaaaaaaaagaanacacaaaaacaaagattataatggcttcctcaaccatggctttgtcctcccctgccttcgncggaaaggctgtgaagctgccgnatcanatgtcctcggaancggncgtgtgaccatgaggaagactgtcgccaagccaaagggtccatcangcagcccatggtacggatctgaccgagtcaagtacttgggtccattctccggcgagcccccgagctancttaccggtgagttccccggtgactacggatgggacaccgctggtctatccgtcgacccagagaccttcgccaggaaccgtgagctagaagttatccacagcaanattgggcatgctcggagcctaggttcagttttccctgagtattggtttggaacgggtnnanttnggaaaagggttttggtcaaggcgggttaaaagttttaaangagggngttttgaatttttgnaanccgntttggnccccc

SEQ ID NO: 133975 - DNA, 539 bp, Arabidopsis thaliana columbia
  unsure (1)..(539): unsure at all n locations
ctctgttttcatggctgtttacaataccaaactctgtttggcctctgttttcttgctcttagggcttctcttggcttttgacttgaagggtatagaagcagaaagtcttaccaaacagaaactggactcgaagatacttcaggatgagattgtgaagaaagtcaacgaaaacccaaacgctggatggaaagctgctataaatgatcgattttcaaacgccactgttgcagagtttaagcgtcttctcggtgttaaaccaacaccaaagaagcatttcttaggtgttcctattgtgagccatgatccatctttgaagctacctaaagcttttgatgctagaactgcttggccacagtgncactagtattgggaacatcttagggttgggtttatgctttagcttttncccncaattttagggnccattggattccggtaataaccccngggttttggggggggggtnaccccccnngaaancnggggaattnccaaccttngggncccnggacctttanattnccanggnaaaagggntt

SEQ ID NO: 133976 - DNA, 466 bp, Arabidopsis thaliana columbia
  unsure (1)..(466): unsure at all n locations
aatcagaactatatatgagtatctgagttagttttttttttttttttttttttggagcaacatctgagctagttcatggttagatttgtttagattttttttttttgtgtgttttatgaaaagacaagaaaaataataagcaaatcgaagtcaaatctactttggttttgatcnggtttcaattagttaagattagttatatatgtatttgaaacaggattacncntatatcnattttaatgagttttatnggttatttttcnatgtagtcagtcatgtataattatagaaatttgacgccataccggatttgggtnaatccggntttnacccattttcccgggggggggtccggnttggantttaacccaatgggccccccagtggggancccaaaaaaacccccccccccggtttnangncccccccagnccntnaggcccccccccccgggggggccccccca

SEQ ID NO: 133977 - DNA, 499 bp, Arabidopsis thaliana columbia
  unsure (1)..(499): unsure at all n locations
caatcttcggagattcactacgactagcaccaaaatcgcaacttaaagccgcaaaggctaagagtaatggtgcttcaactgtgaccaaatgtgaaattggccaaagcttggaagagtttttggcacaagcaactcctgacaagggattgagaactttgctgatgtgtatgggagaagcattgagaacaatagcttttaaagttagaacagcttcttgcggtggaacagcttgtgttaattcctttggtgatgaacaactcgctgttgatatgcttgctgataagcttctctttgaggctttgcaatactcgcatgtgtgcaagtatgcttgctcctgaagaagtacctgagcttcaagacatgggaggtccagtggnaggtggggttagtgttgcgttgatccatttggatgggccagcattgtggntacaattccnctgtgggaccatatcggngnttgccctgagccagtaccgggcnctggggggccagtggtctc

SEQ ID NO: 133978 - DNA, 499 bp, Arabidopsis thaliana columbia
  unsure (1)..(499): unsure at all n locations
atggctgtgtgatcaacttcttcgatgaggacgaacactctcaaccatttcagaaacctcctcacgtggatcaacccatatccactcttgtcttgtctgaatcaaccatggtgtttgggcacagactcggggtcgataacgatggcaacttcagaggctcactcactctcccacttaaggaagggtcgttgctggtgatgaggggtaacagtgcagatatggctaggcatgtaatgtgtccctcgcccaacaaaagagtcgcaatcaccttcttcaaactcaaaccggactccggtaaggtccagccgccgcccaccctatggagaccaggcaccccttctcctctggtgatgctagctccggcgccaagaggctagacgctggcactggagttttcttgccgtgnaaccgcagtgtcaagaaaccagccaagcatttccggcgngtgtcaaaggtggggctcttgcattataagnagtggcnnngtggtatgccnagt

SEQ ID NO: 133979 - DNA, 536 bp, Arabidopsis thaliana columbia
  unsure (1)..(536): unsure at all n locations
aacgttgggttcaatgttaagaatgttgctgtcaaggatcttaagagagggtacgtcgcatccaactccaaggatgaccctgccaagggtgctgctaacttcacctcccaggtcatcatcatgaaccaccctggtcagattggtaacggttacgccccagtcctggattgccacacctctcacattgcagtcaagttctctgagatcttgaccaagattgacaggcgttctggtaaggagattgagaaggagcccaagttcttgaagaatggtgatgctggtatggtgaagatgactccaaccaagcccatggttgtggagaccttctctgagtacccaccacttggacgtttcgctgtgagggccatgaggagactgttgagtcggtgtnatcaagagtgttgcaaggagtgaccatcctcaaaactttntttccgaggtgattnaaggnagtntaggtttntnnaaaagtttggattnggcgggggcntntttttnttcggttttccngnaaannnttttcngaantgggntgc

SEQ ID NO: 133980 - DNA, 529 bp, Arabidopsis thaliana columbia
  unsure (1)..(529): unsure at all n locations
agagatgataaaatcagtnactcttcgttcgtttcatctcccaattgagtttaacgacaccaaattcgtctcacggccttgtttcctggcgagatccttcccggtggttcgttgttcaagcaccagagacgtacctaagcttgaactcttcagccgcggaaaattcgaccggattcttcaagatccgccacttattgaaaaagccgaatccgaactctcagattactgttcgacgcttgaaggtgatgactcttacagttgctggagagcttactttgaactcaaagatctcgnaagagagaagccaaaggttgaagttgagaatttnattttgcaaacaggtggtttgaaatccgttaatcgggtgtttacatggagttgttcaatggggaaggtnncaaaccacgatggtttcatctngggnggatcagttgggggnaggattnattttcncatcaantcctntggtnccaaaacttaccaaagttgtggggngggaaccnaatccggtnagttnccngnttntngg

SEQ ID NO: 133981 - DNA, 538 bp, Arabidopsis thaliana columbia
  unsure (1)..(538): unsure at all n locations
taaacctcgccgagactcgccggaatctcgccggagatgaaattccggctgattgcnagaaaacgaaggtcttttagctgagagattgttgccggtaacgcacccatgattctnccggggacaatggagagctcagtgagtgcagagagtttgcctattgctgggtcgatccgaccgataaaccgggtgaaccggctctaggatcgccgagattgagagagattactttatctccgttgcagtagacgccagcnaagccgcatggntcagaagtgaaatcccaagactcgaagaacttggaacctggcaagtcatcgagggatttacggatagcttncagagccaagaaatcaactgggtcgagaatcgcctccgtgaagaagccgatcgagcaggaccatcaacancaaaccaacttggtaaatcttatcanatctcttcttnttctnnttaannttngccgttnaaggtnaagaaccaggggctttttttttcaaagngggtgancanngcggcttttaagttggaaattnggttg

SEQ ID NO: 133982 - DNA, 405 bp, Arabidopsis thaliana columbia
  unsure (1)..(405): unsure at all n locations
ccttcctaaagcactcactgagaaagagcaacaagagcttgttgatctagttnatntcaagcttggtcaggaatacgagcttgttgtcaccacttacgccgggctttgcagatacagagttggtgatttattgagagtnactggtttcaagaacaaagcgcctcaattcagtttcatatgtcgcaaaaatgtggtcttgagcatagattccgacaagaccgacgaggttgagcttcagaacgcggtgaagaacgcagtgcnacaccttgtcccatttaatgcctcactctctgagtacacgngctatgcaggcacaagttccatcccagggcattattncccnnttttngggngtatgttttggntgggaanaaacccgntccctccnttngggtttggggnctt

SEQ ID NO: 133983 - DNA, 375 bp, Arabidopsis thaliana columbia
  unsure (1)..(375): unsure at all n locations
atttnacggaaaacagatcgttttcggagattctaaagacgagagcttcanaagatcatcagctatcacagctcagacaactttaaggattggaacagctcagaagtggtgggagaaaggtctgaaagataacatgagaganatctcttcagctcaagagctcgttgattctnttactaacgctggtgataagcttgtggttgttgatttcttctcaccnggctgtggtggctgcaaggctctccatcctaagatatgtcagtttgcagagatgancccggntgtccagtttttccaggtgatttncgggggggcaaaagncccntgtntttaaaggcnttggggnccccntttccccccttttntcccggtttt

SEQ ID NO: 133984 - DNA, 438 bp, Arabidopsis thaliana columbia
  unsure (1)..(438): unsure at all n locations
aaaacggagtcgtttccaaggacgttgtttattctgccgacaacaacctatccgtccgtatttacctcccggagaaagccgccgccgagaccgactcgaaactccctctcctcgtttacttccacggtggaggattcatcattgagacagctttctctccaacttaccacactttcctcacgacgtctgtctctgcgtcgaactgtgtagcggtctctgttgattaccgtcgtgcaccggagcatccgatctccgtcccgttcgatgattcttggacagctctcaaatggggtattcacccatatcactggatcttggtcaagaaagnttgggtaaancaaacattnttgacttaannagagttttcctttccggggganattnnagggggnaaanattggggaataaaaatggcnttnngntttncaaaaagnnaat

SEQ ID NO: 133985 - DNA, 586 bp, Arabidopsis thaliana columbia
  unsure (1)..(586): unsure at all n locations
tcaagctgcacaggcacacgttgataatcttcagcaagaattagctcaagcaaggttaaaagaaactgcacttgacaacaaaatcagagctgcgagttcctcacatgggaagcggagtagatttgaagatgttgttgatatggacattggagaaggaagtgacagaatcttgaggactaataaacgagctcgaagcacaagaggagatgatcacggtcctactgatgaaggcgacgaggactttcaaagtcatcaagacaatggcgaggaggaagaagaagaagattacaggaagcttactgtgcagaatctaaagcatgagctgaccaagtacggttgtggacatttgttatttgaacaggggnccttcaaaaccaaggaaggggnttctttcggttgtatgaagctcatgttcttncccagaaanctttngcgggaaaaggnggggggaaagaancngggggggnncctttntttttttggggccaaacctttttncagggnttgggggttaaccctttttttncncaaaggttttcgcctttnggggttttnnaaagntttggntttnnaaagccccnttttt

SEQ ID NO: 133986 - DNA, 452 bp, Arabidopsis thaliana columbia
  unsure (1)..(452): unsure at all n locations
gcaatcgcggttgatatgccaatgaatgttgagtctgtnatcatataccttgctattgttttagctggccacgtagttgtttcaatagctgatagtttctctccccgtgaaatatcaacacggcttaaaatatcaaaagcaaaagccattttnactcaggatgtgattattcgtggtgataaaagtattcctctctatagaagagtcgttgatgcagaagcacctctggcaattgtngtcccagctagaggctctagctgcagaatgaagctgcgcgaganggatttgtcttgggacaactttttgggaaacggaagaaattttnagagggcgtggaatatntttnctncagaggaacccagcaggggcttncacggacatccttttcttatnagggaccccctgntgngncaaagggttttncctgggcnnacctttttcccnttnaaaaa

SEQ ID NO: 133987 - DNA, 334 bp, Arabidopsis thaliana columbia
aagcagaacatagaaacttattttgtaacttcttttggtccgaatattttacccaattattacaatatgtaacgaacttcacttgtgtgataaaaaagactaattacatttacctattggattaatatgactacataaatcgacataactcctccaataactccaccacttgaaccatagtaggcctttctctagtcgactctttaatacaaagacaagcaatcctaaaatactcttccactcccttctcactaccacaaacacctccaaaatccaacatttcataacaccgattttgctccaccatgatcacagcccattgagccaaccccaa

SEQ ID NO: 133988 - DNA, 368 bp, Arabidopsis thaliana columbia
acgtaatttgaattttcaaaacgaaaattcataaatatatatatatttacatcccaagtttggttacatgacaataataccaagaaaccataatcctcaaatatgagtattaccaaaaaaaagtggaaattacaaaattggtggtgaagccgtgggagatatctctctcattttttaagatggtactgagaaagaaactcttgatatgaagatgatcgatcttgccattgagagtgaaacgtcttgtccgtaagcatagctttcatatcgaatttatcgaaattcacttcccgattttcgaagaacatctcgaccggagacaactcatcgacagttcaaggcctcttcttcctacaggattatcatca

SEQ ID NO: 133989 - DNA, 418 bp, Arabidopsis thaliana columbia
  unsure (1)..(418): unsure at all n locations
tgaagggtaatgttttcaagaacaagcgtgtgcttatggagagcatccacaagatgaaggctgagaaggctagagagaagactctcgctgaccagtttgaggccaagcgtattaagaacaaggctagcagggagagaaagtttgccagaagagaggagagattagctcagggacctggaggtggagagacaacgactcctgctggcgcacctcaacaaccagaggtaaccaagaagaagtcgaagaagtgatttggtgttgaacttttttgcaattgaatctttgagtttacctgtagaagaagcgcctttttcccatctttttatatgatttggtcgggagattctcttcttcaaaaatattccttatgttatggatcttcaattgcttattatgaattcctcaacctcgggncctt

SEQ ID NO: 133990 - DNA, 603 bp, Arabidopsis thaliana columbia
agagagtccaaacaccaagaccagctcctttttcacctatctctcttcttcatctgaatcagattttgtatcagaaagagagcacctgagctcataaattctggataagatcaaagtcagagtctttcttgtttttcatcacttacttgtatgacagaagaagatagctcagctaaaatgtcagaggatgttgagaaatatctcaacttaaatccaccttgctcctcctcctcctcttcttcctccgccgctacattcacgaacaagtctcgaaatttcaaatcttctcccccgccgtgtccagatcatgtccttgagaacgttttagagaacgtgcttcagttcctcacttccagatgcgatcgcaacgcagtctcattggtctgcagatcgtggtatcgcgtcgaggctcagactcgattagaggtttttattggaaactgttactcgctctctcctgctcggcttattcaccggttcaagcgtgttaggtctcttgtgcttaaagggaaacctaggtttgctgattttaatctcatgcctcctaattggggagctcaattctctccttgggttgctgctacagctaaggcttatccttgg

SEQ ID NO: 133991 - DNA, 282 bp, Arabidopsis thaliana columbia
gtttttttttttttttttttgttggatctaataaatatacattggaaatttccaaaattcaattgatacatatcatatatacaagagaaaaagacataaatattcattttcaaattaataagaataacaaaaaaaaaaaaaaaacattattttttatcaattccaagaccgtgttagttgatggtatgttgtggccatggtgaaaagagttaataaagtttgggttttggtaatgcctctacgtcctctgattgaatcgcacttagctcctcctccgaattg

SEQ ID NO: 133992 - DNA, 318 bp, Arabidopsis thaliana columbia
aaacaacacagattcattcgagcatcagatgagtagactatttgagatagcttcttcaacgatcgtagccaatactacttttgatgctctcaaacttctccgatcagttgagctgtttccttgtcaggttccagacattactctcggtgatccgttgatcttgtcttgaagatacaaaggagagttcccagatgaagtttgaacttagaggcacactggctgatatgagctgtttcacaatagagttaacagtgcagaaggctaaagacattcctctagacaaggttcttgcgaggagacaaatcaatgaactcactg

SEQ ID NO: 133993 - DNA, 349 bp, Arabidopsis thaliana columbia
tttttttgtctacaactcaccaccttctcttccacatattttcacataaaaatattatgttaattatatatagattcatttataatcacattccatcttttgttcttcttctattatactaatcttacttattttaagaagagtcttttatctcttttgtcattatcacacaactaagaactgaaaaaagggttaagtaaagttaattaccttcttcacatttttcttctccctaacttcataacggttcttggtcaaatcagataaccacatccctggaaaacaaaactgaagggctttatcaatgttcttagctcgtttcctgggtctatgaggaagcttagttcct

SEQ ID NO: 133994 - DNA, 349 bp, Arabidopsis thaliana columbia
tttttttcgaagttacttcttttaactatgcattgaaaaaactcgtaataatcttttttgctcttttttggttctttcccaacaaatccagcattgtagttctacacgtctcacacaacttttacacacacacgagtttttaacttgacatagtttcccccctacaaggcaggtgggtacgcaatattactgaagttgttcgcttccgccctctgcaccgccctgtgaaccgctcttctcaagctccactcataacagaactccaaagtcagccttagagctgttcctagcccaagcacaactatgactccaataatgatgttcaccggaagcgcagagaccccaagtg

SEQ ID NO: 133995 - DNA, 349 bp, Arabidopsis thaliana columbia
gagctgtggagacgaaccccgaaaaatccatctgtcttttccaccgtctttacctgatgcttatcttgccctcagcagatccgagtggcccaagacgtttctacgtagcttcacatgcgtgacgagtttggctctcgtgcttagcaaggattttcatgtgatggcagtacccaaattcagccagttggtatacctgcatttgatatacgacatgacacaacattttagattaatgcagttccttaaatccgcaccaatactcgagatgctcagcatccgcgacctggacatctcctcgttcaacacctactgcaaagtccttgaaggaactacgttcagtagaatctcc

SEQ ID NO: 133996 - DNA, 349 bp, Arabidopsis thaliana columbia
tttttttaatctgacatgttccatcaaattattcatgttggtgaaagtgacaaataactgactgttacaaagaacaacactaatatgatagtaatagataatggatttgagaatgaaatggttctaacaaaaaccactttatttcaggagtgataaaagtgaagaaacagtcactgtgacgactctgtaagcttatgcctttggaagatcaccagctgcttcaaagctcacaacagaatcatcaatggtttcttctaatggcctaaacttccaccccaagtttttcaacttctctgcacttagaggcctcacttccttctcttttacctccgtgaaactttcagggaag

SEQ ID NO: 133997 - DNA, 349 bp, Arabidopsis thaliana columbia
gaggatgcacgagtttcgtctccctacagccaatgacacaatccccggtggccctacacactctaaccctactccaacttccttgctacacgcggaagtatggacgttatgccggatatttaagagaactgtgtctagtcgaaaatacactccggactggagagaattagcaaatggcaaacgtgtgaagcagcaacaatctaattaccaagaagcttatataaattttggggacaatgaaagtagtagtagtaccaacgtggatgaacgttaggggaaggcaaaggggaactacggagagaagcattttccagcttcagcaaacgcctttatcaacatcaaaaccagc

SEQ ID NO: 133998 - DNA, 300 bp, Arabidopsis thaliana columbia
ttttttagatgccaaaaccacagacctctataactttctttaatttacgaaactgtttctttcaatagataagtgaatatgcaaagaaagaaaaggaaaaaagatacaaagatcacttcataacataagtgtgaagaagtttcattttgtgaaatgttcaggtgagcagctaatcatagaacggtagcataaatggaatctcccatctccttgccattcctgatataatgtaacaaagaaaaaggataacaagaccgctaatacccgagttctcgaccaaatcaaattagccaaattaat

SEQ ID NO: 133999 - DNA, 224 bp, Arabidopsis thaliana columbia
tttttaagacgtaacagtggtaagtgtaaaaaaaagcgcttgtgtccggttcgccaagtatatagaccattagcttctaacgtttactttctaaactcaaaatacaaaacttaaaaaaaggagaaaaaaataaaaggaaaaaggaaaaggggagaattaggagaacataacattaaaactaacacattggttctttaggtagagcactacaaaaaatatcttta

SEQ ID NO: 134000 - DNA, 204 bp, Arabidopsis thaliana columbia
gtgctcaagtgcatccctcgatacgacgatgtcttgcgagaacgactgttcggtctcctccctctgtttgctactacctccttgtgcttcttcttcttttggagatagtctgtatcctttgtggttgcccatttaacttacagggttccggttcggtttctttctttacttctctcaagcacggaattcagaacaaggactacc

SEQ ID NO: 134001 - DNA, 210 bp, Arabidopsis thaliana columbia
ttttttttttgatacaactaaagaagcaatgccttgcaaaacaagtagctaatgtcttatatattcaactaatagccttagcgaatgaagttccaaatcggtaagagaccaactttctttctattgttacaacacaaattggcattttgttgccagatagaggttctgtatctatacactgtcacgatctattgtcaatgtctcatcagg

SEQ ID NO: 134002 - DNA, 207 bp, Arabidopsis thaliana columbia
ttttttttttaggcatatattctatcaattttcattcatcttaaacaaaaagcagagaagctacattatattctaaatttatacaaaagagagcgatacaatcaaaaggatcagtgaagagctaatccacatatctaacattctccgttttccttttgtgatctatgaatgacgaaacgaccactatctttacggattaacagggct

SEQ ID NO: 134003 - DNA, 206 bp, Arabidopsis thaliana columbia
ttttttttttacatataaaccttatttaatcatcgctgcatgagtgtgagtctcaagcaacacattatgtagcaatacaacacacgtggagtttcagtttttaggataaagtattaaaattggaacacatatatggctagagtctatactatcctcgtacagatgcgacgctgaagctcgatttgcctccccacctgtctcgttca

SEQ ID NO: 134004 - DNA, 235 bp, Arabidopsis thaliana columbia
ttttttttttaacataaacaatggattaggttctgatttttgtttgggcctaaaatgttactgcatacatgacgatacgggcccaatgacacaagtacacaactcatctaggcatatatgaaaccgaatcggttatttctacttgagtcattgtgagagctgacattagctgtaacaccaaacaaggacaaaacattgaaacaacgaggcagaacttgagctcatgaccaacctt

SEQ ID NO: 134005 - DNA, 216 bp, Arabidopsis thaliana columbia
ttttttttttagtaactcgatgatcatttaccaaaatctaaaaatttattgcatatacaaaggattggagtagaggaaaacaatcagttagctcaccaaagattgttgcaccggcagacgccatttttgaacaagtggatactttgcatctcgcttaactaatctctgctccagttagatcgatcactactcacatatcatggtcaatgcaacaag

SEQ ID NO: 134006 - DNA, 220 bp, Arabidopsis thaliana columbia
ttttttttttgatttaaacctaccaataatctttacaagaacaagttccacctttaaacaggtgaaacctgtttcctgtctcttacaacaatctcctctttcgtagatcatggagattttctttgtataagtgtgacagtcactacacatcctcaggtttctagctattttaatgatagacctggagtgtatacatagtcaagcatagcactttgcgttc

SEQ ID NO: 134007 - DNA, 201 bp, Arabidopsis thaliana columbia
ctagtctagtcagaggaacacctggtattgtctcttttagaagtcgtaacatgtcatgtacctcggcctcaaccgtaccagctccttccagcttttcccagcttggaatttgtatggcaatgtaaggagggcaaatactgaattaaaacgtgacactactacattacaagaactctaaataaatacagtccaaaaaaaaaa

SEQ ID NO: 134008 - DNA, 220 bp, Arabidopsis thaliana columbia
tcttgaaaagagctcccccccgggccatgggttaagcgggatatcactcagcataatgttaagtgaccggcagcaaaatgttgcacaactgacccttttagggaccgcaatgggttgaattaccaacttcgtgtagggggaccctcacaccattatcgctttctcaggcagctacaaactgttgtcaacgtgcactacttaccgcttatcttacattcga

SEQ ID NO: 134009 - DNA, 207 bp, Arabidopsis thaliana columbia
ataaaagggagacagaagtataggttgtctctagagaagtaccgaggttaatgacagccgctacaacatggtctgccttgatagagaaagaagctacttttactagtcgaagtctggcagaggcaaagtgagataccggcggccatttttcagtaaaggaggaaacagcagggcccacggaaagtgagggtgtacgtctcactcggt

SEQ ID NO: 134010 - DNA, 200 bp, Arabidopsis thaliana columbia
tattgattttgtaggaaatttcggaaaagtttttgagttagtacagttcgttgacgcttcacgctgacacgactgttctgggtcacgcatttcttcccttggtcgatgtggaagctgtagcactctgagtcctctcgatgttcctccggtactagtacctgcaaacaacggctcctcttgtgcgttaacgtcaacgtcaa

SEQ ID NO: 134011 - DNA, 211 bp, Arabidopsis thaliana columbia
tggggacaggtcttttttgttctaaccacatcttgctttcctgccaaaaactcatatccacgacgtcactacagtttggctttactttctcgtggactacccgaacaacacctacgtgtggagaggctgccaaggaagtagagtatgagtattttctaacgtagagcgaggttcatgaataccgtggattgtaagaagcttttctccacct

SEQ ID NO: 134012 - DNA, 223 bp, Arabidopsis thaliana columbia
gctcaagaagaggctaagcgtctagttaatcgacccaaaactaaggcaacacgcttcctgaaattctccaaaacgtctagctttaggccttctcttcttcttctacaaagagtgatcttgactcatactgtctcctcacttgtgaaaaaggaggtcttccttccgataaagttcaccttatacggtaacttcgatagttcgaaccaagatgacgttaacctca

SEQ ID NO: 134013 - DNA, 245 bp, Arabidopsis thaliana columbia
aaccaacatctgactctaccattaatggtgcaagaaaaggtggaagcttgaaggcttggatcaacaaatccttcaatctcaaagtctcaagccattaagattaattttcttctcttttttatgaaataataagaccaatctttgttttatcatcattatgttctttgtttttggttttgattccaaagttgttattttcatctttcattcatgaataaaagtgtcaattcttctgaaaaaaaaaa

SEQ ID NO: 134014 - DNA, 203 bp, Arabidopsis thaliana columbia
cgaacaaggagagttttttttttttttttttttttactcccccccgggccatgggttaacatggatatcacttcaccataatgttaataccttcacaaaatttcaacaactacccttttggtacctcaatttaattatctctaacttcttaacttaccactctcttctactctctattatcacttgctccacatactcatact

SEQ ID NO: 134015 - DNA, 202 bp, Arabidopsis thaliana columbia
cctcaatgcccacttcccatgaataaacgtaatgtttctttcatttccgacgtgatcccatagttctaatgacgggtcccggaacttgtgcgttcaacgaccatgacgggacgtacaccaacctggactactactgtagctccgttaatcctcagcgatactcatacacttcagccacaactcggctaactgtttacacggt

SEQ ID NO: 134016 - DNA, 218 bp, Arabidopsis thaliana columbia
cgcgtatacaggaaacaaatgtcgaaacgagttcgacgtcgtcgaagagttcggccacgaagacagtaagtctaaaacatcaacgggagtccctaaccctctcattagtaagccctctatggctttaacttagaggataatttagccctcttctaggaccaaaccggaaccagttttctagtatattgatgtaagtgttcataccaatgttcaggttt

SEQ ID NO: 134017 - DNA, 205 bp, Arabidopsis thaliana columbia
cagaataaattgctcttaattacttgatgagctgcagaaatttgtgatacatatataaaaggcaagactaaaacctaattaaagcgacaagaaaagaaagtagtagtcacatgatatcacaacaattattgtataaacctcataagcataatgaaattaacagacatactttttctgaaacttaatcaagcatataatggtcggt

SEQ ID NO: 134018 - DNA, 211 bp, Arabidopsis thaliana columbia
tctccgtagttgtaagaggtttcttagccctggccatactaaaagagggagtagtggtactagtaacgtcgagatcaactctttgttgctaacctggcatggttgttgttgtttgggtactcacactataccgatcgaggagtcaagtaccagtaaccgaaacgcctggcaagtgtgatcaacttgaggttctcatgaaaatggtggttca

SEQ ID NO: 134019 - DNA, 210 bp, Arabidopsis thaliana columbia
ttttttttttcttttctattcttatctcccccccggagcctctcgcgaccttcatgaggacgggtagtgagtctatctcaaggcataatgtcgtctacagtcgatccgtgctatgacagatagagctgctgtcggccagccatcatgtatgctctccgatattcatggacgagtagcccgcctatatgagagattagcacgtctagactc

SEQ ID NO: 134020 - DNA, 508 bp, Arabidopsis thaliana columbia
  unsure (1)..(508): unsure at all n locations
gatgaaagaagaagatcatagtcatgaaacaaatacaattgtaacacaagaataaaagtgaggcaggtttattattccccctgaaaatcagagcacttaacagaattacacaaatcaccaaccaagaatcaaagacataacaggaaatttttgagggctgagacttatgtttgtctgtctctactacttctgcctcttgtagatcttagccaagaaggattttagcactgcttggattgctttactttggtgtccctcaatcgctccagtcagcttctcgtaggttttgctctcatactccatggaaactccctcaaggtcccagctctttgtaggggtccttcactttagcaacgttcgntgggncggggttccatagttctcatataatancttaggtttgtccttcggtgcagggtctaatgccttacccccaccacggggattttnaaactcctnnannggcccnantttncaagggnttgggtcanaaaaaanccngtntttc

SEQ ID NO: 134021 - DNA, 480 bp, Arabidopsis thaliana columbia
  unsure (1)..(480): unsure at all n locations
cctctttggacacttacccatctctttaaaacccggttatcccaagttttatgtcagtcccaaaccttgtttgatggtgtttgccttgcttttacgataggttggtcatatccggttgaaactggatagatttcccaagattgaaggactgaagtgaacactcaatgtgctaagcttttatttctctatgaaagctccatcaaccaagagggctgtttttagttgtttaacagggtatttgtagatcttcttgttttggtgattgttcctcttggagaaagctgattggagctgtttcaaaaatggattgtcttggtgtggtgcaatgtagatgggagcaacagttcatcgaggttttttttcctgggatttnnaggtgncctgntaatngtttncgaannnnaggattaggntttcctaaaaantttcnttccttnnagggttccanaggttccctcaactagnaggatttnccnattt

SEQ ID NO: 134022 - DNA, 504 bp, Arabidopsis thaliana columbia
  unsure (1)..(504): unsure at all n locations
acttatatcatattgcataattgtataaaattatattattccgaatttcacactaaaattttgtaaataaaaaagaagagatttcaataatacatcacacatcttcacataacgcagacttatttgctcctgccttcacttctatatttctnactcttctagcttcacttgaagatctgtgtccattatactatttgaaacaagattcggtaatccagctccgtaacatttgcttaagatagcataacctcagatcaaatggtaacatcctcccaaaaggtaaccggcagctctggtgaaacaggcatggtcgcaacgcattggaacttatggtgcttatatttctctctaacagcttgtaaagnacctcctcttctgctcaaatacaagtnatgttgnttccacacacacttgtnggtcagccgntttgnctttgngacctctctaacattnggtccaaggntgttgttcgggcgggtgtgaccggggggaaacagagagggc

SEQ ID NO: 134023 - DNA, 488 bp, Arabidopsis thaliana columbia
  unsure (1)..(488): unsure at all n locations
caacgatacatggtgattacagtttgctccattttggctgtgttttttccgttttttttgtttgggtgacgttttcggtatgtttttnattacattacaatgtcacagtccaagcttcttaggcctgaggaaagtggtgccctttttcaagccagggcctgaaatctgttgctgctgctttgcccttttttttctctctctctctttgcttctcagctctgactccacctgatctcttctcagtttctccatctcttcctccattcctgatttctcttccttctgctttttttnatgctccaacatcgatgtatccgagtccttgaccgagaagaacataggncctaactcagccagccaatggggtcaaccgatgtnganaatgcatgtactcctttgngggnaantcagttcatggacaacanaaggcccggtgtgtatccaanccgtaaggggattttnggggaaatggaaggatccggtttagc

SEQ ID NO: 134024 - DNA, 515 bp, Arabidopsis thaliana columbia
  unsure (1)..(515): unsure at all n locations
ccttcgctatgttcatccagaatccccgaaggtaagcgtaggtttcgtcacagagatgtgggcatcgttaganggnttttggctgcttcgaaatcttctccgggaagtgttacgaagaagaggctttggaaagacggcgaattccccggaatcacggagccggttaatcagagaagaactccgataaagaatgtgaagaagaaacttgacaggagaagcaaagctaacggatgggttaacaccgtcactgaaactttgtccgatctcatcgccaaaaagcagtggttacaagctctcgaggtttttnatatgttgagggacaaacattttatcaaccaaaggaagggacttacatgaagctgcttgtcctctcggtaaatctggtnaacccnattcgttnacagaagctnttcgncggaatctttaaggagggcttnnaccacctnttgaccttncantgtttttttggtggttaanttgaggattttattgcggtgtttttaattttnanaang

SEQ ID NO: 134025 - DNA, 507 bp, Arabidopsis thaliana columbia
  unsure (1)..(507): unsure at all n locations
gttttgctcctgatgaggaaatagaactttttgaggaaataaagtttgaaccttgcgtaatgtgtgaacagattgataagaagacttctttcaggctgtgtcaaattgaagatggagatatcatttgttatcagaaacctctttctatcgaggagagtgaatttcgatacccagatgtgccatcatttttggagtatgtacagaatcgagagctggtgcgttttcgcacactggaaaaaccaaaagaggatgagtttactatggagctgtcaaagctgcacacttatgatgatgtagtggaaagggtggctgagnagcttggccttgacggtcccatcaaaacttaggcttacaatctcacaattntactntnagcaacccagcctcagncaatcaaattncctggggtggncacctttcaggtatnttnggtcncntnaatnagcngctngcaanttgnttnttgaggttttgnattccccttcccagattcaaggcttagggcnt

SEQ ID NO: 134026 - DNA, 552 bp, Arabidopsis thaliana columbia
  unsure (1)..(552): unsure at all n locations
ggaggagtttttggtcagggctggtgtggttagggaagaacctcaaccggtggagagtgtaactaacttcaatggcggattctatggatttggcagtaatggaggtcttgggacagctagtaatgggtttnttgcaaaccaacctcaagatttgtcaggaaatggagtagcggtgagacaggatctgctgactgctcaaactcagccactacagatgcagcagccacagatggtgcagcagccacagatggtgcagcagccgcaacaactgatacagacgcaggagaggccttttcccaaacagaccactatagcattttccaacactgttgatgtggttaaccgttctcaacctgcaacacagtgccaggaagttaagccttcaaatacttggattcataaccatcctntgacaacaatntctncaagctgngnttttaaaccaggggtaccggtncagnagtttttctggnggcantttnnctganttgctcaaaggngcctggtgatttttnccctntccttaatnttgnggttgaacagnngttgngc

SEQ ID NO: 134027 - DNA, 208 bp, Arabidopsis thaliana columbia
  unsure (1)..(208): unsure at all n locations
aaacgtaatacatntcaagnttatcaacttcttacaantaacagaggtaatacatttgagacatgatccaatagaaacaactttttaaaaactttgcgttccttattattacaatgcccncattttaaacaaaccccacatgnngctaagacaccaaaatacctcttagctaccgcaccattcaccatcacgtcatnaccatgaccnt

SEQ ID NO: 134028 - DNA, 451 bp, Arabidopsis thaliana columbia
  unsure (1)..(451): unsure at all n locations
agcctcgaggcttcgtcttcagctaataatcccttcgccgagggttccggcgagatgtctccgggaccatcaatcccgctccgccgagctgctctatttctagctgccatctccatctcctgcttcgtcctttacagagccgctgattccttgtctttctcccctcccattttcgatctctcttcttatctggataatgaggaacctaagctagaagatgttctgagtaaagctgcaacgagagacaggacagttgttttgacaactttgaatgcagcatgggcagctccaggntctgttattgatctctnctttgagagttttaagaattngggnaggaactaggncaaatcttggtcaatttggngantgtttnatttgnttctaaaggcttnttcggggtgnttagnactnaataagaattgttncaagctttnnncggnagggggtt

SEQ ID NO: 134029 - DNA, 514 bp, Arabidopsis thaliana columbia
  unsure (1)..(514): unsure at all n locations
aatcttcttcgtgtggtttcacaggattgaaatgagttcgatctctggattggtggaagatgaaatcagttcgtttttcgaatcgtctccacctctgaagaacaaggaagagatcgtagccaatcttaatcagttcattgagctgaattcttcgtgtcaaggagggatgaggaggattgtatgtgtgacttcaggtggaactacagttccattggagcaacgatgtgtaagatacattgataatttcagctctggaaatagaggtgctgcttctactgagaatttcgtcaaggctggatatgctgtgatatttctctataggaggggaacttgtcaaccgtattgccggtatcttcctgatgatccnatnccttgaatgttttgaggntncncatgccaaaaaaattcaagtcatgggncacattcaggngcnttaagaaggctnttntngccccaaagttcagttcaaaaaggcngtttttaanncccctttaacccnttnananncnaattt

SEQ ID NO: 134030 - DNA, 550 bp, Arabidopsis thaliana columbia
  unsure (1)..(550): unsure at all n locations
gggtatgttaatagtagacgtctgactctcacagtacagtaactgagtattgagacaaattttgatttgcctaaaaaaaaccaaaagcatagataaaagagagagagagacaagggattagcatgaatgatcaaggagacgagtggtttcttctattcacaagcaagcttggtgtcaaagctgcttaagcatatcgcaaacgcctgaaacgccgataatggatacctatagtccattgtgaacatatctttccctactttaccaaactggagaatcaccttgtnttgctcagggtgagcaggtgcacttgttggtgctgctgctgacctgtcccttgaggctgcgggctgtcttgctgctacaaagctggaaattcttaaccgatgcaactgtcacacgtccgcggaattaacaccagcattgaacttgtngtgccacctttggttnttttccttagatcaacggnttnaactcgtttttttcgttgnggcgaggtttccnttttnggggtnttgactcttaatcggggnggtgcaatatgtttggggtc

SEQ ID NO: 134031 - DNA, 507 bp, Arabidopsis thaliana columbia
  unsure (1)..(507): unsure at all n locations
gagattagttgtcagatagatattcgcgagacgagaagctccaattaaaaaccctagagctcatctctctctccaggtacggccttttcgtttttggctttcaccggcgtggatctccggtgacggggagattcggaatttcggagagattttagatcatgtatagggagagaggtatggttggttcgaagtcggaggtggtcgatcggaaacgaataaacgagattcacgataacaggccttcgcattcgatgtctcagcctgtcaatggaaaaggcaaggtaacatcgacctccgttttnatggggaagcagcaatttcatgataaggaatcttcacgttcttggttctatctctaaagactaacattttncgacggttgtgggntaatatcaagccacagncagccganggantnaanagggncaagttgggttnctaactgggagnggggccancccccttnggtnanttttggttcttnnaaccnttccntttgggaccgna

SEQ ID NO: 134032 - DNA, 571 bp, Arabidopsis thaliana columbia
  unsure (1)..(571): unsure at all n locations
gaaatacaaaggcccgttacaagcccaaacgaaggtacataaaagaaaagcagaaaatgaaaacgaaatcgatagggataagtttttccaactgacggaaacacaaactacaccaggtgaaatagatcacctcccaagtgcatgagacacgaaccaaccacttatcatcagatcacaaaaagcttagaagcttccaccacgaagacgaagaaccaagtgaagagtcgactccttctggatgttgtaatctgcaagtntgcgaccatcctcaagctgttttccagcgaagatgagtctctgttggtctggtgggtcccttcttgtcctgaatcttagccttgacattatcgatggtgttgagtttnaaacctccagagtaatggttttccggtaaggggtcttcacaaagntcttgcatnccaccacggnggccggngganaanattnaggtttggctcctttttgggtnttgaattttnaagggtnggcnatttttngggtttttccggaaaanaaagcttttnncccgngngttcccnttttnttggtttgggttaaatttaaagggntt

SEQ ID NO: 134033 - DNA, 516 bp, Arabidopsis thaliana columbia
  unsure (1)..(516): unsure at all n locations
gataagcgatattgaaggagcaagaaaagcaggtgaacttttcggttaccctcttatgatcaagagcaaacgattggnttatgatggacgtggaaatgcagttgccaacaaccaagatgagctttctnctgctgtaacggctcttggaggtttcantcgtggtttgtatattgagaaatgggcaccttttgttaaggagttagctgttattgtggctagggggagagatggttctatggtttgtnatcccgttgttgaaaccattcacagggataacatatgccatatagttaaagcacctgcagatgtgccttggaaggattaacaaaacttgccaccgattgtttgcccaaaaagncttntcgggttctttttagaaaggtnctggttgttttttccagtttgacctgnttcttnncaantgggttnngncaannttcttcttaaaccggagttggaaccttggcccanacaacatttgggccattaaaacngtccgntttgnttttatacctt

SEQ ID NO: 134034 - DNA, 540 bp, Arabidopsis thaliana columbia
  unsure (1)..(540): unsure at all n locations
agacaacaaattgtggagtcaatgatcacgattgtccacccgtcaagaacgaggaactagcagctgaggcgcgttatagtacagacagtgactcgggtttgccaacctgtcgtgtatgccattntgcagaatccgacagacgaggagataccgccttggggtttttggggattacccctccggttccagaagctcgtaaaagcaatgtagatggaaccgctgatgatgtcagcaaagtacagagtctgagctgaagaattctgttgtcaaaagcaatggaagggaatctggcttcatcgaattaacaagtcctgatgcggaagttttcatttgcacaaattgatatngnaaattgggnattccaggcaagaatcagggatgcatttgcttnaagctttgggntgttcnttgcaaaaaaccgnggtttgtttttgggaccaccttanggnttncnnggttcaaaggtggttttttaaacccatgggtncnnccggtgttgtgnaaaatcttntngggcaatncctcnaggaaattttaaaa

SEQ ID NO: 134035 - DNA, 637 bp, Arabidopsis thaliana columbia
  unsure (1)..(637): unsure at all n locations
aaaacaccgcttagcttctaaaatctgaacatcgagaaaaaatgagttggtggtgggctggcgccatcggagctgccaagaagaaactcgacgaagatgaaccatcacaaagcttcgagagcgtcgctctcatcatcggcgttactggaatcgtcggaaacagcttggcggagattctccctctttccgacacacccggtggtccatggaaagtctacggcgtcgctcgtcgtcctcgtcctacctggaacgccgatcatccgatcgattacatccagtgcgatgtctccgacgnccgaagacacaagatccaagctttccccttttaaccgatgtcacacaatgtcttctacngtaancttgggccaatcgtgaattcggaaaggtgaaaaactnttnangnaaattgggtcaatgcttccntaaacggtttttcccaaggggatttttccccatacgggggcaaaantttccgcncaatnttttttttcccannnaaggggcaaaagacttttcctttgggccgttttnccaaccgttttnnggggccttttanangtcccccccgttnaatttgggggatttcccggggtttangcccnaattttttttttcccaangggnttttttttttngg

SEQ ID NO: 134036 - DNA, 495 bp, Arabidopsis thaliana columbia
  unsure (1)..(495): unsure at all n locations
gcttggttctacttcaagtacaggnctttcaagaaagcaagagccatggagagatctaagtggactctaatgtcgttccacaaactcgggttcagtgagcatgagattcttgaaagcttggatgaagataatgtgattggagctggagcttcaggtaaagtttacaaggttgtactcaccaatggggaaactgttgcggttaagcgtttatggacaggttctgttaaggaaactggagattgtgatccagagaaaggttacaaacctggagttcaagatgaggcttttgaagctgaagttgagacattgggtaagnttaggcataagnacattgtgaagctatggtgttgctgttctacaagagnctgcaagctctttgggttatgagnccatncnaatggtagttttggngttttcttcatngcagtaaagngggatttttggntgcaaccgggtttaagtntctnagtncgctnngggnttcgntctcnccac

SEQ ID NO: 134037 - DNA, 500 bp, Arabidopsis thaliana columbia
  unsure (1)..(500): unsure at all n locations
aaattatctgtatgcatgggggtattggtcgttctataaatcatgtggagcagatagaaaatattcaacgtccaattacaatggaagctggctccattgttcttatggatttattatggtcggatccaactgaaaatgacagtgtcgaaggtttaaggcccaatgctagaggccctggattggttacttttgggcctgaccgtgtcatggagttctgcaacaacaacgatcttcagttgattgtacgagcacacgaatgcgtaatggatggatttgagcgttttgctcaggggcatttgataacggtcttttctgctacaaactattgtggtactgcaaacaatgctggggctatctttggactagggagngatcttgttagtggacccaaggtcattcatccgttaccccagnactttcatcgcctgaanntnaccagnaggcattttggngcacatggttcagggctaacgaaaagccagggcggaanccgggcgtgc

SEQ ID NO: 134038 - DNA, 259 bp, Arabidopsis thaliana columbia
  unsure (1)..(259): unsure at all n locations
atcaataancaactttgccttgttgtctatcgccggaattacaaaccctagccctgctacaccgncaatnacgccgactacgcctgcagacgatgcttggntccgntcttaccagngcttgcttcctgaatcgcagtctcttctcgcttcccgccggtcagttataccggttncaatntctagagtgaatcagttcgacgcagcacgactagatgtggaaatgtcagccattgttgaaggancagntcgttaaggtttt

SEQ ID NO: 134039 - DNA, 508 bp, Arabidopsis thaliana columbia
  unsure (1)..(508): unsure at all n locations
gtgnctctaatcattttattaaaataaaatgtacatatatgtggaaatcaaacactggacagatcacctggaaggtaggatcaatgtgcaagtgggacatgagacacaagaacatgtccttaacaaaacaaaacaaaaatacacangaacatgtcccatattaagatactgattagtcaaaccgagatattgctcttaattcttttggactgaaagatggtaaacaaaggatatttctcatttacggtgaaaacgtataagccacatttcccagtattctcgatcaactccaaatggaagatgctaagtggtaacaacaagggctttnagnaaagnaaagnaaacccgcaaaggnaaaatnaattcaggaatgcccgtaccnagtatgtgtgtgtgtcttccaaggcttgttcagtcatataggccttctngttcccaatgtccncttggaaatccnccatttcggtggggggnntnggttggggataacttgttntnccnagaangt

SEQ ID NO: 134040 - DNA, 528 bp, Arabidopsis thaliana columbia
  unsure (1)..(528): unsure at all n locations
gcctgaaagtgttcctactcttaaggctaagaaaagccacttgcatgacttgctggctgatgatgtttttgccaaatccagtgacaaagagagggaagtaatggaaatcatctctaacaatgatgcatttatgcaagtcacgaccactaatgcagagtctttcgacgatgataactttattgacgctagggaaacaaaaaagagccgtaagaaatctgcgagggcaaaaacttctggtgcaaaaattgctgcacatgttcctgctgtagatacatccctccaaacaaactctgttgagaagggnaaaaagttctcgtattctgcagcagcaggngaagggaagtttttccggctattccttcttgggccttcttctgggnggatttttntcccctgggaaggngnggcttttaaacaaatcctccacccggcttgctgaattggcttnttggcccaaaaattttcaaaacctagntncgnttagggcancntnagggcngnnaggtnccgccttttttntnnncccct

SEQ ID NO: 134041 - DNA, 374 bp, Arabidopsis thaliana columbia
  unsure (1)..(374): unsure at all n locations
aaataattaaggaaagagatgtgtgcataagaaggcacataaagctaaacaaaacaataccaaatatgactaaaccaaaatttgccaaataagcagctatttctagttataacatcacgagtcaccagtcgatacattaaatttaaagttgcaactagaaatatattgaaaaacagnagcagtcacggagcggaatctctncatgctttccacctntggggatttgttcccggcggcccacccggtgnattntgntnccctnnttttttccgggattttcccctccttttttttcctcccntttcttcngggcacnccttgtcaaaaccggttttttgtttgtgggggngnccccaaatcttttttagatttgg

SEQ ID NO: 134042 - DNA, 244 bp, Arabidopsis thaliana columbia
  unsure (1)..(244): unsure at all n locations
tcgtctgtaagaaganaatagacaaagaaacttgccgtgttntataatctcagttttnagtgtttggtgagagagcaagaccggtacacaacaaacacacaagctactacacagagagagaagtgagagatagagagaaaccaacgncgtagntgatgattgatttctcttaccggtgacgngaatatataatcactgcgggtganagcttcaggttgggtgggtgtggnttaggtataagcnc

SEQ ID NO: 134043 - DNA, 509 bp, Arabidopsis thaliana columbia
  unsure (1)..(509): unsure at all n locations
agactnaacgagatcagagcttcgctgccatcaggaaagtctaccatggtgtcaaggactagcgatttcaggccatcaacaaagacctttagctttgctgaagaattggttatttcaaaatccagaatttctcccaagtctacgccaatagctttgagcatatcctggtgccagtaatgttttgggagtccttggatatcaatccaaaaggggatcttagaggtaaaggtgtcagagattgtaggttcccacttctgaaggatgaccatccattgatcatagtgattccaccggtttgagaggaaaggaaagagagnccataatccgttggatagatgggtttttgaaggcgatccattagagttaggnaattagcttcgntgagggctnagtgtccagttctggtcaccgaatttttctccgatttgtggggtagtccctnnctatcattncccttnannggnggggntnttganctatnttcanggngaaaggtttaagggggggaa

SEQ ID NO: 134044 - DNA, 544 bp, Arabidopsis thaliana columbia
  unsure (1)..(544): unsure at all n locations
gcaatttatacaatttaattaaaacaaaaaaaaacaccatgacctaacagattttttaagaaacaccttgttttatattactagtttaaacactatcaaacttatttaagcttataattaaagatgctgacgctcacatacatttcactcaacataccacaagcgtcgagtagttcgccaatcaaagcttggttcggcctcggccacttgctcttcgttgaaccataagcgtcgagctatatgcaaatcaatgcttattggctcactttcaggcacaaactcagacttaggatgttgaacgcatgcaaggtttggacctttaatgatcccgcttaggcccaaagngacgnatcggctttgccttattgtgtgggggttatttaaccatnggcttgggatttaagcagtttttcctgngnctcattagctaatttttggcngttaccggggtttttggtaacaaaccnggnttncggcaattcnttggttaanccgggcattngtnttatgctaataggtgnccttttgnngcccccccccccgt

SEQ ID NO: 134045 - DNA, 377 bp, Arabidopsis thaliana columbia
  unsure (1)..(377): unsure at all n locations
tgctctcttcctccacacttctggcactacgagccgtccaaagggtgtaccgcttacgcagctcaatctagcttcatccgtcaagaacattaaagctgtgtacaagcttactgagtctgattctacggtgattgttctccctctgttccatgttcatggattgttagctgggttgcttagctcgcttggagctggtgctgctgtaactntttccagcttgctggtagattntcagcaacaacattttggncagatatgnaggagtataaccgntacaatggnaatactgcttgtgccgaccanttcatnaagatcaanattggacccgcaaggggagcccaaccctntgnncgggattatncnaaaantcccgggtt

SEQ ID NO: 134046 - DNA, 525 bp, Arabidopsis thaliana columbia
  unsure (1)..(525): unsure at all n locations
aaaaaagagaaaataaaatgaagggatatttctnactaggaagtctcaaactccccgaacgacataagacattacaaaaggcgtgaaaacaaagaaagctataagtagcaaactgatgtaggggaattcaaaacatgagttgtaacaagaaagcaacgagaggttgttattatgtggctaaagcttttggatgtcttatggaccgagacgataaggtccatcacccatgtaatgaccatccatgtacagagctgcgtggtgcgggtgctgcagaccatccatcaccatgaactgcatgtnttcagatggtttccagtgacgntttcttttggtttatgaaccaattgttgatttgtttctgatctaacccgttggttccgncaacggtaccttcttttgctnagaagggtatggccncttgtaatggactccnccncgggggaggttttccggngttttttgggggttaccctcccttttttttttggtaggttttnttaannnnttagngnccctantnttttt

SEQ ID NO: 134047 - DNA, 551 bp, Arabidopsis thaliana columbia
  unsure (1)..(551): unsure at all n locations
aatctccaatgtctatcagttactggggattatatggntctacctcagagcctcgtttatttgccccctaaactcagattgctagactgggataggtgtccattgaaatgtttgccttatagttttaaggcggattacctcattcaactcacaatgatgggaagtaagcttgagaagctgtgggaaggaactgtggtacttaattcttcattgaaatagttgtcaatttttagaacagacctgtggtaaaaattaatctatttgaaatgtttatgaaatgtgtgtattatgtttttccctattttgtttttcagccacttggangnctcaagaggatgaatatgcatggttccagatatttgnggggaatttcagatcctttctaatgccagaaaccccgggggntttaaanctttcnggatgcagntctttgggggcactttttcccggttcagaatnccctaaactggnctttttngnattnnggggtgncaaagcttgggggttccacccancnaacttgntcntttngggcccggnnctttttcgga

SEQ ID NO: 134048 - DNA, 521 bp, Arabidopsis thaliana columbia
  unsure (1)..(521): unsure at all n locations
aaatctgcaaccttttggaattagttatcaagctcctccttcaaatatggactctgaatatatgcctgtaatgaaaatattgcgaagaagcgaagatagtttgaaaaaagtcgatagtttttctaagtgggctattaaagaacttggggagatggaggatttgcagatgcagtcttcacgtggagatattgcatggaccactgttgaatgtgaaactgcagcagctgggatctccttgagcccttctctctctgaggatcagcgtttcaccatagttgatttttggccaaaaagtgcaaagacagacgcagaagttgaggtcatggttattgggccatttctacttagtccgcaagaagtaactaaatataattggtcatgcatgttttgtgaagtggaggtnccgctgaggatttagtagtggggtcctttctgcatgntccccgatncagctgcacgnccctttatgtnatgtccacantttcttcagtnagtcgggattgttccttctggttccntgc

SEQ ID NO: 134049 - DNA, 504 bp, Arabidopsis thaliana columbia
  unsure (1)..(504): unsure at all n locations
aatcatcgcaaattatagtctttgtcctttcctcttacaaacatatacaaaacactcttgaccatacaaataaaatggaccagtttctgaagtcaatacagatataatagtgtaggtaactcactcttcaagtttcagtcaatgatgttgcggctgttcaattggtcctcgaatcggctacacgaaccaactctcatctctgtgctcatatcgttctccggcgccggataatagtctgctctaagctgtacatcccttaagtttgggattctcaacaaaaagttcatgnaatgctcatgagctgttccattggatgaccagcttnctcaaagtcaaggcactcttgtaacagacctgntccagggagcggggagnctcctctggtaanatctttatcctgtggtggccaatattaaggttggtcaaggtcaaggttccaattccgggcaaggaggatntttccntnaattaaatncatntgatttggggnngggnagtgngnnc

SEQ ID NO: 134050 - DNA, 450 bp, Arabidopsis thaliana columbia
  unsure (1)..(450): unsure at all n locations
aagaatgtaagatatatctggtagctagtaacagacaaataaaattttgttttctcctaatcaccacgtgaataatgagctctacatttacggtttaatttcaatgtatactacaattttcacaaaaaaagaaagaacagaataatttaataaatttattggtgagtttgtttttggcgatggggtcatgcttcttctgtggatgtcatggaccatggtgtcatatccatggggtaacttcccagcacccttaggaacgacgtgtactcttgaacctccgcaagcgcgttctgtgcacgnggnttagccatcgatgcctcaaaaatccacgnnaaaacatgtactcgaagttcttggcgtcccaaagntcccgtaccaacaacctagcgggcggtatggtaggcggnctcgtnttggcaagntatntttgaagggaaccgtgggcttant

SEQ ID NO: 134051 - DNA, 533 bp, Arabidopsis thaliana columbia
  unsure (1)..(533): unsure at all n locations
aactcactgggtctggtctggtgatgaagcattggagctcttggaatactttgctattgctgtgacaatcgttgtggttgcggttcctgaaggattgcctttagctgtgactctaagtcttgcgtttgccatgaagaaaatgatgaacgataaagctcttgtgaggcatttagcagcatgtgagactatgggatctgcaacgacgatttgcagtgacaagactggtacactcacaaccaatcacatgaccgntgtgaagtcttgcatttgcatgaatgtgcaaagatgtagcaaataaagggttctagcttgcaaatcagnaaatcccggaatcttccggtgaaggttgttgantcaatcgnttttncaaataacancaggnggcngaggttnttttnaancaaanattgggaaaacccgcgctttttggggcngccaccaagggctttctttntnnggttgggggttttcctttgggggaagtccnanaaggggggggtttnaaagggncaagttgggcctttacncccaaa

SEQ ID NO: 134052 - DNA, 516 bp, Arabidopsis thaliana columbia
  unsure (1)..(516): unsure at all n locations
aaaagccttatttacatacatacaccaacaaaccaaagacttaaccattgatcaaacacatttatttatctcatgaaacaacaaaccccaacctaatcatatactacactaagaatcctctctaacaagcattcaatagcaacaagtgggtactacaaaattacccttacacaatagagtttacaactacattcactagagaaacttgtgtgaaaggtttaacactttttaccgcggcttatactatgatcgtggttttcgacttttcgcagtattctccggtgtattagccctaaagatgctgacttcaattcatggncattctccaactttctccgttagngcaaccttgagttggtcttgcgtgnaaaatgattccccattttcacagtcggcttnttggtcataaggtcattcactaccggtaaanctcgnatgnntcacttccaaatccactccttaggggtccatggnctttgnncnggnggttcccnttnctncatggntcctannatg

SEQ ID NO: 134053 - DNA, 477 bp, Arabidopsis thaliana columbia
  unsure (1)..(477): unsure at all n locations
gtttggttggggcgtggatgttcatgtcttcatggtctgctccaactgagtctattgacttctctgcaaacgagaggacaaaagatgtagatactactaagagtgatttcaaaagtgaagaggttgatcgaggttccaagagttttccggatgaaaagaatgaggagacggaggttgtgacagagaccaacgaagagaagactgatcctgagaaatctggtgaggagaactctggtgagaaaacggagtcggctgaggaaagaaaggagtttgatgacaaaaatggtgatggggatagaaaaaatggagaccggtgagaaagacacggaatcagaaagtgatgnaaccaagcaaaaagngnaaccccaacttgangaganctcagnaggtaaccaatctgngggtagtaattggncccgngagaattcttggtnatnttnaggaaaccacccngnagnagtctgaggnancnctngt

SEQ ID NO: 134054 - DNA, 385 bp, Arabidopsis thaliana columbia
  unsure (1)..(385): unsure at all n locations
tgcttcttcagtacgctacggcaaatgtcatcgacgtttttatccggaaactgctgtctggctttttttgatttcagaattagcctgacgggcaatgctgcgaagggcgttttcctgctgaggtgtcattgaacaagtcccatgtcggcaagcataagcacacagaatatgaagcccgctgccagaaaaatgcattccgtggttgtcatacntggtctctctcatctgnttcttgcttncggcaccatcatttccagcttttgtgaaagggatcggctaacgnatgaattnctnggctgttctcttggatttgcacaaacctgattccatttnagcaaggnatgtncatcncggtactnggtnttaacnaacanaaggtnttttt

SEQ ID NO: 134055 - DNA, 429 bp, Arabidopsis thaliana columbia
  unsure (1)..(429): unsure at all n locations
ctttgtactacacattttgtaatccactatatgcttatgctgtattatactctttgcttatagagcaaataaggagtttactggacagaaaacgtaacgtacacattaagaagtggtcagagaatttgatcacacttgtggtcgtgtctggacgacatagagcttcccgtctctgatcacaccttcaatgtcctgtgcagttccatagagtttctcaatggcatctccagcgcgtgcaatgtctgaggagacctttttctggaagctcaagtcagtgatcagagggtcntgtttgtgtaatcggagcaacgggcttnggnccttcctcggcccattngnacaacttntcggtagngggccttnnacctngaataanctttnaanantcttntccatttggaatcaagatctnaanggtggttttaacgg

SEQ ID NO: 134056 - DNA, 388 bp, Arabidopsis thaliana columbia
  unsure (1)..(388): unsure at all n locations
aattcttttttttttttttctttccgatgcctccgaccaataattaccgaatctccggcgaaccaccgtctactacgccgtctcatccaccgccaaaaccgaaaacaaggattctctctctattcctcgttggtgtaatcatgttttcaatcttcctttctcttcctcgttcttatcggtatcgcctctggtcttattcctccctntcctcctctcttnttntccatcgtcaccaccgacggtcgtgtngtaaatcgccggcaaagaatcctcaagattgggttatcttcaaggattcgtgaaaaaggnttcctcaaattcaaatttttccggaaccttnggancntacanannggtacggnggggcggtttnntntgggttggtttt

SEQ ID NO: 134057 - DNA, 519 bp, Arabidopsis thaliana columbia
  unsure (1)..(519): unsure at all n locations
gtgcaaatgtaacatttaacgaactctaccgaaaactcgaatctttttatttgattatacaacagtgaccaacaagatgagagactgaaaacacattcatggtttggctagtagagaaatctcaatctcttgaagtgtttttcctttggtttcaatcacgttccgcttcacgaacatcaccgccattaaacagaacgtagaaaacatcgaatatagtagccgaggaccaagcttctcaagcaatctcagaaagagtaaacccacaaagaaatttatcacccaatgcacagacatgcagaaagccatcgctttttgctctgaattcgacttgggaagntctcagggaggagtaaacctnggncttggaccagctcctaaggcggattnttagcacaaacacaagggngncaccgncagcaancacanggcgaaaattnttggaaggttgacttttgncccanttgangnccattgttgntncntgccataaaattncaagggggggngtttttctttgaa

SEQ ID NO: 134058 - DNA, 491 bp, Arabidopsis thaliana columbia
  unsure (1)..(491): unsure at all n locations
gcatagctggnactagcggctttcacagacctccagctcaattcgcaacaccgaaccaatctttttcgccagctcagtctcatcagttgtcacctgggttacacgatttccactggtcacgtacagatgcttttggtgacaatcaccagctttcacctcccttttcaccatcgggttctccatctactccaagatacatatctgggggtaacagtccgcgcattaatgtgagaccagggactgctccagtgaccattccttcttcagccacgttaaatagatacgtttcatctaacttctctgagccaggtaggaatccacttcttcctttttcccccaaaagcacaagacggtnccctttaatcgcaggaccctttgcctgggattgcgttgtacaggagtnttnaagcggngagnttccttctggnttaatgaccagnaccctcttaaaagntgtaaaggcagnaancggttaggccgttttaggggtg

SEQ ID NO: 134059 - DNA, 379 bp, Arabidopsis thaliana columbia
  unsure (1)..(379): unsure at all n locations
ggcgattttcaagtttcctgagcaacaacaacaacaaacgatgcaatcagttagggaagatgaagattcgtcttctccgattcatcacgactctaaaacctcttcttctatcccttccggtgataataactccgtctgggccgatgtatcacctctcctctccgccgnctgctctgatcttcaaggaaggtgaacctcataaatggagataatttcaaatctttttttgctgccatgtctgctttngnggataattggnccccaaagatggattntgggattggnggcctancggttttatttctatangatgnaggccatnggaaagtgggttttttggccggtcccnnataaaggttnggggtnagnaccttgttaa

SEQ ID NO: 134060 - DNA, 510 bp, Arabidopsis thaliana columbia
  unsure (1)..(510): unsure at all n locations
ggattcttcagtgaggagaggaaatgtcggatcttcagacaccgcttgtnaggcccaagaggaagaagacttgggttgattactttgtcaagttcagatggatcattgtcatcttcatcgtccttccattctcagccacattctacttcctcatctacctcggggacatgtggtcagagtccaagtcctttgagaaacgtcagaaggaacacgacgagaatgtcaagaaagtcatcaaaaggcttaagggtagggatgcttccaaggacgggcttgtctgcactgctcgtaagccctggttccgctgttggaatnaggaacgttgactacaagagagcccggcattttcgaggttgactttgggggangtcccgtaaacatcctttgagntccaacaagggngaagnntgncttctnngagttggagcctctttgttaacattgggncaaggtttcccgtggttaccggncccattnacccttttttttncngnttttncntgngcttna

SEQ ID NO: 134061 - DNA, 511 bp, Arabidopsis thaliana columbia
  unsure (1)..(511): unsure at all n locations
aaagaattcatggaggcgttggctgctggagctgatgttagcatgattggacagtttggtgttggtttctactctgcttacttggttgctgacaaggttgttgttactaccaagcacaatgacgatgagcagtacgtgtgggagtctcaggccggtggatctttcaccgtcaccagagacacctctggtganggctcttggtagaggaactaagatggtcctttacctcaaggaagaccagatggagtacattgaggagcgaaggcttaaggatttggtgaagaagcactctgagttcatcagctacccaatctctctctggattgagaagaccattnagaaggagtctcttgatgatgaagaggaggaagagaagaaggattaggaaggcaaggttnaggaagttnatgaggggnagnaaaggagggnngaaaanaagaggttaagggggttctcatnagtggntttgtancaacagaaccccttttgtttggaccnaggggcnccanng

SEQ ID NO: 134062 - DNA, 465 bp, Arabidopsis thaliana columbia
  unsure (1)..(465): unsure at all n locations
aaagaagattactactattncacaagtaaacatacacccaaagcccaaattccaaggcccaaagcccatatccgaaagggcttcttttgtaggtttgtttattgtgtacatgaccaagtactggngagagagccaacagattagtgctctctcaatcgttcaccaaaaattcaaccaaaaaatatattttaagatcaagatgagtgaccaaaaaaatagcctatgtttctcttatgtctatctgaacgtaaataaagctgaagaatggtttntgtgatagagacacagaactcaagtggagggtttcaatggtgggtnctactcagtgacgtttcatctcctggnatattttggaaactcgcgggacagtntttgnaggaacttaacagcnagaggttnacacagngtcctaatacgggncttggngtaaaatggtatagtggttnnacttnnggccntatgtnc

SEQ ID NO: 134063 - DNA, 509 bp, Arabidopsis thaliana columbia
  unsure (1)..(509): unsure at all n locations
aagcagattcgtttggaaaagacattagcagtggatattgcatgtcaccaactgcgaagggaatggattcacagatgacttcaagtttatatgattcactgaagcagcagaggacaccgggaagtatcgattcgttgtatggattacaaagaggttcgtcaccgtcaccgttggtcaaccgtatgcagatgttgggtgcatatggtaacaccactaataataataatgcttacgaattgagtgagagaagatactctagcctgcgtgctccatcatcttcagagggttggggacaccaacaaccagctacagttcacggntaccagnttgaangcaatatttaggcaattttngcaaaagaaaggcttttaagccttacaatccccgttggggngtccccgccatcggggtctttttggggtttgtacaattgngnttttncacaagaaantttnntttggcctttnaanaanagncccccgattgntttanccctnggcccannccct

SEQ ID NO: 134064 - DNA, 539 bp, Arabidopsis thaliana columbia
  unsure (1)..(539): unsure at all n locations
ggctgatgtcgctgctgctccggtggtgaaggagaaacctattaccgataaggaggttactattcctacccctgtggcagagaaagaggaagttgctgctcctgtctctgatgagaaggcggttccagagaaggaggtgactccggagaaggaagccccagcggcggaagcggagaaatctgtttcggtgaaggaggaagagacggttgttgtagctgagaaggttgttgttttaactgctgaggaagttcagaagaaggcacttgaggagtttaaggagcttgtaagggaggcttttaacaaacgtgaattcactgcttccggtgangccgggttaaggnaggggaaaccaganganaagaaaccagaggagggaactaaagatggaagggaaaacagaggtgatgnaaggagggccaacgccttnaggttaaggtttaanaagggaanccggcggtcccaaccgcngngggngggaattatctaagnttttcccgttnnnnccaatnttggggganccnttacgnaaccanggtaca

SEQ ID NO: 134065 - DNA, 526 bp, Arabidopsis thaliana columbia
  unsure (1)..(526): unsure at all n locations
aaagagttaaaacagtgaagatttgtctatatatgtgagaactcaattttcacatatataaaaccaatctacagatgtccaaattctctaccaatttaaagagaccataagaccatacattggtggttctccactacaaatactgaatggtganatttattgacaaacgactaaactagtaaaagttgtatatagacttctctattctaattctctaaccggttggtataacttggtttagccaaactgaacccatttacttagacataatgcaatgttcaccgttgctttcagaatccttttgagnattgggatcttgatgctacaaaaaactctgaaacggggggccttacactncttttgctctttcggaaccgcctctttcttncttctctggnttcttcatctttttcttcttnntgccgggaacggncttnntggnncccctcaaggtncttttccaggttttttttgnccnncncgnatgtcaggggttnccancccgtttttcnaggcttttttttgg

SEQ ID NO: 134066 - DNA, 481 bp, Arabidopsis thaliana columbia
  unsure (1)..(481): unsure at all n locations
atggagggagtgtgagcgacangttnttgggaagcacaaatcggcatcaccagtctagagtctcgggattgtggactagaatgcgaaggtaagaaaaacaaaaggtggtgcaagtgcaaacgnagctgaaacaattctnaagatgccttttttgtggaagtctcatcttcgtcacatctaacaaagaagttgtagatttatgggatgatgcttactctgctggatttaaacacaggtancaacagatgatgctactaactagttttcctctacctttacacaaactttattgagaagttagggcggccgcgaatttgattaagcttacggagttaattncaaaaacccatcttgnacacaaagcttncctccttacaatcttattngtccnttatngttcaatnttnaagctttttccagnatctncngggtcttcctgttttaaccccaacatttggcatntnanggggcctttttgggg

SEQ ID NO: 134067 - DNA, 457 bp, Arabidopsis thaliana columbia
  unsure (1)..(457): unsure at all n locations
aatgatctgcttatatagatggggaaaattcaatgatctgcttatatagatgggtataatttcaatgatctgcttaaaagaagctcaatgatctgcttatatagatgaggataaattcaatgatctgcttatagatggggataaattcaattatctgcttaaaagaagctctatganctgcttaaaagctcaatgatctgcttatagatggggataaatncagtgatctgcttatatagatggggataaattcaatgatctgcttaaaagaagctcaatggtctgcttatagatgggggtaaatccagtgatcctgcttaaaagctcaaatgntctgctttnataggatgggggtaaattcaatggtnctgcttatataggntgggggttaantncantgtcctncttantngatnggaaaaatncantgtcctccttaaanccccagngcctnctt

SEQ ID NO: 134068 - DNA, 370 bp, Arabidopsis thaliana columbia
  unsure (1)..(370): unsure at all n locations
gtttggactttggatcgaaaaattgaaaggtaaaagaggtagagaagctctggattccgtctcttcccgtcgtcggcgacggtggttttgcccgttggctctgaggttatatcaggctttaatttaagtggattgtcatcttctgagatatggaacaaggttttttcttgccaagctgctaccactatcgggntttctcaattccaagaagncgttcgatttggcggntttccttgtacggtcctgaatttccttgttgggnctcttccggtaaactgnnctttagntggcaaaanccccnttcctaatgatcctttaagggggaaggttttnggcaaaattntttnggnaagggcttaaagctttnaaa

SEQ ID NO: 134069 - DNA, 248 bp, Arabidopsis thaliana columbia
  unsure (1)..(248): unsure at all n locations
gtgaactgtaaaangagagacgaagcccttatttacacaagaggaaatgagtatgtttcctacattacaactccactcggtagaagcgaaccagtttcatcatctgcactctctcctcctgaaccggaatctgttccgtctcctcagcctgctgcggaaaatgaaatccggttgagcaattcttcantctctccgggtttttttaaccccntgntttttctncctacaatttactntttnancctggg

SEQ ID NO: 134070 - DNA, 247 bp, Arabidopsis thaliana columbia
  unsure (1)..(247): unsure at all n locations
aaaatatccaaccagataatgaatttcttcaagtggtcaggttgaatttagttactaatttaacgacgttttattatatatcaaaccccaacaagttaaaaaaaataaacttggttgccttttcagtaaaaatgtgcttctgaattgacacaatcgtcactgtgatcagagtttgatttgaagttgatgctttgttcttcctgcttncttaaccattnnccnntgnttnannaagcagggtttaaat

SEQ ID NO: 134071 - DNA, 506 bp, Arabidopsis thaliana columbia
  unsure (1)..(506): unsure at all n locations
aattcttgtttgcaaacagaaaaaatgtaaagaatgtcgtaatttgaataaccgttgcactgctaagaaagtcgcagaagtctcccattttcatcgtcttgatttctctccagaatctgcaagcatcagtacttggatctgtaaactattaaaaaaactgtacttagtgtcgatggtgcagagaagcaaactcgttgacagtttgctaattttgcttcttttcttttgagttatttttttaataatggtttttgacaaacaaggagccgttggtcactaccgtcttgaatatcgatgactctttgcttnccagcgtacacgngcagcaagtgtacggggccatctctatcaactccaagntttttcactttggacaacccatncctnaagggcggnggatccggtccntttccaagaccaagtccntnaggntgaccgttctgaggtaagnttttttngaggtcattggatnaagnttncanatgttcgggnaggtngggnttgtc

SEQ ID NO: 134072 - DNA, 432 bp, Arabidopsis thaliana columbia
  unsure (1)..(432): unsure at all n locations
gaaaatatttagagtctcttgcaaaggggaaaacctcggatgctatgaagaaactagtacaacttacgccagcaacagcgattttactaactgaaggcaaaggaggaaagcttgtaggggaaagggagatagatgcattattgattcagcctggtgatacattaaaagttcatcccggtgcaaagatccctgcagatggtgttgtggtgtggggttcaagttacgttaatgaaagtatggtgactggtgaatcagttcctgtatcaaaagaggttgattcaccagtaatcgggggtactattaatatgcatggtgctntttcacatggaagnttccaaagggtggggtccttattgcagttcttttgcccagttnnttnattttnggccgggncccnccccannntnnaaangnncccttttnagaaatttt

SEQ ID NO: 134073 - DNA, 511 bp, Arabidopsis thaliana columbia
  unsure (1)..(511): unsure at all n locations
aaaggagctttgcttttgtaggaattaatggattcagtgaactccttcaaaggatatggaaaagtagacgaagctcaagatttagcattgaagaaaaagacaagaaaacgtctacttctactatccatctccgtcgtagttctcatcgccgtaataatcgccgccgtagtcgccaccgtcgttcacaagaacaaaaacgagtcaacaccgagtccacctcccgagttaacaccatccacttcactcaaagccatttgcagtgtaactcgtttccctgaatcttgcatttnangtatctcaaagcttccatcttccaacacancagatccaggggcttctattcanggtctcattgaaagtaatcatcggttgagcttgatnggntttccgatttnccggggaggttttcgaaaggggctttnggcggaaggttcaattctgcgnttaggggttttggggtntttncgngttntttnggnngcttacggcactnttcncccttttttccggg

SEQ ID NO: 134074 - DNA, 532 bp, Arabidopsis thaliana columbia
  unsure (1)..(532): unsure at all n locations
agcctgnaggggattcacagaattacagacacaagccattattacatgatgtgatgttttttcactcttctttactgacaagaccaaaaaacaacataaacattaacaagagagaaagacataaaccaaagacaaaactgacaaaaatttaggttccaaaaccaatgaattatgactcaaaaaagaatagagatcaatgaagaaagttgaaaaggaaaaacaaaagaacaaaaagncacagtaccttgtcttgggtgatttatttgntatcattaatcacctctcaacttcttcacttcaactcttctttctctattcactttccaggnacaaatcttggtnagtttaaaagtgtattacctctttgcaacaccttcaagtgcaggatactctgttncngggtnttgattccaggtnatccgnttcttnttatcaggttctcagtttcactttcgtnggggggatntttttcccggcntgcagtntngacggcctggccgtttggccngngnataanatcctagcgggggnc

SEQ ID NO: 134075 - DNA, 542 bp, Arabidopsis thaliana columbia
  unsure (1)..(542): unsure at all n locations
ggagnattcttcctttccccagatttttcgtttgaagaagaatcgaaaaacttagatttttggttttgctttcggagttattcgaatttgaaatatctgaatctgttgattcatttattctccgcatgaagctgtgttggtgaagtttttcggagatttagggtttctnagttgttcctcgtttggttggtgaataaagcgaagatgaacgtnatgcgtcgtctcaagagcattgcttcgggtcggacctccatttcttcggatcctggtggggactatgcgttgaagagagctaagctggatcaagagaacgncaactttgtgtgttgatcccaatgcaaggttgaccaaaataagttctttgttttgagatgaaagtgacggtttgtcaacaagaaagttgttcttggaccgcaaatgtgccncctgtntcggaaaaanccntggggtnccaanntcccgatnttatnnccgaaatnaggtngggcgggggaaattccaaccngggggtaagggtttggaccactttttaacggngnngc

SEQ ID NO: 134076 - DNA, 544 bp, Arabidopsis thaliana columbia
  unsure (1)..(544): unsure at all n locations
aattctctattcactactaatcattgttccaattcaacgccggtggcttttaatcggcgagacactctctgatttctcggtctccgattaactgatctaggtttttttnggggaggagaatgcaaaggtagatgatggatagtggtaataataatatgaatagagccaagaggaatttggatgggaacgatgatgatcagcctgagcgaaaacgccctgcttttgctagtgtgattgttgaggctctgaaagtagatagtttgcagaagctttgctcctctttggaacctattctccgccgagttgtcagcgaggaaccttgaacgtgctttagcaaaacctagggccctgctaaggctttacttgaaagttccgggctcttctccaaagcgaattnaaggncccgattggccgaagttacaagttgcncttcaaatctagggtaacnntncccgtaattcnctggggggaaannagaagggngcaaagnncttggatcaaggngcttngnttnnnaaacatgccngncttggaaatgcccagg

SEQ ID NO: 134077 - DNA, 532 bp, Arabidopsis thaliana columbia
  unsure (1)..(532): unsure at all n locations
caaaaaggccactcctttgcttatctttctctctctctgcagctgaagaacagagaaaaagggttttttattgtctgacccaaaggacccagtttcaattcagcttttgttgttagaaattgaggtaaaagattcaaaatttgttcagaaaagtggcacagattctgaaaaattaatatctttcttctcactcttttagctcgattctaagcttaaatctggtttagggtttttggagtttgtactgataaagcatgatcctttttgtcttccgttgactgattctgttccttttctcaatatattgatttgggcttctcttgttcttcatcggaatcattggtcttcaaggtgaatgtgtttgtgtagtggcaagtctngttggtttgtagtggttttgancttngaggtttctgnntagtgagtgggggtcacaagattnngaggagatgnttaagtcgnaanatnagttcacagagangggancnnaaccatntncggaaaacccctnggntngggtngtcaaacccaa

SEQ ID NO: 134078 - DNA, 513 bp, Arabidopsis thaliana columbia
  unsure (1)..(513): unsure at all n locations
aatattttcataaaccactgatttgtctatgatcaggttatagtttctttccttcttcttcctctatgtttctgcaacttttaccggaacttcaaaattttgcgggaaaaaaaaatcgaaactttttctttctctctacgttgtctcggcggttacttgaaattgattcgttgattgagtttaagtaaccctaatcattgctgggtttcacttttttcgatttctttattcgggtttgaagttaacttttaaaaacctttctttcaggaattttgtcgnacaccttcaatggattctccttcatcagtcgtttacggttggttcatcatccaaaatccaggaacctttcaatnctaaatccaaaggttcggttacaactttctaaancggttcaaggggcnccaggaatcaattgaggcggtnttaatnccngaccngnaccaacttccctgangtnttngaagcctgnggccccngtttaggtgatcnggnncnatttggttntcgganggg

SEQ ID NO: 134079 - DNA, 508 bp, Arabidopsis thaliana columbia
  unsure (1)..(508): unsure at all n locations
aaaacactcaggaggagattagatatgcatccatatttacagcttcagaaaagagttcaacagaagatgtaaatggatggatatttnatcgttactgaaatttgaaaacgaaaacaaaagcgataaggaaagttacaagcaaagaacaaccagtgactattttatatcaagccagacccctttncttttggggactacttgtttgctgcagcgagttccgcagtgataatgaaacttgatttcccagcttgtctcaagtactgaacatctccattcatcagcttcaccagtttccggctaaccattaaagctcaaatccttcttctgacacatcttcctcagtcccaaaccatttggtttagtaaaactcaggtatcccagcttcggtatgcgtaacctgatccctaggtttgnaagntgacagaacggcccngnttgtccttcctcagggagntgaacagtagntgccnccgntgggtaaggttnagcnnagatgaatttcaaggtc

SEQ ID NO: 134080 - DNA, 515 bp, Arabidopsis thaliana columbia
  unsure (1)..(515): unsure at all n locations
aaaaataattagataaaatggattcgaccttgtcacttgctaatgagagcacaaaatcaggataaatcccaataccaattatgggtaaaagaatagagattgaaagaaataactctcggggtccagaatcaaaaaaagaaaagtttttgatattaattaacttgtatccatagaacatttggcgtaacatagataataaatatataggagttaatatcattccaattgccattacaaaaataatgaaaattttggaaattaagaaatatttttggctggtaattattccaaaaaaaacaatgnattctgcaataaaaccactcatgcccggcaatgcaaggggagccatcggttaaaatagtgnacntttgtaaatantttttgggattggggtngccnttccacccntttcatcaggtaaacaggctaattctatcatactngtccntccnggnaaaaagtncgngccnttatccctgggatttttntaaatggccctttgcccggccgtttgc

SEQ ID NO: 134081 - DNA, 524 bp, Arabidopsis thaliana columbia
  unsure (1)..(524): unsure at all n locations
aaacgcccacagcctcctattcatgattcaacaaatagaaagcataaatcatttgacaaaataattttagccacaagggttagcccgcttttagcaccctctaatagcataatattctacagttatatctcctattttccaagaggaggcataggctaatcaagcggtcgtcaaaacttcacgggctcgcgagctacgatgttggagacgacggtgaagcacctcagacatctcagtgtagaaatcagcatcccatctctgaatcaacaaaggatcttcagcaaaacatatgtatatcgatgtcacagcgcttttngactaccaccattcctaaacccacaaagaccattcccatcaacatngnccgtagatgaaccattataactcggtcactgtcttgatcccaggccatnttccattgcaagggcctgtnatgggcctccaangtggttccnttaggagtnagnaccngggggtcnttttgaanaagngctnttaacctntgggctgaaaaatttcttgta

SEQ ID NO: 134082 - DNA, 505 bp, Arabidopsis thaliana columbia
  unsure (1)..(505): unsure at all n locations
agaacattgataaaaccacagactctagtaaaacagtcttatcgttaccgaagtttgtaccaatgaacacacaaaaggagacgaagattgcaataattgggtggtctttcagagctgatgtatcattctaaaccgttgcgtttgtcagatctttcactgccacaatttcttgaggctcagctagctcctcttcatgcttgacgatgaaagctgtatcaacttttccatttttgaaatcctcaacatcaaggataagtttgtggtaattgatagtcgttggacccctgtaatgatagtgtcattaagcggccgcttcatccgttcaatttgcttttttccctcggttggggccacacaataaggtttcccangnaggngattcatagctttggnggacaacatagtcgganttggcatgggtgtcattctaacggaagggcccncagatggaaggntngtgttttttcnggcccggttgatncttaangggtntnttcnttnatnt

SEQ ID NO: 134083 - DNA, 408 bp, Arabidopsis thaliana columbia
  unsure (1)..(408): unsure at all n locations
aaagcattattaatcatacaaaaacaagtctgaaataacctgaataggcagacaaatacattacacttgccttgttctatggtgatctcactggtttctttctttttaattttgtatctctctcagcaaaagcattgaactagcacagctccacatttcacctggaccataatatcgaacaatgcatgtnttttgtgtcccaaactcgttattcatgcctcatncnttcccagaggtttgggtactcacaaatccacccaagnatccaacaagntaaatcatttgaatggtttgtnaatctttttangttttcnttttcncttttaggaactttttttttntttcccctttttaaagncttttaggtttccataatttagggggnacctnnccaataggtttnggggt

SEQ ID NO: 134084 - DNA, 326 bp, Arabidopsis thaliana columbia
  unsure (1)..(326): unsure at all n locations
aaaaaagtcaaacaaataattaagtttgttgtagtaaaaaaaaataccaaaaaaacaaacaaagacataacagaatcttctctgaattcacctctgcaccagacttttgcctaatcaacaatgtcagatataaactatatatatatatccattctctgtttangcaagattagtatctttcttagtaacattgctttccagctttggtggncctgaaaaccgtcttacagtcttaggnggtccccgngaaggnaagnccgttttttcggntgccttctctgaggcttgggggcctaagggttttngatncnngntcttgcnttttg

SEQ ID NO: 134085 - DNA, 496 bp, Arabidopsis thaliana columbia
  unsure (1)..(496): unsure at all n locations
atgnacctccgtgtatatactcttctgcggatagactacgcctttaagctgttaagaaatctcgtatatagagaagggactgtgacacctggcaatgatgaaacagcacatgttatagaggagcttgaaaacgaaaatgttgtggaagattttgcaaatataacttcgcctgctgggaagtcgtttcttatgaggctcttcagattgtccaagtccatcatctactagtcttccatcaggatcctgccaaaaatctgaagtttcagagcggtgtagttcagagagggagagagtntgggatctacacattctgtgagtaacaaaaagnccagtnttcaccgattataggttataagttagaccgtgtcttggattcaagtgccatcttggaggctttccccntgtgagtgaatnttggggcaggtggcaacangtgaaatttttnagggntgggcaantccnnggaagtgnanaggctttngcaacgggtntttgc

SEQ ID NO: 134086 - DNA, 505 bp, Arabidopsis thaliana columbia
  unsure (1)..(505): unsure at all n locations
gtncacgtccatcgtgtttatccctcggaaatcgcttctcagcctcagatatcacttcatctgcgattaacggcggcgagttttctnatttcgttagagctttcgcctttaattcgtcttcgtcctcttggtggtcgtctcccgatgatttgacggcgtcatcgaagaggaaagagaagaagactacagagcgtttctctgccgtgattgacgcagncattgaccggaaactcccgccggagctacgtgggcggcgcgatttcgtaagcgttttcttcttcacatgtcaatttcaagggtccaagcgcaattcaaaattcactggtttccatggtttttncggtggagttttttcaaggcaattcaagttcagagncttaagcgagttaacaaccaaagncaaatttctctctgtctgatgatnattcaagatnaggaacctgaactnangttacttnaggnttcaaagaagcaggngcctcacctcnccgnatgaccctttttc

SEQ ID NO: 134087 - DNA, 313 bp, Arabidopsis thaliana columbia
  unsure (1)..(313): unsure at all n locations
attagatcaaggctatcaatctttagggctcctgcagttaagtgtttaanatttagtaatgttttgcctagtttnagcaataattgtattgtncgactgtatatggaacctcccgtagcttgtgtgcttcctttaggtctgtgttctatgtnctctacttccatagctgattcanagcaagtgggatttactcggagtaacattgagaaagatgatgagagtnncattnatctttgggttgtagtataantanatgagcttgtttccanagggatngtttggaaaggtttccgaagcctggtgaaaagtttgt

SEQ ID NO: 134088 - DNA, 460 bp, Arabidopsis thaliana columbia
  unsure (1)..(460): unsure at all n locations
gaatncgtcaatagaactttgatagatccatttcaactagacttctctttactcacttctgaatctcccccaaaaaaaagaaagaatctagctctgaatttctcgattcagtttccagaccaagcttcgcatcanacagaacaaagtgtttcggatttggtgtttgctccggagaaagcgaagagagttgagaattttttgtataattnctgagattatatacatgtnatgtcgggatattcgtcttctgctggcctccgaggattttgcaggtaaagtttcccgattctcggatttcatagagctaaagttttggttctgcttcgtattcttaagggttaanggttttattcatttggatnttagcttcggncntgntatatattttnanccnctnggtagcttaaattttncctaatccacctgnttaagggntgttnaatctaaggctncaaaattt

SEQ ID NO: 134089 - DNA, 477 bp, Arabidopsis thaliana columbia
  unsure (1)..(477): unsure at all n locations
gttctttcataacctaaatgctactganaagcgtgaggttttaattggtgtgctgcaaattgtncgtaatctggatgacacatcacttgtcaaagcatggcagcagagcatcgctcgtactcgattatatttcaaactcatggaagaatgcctcatacttttcgagcacaagaaggctgctgacagcatcctcgggggcaacaattctcgtggtcctgttagtgaaggagctggatcaccaaagtactcngagcgactttctcctgctatcaacaattatctgtnagagggtttntcggcnaagaagtnaaggctagaggggaacaactgnttaattgggtaactgttggcagagaggttaaattntnaagttgggctttccntaggcaaacttanttttttaagngaaggtttaggttaaggaaaatttttnnggatttggnggtttagntangggaataagnggattggtggaat

SEQ ID NO: 134090 - DNA, 513 bp, Arabidopsis thaliana columbia
  unsure (1)..(513): unsure at all n locations
cttaagaaaaacaaaaacaaaaatcaaatgagctccttcaccaccaccaacactccgccaccgtatctcctccggaaaatttatcatcgccgtgtaaaccaaccgttctccgtcgtatgttgcaccggagaaccccaacaagacatcttcacccgccggagaaccttgacttcactaataacattcacggtcatcggcggtgctacgtcatcagcattagcacaggagaaatgggggacaaggtcattcataaaggngaaatattttatgccgggactatcacctgaggatgcggcggcgcgtataaaacagacggctgaaggattangagncatgagggngatgttggccacatgtcgtgggaggtacgttatattcttcataagnttgaaacaggcttattgtctcaggttctnaccaacgcatgacatntttccggnggtgccggattgttcgttaggggnaacgggttttggaacatnntngtggttttttttcggcgccaaggtntgg

SEQ ID NO: 134091 - DNA, 536 bp, Arabidopsis thaliana columbia
  unsure (1)..(536): unsure at all n locations
taatatagtaaatgacngctttgactattacacatccatctntgcacaagaagaatacaaagagaaaggtagatttttgtatggagaatcaatgggaggtgcagttgctttgttgcttcacaagaaagatccttctttttggaacggggctcttctcgttgctcccatgtgtaagatatcagagaaggtgaaaccacacccagtagtcataaatctactaacgagagttgaagatattataccaaaatggaagatagttcctacaaaagatgttatcgatgctgccttcaaggatccggtcaagcgcgaagagataaggaccaacangctgatatatcaaggcaagccaagccttaaaanccggactttgaaatgnttnagancgggcatggcccttgaagncacttttccnnggggtcacattgccttttttngcccttccgggtgaggaggcattttgncgttnccgggtnagaaagcnttttncgggngggatcccacgggcaaacccttaantttncccgggttggggtggt

SEQ ID NO: 134092 - DNA, 232 bp, Arabidopsis thaliana columbia
  unsure (1)..(232): unsure at all n locations
cgagaagattcgaaaccggagctaagctatgacgacgattgtncccacctccnaagaaaatccntttttngctgttgtccgattnatttcccagctcgcntggnccgatgctggtcccgaggcagcagagccagaaattaccaggctctgtagggaggctgaggagtcaatggtagcagagaagtggcttganttgttttcgtnaatggtcacttcagctgaattggtatct

SEQ ID NO: 134093 - DNA, 405 bp, Arabidopsis thaliana columbia
  unsure (1)..(405): unsure at all n locations
caccaccgtactctctccaacgaccatctccacctcaccgtcgacgtcaacactcttaaagtagattccgctgagattatccgacccgatgacgtcattagacccgatggtatcattcacggcatcgaacgtnttctcatccctcgctctgttcaagaagattttaaccgccgtcgtagtctccgttcaatctccgccgttataccagaaggagctcctgaggttgaccctagaactnaccgtctcaagaaaccatcttccgccgttcccgccggagnttctccggttctttcaatnttanggnggtatgtnaccaggnccttccctaggttctgttcaagtttccgganccggtgggtcnaggggggcntttaaagggggngtttnaaantaaangtttttncc

SEQ ID NO: 134094 - DNA, 505 bp, Arabidopsis thaliana columbia
  unsure (1)..(505): unsure at all n locations
tgttacattttcctagtacttttagttataagtttgaaatgaataacgtttttggtattataacagaaaggttacatggttcatgcgaccaagtcagccacaacgattccaaaagaacgcttaaagaaccgcatagtcttccatgatgggcgtttagcgcaacgtccaactccgttaaacgccattatcacatacctatggcttccttttggtttcatcctctccatcattcgcgtctacttcaacctccctttacctgaaagatttgtccgttacacttacgagatgctcgggatccacttaaccattcgtggtnatcggtccttcanctncttcccctnggactttttggnaaacctctatgnnccttaaccaccgtaccgngntttgatcccatcatcggttgctaatggtntttggccggaagaccttttnngtacttanaggggctntgggttttccctaatggnttntccaattccngntgtgccctaccgggccngng

SEQ ID NO: 134095 - DNA, 523 bp, Arabidopsis thaliana columbia
  unsure (1)..(523): unsure at all n locations
catgtcacgaatgggtnaacgtcgaaaagctcatcggaatggagaaactctgtcaaaactgacgaccctttctcaacgtcctctcgccggagttgccctaaatgggaatcttacaccgtcttccaaaagtacgacgaagaaatgacttttctcactagaatctctgctcaaaagcttcacgaagcagaatctttgaagtcaattatggtggagccaagatctatctcggagaggatcgttcacaagttatcatcaaacggtcacaagaaaaaacaaaaacaatatccaggcagcaatgggtcgagaccaaacccttacgtggaactagaatccgctttacgtgggacagatatgtctaacatgggaagcttctaagttngacttcaaaaactttcgggggaaaaggtcancnnggaccgagnttnaacggcgtggntntcccccggatttgccggccaattcgacggttanatnttttcaaaggtcggggnattgacctttgncatgnggggcccgggtttgc

SEQ ID NO: 134096 - DNA, 312 bp, Arabidopsis thaliana columbia
  unsure (1)..(312): unsure at all n locations
aatacctaagagtcgggggaaacccgtctgatagcgcttaagcggatacttcgaaaggggatccggtgcgcccccggcggcccttgaaaatccggaggaccgagtgtcgctcacgcccggtcgtactcataaccgcatcaggtctccaaggtgaacagcctctggtcgatggaacaatgtaggcaagggaagtcggcaaaatggatcccgtaacttcggngaaaaggnttggctnctnagggcttgggctcggggggtcccagtttccgaaacctnncgggntgttnagcggncttnttngagnttgctttc

SEQ ID NO: 134097 - DNA, 443 bp, Arabidopsis thaliana columbia
  unsure (1)..(443): unsure at all n locations
gctcctccttctctctataaaacaaagtcgccgccgttgttgctagggtttcggtcccagtgactttttcagcaccagaaccgaaattncttggtttcttcatgtttagtttttgttttccttcctctctgacagatctgaaccttttttttttccaacggtttcagatctaaaatttcagatctaaatctacaatttctaaattttnngtctttggattttnctgcttgtttttgtccctttaatgtgcagcaccagttctggccgttcgaacctcggcagaggcgagttctttnaccgccttcagaagtagatttctctcctttgaagatctcgancncctttctcnttcttatgccatnatcatttgggtcgcggggtgtttgtttgtcaccgccgtttntgggaaangagncnggtttnttgggttngtttncctagng

SEQ ID NO: 134098 - DNA, 480 bp, Arabidopsis thaliana columbia
  unsure (1)..(480): unsure at all n locations
cnagnagtttcattccatagaagaactagggttaggtgagatgttaaagatcgaaaaagaggaggtggaggaagaggaaggagttgtgacaagagaagtgcatgatcaagatgaaggtgatgagacatccccatttgaaataagctttgactacgagtacacacacaagaccacattcgatgaaggagaagaagatgagaaagaagacgtgatgaagaatgtnatggagatgggagtgaatgagatgagtggtgggattaaagangagangaaggagaaggctcttatgcttagattggactatgaatcagtcatttccacttggggaggccaagggatcccatggaccgcccgggtgccatctgaataggcctcgacatggtttttttcccacccataccntgggtgaaantgggcangggnnttnattaaaccatttccgggcctnggttancttgggnttctgggttgggaannant

SEQ ID NO: 134099 - DNA, 301 bp, Arabidopsis thaliana columbia
  unsure (1)..(301): unsure at all n locations
aaaaaatcatttctagtcattgtncattattgtttttggtttgtttgancttncttgtgtgtgtggaccataagangaaggaatggtgggaagcattgaggcaaagagtctgcaatcaaacgggtctntncatcatattggncttaatttggaggagaaacttgatgaatttngtcgtctttnggggaaatcagaaaaagatccgttaaggattgtaagtnttggtgctggtgcttggggaagtntttttccagcacttcttcaagaaagctattgggnggtttcagggggtaaagttcca

SEQ ID NO: 134100 - DNA, 500 bp, Arabidopsis thaliana columbia
  unsure (1)..(500): unsure at all n locations
cnttctcaaaaatcatctgcaggangtgaatcgtcaaaaccgagtttggaggatctgtcttgaggagtttttttttggttgagaaatggcttcgaaaaggatcttgaaagagctcaaggatctccagaaggntcctccaacttcctgcagtgctggcccagttgctgaagacatgtttcattggcaagctacaataatgggtccatctgatagtccttattcaggcggtgtctttctcgtaaccattcacttccctccggattatcctttcaaaccaccaaaggttgcattcaggncaaaagtgttccaccctaatgtcaacagcaatggaagcatttgccttgacattttgaaagacaatggagtcctgcactnaccatatcggaggtttnntttcggtaaggtcattnttacggncccaacccggtgatccttggtncnnnggttgctnncatgtcaaancgtngggaagnttngtttctncgggaggtggcttagaa

SEQ ID NO: 134101 - DNA, 535 bp, Arabidopsis thaliana columbia
  unsure (1)..(535): unsure at all n locations
cacacaaggggttacaagttttcaacatatgtgcagtattggataagaaaatcaatgtctacgatggtgtcacggcatgcaagaggcgtccatattccttcatcaataatccgaactatcaatcatatacaaaaggctcgtaagaccctgaaaacgagccatggtataaaatatgcggctgatgaggagattgcaaaactaacaggccactcggtgaagaagattcgagcagctaaccaatgcctaaaagtggtcggttcaattgacaagaaagttggggattgctttactacaaaattcctgggatttacaccagacacaacgatggngagtcctgngggaggccgtgatgaggcaagagcgcgaggnggggccatccatgatcttcttagaaggggttagagccaagtgggnagcaagttattgtcctcggtattggcttaaagctncaggcccagtccctggagggtttgnagnttcttaaagttnaaagatngtnggagtcgncggggnatgntactnggcnccncccggc

SEQ ID NO: 134102 - DNA, 539 bp, Arabidopsis thaliana columbia
  unsure (1)..(539): unsure at all n locations
atttattgtagacgtgagcacagagaataattcgtattcttcgtctttcgtccaccaccatctctatttttttcctttcccctaagtcttggttcttcttctctctaatacgagaagaaaaaggcgaaaacctcgccaatccgattacgcgaaaaatcaaaggtttttggatatggcgtcgaagcggatcttgaaggaattgaaggatctccagaaggntccacctacatcatgtagcgcaggtcctgttgctgaagacatgtttcactggcaggcaacgataatgggtccttcagagagtccttatgctggaggtgttttccttgtaacccatccatttccctcccggattacccattnaagcctcctaaggtggcctttagggcccaagggtttccatcccaacatttacagnaacggtnggatttcccttgaaattttttaaggggnantggggncnttgggttaancatttcanaggggggnnttngnntttttttttttaaccggncccaaaccggggntnttttgggggcnna

SEQ ID NO: 134103 - DNA, 326 bp, Arabidopsis thaliana columbia
  unsure (1)..(326): unsure at all n locations
attctccgtcaaaagggnactgaaacgccgggaacagaagaatatgacaagttctttnaggaaggaatcttcagctgcatcggatgcaaaantcctctttataaatccaccacgaagtttgacgccggatgcggctggccagctttntttgaaggactccccggtgncattaaccgagcccctgatccanatgggagaagaactgagatcacttgtgccgtatgtaatggacatttaggccatgttcataaaggtgnaggttatagtactccaaccgatgaacgcntttntnttaacagcgtttcgntcaatntttaacccgncca

SEQ ID NO: 134104 - DNA, 341 bp, Arabidopsis thaliana columbia
  unsure (1)..(341): unsure at all n locations
cacacaaaaaacacaagatctaaaaaaaaaagcttttatcatttagaaaaatttggtttcgaattttttcgaagagtgaaaatggcgtctnatcaagaacagagttacaaagctggtgaaaccagagggcaaggctcaggagaaaactggggaagctatgggaacgatgggggacaaaacacaagcagctaaggncaaaactncaaggggacagccccagtcaggcccacaaaaggnttatggaaccagcttcntccagnttaaaggccagncggtttcaaggtngaccaacgggcttcagggggggnctttaaggngttccaaggccaaggccnnggngg

SEQ ID NO: 134105 - DNA, 538 bp, Arabidopsis thaliana columbia
  unsure (1)..(538): unsure at all n locations
gacaagaagcttctcagagagatccgtggaggagaattctctcaggcggatctgtttgtnggagcttttgtgaatcatcatcatcaatgggtttnttggaagcttttctcaattggcttcgtagcctcttcttcaagcaagaaatggagctttctttgataggacttcaaaatgcaggaaagacatcacttgtaaatgttgttgcaactggtggatacagtgaagacatgattcctacggtcgggtttaacatgaggacagtaacaaaaggaaatgttacaatcaaactatgggatcttggtggtcaaccaagattccgcagcatgtgggnacgttactgtcgcgctgtttctgccattgtgtatgtagttnatnctgcagtcctgacaaccctagtgtgcgaaaagtgactcntgatttgttngcaancttcgttaatggaacccnctntcgtcttnggacaggtttcaacctgggcntttnccaanaggcctnacagcggatgggcttcnanccttcnagnagggggctnctttta

SEQ ID NO: 134106 - DNA, 492 bp, Arabidopsis thaliana columbia
  unsure (1)..(492): unsure at all n locations
gagccttaggagcttaggacagtgtagagtcgattggtctcagacggatcaagcttatgtccttaaatccgatatccccgtggtggggaaaaataacgtgcaggtgtacgtggacattaacggaagagtgatggagattagtggccaatggaacagcaacaagaaagcggcgaccaacagtgactggagaagcggccggtggtgggaacatggctatgtccgccgtctcgagcttcctagcgatgccgacgccaaatacnctgaagctttcctctctaacaacgncgattactctttcttagagatccgaatccctaagntaaattctaagnacaaagttttaatctgatcaatgtcggccttgacgngtttnaacctttaggttccttttccgaaatttttttttcttnnggtnaacttttttttnnggtatgaanttntttnggggtgggncanaaatggttgntganttggtattttttcanccttaaa

SEQ ID NO: 134107 - DNA, 584 bp, Arabidopsis thaliana columbia
  unsure (1)..(584): unsure at all n locations
ttttcttcttcttccttctctcaagaacagattttttttaaacgagcttgatcaataaattctctcaagatctatggcggaagagcatcgatgtcagacaccagaaagcaaccgtntctntnttaacaactgtggcttcctcggcagctccgccaccatgaatctntgtnctaattgtnacggcgatctttgtctcaaacaacaacaacaatcctcctccatcaaatccaccgttgaatcttccctctctgtatctcctccgtngtcatcatcatcggagatctcttctccgatcatccctcctctccttaaaaatccatcagtcaagctaagaggtacccggagaaaaaggcgggtggatttcnnttgccggccggcggtggcaggaatcangcaaacaagagggcccgnattcgggtgcacggngggttttaggggaaccggggtcngggttaacccggntttaaaggtgcccggttncgggaccggattttttttccggggggtnaattggggtcccccggngggtccnnttgggttnnaggttcccggtttnaaattttggcccggccgggtgnaggggt

SEQ ID NO: 134108 - DNA, 518 bp, Arabidopsis thaliana columbia
  unsure (1)..(518): unsure at all n locations
aaaccgtttaacaataacaacaacaaaaagcttccttttttgttttttgagttttcgtcgatcgattggtttaaatcctgtcgtatcaatttnttctcgattctccgcgaccatgcaaatttagggtcttcgttttgtttgatgggcgcgaatatctcgggaggttcaccggagtttgaccggaacgatgacgtttactcgaggaaactcagattggtggatttacctgagaattgtgtagcgttgattatgacacggcttgatccacctganatttgccggcttgctcgtctcaacaggatgttccgtcggcgcttcctcagctgatttcatttggnaatcaaagttgcctgcanaattatccgtgttatttgcacaacaaaggtgttccgatgaaattacttcttnncgnantttaatnaaagggaaggatnttttattgnaaaanggttnngncaatccctaatncttttttcggcgggttgggaccaaaaggnaatttttttngggtnnggtta

SEQ ID NO: 134109 - DNA, 375 bp, Arabidopsis thaliana columbia
  unsure (1)..(375): unsure at all n locations
tgaaacgtatccagaagggaccagnccgtggaatctcactcangcttcaagaagaagagcgtgaacgccgtatngactttntacccgatgagtctgctatcaagactgatgagatcaaggtcgacaaagagactcttgagatgcttncttctctaggaatgtctgacacatccggcatctctgcagtcgagccacaacaagctatggcaccaatcgctgctttcggcggcagggcacccagaagnctactangatggcctcagctaatcatcagctacgnttggctctcttttttctaagttagggncanggaaaggcttgtgttggnttggntnatnggttcctcctgccttatggctttaaaccttaaatntt

SEQ ID NO: 134110 - DNA, 462 bp, Arabidopsis thaliana columbia
  unsure (1)..(462): unsure at all n locations
canaaaaggtatgaagcagcgcttgaacgaaaatcaaagatcatagagatcatccgtnctctgaatcttccaaacaatcctttggatgacatcgtcgatcagcttggaggccctgaaaaagttgcagaaatgacgggcaggcgaggtatgcttgtaagagcatcgaatgggaaaggtgttacatatcaagcaagaaacacaaaggatattaccatggaaatggtcaacatgcacgagaagcaactatttatggatggtaaaaaagttggttgccatttatttctgaagctgggtcagcttggtgttttcgttgcaagcaggttggaaggggcagttaantcaggaaaaggaggggtccncttgacnttnngggcttccntgggntcttatccgngcattccgnaatttggnaggcctccccngcaaaatccggcannttgnccntgtttttggcntcctttc

SEQ ID NO: 134111 - DNA, 528 bp, Arabidopsis thaliana columbia
  unsure (1)..(528): unsure at all n locations
tacaggggtagttcaagcaatagaggatttttttgatttaactccacagccttcatttattctccaggaagcacttcctgatatattggagaaaacacctaaagagttcttcgagaagaagatcaaagccatgagacgcaacgtcgagctttcatgtgagaggctcaaggatattccttgtctcttttgtcccaagaaacccgaatctngttcttatttatggttgaagcttgacacatcaatgttgaataatatcaaaaatgattttnatttctgcacgnagctagttagtgaggagagtcttatnccttataccaggagtggctctaggggcagagaattgggtgaggatatcgataggaaccgccggatcantggtcaagaaatatttgccaggctaaaaggtttctatgatcgcatgccatntccaaggaggtttcaaactcagtggccatncttanccaaangngggttnttcaccnntttngnggcctttcccaagcccntttaatggngganncntntttt

SEQ ID NO: 134112 - DNA, 450 bp, Arabidopsis thaliana columbia
  unsure (1)..(450): unsure at all n locations
tgctaattcatttaatgtgtgcatnactgtttaatcaggtctgcaaagatgcagtagactcacggtggaacaagctccaaagaaataaagatcttctgaagcgagaattaacttggcagtacgaattgttttgcccataattaccaataccattggctaactctttagttatgtgattttnatatgctatttnccttgattggtgatcatcaaagcagattcaaccatcatttaggaaagaaaggtatcagtggaaatatcagagtctcttatgaagncaaaactttntccatagaggtaaagatncctcaagatgcaacaaaccagtgctgttcgngatacctagagggcctttcagggtggggancggtntttcctcggcttttatggtttaaaattagcnnntcagantttgnctnangcccaatttnggcaattggccgggtttna

SEQ ID NO: 134113 - DNA, 511 bp, Arabidopsis thaliana columbia
  unsure (1)..(511): unsure at all n locations
gcttcctagagcaaaggagaaaaaaaatggtgaactatgtgctcaaaatcaccgctgatctcgagaatctcactaatctccagccttccggtggctgcnacgattccaacttcccttacctcttcaagttgaaatgtgaaagatgtggagaggtgactccgaaagaaacatgtgtgactttnaatgagacttttactcctccgggaggtaggggtacttgtnatcttgttcagaagtgtaagtnctgtggaagggaagggaatgtnactatgattccgggcaaaggtcgacctttaactctggaagattctnaggctggagaacatgcccctcttatggtgtttgacctgtcgtggctatgaacccattgatttcggnattttggtnggtattggaaagctcaaagctgaatntggancccaaattttgantgaggttnnattttttcgancggggggggatttcnnaaggttccggtttgaagggggattccccgnaatgtntngattnc

SEQ ID NO: 134114 - DNA, 484 bp, Arabidopsis thaliana columbia
  unsure (1)..(484): unsure at all n locations
gtataagtgcagaaaaactcaaagtggatttgaacatctatgtnatgaccatcaaacttttagcttacagtaagcgatttgcagaactgtcgctattcaccacaaacaagataatcgaaccatcaaaggaagtcgcgttccaacttctggatagtggtcgtcaaaatatccgggtaagaaaacttgggcttgatatgttgagacagctctccttgcaccatgattacatcncctcccttgtgcaagatggatactatcttgaagctctgcgatatgctcagaagcataaggtgccgagtgtgcgatcgtcgatgttcctagaagcagcattcggcgtcggaatgatattgcaagcatttggctgcaatttttaaagggggctttgtcgggaattgntttccccggggtttaaaagnaancctttcttgnntantttcanccnttttannggggcctntttaaantggcnacccanntttccnna

SEQ ID NO: 134115 - DNA, 539 bp, Arabidopsis thaliana columbia
  unsure (1)..(539): unsure at all n locations
gctgtgttcagggggacgtttgattgatcagatggtaaaggtgggcaggtattctgagcaacgagcagctaatatattcaaggaccttatgctagtgatcaattattgccatgagatgggagttgtgcatagagatataaaacctgagaatattctcctaacagctgctgggaagatacagctggctgattttggcctcgccatgagaattgcaaaaggtcaaacactgtcaggattggcaggaagtcctgcttatgttgcacctgaagttctttccgaaaattattcagagaaggttgacgtttggagtgcaggtgtcctcttatacgctctcttgtctgggtgtactccctttttaaagggagactcatttggatgctattttcgaagcaaatcaaaaaacggtgaaggttgatttcaacacgggagtttgggagtcttgtgtccaaacctnncccgtgaatctcttngcggnattctacaanggggaggannttccanattanaagcggttaaggcnaagggatcttggttcttgc

SEQ ID NO: 134116 - DNA, 539 bp, Arabidopsis thaliana columbia
  unsure (1)..(539): unsure at all n locations
cacgcgcgctaacactgatgtattcaacgagttcacaccttggccgacagccgnggtaatctttgaaatttcatcgtgatggggatagatcattgcaattgttggtcttcaacgaggaattcctagtaagcncgagtcatcagctcgcgttgactacgtccctgccctttgtacacaccgcccgtcgctcctaccgattgaatgatccggtgaagtgttcggatcgtggcgacgtgggtggttcgccgcccgcnacgtcgcgagaagtccactaaaccttatcatttagaggaaggagaagtcgtaacaaggtttccgtaggtgaacctgcggaaaggatcaattgtcgatacctgtccaaaacagaacgacccgggnaccaaagatcancanttttnggtgggccggttttttagcgatttctttgcccgccggatccgtggtttgnggatcggnattatncggnggttttaatttcgggntttttgtggggttgtttccgntatanaaaaccggaaggaaaagttaaagnaaaangc

SEQ ID NO: 134117 - DNA, 381 bp, Arabidopsis thaliana columbia
  unsure (1)..(381): unsure at all n locations
gtaacgcaaactcgatcttcgagatnacaagcaattctncatagaccatcctggtgcagnncctattactacaaaccagggagaggaactaaagaaactgataggatcaccaatctacattgaatgtagttcaaagactcagcagaatgtgaaagcagtctttgacgcagccataaaagtggtgcttcagccaccgaaacagaagaagaagaaaaagancaagaaccgctgcgtgtncttgtgatcgnncatntcttaaaacggaaaaaggtttaggtaacaaaagatgctgaaggaaaacggtcacctngcaacattgtatagttgttgaaatncggntttgttttcggggcntttaccngttgtttttttncctggggg

SEQ ID NO: 134118 - DNA, 255 bp, Arabidopsis thaliana columbia
  unsure (1)..(255): unsure at all n locations
aatgcaaggttcactgccagagcgtcatccaggaaggcccacttnctgcccacttcgaaggtnttggccttctncggatccagcttggaattntgggcactnctggccgagctgctcanctggaagttggcgccacccgggggttgctgcnaganagcatagttggcgtagacgctgacggtatcgccgaccttntagagggcgcccagcttccagttnagcagcgtatcgaacgcgtccaggtcgggttgcgca

SEQ ID NO: 134119 - DNA, 381 bp, Arabidopsis thaliana columbia
  unsure (1)..(381): unsure at all n locations
attcaataaatatcatcctccggataagttgttattgtncgtttaccaaattcaagancaaganaaanctttccctttganacaaagaaacatggattnctncaccgatcaagtaaagangaaattctccgacaagaaaccggagagctctganccggagccaaaccacaacaaaancaaacccggtcacacggagccaacaacacataaacccggtcacggcgagccaacaacacataaaccggtcttcaacaccgntccaacancacacagaccggctacgnacgttgagctcatggctagtgccaagattgtaggccggaaggttgtttaaggcggttgtttgtcacgggttaggnaangtttgcaaaggccaaagtt

SEQ ID NO: 134120 - DNA, 550 bp, Arabidopsis thaliana columbia
  unsure (1)..(550): unsure at all n locations
atcggcttgattcagggcaatgggaacacattccagctaaattcccgagatctttgttggatggttacttagttgctggaactcagaagagattgtttctcgtgggaaggattggcctctacagtactctccaaagcatgagaatatgggagcttgatcacacaaaggtctcttgggtagagataagtagaatgccaccaaagtacttccgagcacttctgagactttcggctgagaggttcgagtgttttggacaagataatttgatctgctttacgtcttggaattaaggaaaaggtcttctatacaatgtggntaagnaaatttggtcttggatttccggttgtcctcttcagtcatgcaacagccaagtgtgcttttatgagccaaggntttgatgcaactgtccnntgancaataaggtaacggcctgctcanaanantnttgaaactttcaagttcgcngaaaacatgncngannttggaatccaanggggttatgggncccccggtaatnagcccggcanaatgattntnccnagggtacatc

SEQ ID NO: 134121 - DNA, 331 bp, Arabidopsis thaliana columbia
  unsure (1)..(331): unsure at all n locations
cgttttactttgtcctgcactactcancctcaatggccgcctcancaatggctctctcctcccctgccttcnccggtaaggccgtcaagctttcccccgcggcatctgaagtccttggaagcggccgtgtgacaatnaggaagactgttgccaagccaaagggcccatcaggcagcccatggtacggntctnaccgtgtcaagtacttgggtccattctntggcgaatnaccgagctaccttaccggagagttccccggagactacggatgggacaacgncggacttttaanttgnccccgngncatttgaaaggaccgtgacttgaagtt

SEQ ID NO: 134122 - DNA, 384 bp, Arabidopsis thaliana columbia
  unsure (1)..(384): unsure at all n locations
ggcacgagttctggaggaaaggttcgcgagaagaataaaaccgaggaagtaaaaaaggatgcagagcctaggactcctttctctgatcgccctgtgcgtgacggaaatctgttgagaggcttgttgcattgattgataaagactcctcgaaagaattccgtgttgaaaaggggcgaggtgcatatctcaaagatattcccaatgttgctaacaaggtantgaggnagaggtctgatgaaactttgaagctgcttcacccaattctatttggtgggnggngnggggaggctgctcngatcaagacaaacctattgggcttctctggtttcgtttggcatgganatgagangaacgcccaangaancngtanngannagccttgag

SEQ ID NO: 134123 - DNA, 554 bp, Arabidopsis thaliana columbia
  unsure (1)..(554): unsure at all n locations
tttcgattctatcatctcatttctcacctgcctccgccgtcatggcttccgagaaagaagctgctctcgccgccactccttccgattctcccaccatatttgacaagatcatcaccaaagagattccatccaccgtggtttttgaggatgacaaggtcttagctttagggacataacgccccagggtcctgttcacatcctccttattccaaaagtgagggatggcctaactggcctctctaaggctgaggaaaggcacatcgacatcttgggccgccttctctacactgccaagcttgtagcaaaacaagaaggcctagcagagggtttcagaattgttatcaatgatggtcctcaaaggctgtcaatcggtgtatcacattcatgttcaatctcattggnggncgccaaatgaactggcctcctgggtaaagancactttnagngggttnttgccncatgntaanngggcgctngagtttnnnnggctccnaatgcnttttaanaaaaaacggggcatncttttttgttnnttgaanccttttttggtttaa

SEQ ID NO: 134124 - DNA, 276 bp, Arabidopsis thaliana columbia
  unsure (1)..(276): unsure at all n locations
gcagtatttgtaagaaaatggcttccaagactttncttcttttgggtctctttgcatttcttttcatcgtctcagaaatggctgccgcgggcacggtgaagtcagagagtgaggaaactgtgaaacctgaacaacatggtggtggattcggtgacaatggaggaggaagataccaaggaggaggcgnccatggtggccacggagggggnaggntaccanggagggnggnaggaccggttaccangagtncntttgggcggcaaaggagtggagggg

SEQ ID NO: 134125 - DNA, 361 bp, Arabidopsis thaliana columbia
  unsure (1)..(361): unsure at all n locations
agatctctaaagagatttatcgtttcaaatttgttcacgttgagaagtttaatttagattaaacaacaaaaagatgggttactggaattccaaggttgtnccaaaattcaagaagttattcgagaaaaatagtgctaagaaggctgctgctgctgaagctaccaagacctttgatgaatctaaggaaacaatcaacaaggaaattgaggagaaaaaggcagaactccaaccaaaggtcgtgggaacctttgaagccacgtnttcagaaggtcaaggtcgctatcatcctctttttngttctcccaggtccnattnggtantttcanancccttttttncnggaattnnnggcnttaatttt

SEQ ID NO: 134126 - DNA, 392 bp, Arabidopsis thaliana columbia
  unsure (1)..(392): unsure at all n locations
gacagttcaacagcttgcggtctgaagaagagcttgagaaggaaatggagagagcttcatcggtgaagatccctgtcgtgtctcaggacgaaagcggaaacggttcccttggagaatctcctagcagttcaccggagaaatctgctcccaccaacttataaaaagtttttttttgatatttggttttgttgggggggaaagaaagaaggatgatgaatcaaaaataagattttnagagcagtctctcaaacaatcgcccttttgcancactcactctttntaggctttagctttttttttccctacaatccttttcagntcnantggggtttcacgggntaaggtttctccccncgggggtnatccctttanggcganaaaagnnannaggg

SEQ ID NO: 134127 - DNA, 337 bp, Arabidopsis thaliana columbia
  unsure (1)..(337): unsure at all n locations
gatatttcgaagggaagngagcaaccgaagctgagattttggataaatttggnaacagaggntcggctttaaggccaggattcatacatgggactcgtcaggtcggtagcataaagctgccacttagtctcattggagctcctctcgaaatgggttttgaagctgttgccaaaagaggtgacggaaattcctgtgatcggggccactttttaaataacctccggtcaattgtcaaaatcccgttgcagcaaccagcggttaaaaggcttgnaagttngattcccggagntttncttttctnggngnnaatccggtngtgttaccccgggnttttttt

SEQ ID NO: 134128 - DNA, 379 bp, Arabidopsis thaliana columbia
  unsure (1)..(379): unsure at all n locations
attcacctcgggtcgagacaagatgctggagatggaaatnctagtttccgtggtaaaaccgcgttggataagattncggaaactnttaagaggagtccgtnctctgtnatcttgcttgaagatattgacgaagctgatatgttggtgcgtggaagcataaaacaggcaatggatagaggcagaatccgtgactcgcatggccgtgagatcagtttaggtaacgtnatctttgtnatgacagcgagctggcatttcgcagggacggaaacatcgttcctagncaatngaggcaaaancttcgggnttttnggctnagcggaaactgggcggntttagggttttccattcggggggaaattttngggaacggccgggcaaa

SEQ ID NO: 134129 - DNA, 535 bp, Arabidopsis thaliana columbia
  unsure (1)..(535): unsure at all n locations
ttaatgcttctccataaccaaatcgcatggntctnctcttcgagtgtagccgtcttagacgccgtcaataaactctcacttctgctagctttcaccgttcttcttaacagcgttcaaccggttctttccggtgtggcggttggatcgggttggcaatcgtacgtggcatatataaacttgggatgttactattgcattggtgttccacttgggtttctcatgggctggggttttaaactcggtgtcatgggaatttggggtggtatgattttnggaggaaccgctgttcaaaccatgatcttaagttttatcacaatgagatgtgactgggaaaaaagaggccgagaangcaagtgctcgtanttaccaaatgggncnaccacaataaaatngttcaagntttttgttgatcacctattaaatnatttttgcaggcataaatatggttttggaaacctggtgntgttttgntccaattgggttcacctttttnggccgttcanggttcantgggcccgnaatnntcaaangngga

SEQ ID NO: 134130 - DNA, 550 bp, Arabidopsis thaliana columbia
  unsure (1)..(550): unsure at all n locations
ggaaacaccactgctgctattggaaagggatttnccattggctctnctgccctagtctccttggctctctttggtgcctttntnagccgtgcagggatccacaccgtagatgttttgacccctaaagttatcattgggctccttgttggtgccatgcttccttactggttctctgccatgacaatgaagagtgtgggaagtgcagctcttaagatggttgaagaagttcgcaggcagttcaacaccatccctggacttatggaaggaaccgcaaaaccagactacggcacatgtgtcaagatctccaccgatgcttccatcaaggaaatgatacctcctggttgccttgtcatgntacaactctcattgttggtttctcctttggagttgagacctctctggtgtcctngccggatctnttgtatccggnggttanntcggcatataaggatttaaanttggtgggnctggnnaaggcagnataaatnggggtgggntttangacgaaaggctttgncaaggtttaggcnaaaagagttttttggaantc

SEQ ID NO: 134131 - DNA, 402 bp, Arabidopsis thaliana columbia
  unsure (1)..(402): unsure at all n locations
aagcttgcaaaaaaaatcatgtagtaattcataacgaaatcggtcctggtattganctcaacattgcatgcnggcaattcagcccaaaacgcacaccttcaatgtttcacaccctaaagtacaaagatcctttttacatcattgagttcgcggacaacaatcagctacctcacggtgagaaatggtattgtctgattagtcacggaacaagaccaaaatattggtttgatattgaggtatatcgtcaaggctattatcctcgatgtgggtcagctacgctcaatggttttctagaaagnttgggttttggtttccaggaatttttcatngcccccccgggncacggtnttnttttggaaaacccccgaaaatgtccnnnggntttttgnnncccccnnaaaa

SEQ ID NO: 134132 - DNA, 575 bp, Arabidopsis thaliana columbia
  unsure (1)..(575): unsure at all n locations
ggttgagagaagtaagaggaagctcatatttnacaccatcaacgagatcttagctcacagattcgctgcagaagggtgtacaaagcaaccatccataacattatcaatcagcacgcaaaggacacacgaaaaaagttcaagaggggaagagcttctgcaaactctgtnttcagagattgatcgattacaagataactcaaagtgtatcttggatgaggacgatgaagacctcatttgggaggttctgcaaagccatggcatgaactggaaggagattnaaggagagacaccagggttagtgttagacattgagaggctaatcttcaaaggctttgattggtgaagttttgacaagcgggttttcaagttttccaagggatgctcagtgggcaaccaagggcgntttttcattgnttattatnccnattaatctccccttggattgtaatcaanggantaatcnacccnttttcaagggttgggccnttgggttnttggtnnttnncccctncttattgccttnccttggtggtttgaaccccctaaangnttttnnaaaaaaaaaagggggcccg

SEQ ID NO: 134133 - DNA, 538 bp, Arabidopsis thaliana columbia
  unsure (1)..(538): unsure at all n locations
taagtancttagttcttcatcaaaagcgcgaaaaacagattggaaccacccctggtttgctcaaacgtaagagggctgctgaacatggtgcaaaaaatgccatccatgtatctaaatctatgttggatgtgactgttgttgatgttggaccaccagctgactgggtgaagattaacgtacagagaacgcaagattgctttnaggtgtatgcattagtcccaggattagtccgtgaagaggtccgagtccaatcagatccggctgggcggttagtaataagtggcgaacccgagaaccctatgaatccttgggggagctactcctttcaaaaaggtggtaagtttaccaacggggaatcgatccgcatcacacatcggctgtnggtaaccctaaaacgggcagtaattttttcgtgtgctctggggaattggngtaggacatttcagtttacaaagccttttangttttanggggagnttttngaagagtttttnggntttttttaatntttgggggtnnnccccntnggggnctttng

SEQ ID NO: 134134 - DNA, 521 bp, Arabidopsis thaliana columbia
  unsure (1)..(521): unsure at all n locations
gaacttccgtggatgtttcgtgcatgcgtctgttggtgatcgaggacaaccgccagctggtggccaacctgttcgactatttcgagtcgcgcgggcatgtgctggacgtggccccggatggcatcaccggcctgcacctggccggcagccacccctacgatgcggtgatcctggactggatgctgccgcgcatggagggaccggaagtgctgcgccggctgcgtgccgagcacnngtccggaggtgccggtgatcatgttgaccgcgcgcgatgaacttgccggacaagatcgccggtttccgcgccggtgccgacgactaacctgaccaagccgttcgcccttgcccgaacttggaaggntgcggcttggaaacgnctgcttgcttgcgtnncgaaggggncgcaaaacccggngnaaangccttgcaaggttggnnnatcttggtccttgaattttggcgancccttgnaggccaacgttaanggcaaggttgtnnacctttaaccggncttccgnaaa

SEQ ID NO: 134135 - DNA, 465 bp, Arabidopsis thaliana columbia
  unsure (1)..(465): unsure at all n locations
ggaagatcaacacggcagctgaaattctagaagttatgggtgctcctctgtcaggatcagatttacgagcgtatgtgatgtcaggtggtggcataacatttaagaaattcaagccaacaattaggagcaagcgctgctttcttctattccccgttcagggttctgagcaaaagggccttgttagcgttgaagttaagaagaagaaaggccagtatgacatgaagcttttggcggtagatattccaatggcatctggtcccgaccaacggttatttctgatttggcgatgaagaagagtacagaattggtggtggttnaaccccnggggttaaagagancccggttgtgaaagcaatnggcagcaactaaaggngttccgaaaacccttganaaaanccgaagggggaaaaaccccttnaaagaaccctccnaanagccgaaaaaaacccncgggnaannnntnng

SEQ ID NO: 134136 - DNA, 515 bp, Arabidopsis thaliana columbia
  unsure (1)..(515): unsure at all n locations
cttttagttgtgtgtttacctaatttaagtgttgtcttatctctataacttagattgtgttatgtagactttagcatatttgggcttggagtttgtttctcactggcacaagaatgatttatcatttggtagtcttgttagatgatcaattactcgcttagcttagttttcacaatcatacgaattagcttaagaagctctgcaaaatgtgcactcatctattctttagagctcaagttgaatgctttatgtggtctcttgtatctctgtacattttgttgtgctgaacaaaggtttgacggcagttagtgcatgtgtaagtaggcatatttttggccagctgcaacgnagggncnagctacaaattgggaattggaangggttgaaacgnaaaaccattaaaaagggttttggaaaccccccnaacagccggggnatggggcccgggnccccaattttccgggaagggccccggaaagggggaacccngggccaaaaaggggggttnanccngc

SEQ ID NO: 134137 - DNA, 655 bp, Arabidopsis thaliana columbia
  unsure (1)..(655): unsure at all n locations
atcgggttgaaagtgaaagtcgccaaaaagtggcggaatgctttcgaaaccaattcacttgagtgagacagaggagagtggaatttcgtgtggaggggtgaaatctacagatctacgaaggaacgccaaaagcgaaggcagctctctgggtccctaccgacgctggggtgcgaaagatggggagcgaacgggattagataccctggtagtccatgccgtaaacgatgagtgttcgcccttggtctacgcagatcaggggctcagctaacgcgtgaaacactccgcctggggagtacggtcgcaagaccgaaactcaaaggaattgacgggggcctgcacaagcggtggagcatgtggtttaattcgatacaacgccgcaaaaccttaccaagcccttgacatatgaacaacaaaaccctatcctttacgggatggtactcactttcaataccaggtgcttcatggctgncgncantcgtggcgtgaaatgttttgggcaagncctataccgngngaaancccccggcttggtggttnncaannaattggcctnaagggggaaaggggtttnaaaccgnagtggncccaagggncccnatnncgnccaacccctgaaatttggtgaannaacatgccntcgccnnnaaaaaagggg

SEQ ID NO: 134138 - DNA, 477 bp, Arabidopsis thaliana columbia
  unsure (1)..(477): unsure at all n locations
acaaaaccaagaatcatacaaaacaagcatcctccaatatgatgaaacaatcaccattctcacttttaacatcaatctttctcatagctgctctttttactgcaactaccgcactcgatcctgcacccgaagacccgatttttgaattgtacatgcacgatatacttgggggaagcagtcccacagcaagacccattacgggtttgcttggaaacatctacaacggtcaagtaccgtttgctaagcagatcggttttgttccaccgcaaaacggtgtagccatacccaacgcaaatgggggaatgncaacggttaacggtatcaacggtattccattagggactgggttgtctgggacagngttttctgggcaaaacccaantggggtccgacccnntngggccnaagggccagacntngggttgganaanccgnggttttnnganaaanacaggggccnnttgggggggaacacct

SEQ ID NO: 134139 - DNA, 543 bp, Arabidopsis thaliana columbia
  unsure (1)..(543): unsure at all n locations
gttccattacgcaaacctcacttgtttcccaagttacctcttcccttcagagatacactggatacgtattcggctgaactgaaaagcatagctaaggtcttattcgcgaaactagcgagtgcactcaaaatcaaacctgaggaaatggaaaagttgtttgatgatgagttaggtcagagaattaggatgaattactacccgccttgtccggagcccgataaggctattggtctaactccacattccgatgctacaggactcaccatactgttgcaggttaatgaagttgaaggtctccaaatccaagaaagatggcaagtgggtttctggtcaaacctctcccaaatggtttagttggccaatgttggggacaccttagggntcataacgatggggcattccgagtnttgagcancgtggngtggaaacccgggaaaaagntttttgggggcatnccaananggggccgggaaaaattggccccnngnanccngggaagcccaggggggcttttaaacccnnccnggnggatccngggttttc

SEQ ID NO: 134140 - DNA, 685 bp, Arabidopsis thaliana columbia
  unsure (1)..(685): unsure at all n locations
gtcaccattctcaactggtcctttgtcaggaacgaccagcccaggcacgaaacctgttaccagatcgctttggccatcaaggacgaagtcgaggatcttgagaaaggtggaatcggtgtcattcagattgatgaggctgcacttagagaaggactaccactcaggaaatccgagcatgctttctacttggactgggccgtccactccttcagaatcaccaactgtggagtccaagacagcacccagatccacactcacatgtgctactcccacttcaatgacatcatacactccatcatcgacatggatgctgatgtcatcaccattgagaactccaggtctgatgagaagcttctttccgtgttccgtgaaggagtgaagtacggtgctggaatcgggccaggagtctaacggcatccactctccaangataccatcttcttgaggaaatcgcagacagggggcaacnaagatgcttgntggccaagagcagaacatccttngggtancctggctgtgggtcaagnccggaagtcaccgggggcaaacctgnacncaagacatggttatcggggaaggcaccggnccaggngcaagtncangggnnaaancttnttnaaanggaagggttttttcccnaaaagggggggtntttggggaaannccnnnaaaaaantttggggnc

SEQ ID NO: 134141 - DNA, 542 bp, Arabidopsis thaliana columbia
  unsure (1)..(542): unsure at all n locations
ctttgagtacattgttaagaacggaggtctacgcaaggaagaagattatccttactctatggaagaaggaacttgcgagatgcaaaaggatgaatctgaaacagtaaccattaatggacaccaagacgtacctactaatgatgagaagagtctcttgaaggcattggctcatcagcctctcagtgtcgccattgatgcatctggtagagagttccagttctatagcggcggcgtgtttgatgggcggtgcggggttgatcttgaccacggtgtggctgcggttgggtatggatcaagcaagggttcagattacaccattgtgaagaattccttggggnccaaaatgggggagaaaaaggttcatccaggctgaagaggancnctgggaanccaaagggnnccttggggaacaacaananggcttttttccccnccaaaactaagggncaccanaanattccccnttnccggatttgancnncccttaaagggcccccgttttccccctttggttancangggccttnaanacctggggaaaa

SEQ ID NO: 134142 - DNA, 563 bp, Arabidopsis thaliana columbia
  unsure (1)..(563): unsure at all n locations
cagagtaaggagaaaacattggcaaagatggagagaggtgggctcactgaaaaggttgctagagacagtgttctcgttttccgttttgctgatgttgggaagcttccaccgccagtgcttcagtttgttgaagtgtcttttggttacacaccggactatcttatttacaagaacattgactttggtgtcgacttggactcgagggttgcccttgtgggacctaatggagctggaaagatacacttttgaagctcatgactggtgaattgcacccaactgaaggaatggtgcgacgtcacaaccacttgaagattgctcagtaccatcagcatctggctgagaagctagacttggaattgcctgcacttctctacatgatgagggagttcccgggtactgaagaggagaaatganagctgccgattggnaggtttggccaactgggnaggctcaagtgatncaatgaagatncatctgacgncaaagggcaangtngtctttccgggtacctataanagccaaanggtctctganngcactacattgnancggnacggccnttc

SEQ ID NO: 134143 - DNA, 590 bp, Arabidopsis thaliana columbia
  unsure (1)..(590): unsure at all n locations
cgcaaccggagttgttagatgtaggtgttgatggtattcttatggacctgggaatgtcatctatgcaggtaaacaatcctgaaagagggtttagtgttcttcaagagggacctcttgatatgcgtatggatcctcaggcgactctaacagcagaagatatagtgaattcgtggccagaatctgaactgggaagagttctacgggattatggcgaagaaagcaattggtatttacttcaaaatagaattgttaaggctcgacttaatggcgggttacattctactggtgaactggtggatctcattcggggtacgtcaccagcaagcagaggaggcagaccaaggctggataaagacagcaacacgtgtgtttcaaggcctaagggattgcagtgaacgacgaacctcaagacactacaaaactcactctactcatcattccgatggtctcncccaggtgggancctagcagtanccccttcacagcctggagnccggggtgnaaacaaacgtcccgnnacttagggtcaaggnagggncncgggagggagngtgnaccggaagnaaccnanaagttggagggttaaggng

SEQ ID NO: 134144 - DNA, 534 bp, Arabidopsis thaliana columbia
  unsure (1)..(534): unsure at all n locations
ctcagaccaatcgggctttcgaatcccatcagtagaaatngctacatcaaggttccaagcattcttgaacagtcccattggcccaaaaacaactcatttctgggggcctatcgctaattggggttttgttgctgctggtttggtggatatgcaaaagccccctgaaatgatttctggaaacatgtcgtcagctatgtgcgtttacnctgcattgttcatgaggtttgcctggatggtgcaaccacgtaactatttgctacttgcgtgccatgcatcaaacgagactgtacaactctatcagctctcacgttgggctagagcccaggggnatttatccnccaagnaagaagaggngnaaccatcctcagtaaaccaaatgggggaaggttccttcaagntggcttcaanatttgtccgggggattaccgganccacccatttgattnccttcgaaacggggtttgaatggggnccccagcangggggcttancnggggggnnnccccaaantaancccttgtttcaaanaacccg

SEQ ID NO: 134145 - DNA, 589 bp, Arabidopsis thaliana columbia
  unsure (1)..(589): unsure at all n locations
agacaaaggaaaccaacttgtctcccttggctccaaggacattgcgggcatagccatgggcattgaaattgaatcgcatgagtttgacccagttggttcaaagcttgtttgggagcaagtcttaaagcctttgtatggtatgaccacagacaaaaccgttgttgaagaagaagaggctaagctagccaaggtcctcgatgtttacgaacacaggcttggtgagtccaagtatttggcttctgataaattcactttggtcgatcttcacacnatccctgtgattcagtacttgcttggtacaccaactaagaaactctttgacgagcgtccacatgtcagtgcttgggttgctgacatcacttcctagggccttctggctaagaagggtcctttaagnggctcaccaancgggtaatcngaaggtttgaataaagnggggatggcccccttggcccaaatccncaaaacaataaagggggggngngcccattgcgcaattcccaaaancnnggggattttttnggggggnccccccggttttttttgggnaangaccnccaaaaangggccnaaaaaaaaaattgggggc

SEQ ID NO: 134146 - DNA, 541 bp, Arabidopsis thaliana columbia
  unsure (1)..(541): unsure at all n locations
ctggatgatgtatatnctgcttttgatgatccggaggaacaaacatatgcacaggatggaacaagagacacaggtccactaactctaaatgcgtttgacctaattattctatctcagggcctgaacctcgcaactctttttgaccgtggaaaggactccatgaagcaccagacaaggttcatctcacacaagccagcaaacgtggttctctcaagcatggaagttgtgtcacagtctatgggctttaagacacacattcgtaattacaagatgagagtggaaggattatctgcaaataagacatctcatttctccgtcatacnagaagtcttcaaagttgcaccatcaattctcatgggtagacattcaaaatgcagcaggngnngcagaagaatacccttaaggtcctacaanccttttgnaaggaagccttgtggnatcatttggaaccgccaaatggncctttgggaaccggggccccnggccaggggtaaagncgntnancccccgggngggggttcannngggnttcccgnngcgt

SEQ ID NO: 134147 - DNA, 580 bp, Arabidopsis thaliana columbia
  unsure (1)..(580): unsure at all n locations
aagaagttcaaacacaatggctttcgctttgaggttcttcacatnccttgttttaacggtgtgcatagttgcatcagtcgatgctgcaatctcatgtggcacagtggcaggtagcttggctccatgtgcaacctatctatcaaaaggtgggttggtgccaccttcatgttgtgcaggagtcaaaactttgaacagtatggctaaaaccacaccagaccgccaacaagcttgcagatgcatccagtccactgcgaagagcatttctggtctcaacccaagtctagcctctggccttcctggaaagtgcggtgttagcattccatatccaatctccatgaagcacnaactggaacaacatcaaagtgaaatgggaagnttacgtcgtcgggttttgcggtaaagagtaatnggttnccagaaggacctagnattaaaanacngngatatatcctaagccggnnntanccatggatttggttttggcccaangggtttgnctaatttccaancaaagggggattggngggngaaaccatggaaaagnccctnttngccaaaaaaaaaagggggnggcntaggg

SEQ ID NO: 134148 - DNA, 500 bp, Arabidopsis thaliana columbia
  unsure (1)..(500): unsure at all n locations
gtctcggtcaccatccatcctttgatgaacagggtaatcgacatgcaaacgtgctaagtccaacggtagtaacatcgctaaaacaagtgaacgagcggatggtccagataagtctaacgaactccatatactggaacgctcatacatttgcgctcacggaatcggggaagctattcgcgtttggtgcaggcgatcagggtcagcttggaacagagcttggtaagaaccaaaaagaaaggtgtgtaccggaaaaagtggatatcgatctcagctagctagctgacttatgtggtttggttggtaagaaactacgtttgacatcaaggaaccaaaaacgcaagaaaatttgcgttgcttttaangtncataagacttggaagcttgtacaaaaaggggatancataaacttgccttaaaattccattgnaaggggtttaanttnnccaatggccctnggnaagtttagggangnggaaaaattnccaaaattccctancctg

SEQ ID NO: 134149 - DNA, 494 bp, Arabidopsis thaliana columbia
  unsure (1)..(494): unsure at all n locations
aaaaaaccacaaattggtaaatatttccggagaattctttcgattcatncctaaccttgtcgtattggatttatcatggaatagtagtctcactggattaccaaagaaaatatcagagttagtctccttgcgatatcttgacttgtcgtatacaaacatcgaaaggttgcctgttggtttacaagagttgaaacaactaatacatctgaatttggagtccatgaagagtttggagagtatngcnggggtatctaagttgttgagtttgaagacactgagacnacaaaagtccaaaaaggctctagatgtgaactcagcgaaggagctacaacncttagaacatatagaagttctaaccatagatatcttttcaagtttggtttggacatttggtanngncncagagattggcgaatctatncatatggnggctatngaggtgagnagatcttcaaantgactttccagctgggnaacccgcgatnggnnngagg

SEQ ID NO: 134150 - DNA, 503 bp, Arabidopsis thaliana columbia
  unsure (1)..(503): unsure at all n locations
cttaacaatggattcttctctgaaaactcaggaacctcaagtagtggaaacttctccttctccggtagctcaggagcctcctcaagtagctgacaaaccngcgattgttccttctccgatagctcaagagccagacaacgatgttccggcgccgggaaacgagtttgctgagttcgccgccggttgtttctggggagtggagcttgctttccagagaatccctggcgtgaccgtgactgaggtcggttacactcatgggatctctcacaatccgtcttatgaagatgtctgtacgaacaccacgaaccatgcagaagttgtcagggttcaatatgatcctaaagaatgcacttatgagacacttcttgatttggttttggccaancntaatnccaacaccttgaatcggcagggngaacnttttggngnccaaaaccgtcaggantnttccacnnccgggcaganaaangccngggtcctannaaagccgaaaacnggggtga

SEQ ID NO: 134151 - DNA, 514 bp, Arabidopsis thaliana columbia
  unsure (1)..(514): unsure at all n locations
ctatcttcctcttatctcttctctttgctctatccaatgcctctgttcaagatttctgtgtcgcaaacctgaaacgcgctgaaacccctgcgggttacccttgcattcgtcccattcatgtcaaagctacagactttgtcttctctggcttaggcacncctggaaacacnacaaacatcatcaacgccgctgtcacacccgctttcgcagctcagttcccgggtctgaacggtctaggcctctctacagctagacttgacttagcncctaaaggtgtgatcccaatgcacacncaccccnggtgcctctgaggttctctttgtccttacagggctccattaccgctgggtttgtctcctcggcaaaacgctgtctacgtgcagacactcaaaccaggacaggncatggttttccacaggggttgcttcatttcagatcaacgcgggaaatccctgnttnagcggtgtacnttaanaggnnatcgggntgaaatccnantgaancttgnaaagcg

SEQ ID NO: 134152 - DNA, 508 bp, Arabidopsis thaliana columbia
  unsure (1)..(508): unsure at all n locations
ccgtgcgacggagngttgcccctctcccaagccaaagccaactcctaaaccaaccccaagccctagctctggctcgagcaagtgccctaaagacaccctcaagctcggtgtctgcgctaatgtgctcaacggcctcctggacttgacccttggcaagccaccggtcgagccatgctgcagcctcatccaaggactcgctgatgttgaggcagccgtttgtctctgcaccgctcttaaggctaacattcttggaatgaacttgaaccncccaatatctttaagtctaggccttaatgtttgcagcaaacaacttcctccanggcttccaatggctaaaaancatattgntatataatttaaatacacttatggggggattaaattaaccnccctggttttaagananagggggatccccaaancgctaaaatgggggctnaaaaanccggaccgggggtcctncaaaccgggtncccggggggnnatngggggncncgnaaatcccnaa

SEQ ID NO: 134153 - DNA, 502 bp, Arabidopsis thaliana columbia
  unsure (1)..(502): unsure at all n locations
aggaataaaagcactcaaaagtcaaagcgcgcgcgcnancacacacacaaaaaacaatccaaagctaattgattcatcaatggcgatgtcgggaacatacgtgacggatgtgcctcttaagggatcggcggagaaacactataagaggtggaggagcgagaaccacctcgtccctgaagctatcggccacctcatccaaggtgtcaccgtccatgacggcgattgggactctcacggcaccatcaaaatctggaactacactcgtgatgggaaagaggaagtattgaaggagaggatagagatggacgacgagaatatggcggtgacgatcaatggactcgatngtcacgtcattggaggcctcaaggttatgtcacggcgttacattnatccccggtccaanatggctggncntgcaaaatnctttgggctgggggaaacccccgnnttcccccangccctcgnttttnaaattcgngaaaanantttcccccatggcggc

SEQ ID NO: 134154 - DNA, 511 bp, Arabidopsis thaliana columbia
  unsure (1)..(511): unsure at all n locations
cacaacaccaggatgtggtgtgaggaaacatgtagagagagcagcaacagatccaaaagctgtagtaacaacatatgaaggaaaacataaccatgaccttcccgctgctaaatcaagcagccatgccgctgcagcggacnagttaaggccagataatcgacctggcggtttggctaacttaaatcaacagcagcagcaacagcccgttgcgcggctaaggcttaaagaagagcaaacaacttgagagaagaaaactcttgaccgtttttcattacaaaagctttcaaattccactcacacacttgtctgaaaaatctagcagttttgcaggaaagaaacagcttcaagaggttgtagttcttctatggtctggtgtaaacttaaaagctttttaggggtttcagatttccngttnccnatnncggatgngnatccctttggacatgngggaggaattncnnggggggatttggggtgaacctttggggaatggtcccgaaaagaagggngc

SEQ ID NO: 134155 - DNA, 518 bp, Arabidopsis thaliana columbia
  unsure (1)..(518): unsure at all n locations
tggaagacgaatatgctcacatcacttctcattccttacatcttcttcagtcttccttccttgatctttggtattttcagaggagaaattggtaaatggattgctttcgtagctgttgttgtacaactcttctttcctaaacacgccagagaatacctggaattaccggtggctttggttcttctcgccgtggtggcaccaaatttgattgctggcacattcagagacagttggattggtttagctatatgtttaggtattggatgttacttgcttcaagaacacattagagcttcaggtggattcagaaatgcatttactaaagccaatggtatctccaacacccgtcgggatcatctgtctcgtcgtcttccccggctgggctcttatcctttaaggtaacnctcagttctttttccattggcctttttttttcatgaagagngatgcntgacgactgcnccccgaaccaacaagatggnttgaaaaatggtccnataggaaaaaaaaaangggtc

SEQ ID NO: 134156 - DNA, 541 bp, Arabidopsis thaliana columbia
  unsure (1)..(541): unsure at all n locations
aggtgatcatacatatgaccgaagattgcgtttgggtggaccgttggtgaaacaaaacattgcaacaatggtgttggaaagataatnccactgcagccctttctatggccaaaggcgtccctttcttcaatgcggtgcgagactcctctgtgttagtgatctacttttgctagggagggcaacaatcgaagagtcccgcagtcttattcacnggctagacactgaggaaggctttggaaagatgggtgtttgtgggctaagtatgggaggagtacatgcttcgatggttggatcgcttcatccaacaccagttgcaacacttccattcctatctccgcactctgctgttgttgcattcctgcgaaggaatattaaagtatgggacngcttgggaggcactgagggaggaacttgcagcacagaagatcccatgncnccttgatnaagnnaaaaancgnatcgggaatntcccccccccaaaaggganccggttcccttnccaaaacccggnggggaancttnttnnccanccanagnggaa

SEQ ID NO: 134157 - DNA, 520 bp, Arabidopsis thaliana columbia
  unsure (1)..(520): unsure at all n locations
ccacatttcgaccggtgacatgctgcgcgcggaaatcgccgcgggcacggagctgggcaagcaggccaagacggtgatggatgccggcaacctggtgtcggacgacatcctgctgggcatgctggagtcgcgcctgacccaggccgatgtcgccaagggcttcatcctcgatggctacccgcgcaatgtggcccaggccaatgcgatggacggcctgctggccaagatcggccagccgctggatgccgtggtgcagctggacgtggccaccgagctgctggtcgagcgcatcgccggtcgtgccaaggaacagggccgcgccgatgacacgccggaagcggtgcgccaagcctgcaggtctacaacgaccagaacgcccggtggtcgaanttntaagccggccgtggaaccttggccgcgtcnacgggtggttaanttgnncnaattnaacccgatcttgcgggataaggttatcttaaggcggtaattncggctttggnnaaanaaagntnntcganat

SEQ ID NO: 134158 - DNA, 599 bp, Arabidopsis thaliana columbia
  unsure (1)..(599): unsure at all n locations
ggtgtctataagatcaacagcatctcagacaaacccacatatggaggtttataccttgacacctcagttttgcaagtcgactatcgaacctttatcgagattgtattcgagaaccaagaagatatcgtccaaagttatcatctcaatggttacnccttttgggtggtcgggatggatggtggacagtggaagacaggaagcagaaatggttataatttacgcgatgcagtttcacgttccacagtccaagtgtacccaaaatcatggacagccatatacattgcattagacaacgttggaatgtggaacttaagatcagaattttgggcaagacagtacttggggcaacaaactttacttacgnggccttcacgtcatctacggcctttgagagatgagtncccatcccgagaattcccggtttgtgcggccgggnaananggccgcattcaaggcctttgnaaggagatttcgggcttccgngaaatccgcaaacccaancggttaagaattcctngggaacttcagggtcaaacaatggggggggttttgggaacaccagttncgnnnnccccccgggcaaatttttgaaccgntgc

SEQ ID NO: 134159 - DNA, 414 bp, Arabidopsis thaliana columbia
  unsure (1)..(414): unsure at all n locations
accggtttctttgtgcggatgaagaacacactcttgcgtngacggttagtntctggctatgatccttgtacggagagttatgcagagaagtattttaaccgtcccgatgttcagagagccatgcacgctaatgttactggaattcgctataaatggacagcttgcagtgatgttctgatcaagaccnggaaagattcggacaagaccatgttgcctatatacaaggaacttgcagcgtccggtttgaggatcnggattttcagcggtgatacagactcggtggttccagtgaccgcgacacggntttcccctcagccatcttaatcccccccggtgaaaancccgtttggnacccttggnanccgggtaaccaggtnggnnggatggananaggtttcaangggtgnccctttt

SEQ ID NO: 134160 - DNA, 487 bp, Arabidopsis thaliana columbia
  unsure (1)..(487): unsure at all n locations
gtctgcttcacatcggaaagctacatctttttcgttttttgtggtggcgatttctattctccggctgaaaccnaccttcaggattcagcctttctcaggttttcagttggattcagatagcagcttgtacntcttctagataatcggcgacacatatggatgattgggaggccgaggactttcaaccacttccctcaaaagttgaactgaaaagtaactgggatgatgaggatgtggatgagaatgatatcaaggactcgtgggaggaggaagatgtatctgctccgccacctatagtaaagcctgcttctgagaaggctccaaagaaacccagcagtaaaaagctgttgnaaaagaagggtaaaaaccggttggaagcnnccgnaaaggnanccatccaaggggnaggaaccccccctagnatcccnaattggccnggggaaaaccttcngcatnncaananggcttttnaaaggaacccnggttt

SEQ ID NO: 134161 - DNA, 520 bp, Arabidopsis thaliana columbia
  unsure (1)..(520): unsure at all n locations
cggtgagttaccattaacatgaccttaaaacaatttataacttctttcaagaacttaacacattgtcaaaactgttggtaggaatcataaatgttcctgagtggtacgatgctgggaaagagcagtattttgcatcgtcgtcgacattgttcgtgatcgagttcatattgtttcattacgttgagatcagacggtggcaagacatcaagaacccaggaagtgtgaaccaagaccctatctttaagcaatacagcttacctaagggtgaagttggttaccctggtggaatctttaacccggttaactttgctcctacgcaagaggccaagggggaaagagctagcaaacggggaggttggcgatggttnggcatccttangggtttgtgggtccaacccaatgtgacntggaaaaggggccctttggaaccngtttnaaaacttggntnggcccntgggnaaancattggccaaaccctcnncnaagggnggnnnntttgggcccanccaatnttccccac

SEQ ID NO: 134162 - DNA, 563 bp, Arabidopsis thaliana columbia
  unsure (1)..(563): unsure at all n locations
gaaaaacgaaactttcggttgtgcgaaatcttaagatcaaagatggcatcgttttgcagatcagcgttaatggcaggttccagaaacttagtatcaagatccagaaccgtaactcaaaagtccctcaatcttaaacccacaacnacttcatctcctttcgcttcaatgtctcaatccatccctcgcgcttcgagggttctctctgctttgggaagtgttgaaacgatgatnccacttcacagtgccgttgcttcagctcgtctccggtcaagcatcgctgctgatncctcttgttggagcttgctttctcagggacttgcaacgcctttgtgancccggtctgctggatcgatataaggcggaaataatcaatatattacaatgaatgaacaagaatagtgttttttttccagttcgaccctatcggcaatggattgttgtgtggtcacaaggacttgtgttcaaactccttnaaccaaccatccnaattngnncaacatttggggctttccccccaaagcagattggtccttggcagnaattgaanggnaccncggattcaa

SEQ ID NO: 134163 - DNA, 540 bp, Arabidopsis thaliana columbia
  unsure (1)..(540): unsure at all n locations
attgcctctgatgagaagatagcactattgggtgctatccagtcgctctttgaaggatctatgtatacttttgtattcctctggactcctgctctaagtccgaacgatgaggagattccccatggtttcatttttgcaacatttatgctagcttcgatgctaggcagttcccttgcatctcgtctgttgtctcgttcaactcccaaagtagagagcnacatgcagattgttttcctagtttccggtgctgcactattgcntccaatattaatgactttggtcatagcaccttccaaggtgaaaggngggagggatccctttctcggggttgctttcagcnccctngggtccggaaaatccgangcgtgtgtaagaactggttttgggcatccanaatgaagatggggatncccatnaatcccagaagnagcnngaagcccannaaggaacttttccgganccccngaaaaacttggccggggtgaattgnaaanggnaaggatcccatccgggaagttggangggccaancccctgggaa

SEQ ID NO: 134164 - DNA, 501 bp, Arabidopsis thaliana columbia
  unsure (1)..(501): unsure at all n locations
ccgtgggtgaggtggccgccgtgggccaggctcatgccgaggatggtgtcacccggctgcagcagggcgaagtacacggcctggttggcctgcgagccgctgtgcgtagcacgttggcgtagtcggcgccgaacagctgcttcaggcgatcgatcgccagctgctcggcgatgtccacgtattcgcaaccaccgtagtagcgcttgcccgggtagccttcggcgtacttgttggtcagcnggctgccctgcgcttccatcaccgccgggctggtgtagttctcgctggcgatcagctcgacgtggtcttcctggcgctgggtttnancggcgatggcctttgccaatttcgggatcgtaagattcgattcngaagtnaagcgggaaatcgggaacccaacaggcaggnaaagggtnaggctaanccccanttttnncnccaacggggnttnggggnaaaaaaggaggggnggcnccccaaaaaatccccccnnantttttt

SEQ ID NO: 134165 - DNA, 454 bp, Arabidopsis thaliana columbia
  unsure (1)..(454): unsure at all n locations
gcaagtttctgagactcttgcggctgcgaaaaggcatttaacacaaaggattcagaatctggatgataaggtagaaaagcagatcgatctctcgaaggaaatcaatagccaggttatttctgctcgtgagaatatcagctcacttgagatggatttggaatcattgcataatttgattacnggactggatgggaagttggacacgctggaatacaagcaggatgtcacaaatgttttcatgctaaacttgtataactattttggaggcaagagcacaaagctgnctgaaattgggacagcttcagctttcctgtaaaccagagggcncgtaatttgccttgcagatggttgaaaccaaaggggctgnaaaactttgnctgaaancccgttttaaaaacaangggcccccggggggnnnccccgggggnnaaaaccttttggnaaaagngnnntt

SEQ ID NO: 134166 - DNA, 389 bp, Arabidopsis thaliana columbia
  unsure (1)..(389): unsure at all n locations
gcgagaaggctagctcaagggtcagcagtcaagatacaactttgtgcgcctttaccagtgcaaattgatggagagccttggaatcagcaaccatgtaccttaaccatatcgcaccatggccaggctttcatgctaaagagagccgcggaagagccactgggtcacgcagcagctataatcacagatgttctagagaatgcagaaaccaatcaagtgataaacgcttctcagaaacgaacgctgcttcaagaaatggctctacggctaacttaaaacagggggaaaaaaaggaaagccggaggccaanctttcccttttnaaaanccattatcnncccgggggtnttnaaaattttnnaaagggggggtttttaaaanttngngnncncc

SEQ ID NO: 134167 - DNA, 495 bp, Arabidopsis thaliana columbia
  unsure (1)..(495): unsure at all n locations
gtctaccaccggacagattattcgatgcaaagctgctgtggcatgggaagccggaaagccactggtgatcgaggaagtggaggttgctccaccgcagaaacacgaagttcgtatcaagattctcttcacttctctctgtcacaccgatgtttacttctgggaagctaagggacaaacaccgttgtttccacgtatcttcggccatgaagctggagggattgttgagagtgttggagaaggagtgactgatcttcagccaggagatcatgtgttgccgatctttaccggagaatgtggggagtgtcgtcattgccactcgggaggaatcaaacatgtgtgatcttccccaggatcaacaccgaccgaggaggnatgttcncgatggggaatcaaattccccttaatnggaaaccanttncatttccttgggatncccgntcaggggnanaagggtnncccnggaaggttnaaaaaaaccggggnccccttaaaagg

SEQ ID NO: 134168 - DNA, 548 bp, Arabidopsis thaliana columbia
  unsure (1)..(548): unsure at all n locations
cccgtatttagccttggacggaatttaccgcccgattggggctgcattcccaaacaacccgactcgtagacagcgcctcgtggtgcgacagggtccgggcacgacggggctctcaccctctctggcgcccctttccagggaacttaggcccggtccgtcgctgaggacgcttctccagactacaattcgaacgccgaagacgtccgattttcaagctgggctcttcccggttcgctcgccgttacnaagggaatccttgttagtttcttttcctccgcttattgatatgcttaaactcagcgggtaatcccgctgcaaatgtcaatgaagtggggaagagtcaagtgaagctaacaaggtgctggaaacaacctcttnggaaatcaagccttcanatcgnctgttcncnaacgggttcctgggggggntccaaatgatccgggantaaaaaacnacaaanggtnttgcaaacgggtnaaaggtcccggggggaaaanttttntnaaaaagnggggttaaaaattaaaaggtttgggcccnaaaatnnc

SEQ ID NO: 134169 - DNA, 545 bp, Arabidopsis thaliana columbia
  unsure (1)..(545): unsure at all n locations
ggggtttgcttgtggacgatgaatttatacacggagaagaaaggagcctgactgttcggaaaacatctctgtttttcgccggcgatggtttcacagtttacgactgcaagggaagtttggtgtttcgggttgactcttacggtggtcccaacacccgcgacaccgacgaggttgtcctcatggacgctcacggccgttgtctcctcacccnccgacgaaagaggccgagtttgcgacggagatgggaggggtatctcggggagagatcggacggccagaaaccgatcttcggggtaaggagatcttcgataatcgggaggaacagtgtgacggtggaggtgtacggggactaccagtgcaacgagtacctgatagaaggtagtttcngggcaaggaactgcncggtggtgaagccgaanaaagccgaaggtggcgaaaaaaagcccaaattggttcgnaacnaacgnaatctttggaaaancntttcccttaaangnaacccgntttatgggcctttnaagggttgtctttngtaaaaaaaacgt

SEQ ID NO: 134170 - DNA, 536 bp, Arabidopsis thaliana columbia
  unsure (1)..(536): unsure at all n locations
gagaacatataaaagccatgccaacaaagaagatgacagctactttgagcgagaagaaaggagtgattttattgggagatgcattcaacatgcgtcatccagcaatcgcatctggaatgatggttttattatctgacattctcattctacgccgtcttctccagccattaagcaaccttggcaatgcgcaaaaaatctcacaagttatcaagtccttttatgatatccgcaagccaatgtcagcgacagttaacacgttaggaaatgcattctctcaagtgctagttgcatcgacggacgaagcaaaagaggcaatgagacaaggttgctatgattacctctctagtggtgggtttcgcacgtcagggatgatggctttgctaggcggatgaaccctcgtccgatctctcncatcnancancnaggggaacacncanccccatnggcatcaacnccncattcccnncccttcgattggaacctcgacttttggtggnnnaaaggtggccccccangggaaggttccatntntccnc

SEQ ID NO: 134171 - DNA, 548 bp, Arabidopsis thaliana columbia
  unsure (1)..(548): unsure at all n locations
cattgggctacctacggtcgtcactattacactcgttacgactatgagaatgtagacgcaggtaaagctaaggaactgatggagcatttggtcaaattgcaatcttcaattcctgaagttaacaagattgtgaaaggaattcgttcggacgtggcaagcgtcgccagtgctgatgaattcgagtacaaagatccagttgatggatccatttcgaagcaccagggaatccgttacttgtttgaagacggatcacgacttgttttccgtctctctggaacngggctcagaaggagcaaccatccggctttacatcgaacagnacgaaaaggatgcttcaaaaancgggccgagaatcccaggaagctttgtcnccnctggttgacttagccccaaaantggcgaaaatggaagagttcaaaggcggttagccccaccggncatacataagaaggggaancccaaggcntaaccattcncctttcggcaaaaggggttccccctnaaaggccnggtcctttagaaatngcccggggatttnttcccccatc

SEQ ID NO: 134172 - DNA, 547 bp, Arabidopsis thaliana columbia
  unsure (1)..(547): unsure at all n locations
gaaatcgtatgtggagaaacgaggtttgccttctggattgtgtcttggtagctgtagtgttcttgacactgctggggaaggtgcaaaatctaagctttatgaggttttggagtctagtgttgtctctggagataagaacaacaatggaactgttgtctggcttcatctcggggtgaatagcggacnncaaaattcgccattgaaagacaggcagtgaacgaagctcatttccgttgtcctgatgaattgggctggcaaccgcagcggcttcccatagttgttgaagatggaggcatttcaaaggcaaaagagacttcatgctcgacggagnccattttccagttatnaaagaagaaaggctttgangttgttcaatcagacgatgctggaccgttttgnatgcaacaacgggaccaacanccccaaaggtccccaancaaaggggccaagccctgtcggncacgtccccncttccccaaaacggngaanacccaaaggnntcggggtnnccttggggattncncnttcagggttaanacccaancat

SEQ ID NO: 134173 - DNA, 541 bp, Arabidopsis thaliana columbia
  unsure (1)..(541): unsure at all n locations
caaacgtctcttccgtaccaaatcaaaagcttccgtctccagatctgagccttcttccttcagctccaatgcttcttcctcttcctctgatggatcttacggtaacctcaaacaaggtccaaccgcgactccgatcagtgttctccctcaaaactccggcgatttttacactgagcttgttcaagcttttaaactgatcgatcgtgatgacgacggtgttgtttccagaggagatctcgcggcgttgattagcaggttaagtcatgaaccaccgagtcaagaagaggtgagtttgatgctaagagaagtagacggcggagacggtggttgtatcagccttgaagatcttgctagccgtgtcgctggtacttccggtgaangntctgttgagacggaggagctgagaaaagtgttcgagatttttgacgtggangtaacggaaaatatcggcgngggggttcccagagttttggggtaacgnaataacgggccgtanaaaaggantcgatnaaacancgttatgaacggganggtttttntc

SEQ ID NO: 134174 - DNA, 584 bp, Arabidopsis thaliana columbia
  unsure (1)..(584): unsure at all n locations
aaagaagtgaagtatcaactatatacgatttaacaagtaagattttggtattggtatgaaacacagcttcaataatggcccccaagggtctaagatatactttcaacctctttacaccggcaagtctctctaacaaactctgctataagtttagtgacagcagccggcttttcgacatggggaagatgtccacagttagatatttgtttgacacgtgcattcgataattctccgtgcagtctccaagcgagcttgttgctaatgatttggtcatcctctccccatagtatcaatgtcttctgtggaaccttttttataagagaagttacgttgtatcctccgctaagtcataaaaactaacagttgcatcttcccacnaagggtatagacaatgcaagcgnccaatctttggccagtcccaacaagtttccaatggggtaccattgaacatatggaggtacggntaaccggaatgggaacccttagaagnncccccaggnaaagcggtngtttngnaangtggaaggtccagacctccgggaacgtgggccttaaccagggtancggntggggngcggatgagt

SEQ ID NO: 134175 - DNA, 531 bp, Arabidopsis thaliana columbia
  unsure (1)..(531): unsure at all n locations
agacatcttatttcagaaacacttctgtttacaatatcaattatcaaagctgcatcgtttatcctataactttagttgccattatccatcatagcaaccttaaaccagttgcattacaaattttgaattttgaggaaccaacttaaggaagcaaagataaaatttgagagacaaaaggaaagggtaagagacaacattggagtgcgatttttttagttcaactttagtttcagcgatacttcagaccatcggttgcgcctctggtccatgatcactaaagcatctcagagatgtggaaacgtgtcaatccacacgatggaaactactcctttgtatctcatcgtctctttctcggacccaatcggttggggattgcttagcatatcctctaccatctcacggngctttgncannctgncggaattccccatttggttgcatggtggacaaggcttcaacttggccctgngcncggttgnncttnaggganctgcgggaancaaacccgcatttgaaaccccangnccnggg

SEQ ID NO: 134176 - DNA, 527 bp, Arabidopsis thaliana columbia
  unsure (1)..(527): unsure at all n locations
atcatcttcctccttctcgtttccgagattccgcggccaacttccgattatcttctcagccaataataatcagaagaagaagaatcttccaaatccaaacgtcgtcactctttgtctccactctcattccaatgtctcctcctctcaaatcgccgtcactcgccgcgcaattctcgtcgcaccaccgctcctcgccgccgccgcttcgttgtttctctctatttcctcagctgcctctgctgagacttctgcggaatcagtagctcttcctcctgttgctactgctcctcctcctccgcctgtggagaaggaagaggcgataacttctagaatctatgacgcgtctgtgcttggtgagccgatggctgttgggaaagataagaagagagtgtgggagaagctattgaatgcgaggattgncaatctcggagaagcagaacaagtgctacaagagacgaaanggtctcgagctcgaaatcgtgaggaattgaggaacgatgaattaganggtcgcagtatntttaggc

SEQ ID NO: 134177 - DNA, 529 bp, Arabidopsis thaliana columbia
  unsure (1)..(529): unsure at all n locations
gaacacttgaaacattttctgctctgacaaaacaaagaagacaaattccaacttaagtcctctctacaagagctattcactcttcctaaattgacacaacttaaagcttgagaatctcagaaaatcgattacaatttacacaacttacaatatcgtcaaattttgggattttcggggttaaactagtaaaaattattagttgaagttgaagctagcagtgcggctccatcgccctttcaagtattcctcaacagagatactactagcttcagggctgctatcagaagctgcatcatcttccaaatcaagcaatgcgaggtttatgtgtgattctatatttgtcaaatatgcgctcacgtcttctgaggntctcacttgttgcnttccccactctggtgnttcttcttccccttggaaaaccttagggcaaggcaatttcggcggcatgaggnggcgttgntganangnggagcaacaanagttccggtnggcggacggaacattccagncngggcnggacnggaactcc

SEQ ID NO: 134178 - DNA, 468 bp, Arabidopsis thaliana columbia
  unsure (1)..(468): unsure at all n locations
agcctctctgatntgganaaatgggctacggaatttcctgaccaccttgatgctttattagctgaaagaagggtggatgaagctctggcagcttttgatgagggagaaattttagtatctcaagcaaacgaaaagcatactttaagctcttctgtactttcatctcttcagnttgctattgccgaacgcaagcaaaaattagctgaccaacttgccaaggctgcttgtcaaccttcaactcgaggtggggaacttcggtcagccatagcagctctcaaaaggcntggcgatggtcctcgagcccatactgtacttccttgatgcccatttccagagatatcaatacaacatgcaaagtcttccgnccntctaggacctcatatggangggngtccactggngnactttctnaagcttgngtnccaggtatccncncaagcntcaagtganccagtgggaaccnttggg

SEQ ID NO: 134179 - DNA, 400 bp, Arabidopsis thaliana columbia
  unsure (1)..(400): unsure at all n locations
ggagatacagaactgggaaagactaatccttcagagaacaagcaactaaagctggcaaggagcttggatcgtggcattatcgacagggatctaaagccaagtaatatcnngcgggaatncnnttcaaagagttttgaaatatccgccaacaaggacattgagtggagatgaaagacaacttctttggaagtttcgtttctctctaatgtctgaaaagagagctctaacaaagtttcttccgttgtgttggaagtggggtgntgttcaggaagcaaagcaagcaattcaactggtggtncaaattgggnaatgggtaagatgtatggtgnatgcccttgggagccaattggccccncccaattttgagagttgaanaggttccgagncttnngncngggga

SEQ ID NO: 134180 - DNA, 528 bp, Arabidopsis thaliana columbia
  unsure (1)..(528): unsure at all n locations
gaaacctcagattggtcatcaatatcagacatagatacaacgaaagaacttgaatcttcaaaatctcctgtgccagaatcaacagatgggtcaaaagatgaactaaacatatatagtcaagatgagcttgacgacaacagaatgcttttggaaatacccagtggtggaagtgcattttcttctgctggaattcctgcaccttttatgtctgttatagttaatcctgggaagattcttgtccccgtagctgcggatcagatccagtgtcaagcatttgcagctctgcaagttctgaaggtcattgaaactgatacacaacctagtggtctatgtactcgcagagaatatgccaggtggctgatttctgccagcagcgcgttatcaagaaacacaactcaaaagtggatcctgcatgnataattgaganggtactgnnttncttttggtgnaatacncccggaanccngntttcctcccatcnagggtgnaaaaccagggtntcgggggcaanttcaacgggnttacngc

SEQ ID NO: 134181 - DNA, 561 bp, Arabidopsis thaliana columbia
  unsure (1)..(561): unsure at all n locations
gcatnatcgcaatgaaccatttcgtaaatttttcgctacccgaattgatttcagctcgaaccaaatcgaaagaactaaccatagcaacagaatatagtgcaatctttgccaaaagtgtatgaacttaatcaaaaaccgaaccaaaccaaaccgaaaacccgaaaattcaaggttttagaattgaagatttgagtgagacttgagaagccaagtctggctctcctagtctcaagagacccttactcaaaacctcagcgacatactcatcagcctcccatgactcagacccccaaccactttccctcatcaaggtataaaccctaaccancgnctctctcctctcagctccaaccacaggcctaatcaacttagntaaaggcttatcatcacttctttgntcaattccatcaattcaccaataagncggtctatctcatcggactcttaatcctcgnagggnattancaatggctgggntaggacagggcagngggggggtatttggtncggggagtgggngtcatgggagnggtgggaaagnctgangggagcccggggngc

SEQ ID NO: 134182 - DNA, 226 bp, Arabidopsis thaliana columbia
  unsure (1)..(226): unsure at all n locations
cgcagctaagaatcaggncgccatgaacccngttaaacaccgtttttcgaccgctaaagaggttgatcggtccgncgttttctctganagctcnggttcagagtgacatgaaatttggnggccattccaagattcaagccgggaccttgccggataagccaaatggatctaacggncgaatacaaggggtgaagnagaaagagttccgcacctgaggganatttct

SEQ ID NO: 134183 - DNA, 536 bp, Arabidopsis thaliana columbia
  unsure (1)..(536): unsure at all n locations
aaagtaatgttcaataaaatatagtgagaacagataaggtacctctccccgtatataggatttttattttacatattacatccaacaaaatccaataagttagatcacaccgtccggtcatgtattttcttctttctcttgctgctgtgtagttaaaaagtctcacctcaatacaagtctttccaacgtaatgtatcaccagttccacggtctggtttgtgatttagctgcaagatgtagcgccattgaaccactgctactgcttggaccgttgcagataccaagcctgatgatgaacgaagctgtgcagcctttctccnaggccttcactttctaatccacatggnatccncccattagcccggnaaancggtttacagngagctagcccgnggtcctccaccgggaatgggtcccntgagtcccgggccgaggntggannaaatttgggnaaagggcaaagnatgccttgngggggaatccaaacccggggccttnccnggaacanngggaaagggctnccctganacnggaaa

SEQ ID NO: 134184 - DNA, 480 bp, Arabidopsis thaliana columbia
  unsure (1)..(480): unsure at all n locations
gagaagctgttgcttctggctgagggtttacttaagaagcacattgcctctcatagtatgcatgagccagaagctctcatggtgtatatctctttgctggaacaacaatccaaatacaatgatgctttagaagtcctttctggagatttgggatctcttttgatgattgaagtcgataaactacggatacaggggagactccttgctagggcaaatgactatnctgctgctgttgatgtctataaaaaaatcttagaattgagtccagatgattgggagtgtttcctacactatctcggctgtctgcttnaagntgacagcatctggaaatacttttgncaatattgatcaaattcatccggcaaagcaccattggnatgcaaaatttncttaacccttcgggaggaaatgtttnattctcggaantcaaagngncnnannatttnggtnnagaaattcnaggggggcccgtgggatngg

SEQ ID NO: 134185 - DNA, 527 bp, Arabidopsis thaliana columbia
  unsure (1)..(527): unsure at all n locations
gaaanattgtaactgtagtagatacatcatgagttatggttatgggtcataaatcacatcttttttatagtctcagagacatgagagacaaattctacttcttgaccactttccgattccaaacatcaaaacttttgtacaaaaagaaaacccaagaacctcaaatcacaagcaaaggccaaagtactacttgtttcataaaacggatgaaaaaattggaaggagaaagctgcatcaacggcttgggcaagacttgtctttcttttttagttgggtttgatagaaagnaacactcaagtccttatgctgaaaatacaatggctgatcgatgagtttcacaaccccgcgngggaagttgctgacttgtccttcctctaatacatcttttcccgtcagttttgtncccatcctcatgcggatacaagngntttnttccctgctggntgttagggctttagntnttcgngngggacccttccgtttccagggnggntntgtagtggnccagncanttggggncnttggna

SEQ ID NO: 134186 - DNA, 503 bp, Arabidopsis thaliana columbia
  unsure (1)..(503): unsure at all n locations
gctnccttaggcaattattgtacaaaggacactcgtggttagagctgctacataacgagattatacaacttaaatgtgacgacatagagagagagagagaagaaaacagtcagtgcaggtctgaggaacgtttaatggtgagctcggctctgagatggagaatgccattgatgaaatgttgactgtcctcggctatgaacgaagtccatggaatcccgaaaaggtttctgtaaccaaccgctttcccccctgtgaatgtgtagtttcctttgtatttgcttacgtattcttcctttgtacttttatctcttgccgcaaattcgtagtccacaccaaaacttacagcccctttnttcttgcattccgagggatagcccaaagcagtngacgagctttctgggnccangttcagngtctgagaggagaaaccttgncccccnannggaagnnttggaangnctttccntangggatagccntngnatccnctggttaagccagta

SEQ ID NO: 134187 - DNA, 558 bp, Arabidopsis thaliana columbia
  unsure (1)..(558): unsure at all n locations
ataacttaaaactttaaaactgaacttaaagacaaataagaactaggatcgtaatcaatcgtacggtgaagatcaaagacagaggatgttgtcaagtctctctcaatcaaccgaaataagaccaattctcatctttgcccttgccgccgccaccagctgcagcttcatcgcagtagtaaacgccaaggttattgaccgctgcggtgagagcgtttgttgacgtttccatggaaagataaggcatgttgttgaatgacttagcaagacacgatgcgactactagtttgtngttccccttatcaccacaagctttgttgttgttgttcctcgggctcctcggctcggtgtttaagagtcttgaaacatgagctcaaggctcaatgcttgaattgctcttaggncaatcttcaaggaggnattgggcccattancaaggancggggtcaanttcggaatcccgttanggtccattggnttttgaaattcggggnaccnanggtttgggccnnccggnacaangtttntnggcntccacccgannggnttccttaanaaggt

SEQ ID NO: 134188 - DNA, 551 bp, Arabidopsis thaliana columbia
  unsure (1)..(551): unsure at all n locations
agtcgtgccagcaggtctttgccgtaccagtggtgactgtaggaaacgtcgtaaaggtcttccgcagcgtgaatatgcaaaccacggcctgtggctttcacggcttcacgcagcatctccagaccggcatccggcacggtaaacggcgcgtgagcaccgatatgtgcttccaccagatacggctcgcttgtcgctttcttcgcctcatcaatcaaacgggcgaaacggatgttttcttctacaccttcctgcaactctttgatgccgttgttacggtcagtagtttcaaaacaaggtcatcgcgcgcaggccaacttttaaaaatncgtcgcgcaatgtggagagcgnccccgccgatatacggccgngaggagggcatnggtgattcgntaanccgatgttcaatnccngtcttaaattggatttccanggggntcaaaatcaaagtcccgcttgtaattgaaggggntntttnatcaaagggtnggggattgggncngccaccagnggttttttngncggtttggggttgaaatnccgggnaaangggg

SEQ ID NO: 134189 - DNA, 559 bp, Arabidopsis thaliana columbia
  unsure (1)..(559): unsure at all n locations
gggacaacttcgtggtaggcaaagtaaataagcacagacaacttcctctagctgacaacaacagaagcctaatgataaaagagaaaaagatacatgccaaagagagagagacccttgcaccaaattttaactaataacaagttttgtatcatactctcacacaaaatgacactgtacaaggtaacgactttttcattccaacactccaacttcttgatccactttccagtagttgttatcgttgaactctttcactcctcctgaactttcctccggctttgagtcctcagccatctccttgttcttcttcatcactccaagcttctcctactatcccttctttcatcgnttgctccatcggtttctctgcccctnctgggtncactcccanaaatttcaagggccntctcaaataacggtcttttntgccccgttttggaataatggggttnagntttgcctaagcaattggaatgtngggggggnatnatgtnttncggnaataanatcatnataatggtaatggggtagccggtgcnctcggttganataagtnttc

SEQ ID NO: 134190 - DNA, 528 bp, Arabidopsis thaliana columbia
  unsure (1)..(528): unsure at all n locations
atctagagcagaggaaatgtcgccgacgaagatcgaaatcgaaacggcggtaaaaattgaagaggaagaagacgatgagcatgattctaaggagagagttctacagaggtattttttacaagaatggaagctcgttaaatctcttctcgatgatattgtttcaaatggccgtgttgttgatcctacttctgttcataagatccgatccattatggataaataccaggagcaaggtcaattagtggaaccttacttagagagtatagtttctccattaatgtttatcatccgctccaaaacagttgatttagaggccaaacctgatgaaattccttgagattattaagccaataagcatcattaactatgctttagttactggatgtggggacaaagcnggtatcaagtccttccgnannaagaaccggtctggacncncggtttgccccccggaagggcnaggacaaatccngttctncctgnggaanaannccgggaatggggccaatggnnnccttgggggtcanc

SEQ ID NO: 134191 - DNA, 525 bp, Arabidopsis thaliana columbia
  unsure (1)..(525): unsure at all n locations
ggcggcgaattccnggccaanananaaaacatataactaaatgattaattttagtcttctcactatcaaaatattactcctgaccaaaacattaaaaccaacaggtaaccaaatcccaaaacccttttattcatcatcgtctaaatgccagtaggagtagatttctccgatagttggctcgtagtttctcctgatggcgcatcctcctgagatacaacaggaatcttgactgatgaagctctctccatttccctctcaagctcttcctcagacatgagagtgttaaactgtccctccagcgatttagctgctgctaaccatgcagtgactataccggagcaggntgactccaaggtaaggtgtggaattggcgagtgagcgnaatgtaaggntcatgaaactgctggggttagagaccggctggatttccccatgggttgaggcacatcaattgnagntttgcttaanctnggggcccacccatgggganagcattctttganggngacaagtgnantgncctgc

SEQ ID NO: 134192 - DNA, 521 bp, Arabidopsis thaliana columbia
  unsure (1)..(521): unsure at all n locations
gccgagtacttcggtagattagttggaacgattgatgattttgagttaattgaacgttcggcgtatgagtggtgatcggatagctagtgttcgtaggctccatgctcgcgcatcgaactacctaccacctatccttctcagttaattcacgggcgatgttacgctcgatgatgagttccggggcctgtgtttcgtacctaatttgaaggaattgttgagttcggtttacacccatgcccgcggcttctccttcgtggggaagtcgtgggcacaaacatcggcgcttgttcacctctcgtcatcgcatttgttgccttgctccgcattggtgaatgagttgcgggttgatatctcggatgcggaaaagttgtcgacggtgnctcgaagtgattcagtcccgccaaagctcatcggccttcgggnaaanatancggcaaaacccggcctttctcccttccattgcgtttaaaagntttggggggaattccggancataatcacctggtaaccnncagagcaat

SEQ ID NO: 134193 - DNA, 501 bp, Arabidopsis thaliana columbia
  unsure (1)..(501): unsure at all n locations
tnantaacaattaaaaaagtaaattagaggtgccactcacaaggaaattnatgataaaaaaatgtgaaaaatacaaataaaaaacaactctgctgatactgaaacaagccttacttattatcacacaacacaattattcacccacacgtcgttctgtataaaaacacnaaatcaacaatcacnaatttattgagttttcctcaaaggaaagatatatctttcatgtcctcctcttaagacngatacgcgattataagactctgaacatcatcaatgtccctaacctcatatcgagcaaagccagcttctttaagaacaaagtcccattctttcaaagtccggtctttgcctgtgctgtgtgagcatcatcancngatcagnatcaatctcacgnggncaactttcanccggtcggcacaacancggcttttatcnccggtacggtcnctacaaacttccggattggggggngtnttgnaatnccaaactttggncctgggc

SEQ ID NO: 134194 - DNA, 507 bp, Arabidopsis thaliana columbia
  unsure (1)..(507): unsure at all n locations
gtgaacttattggcagatgatggctcggtttggtgttggggttacaacatttatggccaacttggttttgatggggaaaactccttggcaccatgcttgatcaaaaatttgtttgaacgagaaacatctagttcttctctaaatgattcaggtagagaagttggatcagatttaaaggtttgtactgtaaaggctggctccatgatgtctcttgccattgataatgtcggaggtctttggatgtggggcaatgttcctccacaagacagtgaacctgaccctcgtttgtcttttactagcatcccgattccatttcctatactcgacttccatgggccggacggttttgaaaggtagcatgtggggatgaacacgttgttgcccncgttgggcctggggatatcnccaaggcaacagtatgatggatccggctgnatcctggggaanatcanatggcagtnagnctngaatggaaaaccggnaggccaanctgggnaantttacctg

SEQ ID NO: 134195 - DNA, 495 bp, Arabidopsis thaliana columbia
  unsure (1)..(495): unsure at all n locations
atcaaattaacctaaacctacaagagaataagttagaggaaaaggttaaaaaagggccctaagtatatgccacaaggatggaggagtagagacttctatacaaaacattataaactgtttctactctctcccaaaccaaaagatgggaagaagaagagactacttctctatgatgcaagtgggtaatttacattatgatataccttcttctctttgtgttcatcaaaagaggcaaaaagacctgcatgaattttatcctatccaccaacttcttccctattgatctccctctggccttaccaaatctgcaaactccacaatctgtagagtttggtatggttatactctcagccaaatccaaagnccaccagcagcttcaagatgttaatgcnaaaaagngncccggctctgaaggnggggggcccaaccagtttggggccctgnnaggggtgtgcgggagggcacgtangttgagggntaagnccagggcaggng

SEQ ID NO: 134196 - DNA, 502 bp, Arabidopsis thaliana columbia
  unsure (1)..(502): unsure at all n locations
gcattacacgaatgatcatgggagttttacattgtctttctaatttgtttctcttctcaaaccgaaaacctatcttgacctgaagtacaaaaaacaaaaacaaaaaagaaagtgaaagtctttgtgtcttgttgcactttatttcgagatatgagacaatgttgtgaatagccttgtttccaaatcaagtttcagacaaaaccccctcagagagaatggtccgatcttaaatctcttagaagaatgacttggccgcatcaacaacagcttcaacggtgataccaaactccttgtagagtaagggtgctggtgcgctggctccgaatgaattaatacnaatggnctttcctttgcctcnaanatctttccccatccgaaagtcgaagctgnntcaatgngaacnctagctgnnanatccggtgggananacccccctggatcancggatggccggcaaaagtcccagncccggaganaanccnangggttgcggctttccgga

SEQ ID NO: 134197 - DNA, 464 bp, Arabidopsis thaliana columbia
  unsure (1)..(464): unsure at all n locations
gaagatagacctaaaaagcagaagcctaccatttcactatctgaggtaatgcaatggaatatcgaaaccaatgaaccgaggaaagaaaagagcgacaagaaacttttaaccagagtgtcaagcatgatcatgtctaacaacaagaagactacttatcttgaatctcttggaaccacaagaagtccaaccgcggggcgatactcttgaaaaaaaaaatatttcttttgtaaaattaggggaagaaaaaacgtttcaaatgtaacagataaacagnatatacataaaattacttaaaagggtttgcagtattgngaaatgttgatgagttttagaagggaggaggggaaaggtancatgnatnttggtcagagttnccgcgnggnccgagctnnggggctccttnggccnttcttnattgggaagacttcnccggttgggttgnnntgcatnagtaagcaagggcc

SEQ ID NO: 134198 - DNA, 547 bp, Arabidopsis thaliana columbia
  unsure (1)..(547): unsure at all n locations
agacaaagtctcttctcccaccgccgatctcatcccgcagcttgctntacactcgtcgctgctcttggcgctcaatgctaccgcctcacactaccgccgtctcctccgcccagaatcctgacgccgcaagtgccaccttcgtctgctaccatggcttcctccttcaatcctacccgaatccttgaccatcgcgcgagtctcaccggaatcgtcgtggggcttttccggctagcaaacgtcgccgtctggtcgatgagcccatcgattacccggatctctccaacccggcttaccaggttctctccactccgctttttcgcctctggaattggggtcgattcgncgagctttctgtcgtcctatccttccgccgacggacgtcttncttaagcntncgtctgnntcgattcaacaccgtccgntcaacggttggttttagggnttttaaggntgcgnaccggttggttaacantcgnttgttctcgtccngttggtccaaaaaataatncggntgttacggttnaaggcccanatgctanttttngtc

SEQ ID NO: 134199 - DNA, 509 bp, Arabidopsis thaliana columbia
  unsure (1)..(509): unsure at all n locations
aagaggttagagagattcatagagtcatacaacaaatactagttctttagagcgaattgtgaagagtcatcatatctggctaagaatatcgaacccgtggaagaaattatcacaaaggattctactttctacctcatcaacttatccccaaatctctcgatcacaaatccaagagattcatacaatggtatcaatccttgatactttcctgcaactgttgagcaaactctgaccctcaactctcaagaagctacctgtccttgtcatgtcagtcttagatctgcgagatcaaagccttcaaagactgatggtttacttgcgggtanctacaggagcaaacactggnagttgggtttgaggnagtgtctcttttgaatctagcttcccgaggnagtgtaatgncattcggncttggccctntcttccggggcttcaangnggcttaggnaatctcnatttgggganttanaggggggntcaaagnataatggtnnccngaanaataggnt

SEQ ID NO: 134200 - DNA, 554 bp, Arabidopsis thaliana columbia
  unsure (1)..(554): unsure at all n locations
aattcacgttatatcgactatataaatcagtgcttacaagatagtcacattttttggtgatatatttatgtacatacgtagctcacaaaaacgtgcaaaattctctatgaatgcagaaaaagaaagctaacaatcaccaaaactatagcaacaaaaaagcaagatgagagcaaagtaatttaatatccataattaattaagttctttagtgagcaacaccaattgaagatctcttgacgaaccttcctttcatgcgaggccttttctctgcattcaatttacgtacctcgtaccttatcttcttggngaacaaccttgtcctccttttcnctcgggatcttgaaaccctaggctctcttcntccatccccagnatctcctagggggaaccctagggcggngggagtgggtgtgatggtgaggctctggtccantttnaaccatgggatgggggtggggaacaaacaangtgggggnattttnagnnggnccgggggggcntgggntncttgggttccaagggganggtggttnaggcaattaggnangggnggc

SEQ ID NO: 134201 - DNA, 541 bp, Arabidopsis thaliana columbia
  unsure (1)..(541): unsure at all n locations
gttactttttcgctatttaatcaatggtatgatgtccagagttgagagatctacacatttaaaaaaattagaaacaagaaaattggacaaggagggaataaaaaagacatacacatatgggatcaaaaaattgaaggcgagactcccttcagaactctatgaacaaaaccacccttctctatctgcaactcttcaaaaggtaagatgatgggcttgagtagcctcccggagaagccgaagtaccttagctttccctggtgtcccacaatcgctgaagtctaaggcgcgacactccacctgggatcggttcccaagctgatcatgaggctggtgctgattttctttcccttgaatggacttgttcagctgtctcttcttgagtatcgattcaggngnggcattanccagaaanttccaagggatctgnatatgcggagctgagtggtcaatcaaatggttannagnccatgggncataantntctcgcgggggnntaaaacccaattccccaagggnttnggggnacttgggttgnanangc

SEQ ID NO: 134202 - DNA, 341 bp, Arabidopsis thaliana columbia
  unsure (1)..(341): unsure at all n locations
aggagtttcgtcttcgagtcgtcgttgttcttccggtactgctggtgctgcaaatgcagaagcaagaatgaagtttgctgctgttgatgctataacagaattagtgtggtctcctagcaacggtctaagcttaagatgtgcagatatcagtttcacgggaaaggcaaaattactctctcctaacttctttgatataggactaactaacatggcgattcactcaaatagcacaagtattgaagaccaagaagatcacgtagatgtcgaattgaganccgggatcangtggnccangccntgnttggtggtctgttggggntatgnncctgnnntgggtgngg

SEQ ID NO: 134203 - DNA, 562 bp, Arabidopsis thaliana columbia
  unsure (1)..(562): unsure at all n locations
aaaaatagtactaaaattccgccatatgacgatcgtacattaactattacattgctacatataaataagggcatcgccagtttttaaactgcgaaattattcaaagcgagaagaagaagaagacgaagaagaaggacgaagcaagtctaatgtgattaaccatatcgagtatcaagcaaagaaaactcttcagagcctagcggtacgaagttgctgctgaagcacaggtcgaaggtattcttggtacccatcaggaaccaccgagtcgttcaatggatccttcaacgcttcctcaaagagctttgggtacacattaccgtcgtaacggccaagaaccgagttcaagtaatggtcggtgtaattgnaaggcggccacaagtgcaccgcattaggccgggcctgagtgtataaaggacgggctgggcggtagccagagnngcttgnttgggngtgntnagtnagtggngnggaancncgnaatgttgtgggggggtaaggccttaatggtcccngtntcaccggtcctcacccttgccccangcctgncagtnggnnnacnggc

SEQ ID NO: 134204 - DNA, 557 bp, Arabidopsis thaliana columbia
  unsure (1)..(557): unsure at all n locations
aaaaattacaacacaaattgtctaacagaaagaaagagtcaagctttttaatgttctatagaaaacaagaaacttaaatctctcttctttgttgataaaagaccatctttatgccacattttccctcactgtatcgatctgaaaccatcaccaaaagttttcccactttaatcagaatcttcgtaaacttcagtatctgataactcatcaaatgtcctcatgtcaagctggtaacgtaacataccaccaatcccaccaaaacctctgcaaaactgtgacccttcttgggatttgttagtcacaaactcaagagtgcagccgaaacgtttgtactcatttgcaaaccattcgagtagaggnatcttctcctggtacttctagctccgngntaggctctggaatcatgggagtggctggatcagacnctggatcttcccaaaggggtcaccaccatttctcccggcggacnggncttaggccaaccgggtatggcaggtccccanacggtaaggggtgggaggnccattcagggcttaggggncncaacgnaaggattg

SEQ ID NO: 134205 - DNA, 543 bp, Arabidopsis thaliana columbia
  unsure (1)..(543): unsure at all n locations
gatatgagaatggcatgtgcgtgaatgtggcctactttgttttcttccttctaatttgggaacagagtttggttgtcctatttattgttactttgtaggtttcactcttttcgacattacttttcaattgcttcagattcataaatctatcttcttctttctttggttgttcagctttagcgtgttaggctgaacatttaagaaccatggatctcaatctcggaaaatgctgtggttctcgttcttctaagaaggaatcatggaggtcggttttgcttcttgcttaccagagtcttggtgttgtctatggagacttgagtatctctccgctttatgtctttaagagcacttttgctgaggncattcaacattcagagaccaatgaagagatcacggtgtaatgcctttggtttctgncctnaacttggtccttgctaaagaaggccncaatggcccccgagnggtgaaacgggagggggncttttgcttgacccatggcngcggcangcaagaancccccaacggagccggggggggcnctgc

SEQ ID NO: 134206 - DNA, 505 bp, Arabidopsis thaliana columbia
  unsure (1)..(505): unsure at all n locations
atacatcttcctcatcttctctctccgtgttgactcttgaggcgatccaacaaacaacaacaacaacgccgcgattctcgagggaccaatccgttcagagagattaaagctgagctgagcttctccttataaaggaagatactgcttgttctacggaattttgagagatgcctcgggacttgtcaagatcgaggtcaccgtctccatcaccttcacgtcgtagaaagcactcgaggtctcccgtaaggcagaggcatagcaggaggagtagaagagacaanaagcccttctncatactcatctcatttcggtatagcaaggtgaataccccctaagtggtttgtttttttccgnctattcggtntgcccttaggttatcaattcgtttatacgnacctgtnaggaancatttggtggacacggttnatagntaggcatttaaaggtttcaggctnaaanaattnctttnagnaaagtnctccttantggnanatttctncccncc

SEQ ID NO: 134207 - DNA, 484 bp, Arabidopsis thaliana columbia
  unsure (1)..(484): unsure at all n locations
tcattgagatatgaagttcgagtgctggagaaagagctcgagcttcggaatgaagagagagagtttagccgtcgaactgctgaagcatcgcataaactgcacttagagaatgtgaagaaagttgcaaagttagaatcagagtgtcaaaggttacgggttctggtcaggaaacggttaccaggacccgctgctctttctaaaatgagcaatgaagtagagatgttgggaaggagaagggtcaatggaagccctcatagtccgatgattgattccgaaaaaatcaataaccttactgancaattatgcttnctggaagaagagncnaaaactctaaggggnaagccttaaaccaaggaaagtcaagtgagctttcagttctcgaggaatattgtatttctcgaccagcgntngncttcctagnattccgagtctcaacttttnaagatnttntnggggntccaaanatttggnccagcnngngttg

SEQ ID NO: 134208 - DNA, 535 bp, Arabidopsis thaliana columbia
  unsure (1)..(535): unsure at all n locations
gctcaacgaacgacttcgctttcgcagtttgcattgaattgaagcataagcaacctccaaattccgacaacaaccgatttcctgcagagagagtctctctttgtttgccctggataggaaacctacactactctttgtgatttgattttgttatctgaattcagagtcttgcttctgggttttggtctgggttttggaggtttagtgcttgaatctgatgttggttcaagatcgtgtggctcctaagccaccaaaatctcggatcagagaacttcctagtcgggaccgantcggctgaaaccaaaaatcctagatttcnccttcatggggttccgacaatggccaacagaaatcgnaaatcancctccnccttcaacggcaacggcggtggtttccttctccncaaaanaccaacgnaaangggttccncccccggttccaatccaatcaancnaanncttaaatttnaantggcctcaaacaaagggaaccggccaanagggccggaaaacnnccctagganttccgnaaaaaa

SEQ ID NO: 134209 - DNA, 531 bp, Arabidopsis thaliana columbia
  unsure (1)..(531): unsure at all n locations
gttcgccgattggatttgaagttttagtctttgttggtaagttctatcctttttgagatgttgaatttgctcttctgataattagggcttctgattattagcctaccaatctttgatttggttttcatttccttcagctaaatatttgtaattcttggatcctgaatgattaaccatcttagtttgattggtgaaagtataccatagctgcttaggatccgtttggctttgttatttgctcagattctgaaaggaagggtttaaagtttcaagcttttcattccgctgaatcagtccttgtatttggacggcttgatctgttatctgctctcgtgggtggggcatgaacagaacggtggtctcgggagctgttgaatcgagttnncattgactgatgctgttggacggaagccccaaatatgcagaggagcagtggcaccataanaatatgnggacccaacanaccgatggcttccccccgaaagcgtaacaaccggggcatngggcctgatggccgcgntcaatnaaanc

SEQ ID NO: 134210 - DNA, 527 bp, Arabidopsis thaliana columbia
  unsure (1)..(527): unsure at all n locations
gttacattcttcaggaaaaaggcgttacctttactctctctgcatcaacgaggaagcgtgtagagctaaaggagctgaatttgagagatttttttgttttgtttctgggtttgttcaaagatgcaaatttttagttgtttctgctgtggaaaaggatttgatcggtatgtatggagttttaatcttgattttcaacttgatttgctggtttatgggttttatctagtttctccattgttttgttcttcagaaatttgttcttgctttgatccgttttgctattcttctttattagggttttgagatttatatcatttctcgagcctattcatgttcaaaatttatttcctggtgtaaagtttggaacctttcgaacaataatcnaccngtttgataagcctaaggtgcagatttgnnnaacccaagaagaaagnaatgtaaattgggttgatggggcactttacncaggcaaagaggnnaacgggncaccgggaggncttcncccagnactccgagacaacagtttc

SEQ ID NO: 134211 - DNA, 524 bp, Arabidopsis thaliana columbia
  unsure (1)..(524): unsure at all n locations
gctctacaattgaaacatcctcttatgacaagttgagatttgactaggaagaaaaatctgaatgcattttcaacccaacatatagaagatcagataccaccaaagccgtttcttacaataccataaagtagaaaattacaaagacaaagagtttatgcataacacaactgacagatatcataacaaacatatacgtttcacaatcactcagagaaattgtgagaggtgatggtgttcaacgagcacttgtggtgactactctgcgcttgtttcgatggaatttttccatgaaccactcgtgtttgtgtgcagtaaagaagatatgtccaataactaatccacaaaacacaccaggtccgtagctattgccgctgctatccagttaatcacttgtccttctggttccggaaattcctcggattctagtggtggagactcggggatgagctttcncagatttctcaggcggngagctgaggtggccatgatgtgacatgtggttgaacnggggccnggnacgncgc

SEQ ID NO: 134212 - DNA, 567 bp, Arabidopsis thaliana columbia
  unsure (1)..(567): unsure at all n locations
gctcacaatctgatgatgtaccaagcagctcctacactcctccttctgaccagtacgagttttctgatgaacaaccatcagatcggaagctcaagttatcagcatcttgtactccagatcctgctcctccaaggatctctttctctttccctgttcctagggtttctttggctaaagtctctgtttcttcacctgcaactaacaccaagctcaggagctctgatgtcttcatagggtttcatggacaaaacccaaacttggtgagattctgcaaatggttaaagtcagagcttgagcttcagggaatcgcttggtttcgttgctgacagagctaagtattcggacacacagagtccatgagatcgccgacagagttatctgttcnggtactaatgggnantgtgggntggctcttggtccaanctggcnaacnanctaagcnttgggggagtaaggtctttgcnccaaaanaanaactggatncnaatttctatggaatgggccttccgnaaaaanggggntcccaaccggaagnatggnanngggaaaagccatngtggggggaaa

SEQ ID NO: 134213 - DNA, 453 bp, Arabidopsis thaliana columbia
  unsure (1)..(453): unsure at all n locations
gtcgatttaaaattctatgtagcgtatcttgcccttgacaatcgggtaacagcgaaaaaggagcagttagtgaaggaggagctggaaaaggtgacattttgggataaaacattaattactgggggttttcgaaaatcctaacactaaacttgaatgtgttttctctgatatttgcaggtgaaataagcaggtacacatacaaccgacatctgggtcttaccaccggattacgtcaaaaattatacagaccggattgagaattttgaggaagtgactgctcccttgctgaagaagcttctggagaatcgaaaaagtccacaagcagaggaagtggtaaaatgaggntataaggcaagttcatgtgaaattcatgttgtaacaagaaggattgcaccgggtntggncantcntnnnctgccagnggggnggggngnagacggnncggntnncgnc

SEQ ID NO: 134214 - DNA, 465 bp, Arabidopsis thaliana columbia
  unsure (1)..(465): unsure at all n locations
gccagtagctgcagttccaccatcatgtacaccatccttctcttcatcctcatcatcaacaagaggctgctttggcacttccatacttacaatagaaaatgtggtaacaacaacatcatatttagccaactcatgaggatcctttgttctgctagacccatggtataccagaacagagagatttgcttcactagtcaccttcttatgtaattcatcagcccactgccgcataacactagtgggacatacaacaagcgttccagcagctggccttcccgtcactttacccacactgtctccaccaactttgttttcattggaaagcaattgagagtgttcaaaatgcttgcttcttccactgggttttaaaggngacattctccagtctcgctttctnagggcaaaaattctttcttcgnacttnctnaaaatgttnggaggttngaccttnctcagaaaaangga

SEQ ID NO: 134215 - DNA, 650 bp, Arabidopsis thaliana columbia
  unsure (1)..(650): unsure at all n locations
aaaagttgctcctgctactcagcctagagccttgagcattatacaaggacgtgctgtaggagtaacccattaccttctgggtggaattgccacaacatgggcgttcttcttagcaagaattattgcagtaggataatggctaggaggatttgaaaggcattatggcattaagatttccaaggtttagccaaggcttagctcaggaccccactactcgtcgtatttggtttggtattgctaccgcacatgacttcgagagtcatgatgatattactgaagaacgtctttatcagaatatttttgcttctcatttcgggcaattagcaataatttttctgtggacttccggnaatttgtttcatgtagcttggcaaggaaattttgagacatggggacaagaccctttacatgtaagaccgattgccatgcnatttggggtccccattttgggcaaccggctgtggaancggtaccccgaggaggggnccttggnccggggaananacctatcccgggggtaccagtggggnaacaaccggtnccgnccaatggaggcntttaaccnggggccctttcaaaaaancnttnnncnancccnaaangggggggggcnccgnacccaaaagggngccaaaggcccngggnaaaaa

SEQ ID NO: 134216 - DNA, 461 bp, Arabidopsis thaliana columbia
  unsure (1)..(461): unsure at all n locations
aaaaagaaggtcctgcgcataatatagaagatgactggctggagactgaaaaaaaggtcatagtcattcacagacttcatcaaattttagagccattcatgctcagacgccgtgttgaggatgtggaagggtcacttcctgctaaggtttctgtagtcttacgatgtagaatgtctgctattcagagtgccgtttatgattggattaaagcgactggaactcttagagttgatccagacgatgaaaaacttagggctcaaaagaatccgatataccaagccaagatatatagaactttaaataataggtgcatggagttgaggaaagcctgcaatcatcctttgctcaattatccatatttcaatgacttttccaaagatttcctcgtaaggncatgtgggaaattgtggattctggncagggtccttataaagcacagaggcaggcatcgggattnnctg

SEQ ID NO: 134217 - DNA, 429 bp, Arabidopsis thaliana columbia
  unsure (1)..(429): unsure at all n locations
tccttaaaaagcatggaagaannaaggagctacacaatgtcatctatacattacatttttcatatatttagaaaatgtatattaagaaagcccccatgtatctcaattcataaccttctcttgccataattcatttaagggccaaagcaaaagaagagagaaacgcacgcactttgctttttttatttaagcaacagggagagaatcttcctgctcctccaaggaagtagttggagtgccacttccaccatttagcaccgtgacgttaccttcancgtcancgtccanaaatcaaccgnagtctccttcctttgatctctctcggcaaagcancttctcctnnccatactatcctctaaaaaaggcnttnaangagttagnttccttctnnaaaccgggnctttggnttccaagtaatgcttcgggggt

SEQ ID NO: 134218 - DNA, 637 bp, Arabidopsis thaliana columbia
  unsure (1)..(637): unsure at all n locations
gttctccagatcttttctcaagaaaatttaaagctttaacttaagaaagcttgaacctttctcttccaaccacatcttccttctttttatcctctagctcaacttagaaagaatagaataaagtggcaaaaccgaaagtgaaccaacttgtagtaaattaatagttatgggttcgaaacctaatgccatgaagaatgtggtggctatggcggcagtttctgctctgttccttctagggtttcttgtttgctctgtttctggttctgtctcttacgatagcagagccattaccatcaatggcaaaagaagaatccttatctctggatctattcactaccccagaagtactcctggagatgtggccagatctaattccggaaagcaaaggaaggaggcttagatgtgattcagacttatgtgtctggnaatgggnatgagccatcncctggaaaatattattncgaggggacctatgatttgggaaagttgncaagtgggccaacaaanctggnnccaacctcaaccanagggtgggcctatgcctggcgcgaatgnaccccggnggggtcccggttggngaaggncanccnnggggttcgcctnnaangaaacggggntnaanggncaatcnnaaggc

SEQ ID NO: 134219 - DNA, 520 bp, Arabidopsis thaliana columbia
  unsure (1)..(520): unsure at all n locations
gccaattgcagcaacatgttatatgcattcttatacacaacaattccaatttaagacactcacacacaaaaagttaaccaaaaacaagtcaagaacgtaattccatcaagctactggaaagttgacttgtttatggacgatcaagccatataaaacactctgccttgttctgattgcttgactagcttcataggtttgactcgtgcgatatatactctcaaggaccaaacccaggagaagaggaagctttaaaaaaaaaactcctttaccggatatcttggtaccagaagctctgcccttgagtccttggtagagggatggttattgcccggttttgggganacntttgccaaantccggtaattagccatngggaaagnaggnctcntggggnggttttcccaaggccccttgggggnaaaccccggttcccgncaangttaaaatgggccggggggaccccntgggtggcccnggggggacccgganngggnaacggggccntggggaatttngggnc

SEQ ID NO: 134220 - DNA, 537 bp, Arabidopsis thaliana columbia
  unsure (1)..(537): unsure at all n locations
atcccaacaagcacagatctctgaaacaaaaacagaatgcaaaattctgagatggaagaaggataagaagagagagctcaaaagattctttgtggtggtcccatggtgctcttcaagtacaaacaccttacgttttgccaattcttcttcaagagcgagacgaggaagttaacactcatctgcacattctggaagagctgcttctcttccatggaaaggttaccaacagcaacacccatacacagaactttcttcaactggaacttcactgttgctttggtctcattcacctttgcttccaatgactcttggtgacccacaagtgttggggaanttccctggcttgttaagaccaggaccaaggagacgngggactgnttaatgncagaccaggagccaaggaagcatggtaaggctngcaagttcttaaacaagttcttggcctggtaaagnttttcaaagcccaacaccangtancaagcccattctctgngccccaanaggnngattccagntaaggctcattttggggggnat

SEQ ID NO: 134221 - DNA, 524 bp, Arabidopsis thaliana columbia
  unsure (1)..(524): unsure at all n locations
gatgagaaataagtagtcgaaagaaatggagtataatttcgaatgtgcttttcatcggtgcgtttgttgctgttgccgtcggatccatggttctagtatgtacaggcgtgggtgcgggcgtgggcgttgcagggcttctatcattaccactgattgcgataggatgggtaggcgtccacactattttagagaacaagattcaagctcgagagaaacaggaagaagctctgaagaaagcgcaccgtatagcaaacgaaatggataagggtatggaaaccgacaaagtagatatgaattccatatcctggaaaagccacgcgctaaaaaacaagatcacgcnnatgttgaatgctgtgaagggtgctactgaggntggancaatgaggtggccncgaaccagtaattggaaccttncggggggcntggtggatttncagaggtnnccaancagttggtgatgtgtgccaatttccaatgtcnnangccggttcccgtttcaaaatcccnggnttgaaanacctttc

SEQ ID NO: 134222 - DNA, 540 bp, Arabidopsis thaliana columbia
  unsure (1)..(540): unsure at all n locations
gctaacacaagatcaagttagacaactggagaagtgcttcactatgaacaagaagcttgagccagatctgaaacttcaactgtcgaaccagcttggtctacctcaaagacaagtcgctgtctggttccaaaacaagcgagccaggttcaagactcagtctcttgaggtccaacactgcactcttcagtccaagcacgaagcagctctctccgacaaggcaaagttagagcatcaagtgcagtttctccaagatgagctgaagagagcaaggaatcagcttgctctgttcacaaatcaagattctcctgttgataattctaatcttggttcttgtgatgaagatcatgatgatcaagtggtggtattccgacgagctttacggttgcnttggtagcaatgggcatgggtcttcatcaacccatggggctggatcctggttnggcnagacaagntcccaaatnnaagcctggcccggttggtncgttgnccggtcccttgccgaaaggttaaaattgaataaagcctccggggggngggggc

SEQ ID NO: 134223 - DNA, 544 bp, Arabidopsis thaliana columbia
  unsure (1)..(544): unsure at all n locations
aatcagctgaaatcatcattgttacttcacatggatggaaccagcccaattgctgaagatattggtcgtcagctgctgacctatgggcgtagaatcccaaccgctgaactctttgctaggatcgatgctgttgatgccagcacggtaaaacgtgttgccaacaaatatatctatgacaaagacattgcaatctcagctattggtccaatccaagatttgccagactacaacaaattcagacgcagaacctactggaaccggtactaaggctctgaaataaaggtcactgaatccgcaaggttcgcccacggggagattccgtaggcgggaggagagcagaacgaggtgatgatgggttccataatttttgagttttcctaacggaanctccataatttaccatcatcgctgggnaaaatnagtggnccattaacccttggccccnactgggaaatncngantcccccgggggggtttttttggccccncaaatttnccnnancanccaaaagccttgggggcgggattctgagccgggggggca

SEQ ID NO: 134224 - DNA, 546 bp, Arabidopsis thaliana columbia
  unsure (1)..(546): unsure at all n locations
aaatagtacaaagccaaccaaatcaaaagatagaagcagtcacaaagtgaagccatgcccatatgagtagtgtgtgacataaggtctattcactttttgatatggtgacattgtagtgagattcagacaattttctatccttaaatctctaaaggtcccaaggattttcttttaaatgcaatcttccattgttcttttgtacagcacaatgaagctaaagaacaacatcgagggaaatcggtgctttgtcctgtacagaaataaattgcatagactactaatcttctttttttctttggggaggaacaatggtctctccgttgagtttagtattgatctgccaaagctcgtttcttacattggctttgtaccacactcagtaagaaatcagtgnatacatgccatactctgggcatttcccgnancctgggaatagttgatggcggtcacataaaacgntcnctggcccggnccccaattatggcaaatgacagccttgaccaaccacgggggnccttgccagccnccacanngncggggnancgc

SEQ ID NO: 134225 - DNA, 581 bp, Arabidopsis thaliana columbia
  unsure (1)..(581): unsure at all n locations
gcaagataagtttgtggataatcgtttccgcgaagagactcgtgttcgtgagaatcagagaaacgttcctcgaggatcaccacaagcttatggtagtgacagagctcggagtcgttctacacattcgaaatctccagggagacctcgttatagtggatgggataaaccgtatgataggcaaaagcctgaggtgagtggttataggtctgaaagatgggatcaagagagaatgggtggctccagcgatattcaggtgagtcatcagtttgaacgccctcctttcccacaaacgttagaagaactagaattggaatatacgagggatgcattggagcttgaaaagaaacgcgataagggaagaagatgaggagaaccaaccaagccatccgtgaagacaatcccgggaacttgagagagagtttcatgnaagaaacctggctgggctaaagggggtattgaattcctaaccaattgggngtgacttccctttaaacnccgattccccaanannncgnnnaancannngaancccccnggggggnaaaaaccccctggggncttnngggttnttgggnnaccct

SEQ ID NO: 134226 - DNA, 676 bp, Arabidopsis thaliana columbia
  unsure (1)..(676): unsure at all n locations
agcgaccataaattcctaacgcaagctgttgaagaagcttacaagggagtggactgtggtgatggtggcccatttggtgcggtgattgtgcataataacgaggttgtcgctagctgccacaatatggttttgaaatatactgacccaactgcacatgctgaagtcactgccattagagaggcatgtaagaaacttaacaaaatcgagttatcagaatgcgagatttacgcatcttgtgagccatgtccgatgtgcttcggagccatccatctctcgagactcaagaggttggtttatggagccaaagccgaagcagctatagccatcgggtttgatgacttccatagctgatgctttgagaggcacgggggtttaccagaaatctagtctggagatcaagaaagnagncgggaatggcgctgcnattgcggacaaagttttcccagaacaccaaagggggagtccgtttatcctaaagnacttctnccatnccacatcctcctcctctccccctncatgatggaatntgnaggagtgaagaanaactcacctggttaccttaaaaaaccccggtnaaattggccntttaaaaccgagggccggaaaaaaccatncggccttgtnacngtttgnccgnnntcggncgnanaaaaggggggggnncccaaatgggnna

SEQ ID NO: 134227 - DNA, 555 bp, Arabidopsis thaliana columbia
  unsure (1)..(555): unsure at all n locations
agcaaatgttgcaatgtgaagcaaatggaaagttgtaatctggagaaaaagaaatataaaaactaaatcacaatatgagaattgtatcttctgaagttctgcttcttatgagagaactttaacgcattttgtagtgttgggtccttgagatcttgcaatgctggccattcaaagaatagcttagctttatgtcaatgtctcgaggattcttcttgttaggagaaacggacatagttccagtgattgtctcaccctcacatatggttaacacatcttctagatacagaactgtttgtttccagtgtgtagctcgggatttcggtcctgttgagaacccagcagcttgtggcaccatgggaaacggtacatccaagtaggntacaagggcgtggatgnagccattgnngtgggcanaagcctaaaggggcngtnaaggagccccccaggggcactttgaaacccccgccttaaanccncancgggggcatttggtttggcnctgggcaaaaggggccncaaagctttccaaacagggngnaaccanccggccaatna

SEQ ID NO: 134228 - DNA, 643 bp, Arabidopsis thaliana columbia
  unsure (1)..(643): unsure at all n locations
aaaagatacaagacttaaagcctacaacgattgtgcagcaagaaaattggagcccaacaatagcccattagagtaacatgtacagcaaaaagattcttaacgttggactcttatccgaaaacacgtgttgactttagaattcaactgtaacacatgccgataagtcatcatcagaaatttaacgacatcaaccttgccgtcgagaagcccagaatccggtgaagaaaatatcgtcgaaacatcgcacgaaatttttttgtttaccaccgaaataacactgaacggaactcctaaagaacacaacataagggaatggtaatatgcatcggaatattcttcaatctttcaaccaagaaataacccgcttgatagatttcctggcaaatccgaggtttccaaaatcacaaggccagaattattaatttttagggatctaggtccctaaaaaaaccaattccctaaccncaggatctggtaggaatttattggaaattaaaggtggaaangcaatccgggtttaacccggnntggccggggggggnaagggtttaaaaccccggggcaaaaaccnattccntnggnaatttngggnttcccnnnccggaaccccgggnatcnnncnccntttcnaanngnggangga

SEQ ID NO: 134229 - DNA, 657 bp, Arabidopsis thaliana columbia
  unsure (1)..(657): unsure at all n locations
aaagnaaacctcgggaatccttcgcaggattgtaccaggctgtgaagagatcgaagacgaggaagccttgtttctcaagtcaattcagcatctcttgcttctcaaatctcaggttaatttacttaaaaagctagctgatgtatgtggagtctaattaaaagaacgtaagttctcaagttgtttatgcattacattataagatcaagcgagagagacataagaaaacagaggaggggataaagtaaaattacacagagaaaaacgatgaacaaggcgatgaatttttttagtttttgttgtagaaagtgagagcgtaatttgtacttaaggaggaagaagagagagtgagcatgtgttggatcgttgtgaccccatgtcttggaaccgattggaatccgtcggccatggccaaccttggatagnccccccngtncggccccagggccaatgagnttaccaagtggcccccaatggtggtggcctccgnaacctgaantcgggccgggaatccctggaancccgggggncccccnagtnctaaacgggccncanccgggggggggncccannntttggcccccttaggggggggnaattccngccttggggaacccagggcaaacnngggncccngggggaaattggnncccgccaaaa

SEQ ID NO: 134230 - DNA, 301 bp, Arabidopsis thaliana columbia
  unsure (1)..(301): unsure at all n locations
gccaattctgtggaaacagtagtgatagagtagataggttctcggtaacttcaggtncaantcatggagagtatgtgatcagattaagcccatctctcacggaaagaaaaaagtttagcaacgccgtggaatctgcattgcgacgttctatggttagaatatggctatggggagacgagtcaggagcttcgccggagcttgtggccgncactngtggatgtatttggccgtggagagccgnaaactgacgtcactttgaaaagtttgggnnngnaattgnnagggntcagggaaaaggtct

SEQ ID NO: 134231 - DNA, 657 bp, Arabidopsis thaliana columbia
  unsure (1)..(657): unsure at all n locations
gtcactccgtcgctaaacctaaaccgaagaaagtctacaacgctgaatcggttacggcggatggagcgaggcggtgcacgcactgtgcctcggagaaaacgccacagtggagaactggaccgcttggacctaaaacactttgtaacgcttgtggagttcgttacaaatcagggaggcttgtaccggaatacagaccggcgtcgagtccgacgtttgtattgactcagcattcgaactctcatcggaaagttatggagctccggcgacagaaggaacaacaagaatcttgcgttcgaattccgccgtttcagccgcagtaaatttgggggttttcttttcaagggtttttgtgaatttggtgacgtgtcgtaaatcttaaccggtggatgaatcaccggtgacccgaccgggaagggggttaaaggacttaaattatccagtaattaagtttaaangttttgncaaatcccctggcnaatttaatttggttggggaaatttccaattgnatttnttnccntngcttttnggttnatttccggccggggaattccttgaanccccgggggggnncnccnanggtcctnnannngggccgnaaccccggggggnnccccccancctttttgggccccctaaaggaaggggaaaatcccng

SEQ ID NO: 134232 - DNA, 494 bp, Arabidopsis thaliana columbia
  unsure (1)..(494): unsure at all n locations
gggctatagacttatcttgacaatgccagcatccatgagtatggaaagaagggttcttttaaaggcatttggagctgagcttgtattaacagatcctgctaaaggcatgactggagcggttcagaaggctgaagagatcttgaaaaacactcctgatgcatacatgctccaacagtttgacaacccgtgcaaatccaaagattcattacgagactactggtcctgagatctgggatgatacaaagggcaaggtggatatctttgttgcaggnattggnactggtggactatcactggtgttggncgatttattaaaaggggaaaaccccaaanccgggttattgggtgtaganccccccgnaagcgtaanatttcctggggggnaaccgggccnccaaaantccgnntttggcgggggtttcccccnaaanttgggccaaaatttggggggnccncggngttcccagnggggccttnaccccggaacacccctt

SEQ ID NO: 134233 - DNA, 689 bp, Arabidopsis thaliana columbia
  unsure (1)..(689): unsure at all n locations
agaccagactgttgcagctgaacctgaagaggccgaagaaggggaagaggaagagtctattgttcaccagaccgctagtcttggtgatgtcgagggtttgaaagctgccttggcatctggtgggaacaaagatgaagaagactctgaaggaaggactgctttgcattttgcatgtggatacggcgaggtgagatgtgctcaggttcttctggatgctggagcaaatgcaaatgcgattgacaaaaacaagaacacaccattgcactatgctgctggttatggaaggaaagagtgtgtaagcctcctcctagagaatggtgctgcagtaactcagcaaaacatggacaataaaaatcccattgatgtggccaggctaaacaatcagctagatgtggtgaaactacttgagaaggacgctttcctctgagctgctttgacccccttgaaggatatggttcttccctgncatggnatagtgnacagagnctnttcaaccttgctntgtggggggtcaccatnaanntggnaaaaaaaatggggaaaatggntgttatnaggggttggaangnatanttccccctgaatgggtttcctttgggcccaaaacctttttgncccccttgggggccccaggggtttngttnngccccaagnnaaaccccaaancggnngggggggnantngggggg

SEQ ID NO: 134234 - DNA, 496 bp, Arabidopsis thaliana columbia
  unsure (1)..(496): unsure at all n locations
ggcggcatgattgaaggatttatatggtcaccaagaagcggtgacaccaataaccaacccgatagttggcctcttgaagatggtcctcattctgatttcacgggacctacctcggggtgcacagcgtgtgtagctcttattaaagataagaagctctttgttgcaaatgccggtgactcacgttgtgtgatatcaagaaagagtcaggcttacaatctttctaaagatcacaagcctgatcttgaagttgaaaaagaaaggatattgaaagctggtggctttattcacgctgggagaatcaatgggagcttgaatctgacaagagccattggtgatatgggagtccaagccaggataagtttttaccanctggaaaaccaatgggttcctgnctgntncccggattttaaccncnattggccnntgggnangatggnggnctccctggttggtncctcccangggaattgggggnttttttnccnccccnggacaa

SEQ ID NO: 134235 - DNA, 625 bp, Arabidopsis thaliana columbia
  unsure (1)..(625): unsure at all n locations
aaagatgtctcaagataagcaagaaagtctaaggcagacctttaaacaaggtgatgctgaaaaagattcagacgtattttcagaaggccatgaatttccaagtaaaatggcagaactagatagtgacactgaagaggagatagtggaagaacaattagaacatttgcagaaagagaatgagaagttaagtctaacctttgaacaacatgatcacatctacagcacaacggagccttctgaaattgtgggtttgcgtcatgcgttataccaaacgcaaaattcacctctacgatcacctctcacttcaccaattcatactcccattggttctccgctgcattacctgatgggcttcacaaatacgtctccaatagcttcaacaatgcataggcacataggtttcaccgnttcggtctcccatcaaatcctctggntcactcccctgnatggattggtccttcagcaaggaaaccttgatggnncgnaaaccggttagcattgtccaagnnttncccacancctggagngcttncctgnggtncaaaacgggggcggnattcgggggcnggggggttccggagggggatggngggnccgggngggggnttggggnncccggnggggc

SEQ ID NO: 134236 - DNA, 525 bp, Arabidopsis thaliana columbia
  unsure (1)..(525): unsure at all n locations
aaaaagctttgctattatgatggatatctttgacacaatgtctactggcaaaagcaccagttactgcatattatgttgtatttggaaactaaacacttgttttcatgtatgtgttgtgtttaatcatcagggaatccaaggaacctgtcgataatgcgagcaacaggagttccatcacctggagtatactgaaccagagaccccaactccattttcgtcaaggtttgatgaagggagtgaggacgagtgtagtacaagtgcttcctctcttcaagtgcttcagctaattcacattgatgattgtccatcagatcttccgttcactancacaatcaatgggttccctagtttcagtgcctcaaatatacttccagatccagcgngactaataccagggatgcagttggatataancagcggtacttggggaaatgggagaaccccaacaanggccancggccacaaccttgtngggaaaatccccgnccttggaaaaagggggaaccccctcggggcggcttaaat

SEQ ID NO: 134237 - DNA, 608 bp, Arabidopsis thaliana columbia
  unsure (1)..(608): unsure at all n locations
atcctgaatgtggtaaggaaggtctgatcgtttgtgataggcagacaataaaaggagtgcaaggagttagtttagatgaattagttggaattttcactcgtattggacgcgaagttgaggccattggtgttgccaatacgtattcgcttgctgagagagctgcttcggttattgaggaagcaaggccattgctcaaaaagattcaagccatggctgaagatgctcaacctttgctctctgagtttcgtgatagcggcttgctcaaggaagttgagtgtcttactccgaagccttacccaagcttctgacgatttgagaaaggttaattccgtcaattatgactcctgagaatacagaaccccatacaggagtccaacctacacccctgggttaaaactttgaagaacggccgagagtatnaancccagaaatcctgggggtccccaggggatgaagcccccaggaaaaaccttaaacaacccancaaaccccaagcagggaccaatggccancccggaagattntgccngggnaanaaancccgnatttntngggnnnaggtttaaaatcggaaaaggggggtccccctaaaggattttgtccggtgc

SEQ ID NO: 134238 - DNA, 589 bp, Arabidopsis thaliana columbia
  unsure (1)..(589): unsure at all n locations
aaaaggtgactatatatcattatcttaaaatacaatattatacaggacacaacaaagattgttacacaatcttgagtttactttccgaccgacgaaaaaaaaagataacaatttacacaactaattgaagtttagattcaaactctcacttacaagccaaaattttcacatttaagtccatttaaggaaacttcacacttcgcttctctgcaaactgattaaccaaagcaagagcattgctagtgacttgagccacgtgaaccaccttataccgaatcagtcttttgactttgcctcccatggctcgttctgagaatccatctagacacgttgtctcgtccgtcaaagcggcactgncccatgtttgaacggtaactcattttccacatgaaggcctcactaggcacagcatgnccagntcgagcaagtccttaaccggttggggcnaccgggccnggtatggctaggacttcggtgnaaccttgnttggaagaatcccacggtaaanttnggggcccntnggaagttggggcnagttgaanggttgggcggccagtgtgtganactgggggaattgggatgtggggtc

SEQ ID NO: 134239 - DNA, 537 bp, Arabidopsis thaliana columbia
  unsure (1)..(537): unsure at all n locations
tnggttgatgctcgtcaccacatgctaggtcgcttggcttcggttgtagcaaaggatctgctcaatggccagaatattgtggttgtccggtgcgaggagatttgtctctccggcggacttgttcgtcagaagatgaagtacatgaggtttctccgtaagcgtatgaacactaaaccttctcacggacctattcacttccgtgctccctccaagatcttctggcgtaccgttcgcggtatgattccacacaagactaagcgtggagctaatgcacttgcccgcttgaaggtcttttgaaggagttcctactccatatgacaagatcaaagaggatgggncgttncctggatggccctcaaaaggnctttgaagggctgcaaggntgggacaacaaanaactggnctgtttgggggccgcctttncntcctngaaanccggggngggaacacttntnggganccatcaaaggnggctggnggaanaaagggnaagggaaaaagcccaaaccggtttttgggggnnaaaaaggaactttt

SEQ ID NO: 134240 - DNA, 591 bp, Arabidopsis thaliana columbia
  unsure (1)..(591): unsure at all n locations
gtnaactttaatgggggcaaaaagcatcaagttatattccaaagggtttaagccaaaacatgaatcaagccaccaataaaggacaagagctacttccccaagagcaagaacatcaaccagtatagtactttcagctatacgnagacagaaacacttgtacgagtggttgaatccttagtctaactgatacacaccctaaattacacacagcttttttatttatcaaaaccctattgcacttccttattcaagattatgccctttctcttgaagttcagtaataacctcattcctcattctcaaccacagtttctgnggctcctttatcaaacttcttcttctcccatttccttgggggggaattatcagcctcancttcgggctcaacaattcctttcgggccaattgnaggaccaatcattcccccctttggaacaaaatcccccagnggctctggatnccagggtaaggnactcnngcgggcatncaatgggngaatttcncctcccttgggctgggttaggggcaccacctaaggggggtcatggaancaggcnccaaggtggnaggggngaatggttccnctggngc

SEQ ID NO: 134241 - DNA, 586 bp, Arabidopsis thaliana columbia
  unsure (1)..(586): unsure at all n locations
gagagaagtaacaagttattgaaggggaagtacaaagtgtaaaatgatctgcgtttgagataagtgacgaagaagaatataataataaatcttttagtactagagaaacagacctctgtctttgatttgtaaaccaaacaagcagaagaggaatctggctaacattccatctatgccttgcttgcgatgttgttggagagccagtcaagtccctcatagagtccttctccagaggtggcacatgtgctctgaatgtaccagtgtcgttgacgaagagaatgaagcccaagcttggtcagttatctcagcagcgttcatcgcgttgggaagatcttgcttgttagcaaatacaagcaggacctggcatccctcaattcatcctccattcaggatcctggtgaagctcggccctggcttcaacaacacgggcacgatcaattgntggccacaaccaagntaagnccctggtggggtctggnagnnatggccccacaatggncgggtttggcttgnccccaanatcccaacggggacctntgcctgnatcaaaggncaacggtgacccatggtggaagnggggggnnct

SEQ ID NO: 134242 - DNA, 515 bp, Arabidopsis thaliana columbia
  unsure (1)..(515): unsure at all n locations
gcaaattctccaactattccttagaattcaacagtaaagttcgaagctttacatagagaaattacataaaaaccaacaacaacagatcaagactccaaagtgttaccaagaggaaatgagaagacttcacgaacaggagaaaactcaacgagaccaatctccataccataaccattcaccggaagcttcaaatctctcaacacagagaaagcctcagccatacgagacttaggaacatcaagagccacgggacaaaacggaacccaagaatcaacacgatactcttcaccaatgtcaacagattctttcttcaacatatcacataactgggtctgcaacttggaggagcggtagagacggngngggnagatagnaacagtacgttgttgtcgctagagaagctaccggttgtngnggacgggtncgagttggtctttgnttngntncgagttttttgatgncggntttgnncccggttgaccgaaaaggggtggnnaaagtgtntgtgtgnncgg

SEQ ID NO: 134243 - DNA, 557 bp, Arabidopsis thaliana columbia
  unsure (1)..(557): unsure at all n locations
gtgaacacgaagtagtaacaactaacaaggtaattaaggatcattggcttatataataaatagatttagaaaaagtaatcagtcaatgttgatcatcatcttgacaaattcatcataattgacttggccatcaccatccaaatctgcctcctttatcatttgttcaacttcttcatctgttagcttttctcctagatttatcattacatgactcaactcactggcagagatgtatccattttggtctttgtcaaagactttgaatgcttctttcagctcttcctccgcatcactttcctgaagttttttggccatgaggttgagaaactcagcaaattcaatgggtgccggtggtatcaggatcaatccccagtgntgntatcatggagtcctggtcnggcgggnttctggtccaacgacgggncacggtggaagtcctccaccggtancaacggcgcggctttgcgaangncaaaggggccttgaaccaggnccggnctttggaggggggccnccaggttccggaantttgagnaagggngggaccccnccggggc

SEQ ID NO: 134244 - DNA, 306 bp, Arabidopsis thaliana columbia
  unsure (1)..(306): unsure at all n locations
tttgacatcattcactgagtaacaacaatactttaagttagttcccttgncataattattaaccaaagtaaatatcatcacacctatcgtcaaagtcgtcacatctcanacgtgcttcaatctcttcatccttggttgcacactgaccaaccaaccctcacgacgatttttccnttccgtgattgagccatgtctcctcttcaaaccanagttgaanagagccatccaatggnaaaaccggatatttgtgcaagtccaggacatcaanaacncgncagtttctgcancctgggntgagantcgtga

SEQ ID NO: 134245 - DNA, 558 bp, Arabidopsis thaliana columbia
  unsure (1)..(558): unsure at all n locations
aaaaggacttattcaaaagttttaaacaaatacaaaaaattggggatccaaaagtggttctcagttttcacacaagattttcgtctagacattggaacgatataacaatgaagataatcaagaagccatgtttttccagatttgcaagtagaccacaacatatacagaccggatatatatatatctatttcgttggccatgtcgcttgtgcagacataataattcccacaataactccaaacaacccgagagcactcccgaatatctcgatcacaagaatctttacaaaaagtgtggagttctgagcatcggacaatgcacaactgcttccaatgattcctacacataacccgcatacaagggtggcgaatccaactataattccagatgcaaagattgcatatccagctctaagggnctcagcatcatacatcttgnagatgggnccnctcaactttggttgcaggatggttgnaccataacncctatttgnaacggttcggaaagngggccggtggggtnttcgagaaacgggggtntntgcggccggtaacnttc

SEQ ID NO: 134246 - DNA, 513 bp, Arabidopsis thaliana columbia
  unsure (1)..(513): unsure at all n locations
agcgagaacctctgtcaaaatggcccctaccaccaagtccgccggcaagaagtctgctggaaagaccggccgcagcgccatcgccgatgtcgtcgcccgcgaatacaccatccacctccacaagcgcgttcacggtgtcagcttcaagaagagggcccccagggctgtcaaggagatccgcgctttcgctaagcaggctatgggcaccaacgatgtccgtctagacccccagcttaacaagaaggtctgggagtccggtatcaagggcgttcctttccgcctccgtgtccgcatctcccgtaagcgtaacgacgaggagggtgccaaggagaagctctactcctacgtccaggccgtcaacgtcaaggaccccaagggtctgcaaaaccagatcgttgaggatgcttagagtacttgcaaggataaggggaaagggtgatttgatatcaaaagcattgngttccggcgggttntgttagnantacnacgnttttttnangaaagntggggggc

SEQ ID NO: 134247 - DNA, 504 bp, Arabidopsis thaliana columbia
  unsure (1)..(504): unsure at all n locations
gttcatctccactttactctttgttttcgctggtgttggctctgccattgcctacgcaaagctgacgtcggacgctgctcttgatacaccgggactagtggccatcgcggtttgtcatggttttgctctcttcgtggccgttgcaatcggagccaacatctccggtggccatgtgaacccagccgtcacttttggtcttgctgtcggtggtcaaatcacagtcatcaccggagttttctactggatcgctcagcttctcggctccaccgccgcttgtttcctccttaaatacgtcaccggtggattggcggttccaacccacagcgttgcggctggactaggatcgatagaaggagtagtgatggagatcatcaatcancttcgctttgggccaaaatggctaaggcaacggcgntgatccaaaaanggtttcccggaacaatggnccttnggcaatggctaanggtggggnaaatcctngcgggggcaatttccggggntntc

SEQ ID NO: 134248 - DNA, 432 bp, Arabidopsis thaliana columbia
  unsure (1)..(432): unsure at all n locations
gaattcatcactactcttacaaacaatggtttccagtatatgtaaaagattctgatgaatctgccaatgtatgagcatgaatcaaagctttacaaagacatggttgattactactttctatgatggtaactcgcatgcggctttaccatctttggacttggactgaccaagcagctcagctacggttttgcagcgacattcttttccaggtcgtaacacgtctccataaaccgncatctcgataacatctaactccttgtccgtaaattgcagaccacaagaatagctcttaaagaagtggngggcatcaacaattttccttgagctggatttgaaanctgggnnaacncctgggtttgaagnaanctgngcaattctnccggaatcgggancntccanccttttggnataaaggnccaatngngggtcaaa

SEQ ID NO: 134249 - DNA, 461 bp, Arabidopsis thaliana columbia
  unsure (1)..(461): unsure at all n locations
aattaaacattcttaatccatcctcattagattagttgttttattaagcttcctgaatatataatctcagttcgatgacgactggttcaagggactcctcccacaactcgccggctttggactattcccgacgantcgaggactcatctgacccaacctgattccactcactcttggactaaacacttgtgacaaactccgattattgactggagtcgaacttgaacttgtcacctnaggactactcgtgtgtctaaactctccnctgcttcgggtcanaanctcancaagaatctccaaatctcccgggatacgatgttgtgggatccaatctccggttccggntgcgagattgaagggtnaagctggggntttcttcaaaacnctgntggnntcaaagtccctgaagatgangtcctttgaagaatnnnagggtggnggatattgccggacggggggtt

SEQ ID NO: 134250 - DNA, 537 bp, Arabidopsis thaliana columbia
  unsure (1)..(537): unsure at all n locations
aaaaactatatatgtaatatatccatatataggttttgatgaaaaccctaaaactatagatggtttattcttcgtgatcggtgtttcagtgccgaaacaaaacattcatagtttaaaattcagagagaaccaatgcttcctaaagcgttaacattgtaaaatccagacgagaaaaaaccagaaagacctgccgacatctgaggagcattaaacacttcctcatccaacggtgaataatactctccacggacctctccatccaacggctctaagttcatctccgactcacacggacggtggagatctacggcggtaaaaagtggtgggcgacggtggtagatcagcggcgtcttgaccggtgagttcttgaacaagctctctgaactttgaagggcaaagtctcgactctcatcggatttntaatgtaacgncctttgatgggttgtgcgagccgttgnttcccctctgcttaggngggtcnnnncgangnggccnnatnctgaacccggggtccnagttnaacggcncnccggtggc

SEQ ID NO: 134251 - DNA, 557 bp, Arabidopsis thaliana columbia
  unsure (1)..(557): unsure at all n locations
ggcgtcgttactcgattccgtcacngtgacccgcgtgttttctctgccgattgcggcttcggtctcgtcttcttcagctgctccgtcggtttcacgacgccggatttctcccgccaggtttctggaattcagaggtttgaagtcttcgcggagtttggtgactcagtcggccagtctgggtgcgaatcgtagaaccagaatcgctcgcggtggacgaatcgcctgtgaggctcaggacacnantgccgccgccgtcgaagtaccaaatctgtctgattcagaatggcaaacaaaggttctggaatcagatgtcccagttctggtcgagttctgggcacaatggtgtgganctttgccggatggattcaccccaaaagttgaccagctagccaaanatttcgcaggggagttcaaatnttaaaaaatnnaccccgggggggngcccaaatttnggaaacggttngggggaaaaaagggttcnaaaaaaaanncntttnaaaggggggggnaaaaaaaaaanccccctttgggggnnncccaaaaaancggtgggaaaa

SEQ ID NO: 134252 - DNA, 567 bp, Arabidopsis thaliana columbia
  unsure (1)..(567): unsure at all n locations
gaagagaggtcacgtcagcgccggacatggacgtatcggtaagcaccgtaagcatcccggaggtcgtggaaacgcaggaggtatgcatcaccacaggatcctcttcgacaagtaccatccaggttacttcgggaaagttggtatgaggtatttccacaagcttcgtaacaagttcttttgcccaatcgtgaacctggacaagctatggtcacttgttcctgaagacgtgaaggcgaaatcgagcaaggataatgttccgttgatcgatgtgacgcagcatggtttcttcaaggttttggggaaaggtcatttgcctgagaacaaacctttccgttgtgaaggctaaagcttatccctaagactgctgnagaagaagattaaagggaagcctggtggtgctgntgttcccacnngctttaggttttttttttcaattccaggccccttttnaattaaattcanggtaattgnaccccagctttnttggnattttnggggggcccgnatcctggancccgggggggnnncnaggnctaanacggcncaacccggngggncccaantttg

SEQ ID NO: 134253 - DNA, 541 bp, Arabidopsis thaliana columbia
  unsure (1)..(541): unsure at all n locations
ggattaatctttttaagcttttgtaacaacttatcaggattcagctgagtgttcctcgaaagtcactttaagaatgaaaaaaattgatgtttgtttggtatcaatcgtccatgttcttcatgtactccttggaaagctttgtttccataataagtttctgttcatttatgagtgagtaccctgattccagcaatgcttccaccgtttgctcaggggcagtgaattgaggaacctcttgggtctttttacgtctgagaagaactttccctagagtctccattcctccagcttcatctanccacttgaggntagacctatcatatgtggcgtganctcaaaggctccataagaaggccaagtggcttgaatttgggaaacttaaccnacaatggttaaaaacatcctttccgnggaaanaccaaccttccncggaanattcngnaaaaaaaggttaagggaacctccacggggtggggngccagnagaactncccatnntncctccaggggcangggggngaacagggnnngaaaacggcccc

SEQ ID NO: 134254 - DNA, 539 bp, Arabidopsis thaliana columbia
  unsure (1)..(539): unsure at all n locations
aaagccaatcactgaaacattacagaaactgagagacgcaactaaaatatgtagtaccaaattattccaatatctctagagagcacaaagctagttccctcccttaataaaccctgagaatttatgcatgacttcaatagcattatcacattcaggtttcaacaaatgaaaaacatgatcttctccttcactctccaccacttcaacctctcctttccaaccagacttctcaagcttagccgcgtaaccccaaccctgcctcacnaacgcatctttctcagccaccattaccaaaaccttaccacaacccaacccagacaaatccancggctctgattgcaccacgttgagcaacggnncatctgttccatctgtgntattagggcttggcatcatccaaaacggctctatcttcatcctcaacggttcatctttcggatccttcttggngnttggggtttcggcagaggtagggtggaggagntggttccgagatccggatnggtaaacagggngggtttctttgggggttnatggta

SEQ ID NO: 134255 - DNA, 526 bp, Arabidopsis thaliana columbia
  unsure (1)..(526): unsure at all n locations
gccccgctcaatgcttgttgcacaagccatagggacagcgataggctgcgtggttgcgccactcaccttcttcctcttctacaaggcgtttgatgttggaaaccaaaatggtgaatacaaagctccttatgctatgatatacagaaacatggctattatcggtgttcaaggtccctccgctctccccaagcattgcctagagctttgctacggattctttgcctttgcggttgctgccaacttggcaagagacctcttaccagataagccagggaagtggatcccactcccgatggcaatggctgtaccggtcctggtggggtgggtcgttcgcaatcgatatgtgtatcggggagcttagtggtatacggtttngaaaaagggtgaatcgtaaagaagggcanattgtgaatggttccangctgttgcatcaagggttganaatgtggaagatggcccctnggatnctngccttcttctttgncgggcnctggnaaagggttnaccccganctgaatganctngc

SEQ ID NO: 134256 - DNA, 419 bp, Arabidopsis thaliana columbia
  unsure (1)..(419): unsure at all n locations
atcttcttcagcttcagatttcagntcttaaatcttcaagtcttcttcttcttcttctgcaaccatggctatgcaggttaaaaattgtgttaatagaccaggcgattatgtgggatattatggtcggttgttttaaagagagattacttctttcttaatgtattgatccgtattaggtaagaacatgtctctaatcccctaattattactggtggtctacctcttctagttgcgtattaattagttttattagactcctttgtaacatttaattactcttacaatatattaagagnctaatttgtgttttcttactttgtgnttatagggaccgtngtgagaggttnanggtcctggntgaactnatanccttccncagatggccntntancccaanncaagaaagccttatnccttcc

SEQ ID NO: 134257 - DNA, 452 bp, Arabidopsis thaliana columbia
  unsure (1)..(452): unsure at all n locations
acggatttggaaaancganacncgaagttggcggnaggctatactgtcatggagggtgttcatctcagatgaatttgatgagcttctgcctaagtatttgagtttcttgaagggtcttgttgactctgacacattgcctctaaatgtatcaagagaaatgcttcaacaacacagcagcttaaagacaattaagaagaagcttatccgaaaggngcttgatatgatccgcaagcttgctgaagaagatcctgatgaaatccatgatgatgagaaaaaagatgtggagaagtctggtgagaacgaatgagaagaagggtcaaatacancaaaatttcngggaacggagtttggcaaagtctggtnaaantaaggaatcaattggagggtngntggctaaanaagggaaccggtttggnaaaaantttcttcggntttggagnaaaanaaagntc

SEQ ID NO: 134258 - DNA, 533 bp, Arabidopsis thaliana columbia
  unsure (1)..(533): unsure at all n locations
agactattataataaccctaacataaaaagatccatcagctttcccttgtttctcacgcaaactctgaaaatgccaatttgaggaaaaccttctcctttacttttgctattgcctctctcttatttatttctgctctaccttgtccgaagcatgtatcctcctccctgattgcttctctaccgtctgaaacaaaccgttgaagcaagcacgaaaagattcgcattaagaacaccaaaaaggacaaggatctttctcccaagagcagaaaccatttgctacgataactctaaaatcctctcttatcaggncaatctgttgccctgtgtccagatttcccacaaatggagcatggacctccaaaacttttctcccggggaggagtctgntgnttgntggaantntgcacgggttaaccaatcatcggaattccncggggcnantacanctgggggcagtggttcnccacaagggccttnaaaaaccnggaanatacnncccaatataggggnggngggcccccaangggnntggc

SEQ ID NO: 134259 - DNA, 538 bp, Arabidopsis thaliana columbia
  unsure (1)..(538): unsure at all n locations
aaaaatcatatcgaatttggttatcctctttcaccaaaaccaccgatcatacctgattaatcacatttggttcattgagcatatcaaattattactatagttgggcctaacccgcaactgaaaatctggagaagatttaacgaataaaaaagagtggtaaaaccgttaaagtattttctttcagctcatctcatatccaccagaaattaaaaatcaaaagtttaaaccaaagtcatcttgatttggcttgtcgtaggcggctttacttccttctccctctcaatccacatctcctgagggnttctacatgtgaatgggcttgtcataggtagccatggcagcttcccttgatagcctcactcatggtgggntgagcgtgncagactcgagcatgnctcacntggtggacaaagtggtagcagaacggccatgggcaatccccncgttgggnaanatgnganccccagactggctggccttatcagcaaactggcancccngggggcaagngtgggcncatggctaaggnttcactggt

SEQ ID NO: 134260 - DNA, 554 bp, Arabidopsis thaliana columbia
  unsure (1)..(554): unsure at all n locations
aaatttcagagcggatgcttggttggcatcttactcgtgggaagggagaggaaatgggggaaccccaggtatgataaagaggtctctcacaatcatcttcctcgtctcacgagcagacaagatacttcaggagagttttctgctgcctcacctgaacgcctctctgtatcttctactatcgctgggggaaagcgccttccctattcatcagatgtcaatcaatcaccaaatagaaggattgtggatcctgttggactcgggaatgtagcttggaaggagagagttgatggctggaaaatgaagcaagagaagaatactggtcctgtcagcacgcaggctgcttcctgaaagaggtggagtagatattgatgncagcacagatatcctagcagatgaagccctgctgnatgacgaagcgagngagcccctgtcaagnaagttccaatccctcaacacgggcnaccctnnaananggtattnttntcggntgtaancccttgccctnttggaancggttanaaccngngcancnctgccatgggggcncggnatga

SEQ ID NO: 134261 - DNA, 480 bp, Arabidopsis thaliana columbia
  unsure (1)..(480): unsure at all n locations
aaaatacacaaaggaaatacaacaacagctcttaccacgtttctacccaatatagcagcaatctcagagaaacatacattaatttacatatatatatatatatatatatatatatatctataaacttgtcaagctttacaatctaagtttcctttctgatcaaagactctctggcgtgttaaatcttcccccaatttaggtacctttatccaagctccagaagaaaaagcgagaccgtggatctctatacgggnccagaaagacctgaacttgaagtnatcttatcttaggcacaaccgntctcatgnatacaatggntacagccagaaggaaacccttcctccgnttgtagagcaggatacaactaggggtgngcctccaggggggtggaggacannccaagtggtattcgggggnccatagangggccantagagggcccctttaaaantgccccgggggganagccgcnnntncccc

SEQ ID NO: 134262 - DNA, 559 bp, Arabidopsis thaliana columbia
  unsure (1)..(559): unsure at all n locations
aaaccaatcaatggaaactttcaagtgggctaacaaacacacaacagaaatacaactctcactcagttaagacacaactctcgtagttgggattgtaactaaattattatgagttccgtttcagagcaaccaaaagaagatattcagatcagaactggaattgcatctccggagagtatcccagagcttcaaggtttgcagccatggccttgttcattggcggtggtccgcatcttaggatctgaatatcagatgcaggtgcagggcaatgagtctgaatcatttcctttgatacaaatccaacaccaccatcccatacttccggaggctgggttcaaaacataggaggttttaaattgttccaggggaattnggagtaagaccctccaattcttccttcaagagaatgtcggcggatgtacggtggggtaatgggntncnccttggctggcnggtggggttccaaaatgcccnggcacttgaacatggggggntcctgaccccagaaggtccaatgcccaaacgncnggtgantgaccaccctggcctttggaaaggc

SEQ ID NO: 134263 - DNA, 498 bp, Arabidopsis thaliana columbia
  unsure (1)..(498): unsure at all n locations
gaaagcccccatgtatctcaattcataaccttctcttgccataattcatttaagggccaaagcaaaagaagagagaaacgcacgcactttgctttttttatttaagcaacagggagagaatcttcctgctcctccaaggaagtagttggagtgccacttccaccatttagcaccgtgacgttaccttcagcgtcaacgtccacaatcaccgagtctccttctttgatctctctcgcaagcatcttctctggcatactatcctctaaaagcctcatgatggntcttctcaacgggtcttggctccataagctcggggtaataaccttcggctantaatcctcncttttgaatcctttcgggnaacttgaaggtccatcctctttcntctttaaacctctcngaaaaatttccttcaacaggaatggtcagnaattttcttttaanttccangcttngtaaaggggnntgnaaanannatcccggtnagcnggttangga

SEQ ID NO: 134264 - DNA, 542 bp, Arabidopsis thaliana columbia
  unsure (1)..(542): unsure at all n locations
gattcgtccgtcttctttcttcttagccgagtacttcggtagattagttggaacgattgatgattttgagttaattgaacgttcggcgtatgagtggtgatcggatagccagtgttcgtaggctccatgctcgcgcatcgaactacctaccacctatccttctcagttaattcacgggcgatgttacgctcgatgatgagttccggggcctgtgtttcgtacctaatttgaaggaattgttgagtttggtttacacctttgcccgcggcttctccttcgtggggaagtcgtgggcacaaacatcggcgcttgttcaactctcgtcatcgcatttgttgccttgcccncattggtgaatgaagttgcgggttgaaatcncggnatncgggaaaagttgtcgacggggnaccnaagtgnatcagnccgccaaacccaacggcctttggggaaaanatnangaaaaacccggcctttncccnttccaatngggtnaaaagantngnnggggattccgaancaaaaaccaaccggtaaccccanaa

SEQ ID NO: 134265 - DNA, 556 bp, Arabidopsis thaliana columbia
  unsure (1)..(556): unsure at all n locations
gcaatagagagattagaagaattgaacttggtaaacacttgatcgaaattcacatttatattagaaaaatggaaaagcactttaaagttgcgtaacgtaaactactacatgaccatatatgatacaaaaccttccaaatggatcaacatcaatctttctactaagaaacttatcttcagtggtcttttgatcaaaacgatgctcaaggtactatacaattgcaacaactaaactattattcatcacactcgtgaaacccattttttacgaaataggaatataggatctgctaaagatcaacacacccgcttaaaatcccgggatgtgttagaatggttaggcttcaaccgcaaaagctaaaccaggaaccagtatataggaatggtgtgggttnccaaaaaccctagtattttggggttgccactnaatgccncccccaagggggttnggncaacgctggannccaaacncngcggatccgnaanccggttgaagaggnaggantgggggcnnatggnacatccncgggggacctnncagcgcggngcnggntttc

SEQ ID NO: 134266 - DNA, 552 bp, Arabidopsis thaliana columbia
  unsure (1)..(552): unsure at all n locations
atccaatactccttctttgcaagacgaaaattgtaactgtagtagatacatcatgagttatggttatgggtcataaatcacatcttttttatagtctcagagacatgagagacaaattctacttcttgaccactttccgattccaaacatcaaaacttttgtacaaaaagaaaacccaagaacctcaaatcacaagcaaaggccaaagtactacttgtttcataaaacggatgaaaaaattggaaggagaaagctgcatcaacggcttgggcaagacttgtctttcttttttagttggggttgatagaaaggaacactccaagtccttatgctggaaataccaatggctgntcgatgagttcacaacccgcgagggaagttgctgacttgccttcccccaaaaaatctttccggncagttgnacccaaccccatggggtnccaagagtttttnccccggggggggtangggccctaaatccnnggnngggccncnacggttcccngggggggnnncnanngggccaggnccggggggnttggaaaaanccgg

SEQ ID NO: 134267 - DNA, 488 bp, Arabidopsis thaliana columbia
  unsure (1)..(488): unsure at all n locations
aaaagactctctctctcccatttacatctcttcatcttcttctctttctgcattttgtgactaaatttgttccgatctccgaaaaatatgaaatcttattagaaaaataccggaaaagaaacagattagtacattcgattcagcaccttcaacggttgcagaacacaaaataagaggaattgcttgattatagctatggaagaagcaacaaaagtgagttcagacgtccctcaagctaaggaagtgacaaaggaagatactgtcatggagaaagaagaggaggatacaatatttgatggtgggatttggtaaaagttgagaaaggaggggntccaccaaaaagtatgnatggtgatgatggntgggaagccgggagccgttgnagccttangagaggctttgcggttcccnggtgttaaccctnngggcctacctggngttnggnnnctttnangggtnggncccgccttggaccccgnaaanaagtt

SEQ ID NO: 134268 - DNA, 525 bp, Arabidopsis thaliana columbia
  unsure (1)..(525): unsure at all n locations
gaatnaaatagacgacaccaccttcttctatatctacattacaacaccttccaaaagaataacattatatatctaaatccttcttttctttttgtgttcaatctaacaaggatcttaacacagtaaacaaacaaatgtgtgagcgacactttcctctttacttacctctgtggaaaatctgttacgtatcatatcaactcttgagttcaatcaaaggcagtccaagccacatatctcgaggataggaccgcctttcgccacaaacggattgactcgtacccaaagaagcgtaaggatagaggcgagaaggatcgaccagacaagaatgattgtaggcattctgtcttggttccccaagcagacctttaagggaagggtataggtgggnggatggcccaaaaggngaaggacaaccttccgnaagggggcccccgggtcaatccggtaacgggnggntcaggattcccncaaggnccgggtanggtntggngggaannnggttgnggggnnaangggngccntttg

SEQ ID NO: 134269 - DNA, 526 bp, Arabidopsis thaliana columbia
  unsure (1)..(526): unsure at all n locations
gcaaaaccccaaaatctgggtaaacaacaattcggttatggattctcgagattcgttatcatccgacgccgttagagatgcgtcgtcactctccgacgacgcagctgttctctctgtaacctctacactcgctaaaaccgctctttcctatttccaatctggaaaattcgaagagtgtatcgacgttttgattcagcttgatcagatgaaacataacgatcccaaggttctacacaatatggcaattgcagagtacttcaaggatggttgctcgaattccgagaaattggtggaagtgctaaaacgtgtcaagaaacagagtgaacaactttcttctgcagcaaaagaccaagtgggagctgcaaaccctggaactaaacgtctctgtgtcaaagntcattttgatagggcagtaacaactctcaacattgcggtacctggttcatctggatcccaatcaaatcctttccattcagaccttggtcaaaaatcagngnngcgggcaanggctcaatggtctgtgggg

SEQ ID NO: 134270 - DNA, 525 bp, Arabidopsis thaliana columbia
  unsure (1)..(525): unsure at all n locations
aagtttacacagaagaagggtttagggtacaacatgcagaaacattatctatatcacaaatacagtaatatttaaatgcaaaaacttgtttttgttcttcaaagatgatttcatgtgcgtaattttgcatagccaacgaaagagtttggtagtatagtttcctcatcagtcggtgtagggttgagagtccatgcacaaatgcactagctttctctggtactgttgaaagtattcacaaaccgctgtcacttcttccttccctgattcaagaccaggcagatcgggcagcggtactgtgccatcaccagaagcagattccagactcctcgtcttggggttgatagcncgggtatggattcctgaatgnaccncctganacgcggagggcnaacatggnnactgaatcaggntggtgnaccnccctgggagctggaacggctcttgcaggggccanagccccattnaanaagggcccccaaacgttttncccntgggnacnggtagncnncttggaanccgggaacg

SEQ ID NO: 134271 - DNA, 435 bp, Arabidopsis thaliana columbia
  unsure (1)..(435): unsure at all n locations
gaaataagaagttttatgtctcagatgctgcaagggctcgcacacatgcataaaaacggttatttccatcgagacctgaaacctgagaatttgctggtgaccaacaatatcctgaaaattgctgactttgggttggctagagaagttgcatctatgcctccttacactgaatatgtgtccacacgttggtatcgagctccagaagttttgctacagtcttcattatacactcctgcagttgacatgtgggcagttggagcgatactaagctgagctttacgctttaaactccggttatttcctnggtgaaaagttgagnttnggancaattnttccaaaatcngggcgggggtnccttgggcaaacccgggactngggnccaggncccccggnaagggcganaaangtatactcccnggaatttnnggggtnttt

SEQ ID NO: 134272 - DNA, 571 bp, Arabidopsis thaliana columbia
  unsure (1)..(571): unsure at all n locations
agagagaagtgtttcaatagtttggcgtgaagatggccggaggaggcggatacggcggcgcatcggggaaagttgattacgtcttcaaagttgttctaatcggagattcggctgttgggaaatcgcaactacttgctcgattcgctagagacgaattcagcatggattctaaagccaccatcggcgtcgagttccaaactcgtaccctctccattgaacaaaaaagcattaaggctcagatctgggataccgctggtcaggaaagatacagagccgttacaagcgcatacnacagaggagcagttggcgcaatgctggtttatgatatgacgaaacgtgagacctttgagcatattccgcgttggcttgaagaactgagggcgcacgctgataagaacattgtcatcatccttattggaaacaagtctgatctagaagatcaaangctgttccactgnagccntaaagagtttctnaaaggaaggcncttttccccnaaccctgntttaacgaccatgngaannctttacnnnaatggcnggntcaancggacanaaactncngggggggc

SEQ ID NO: 134273 - DNA, 564 bp, Arabidopsis thaliana columbia
  unsure (1)..(564): unsure at all n locations
gcttgagcaaaccagaggctagctgttctttgcaggcgtttacagcgattgcgttgaccagcctcccgacgaggttgatctcttcagctacaggcagtagcctctcgcaggagtgaagaacagtgatcgaattcgatatgtcattgaaaatggagtctttcaggtaggcctctgttctcgcctcgaggttcttctctgacaagtcttctgtcatctccaggtaatgagccacgcatcgcagcgccgcaatgttggacgagttatattggacgccaacgccgtagcagaactttgcagcaagctcgaacgattctgagccgcctggaacagcggctaggttcagggaaaaggtcgcagagccgacttcaatggttaagtcactcgtaacggccgagacaggcctggaacaacagagagatcagcaacattttgaggaagaagagatgagttagtgaagagaccattgagngtgtgntgnaccggaacttgncgaacgcctttagagaaancttggttttanccccgnnagnnaacccttggnntttacaacctncccaaaaggaa

SEQ ID NO: 134274 - DNA, 555 bp, Arabidopsis thaliana columbia
  unsure (1)..(555): unsure at all n locations
ctcttctttatctctcatctcaatctcagccatcattatcatcatcgttgtgacatcggagttgacgtcacgttgtggtcgtgattgttatacgtggttggtttcgtcgtcgttcatcaccggattgttagaagaaaacagttcaagtggtggaattggtgatccgtttcccgtcacgtctgaaggattttgggcgagttctcaacggttctgcgtagatctcgttcccaagttttcagaatagttttcggatctaaaatcggaggtagaggttttaaagatctatttcccgacggatctgaaagaatcagatcgtgaagtttggtgtcgttggaaagaaccttgaaggnagagaaaaaagtagccaatttccgntttcacgatccaagtttcanctaaaggttttaagnggcgttcngggcaccccgnngcataattngnccaagcgacggnggnaccgggaaaggaattntaagggaaanncgganctttttgncgccnagggaaggcccatgnnattggggaanccccaantcgcctncaaggggatttgga

SEQ ID NO: 134275 - DNA, 552 bp, Arabidopsis thaliana columbia
  unsure (1)..(552): unsure at all n locations
gtctgaagtatctcgccagccggcccgtctcaagcagctcgtcagatcacccgtctgaagcatctcgtcagccggtccgtctcaagtagctcatcagctcgcccgtctcaagcagctcgtcagctcacccgtccgaagtatctcgccagccggcccgttaaattttcccgatggagattcttccgattccggcggagagtttcaaggtaggattcatcggagctggtaaaatggcggagagtatagctagaggtgtggttgcttccggtgtgcttcctcctaatccgtatatgcaccgccgttcactcaaatctcaatcgccgtgatgtcttcgaatcctttggcgtcaatgtcttctccaatagcgaagaagttgttaaagaaagcgatgttggcaaaatctctgngaaacctcaagttgttaagaaggtggcacanattaaggcgaagctttcaagnanaantctgggtctggttnagctggaccaagtnnagnttnaggaggngggnnaaaanntnnaanggggggnnaaanccccgggggggggggnt

SEQ ID NO: 134276 - DNA, 590 bp, Arabidopsis thaliana columbia
  unsure (1)..(590): unsure at all n locations
gaagatcgtcacctcgttatcagcctcgaaaccaccaaatgggaagtagctgatgctgacaaggaattcagatggctcaagtcggccgtgtcttcatccgaaaaggaatatgaacagatcagtaggaggacagacgacatcaaactggaactggatgatgaaaggagggagaagaagaagcttgaggaagagcttatggagttgaacaaagagcttgaagagttgggttctgagagtgtagaagctgcaattgtgaggctccaggaagaagttaagaattgcaaaaacatcctcaaatgtggtgtatgttttgatcggcctaaagaggtggtaattgtgaaatgttatcatctgttctgccagcaatgcatccaacgtagcttagagatccgncacccgggaaatgtccaggctgcggtacccctttggcagaatgcggccggcttgtnaaaatgtacccaaacattctcccaaatgcccntgggttggncatacaanctnattagggccccagntatctcctccaccctcccaaaatgtggtgaagccanatgacgggaaccganccggttccccaangggggaaaaaa

SEQ ID NO: 134277 - DNA, 589 bp, Arabidopsis thaliana columbia
  unsure (1)..(589): unsure at all n locations
aaagaacaaatacatcgactgtactggaatgacatttcggcaattcttggctggaaaacttccctgtctccctggtgaactgccttcatataatgattgggaaaaccatctgacaacaatattcccagaggttcggttgaagagatacttggagatgagaggtgctgatggaggtccctggaggaggctgtgtgccctgccagctttctgggtgggtttattatatgatgatgatagtctccaagctatcctggatctgacagctgactggactccagcagagagagagatgctaaggaacaaagtcccagttactggcttaaagactccttttagggatggtttgttaaagcatgtcgctgaagatgtcctgaaactcgcaaaggatggnttagagcgcagaggctacaagggagccgggtttcttgaacgcagccgatgaagtgggcagaacaggagttacgcctgcgngaagcnctttgnagntgacaatgggnattggggcaagcgaatccgngtncnaaactntgnccaagaaatggcggncaaagggnnnaccttgggngtntcaccgaaatcnnccggaaac

SEQ ID NO: 134278 - DNA, 587 bp, Arabidopsis thaliana columbia
  unsure (1)..(587): unsure at all n locations
gaccggtccagatcctactcacgtaactgtagagcacgggacagatcaccttactacatgcggaggtacaggtccagatccaggtcatactcgcctcgctacagagcacgtgaccgatcatgctcaccctactacaggggaagagaccggtcttattcaccccactaccaagggagagacagatcctactcacctgaaagtcgttactacagaaggcacaggtcggtatcgggaagcgtaancctggagggagaagcatgtcacgtagcatatccccaaggaagggaaggaaagagagcagaagcaagtctcggaggcacgacaggcaatcttcaatgtgtcattcgaggagcggcaagattcaagcacctccagantccgtcaagccataacagtctctacttacttgaagttgncatcaatcactcacggctggtggttgaattaagcattttgggantggcnatncctgaatttggatttgtgcagaccggatgtaatggtgggttggggtagggacttatacttcggggaatgttcttgggcagcctgaaaatgnanccctttgttnaaaaaaaaaggggngc

SEQ ID NO: 134279 - DNA, 566 bp, Arabidopsis thaliana columbia
  unsure (1)..(566): unsure at all n locations
gcaagatgttgttgatcagttctttcaacctgttaaacctactttggggcaaatagttagacagaagcttagtgaaggaaggaaggtaacatgccgtcttcttggagtaattcttgaggaaacaagtccagaagaactccaaaaacaagccacagtgaggtcatctgttttggaagttctactagagattacaaagtatagtgatttgtatcttatggaaagagttcttgacgatgaaagcgaggccaaagttttacaggctttagagaatgcaggagtttttacatctggtggtttagtcaaagataaggtgctcttttgtagtacagagataggaagaacttcctttgtcagacagctagaacctgactggcatattgatacaaacccggaaatcagcacacactagctaggttcatcaaatatcagctcatgtcgcacggtgaacccgagcgacagccccaatgtgtcncccgcggcatagacagtccttggagggtaatntcaccaaaaaggngggaagatncgtgccgctaanccgtgacgggccnngngaactgaactga

SEQ ID NO: 134280 - DNA, 561 bp, Arabidopsis thaliana columbia
  unsure (1)..(561): unsure at all n locations
agattgggctgagcttccttctgctgttgttaaagatgctaaaaccgcgatatcgaaaaacacagatgacaaggcagggcaagaggctttgaaaaatgtgttccgagcagctgaagctgtagaggaatttggtgggattctcacntcgattaagatggaaatcgatgatagcattggaatgagtggggagggtgtgaagcctttaccaaatgatataaccgatgcgctgcgtacngcttatcagaggtatgctgagtatctagacncctttgaacctgaagaagtctacttgaagaagaaggttgagatggagttggggactaagatgatccacttgaagatgagatgcagcgggcttggttctgaatggggaaaggtactgttcttggaacctcaggactctcgggatcttacgtggagcaaagggctaaacaaaagagagancagaatnacgtngacnntgtaatgtgtaaagcgtttttgcctacnctaataaaggcacctgccaaagnattcgggggcngncatgtccncatgacctaatnggcanccatgaaaaac

SEQ ID NO: 134281 - DNA, 558 bp, Arabidopsis thaliana columbia
  unsure (1)..(558): unsure at all n locations
ggtgtttagtggtgtagtggaaatcaattcttcgtcatctgttggagctgttaaggaagagtttgaggaagaatgttcggggaagaggagacgaactggatcatgtagcaagccaggaaccaaagcctgtcgcgagaaactaagaagggaaaagctaaatgacaagttcatggacttgagctctgttttagagcctggcaggactccaaagacggataaatcagctatactcgacgatgcaatccgggttgtgaatcagcttagaggtgaagctcatgagcttcaagaaaccaaccaaaagcttctagaagagatcaagagtctaaaggcggntaaaaacgagctancgagaggnaaagctggtgttgaaggcggagaaggagaagatggggcaccagtttaaatctatggnggttccntcnccaggtttatggccnccccagatccaggagnttccatcccnnaaaatnggggggggttccctnngggaattncnccaaaatgcaatggggccctncccctgtnncggaangccgggtccaaactcccngtgtattc

SEQ ID NO: 134282 - DNA, 443 bp, Arabidopsis thaliana columbia
  unsure (1)..(443): unsure at all n locations
gcccgggcggacggccgtcggtgcagatcttggtggtagtagcaaatattcaaatgagaactttgaaggccgaagaggggaaaggttccatgtgaacggcacttgcacatgggttagtcgatcctaagagtcgggggaaacccgtctgatagcgcttaagcnganacttcgaaaggggatccggttaaaattccggaaccgggacgtggcggttgacggcaacgttagggagtccggagacgtcggcgggggcctcgggaagagttatcttttctgtttaacagcctgcccacccttggaaacggctcagccggaaggtaagggtccagcggcttggaanaacacccgnacgtcgcgtggtntcccggtgcccccccgggggccctttaaaaaatccgggnngncccntttcccggttaaancccgntnnattttnnaancng

SEQ ID NO: 134283 - DNA, 611 bp, Arabidopsis thaliana columbia
  unsure (1)..(611): unsure at all n locations
aattccaacaaagtgaagatcaatctttactatgaatcactttgtccctattgtcaaaatttcattgttgatgatctaggtaaaatctttgactccgatctcctcaaaatcaccgatctcaagctcgttccattcggtaacgctcatatctccaataatctgactattacttgccagcatggtgaagaggaatgcaaacttaacgctctcgaagcttgcggtataagaactttgcccgatccgaaattgcagtacaagttcatacgctgcgttgaaaaagatacgaatgaatggggatcatgtgttaaaaaatctggacgtgagaaagccatcaatgattgttacaatggtgatctctcctccaaaagctgatacttgggtatgcaaaactgacctccgaggttgaagccaaaaccatgnatacgnaccatggggcacactcaacgggaaccaccctatggcaataccanaaatttggcgnccaagctgcaacngnccaangggaggggccccaaacttggagtccccgggctgattgnggaaggcaaggtcagnccctggngnggcgccattnaggnntacaacccttttggccanggggnnnnccttgc

SEQ ID NO: 134284 - DNA, 595 bp, Arabidopsis thaliana columbia
  unsure (1)..(595): unsure at all n locations
aggcaactgatgttgctaatgctgttttagatggaagtgatgcaattcttcttggtgctgagactcttcgtggattgtaccctgttgaaaccatatcaactgttggtagaatctgttgtgaggcagagaaagttttcaaccaagatttgttctttaagaagactgtcaagtatgttggagaaccaatgactcacttggaatctattgcttcttctgctgtacgggcagcaatcaaggttaaggcatccgtaattatatgcttcaccncgtctggcagagcagcaaggttgattgccaaataccgtccaactatgcccgttctctctgttgtcatnccccgacttacgacaaatcagctgaagtggagctttaagggaccctttgaaggcaaggcagtcacttattgtcagagggcttttccccatgcttgctgatccccggnacccngcgnatcaacaagtnaacaaatgagccgggcctaaagnggncnanccatnggnaccaaccggngtggtcagnccatgaanatttggctgcaaaaggggaatnnccggggaaaacccggcnagggttaaaaccannnggcgttncnggc

SEQ ID NO: 134285 - DNA, 662 bp, Arabidopsis thaliana columbia
  unsure (1)..(662): unsure at all n locations
aaagaaacgaacatcaaattgttgtactctttgggagcgagtaaattcgtggttcaattgctagcaccattgggatgcttaccgatcgtgagacaagaatacaaaaccggcaacgagtgttacgagctgctcaatgatttggccaaacaacataacggaaaaatcggtccaatgttaaacgaatttgctaaaattagtactagcccctatggttttcagttcaccgtcttcgatttctacaacgccgttcttcgtaggattgcgacaggaagaagtcttaactacagattcttcgtaacgaatacttcgtgttgcggtgttgggacacacaatgcatatggttgcggaaagggaaacgtgcactccgaagctatgtgagtaccaaaagatcttacttcttcttcgatggacggcacaaccccagagaaggctcaggaggaaatggccatcttccatatgnagccgncctgacgtgggccagncaatgaccgggcccgtgagctaanccggccncccaacctggggnaccaatgcgtgaggattgggacccaccacctttgggtnccggnggcnggcngcncgnngcttnacttggnccnnccggcattatttggtggtggtttcccnaganttnggaaaatgnaggattncntnaangganc

SEQ ID NO: 134286 - DNA, 638 bp, Arabidopsis thaliana columbia
  unsure (1)..(638): unsure at all n locations
gagaaagactccctgatgctggacctccttcaccagctgatcattngagagatgttttctacagaatgggacttgatgacaaggaaatagttgccttgtctggtgcacataccttagggagagccagaccagaccgtagtggttggggaaaacctgagacaaagtacacgaaaactggacctggagaagcaggaggacagtcatggacagtgaaatggctcaagttcgacaactcttatttcaaggatatcaaagaaaagagggacgacgatcttctggtgttacccactgatgcggcgctatttgaagatccttcattcaagaactatgcagagaagtatgctgaagatgtggctgcatttttcaagggctacgctgaagcccatgccaagcttagcaatctcggtgcaaatttgatcccccccgaggggatagncattgaaacgtcccgagaagtcgganctgnaaaagaatctccgggaanaagggncttcgggtncgtgaaaannaggttgnnnnngattaancanttgggggaccccgntanccntttccccaaatncntcccaanaccaaattccattnggggtttggcccctgcccccccttgggggaaaaaccccgnttccntgggccaa

SEQ ID NO: 134287 - DNA, 660 bp, Arabidopsis thaliana columbia
  unsure (1)..(660): unsure at all n locations
gggatttgccattggctctgctgccctagtctccttggctctctttggtgcctttgtgagccgtgcagggatccacaccgtagatgttttgacccctaaagttatcattgggctccttgttggtgccatgcttccttacnggttctctgccatgacaatgaagagtgtgggaagtgcagctcttaagatggttgaagaagttcgcaggcagttcaacaccatccctggacttatggaaggaaccgcaaaaccagactacgccacatgtgtcaagatctccaccgatgcttccatcaaggaaatgataccncctggttgccttgtcatgctcacacctctcattgttggtttcttctttggagttgagaccctctctggtgtcctccgccggatcncttgtatccggtgtcagatcgccatatcagnatctaacacngggtggtgcctggggcaacggcaagaaatacatcgaggctggtgaancaganacgcaaaaancntggnccaaaagggnagngcacncaaggacctgtaattggncacaattggggnccattnagggactcagggcctcantgaaaccccanaacgcaatggngtanccntngcttngcccttttgaacaccggggaaccctttaanacccnaaaccancccggg

SEQ ID NO: 134288 - DNA, 537 bp, Arabidopsis thaliana columbia
  unsure (1)..(537): unsure at all n locations
cgcccattttcccatcaacgcctccatcggcggtgacggaaagtctatcgagatccgtaacttccttggcgagaagaaggtgaggaaggtagagatgttggatggtgtaaccattgttcgatctgagaaggtgaaggatgagattgttcttgacggtaacgacatcgagcttgtttcaaggtcatgcgctttgatcaaccagaaatgtcacgtgaagaagaaggatatcaggaagtttcttgatggtatctatgttagcgagaaaagcaagatcgtagaggaagaatgaatgcccatatcatcgtcttagctcctatttcttgtcttttgaatgttagtttcgttttatggaccaaatccaccggtgttgcaaaactctggcaancccttggtccctttttgggtcgagatttattacctatgcacaagttttgancgagccancatttcacccttgctaaataaancanaccggggaaaaaaaaaggggggccncncnaaggtcaactacgacnggnatgnagcaagcctcaangc

SEQ ID NO: 134289 - DNA, 602 bp, Arabidopsis thaliana columbia
  unsure (1)..(602): unsure at all n locations
agcgtaaattacgaaaaacagagagataaatccgggcattgagattttggagatagagagagagaaaaatcgaaatctattgtctatctcctcaatttggattggattttctgcatatcatcgctctagctttcgcgggttttggattcgattccttacccttctccaatcgaagtttttggctttgaattggatttgggtttcgttccaaaatcagctctttttgttaatcagatatgcaggaccagctggtgtgtcatggttgtaggaatttattgatgtatcctagaggagcatctaatgtgcgttgtgcgttatgtaacactatcaacatgggtccccctcctcctccacctcacgacatgggcacacattataatgtggtgggtgtagaacaatggcttatggaaaccccgtggggggtagtaancgnaanaatgcccctggctggcaaaccaacgaaccctgtgccaangnnncccaaccagggtgcccaaggnccctnccagccanggttccgaaaccaattgnggggatttcggnagncccccangancccnanggggaanacccgcnangccggttgcaatcgaanaagantt

SEQ ID NO: 134290 - DNA, 613 bp, Arabidopsis thaliana columbia
  unsure (1)..(613): unsure at all n locations
ggaaagacgaagcaaagatcttcactctttcagaagtttcagagcataatcaagctcatgactgttggattgtcatcaatggaaaggtgtacaatgtgaccaagtttcttgaagaccatccaggtggggacgatgttctcttgtcttcaacaggtaaggatgcaacggatgattttgaggacgtgggtcacagcgagagtgcaagagaaatgatggagcagtactacgtaggagagattgatccaacaacaataccaaagaaagtcaaatacacacctcctaaacagcctcactacaatcaagacaagacctctgaattcataatcaagctcctccagttcctccgtaccccttggccattcttgggtttagcagtcgggatccgtaatctacaccaaatcaggggaggnttccttttttttctgggcattacttccctaanaccttanatattgggggnaaggttccaggcttttgaaaagccaatctgaaagcccccccctttggnaatggcccnccccaaatttgggggttgatgaattttgggaaatccnacccatggggggnacggccggaatcctganccngggggccncngtntangggcnccggc

SEQ ID NO: 134291 - DNA, 610 bp, Arabidopsis thaliana columbia
  unsure (1)..(610): unsure at all n locations
atccaggtctagatgttcagtgataatgagttacagagataatgagaacaagaacgagagacagagagatacgagatcttacagactccacaagtgatatttcatggcaagaacttgtcgaggctagatgtgagtgtggttttgggcactgcacctatgattgtatccttcttctcgccaccgacaaagatcatgatcgttgggatgcttctaactccgtactggccgggagtattaggagattcatcagtgtttaatttgtagaacttgatcttcccagtgtaatgctgtgctagatcgtttacaagcggatcaatcatcttgcaaggtccacaccatggtgcccaaaagtcgacaaactacagggccagttgctttaagaacctagagagtcccatggcgaggccattgaccacttggaatatcgggagaagtttcctgagcttcacagacgacgggncttcggaatcgggaaccccagggtnatgaacncngggcaacganccgganaaganaaaacgggtctcaaccnggtgntccgggnaacgggaaancncggaaanannaaaaccgtggggtnggancncttggcncgncnggaaaancgggc

SEQ ID NO: 134292 - DNA, 604 bp, Arabidopsis thaliana columbia
  unsure (1)..(604): unsure at all n locations
aaagagcaacaattccatctctggttcgacccaaccgccaatttccacacttactcaatcctctggaaccctcaaagaatcatattgaccgtcgatgacacacccattagagagtttaaaaactatgagtctctcggtgtcttgtttccaaagaacaagccgatgaggatgtacgcgagtttatggaacgcagacgattgggcaacaagaggcggtcttgttaaaactgattggtctaaagctccattcatggcttcttacagaaacattaagattgactcgaaaccaaactccaattggtacactcaagaaatggattcaacaagccaagctagactcaaatgggttcagaagaattacatgatctaccaattattgtactgnccataggagggttccacagggagctcctaanggatgcccaacaagctcatagaatctcaaattatatccaattaattatccacactccncccntnctttatgngaaattgggaatgnccggttaaagctggcaatangccgggatccttttcgggttgattcggcggaatcctgagccgggggccttgtttaaggncgcccggggggccangtttgnctc

SEQ ID NO: 134293 - DNA, 530 bp, Arabidopsis thaliana columbia
  unsure (1)..(530): unsure at all n locations
aaacagcccggatcaccagctaaggcccctaaatgaccgctcagtgataaaggaggtaggggtgcagagacagccaggaggtttgcctagaagcagccacccttgaaagagtgcgtaatagctcactgatcgagcgctcttgcgccgaagatgaacggggctaagcgatctgccgaagctgtgggatgtcaaaatgcatcggtaggggagcgttccgccttagggggaagcaaccgcgcgacgccgngtggacgaagcggaagcnngaatgtcggcttgagtaacgcaaacatttggtgagaatccaatgccccgaaaacccaagggttcctcccgcaaggttcgtccacggagggtgagtcagggcttnagatcaggccgaaagngtagtccattgacaacaggtgatattcctgtataacccttgtttggnccnanggacgaaggagnttggtntnccnaaatggtnttcggttaagnaccaagtgncctgttttntagggnaaagcgccnntncttaacccggntcc

SEQ ID NO: 134294 - DNA, 556 bp, Arabidopsis thaliana columbia
  unsure (1)..(556): unsure at all n locations
atcgagtcttcgacgagtctctcttgctacggctaacagacctgtcgctgcttctcttttcggagaactacacaggtgtctcaaattggtgtcaatcttcaaaagcgtggtgtttggacaagtagtaataggtcctcctggatcgggcaagaccacttactgcaatggcatgtctcagtgtcagtgcatctctctaatgggcaggagatcctgcaaatgatgcattaccgtatccatttttaagccaactcttacaaaatggtaaaaagaaatcaggaacttgcggctacttgtgccactgcggttaagtcaagtaagcatgtagatggaagaatagtgaccagccgttgagtcaagagtgcagacaggtagatccttgcgntctccttgggcaactgcagctaactaactatcttggntccttgncctccaaaactggnctgtaaaacgtnggagcnnctgggaaatgngnccaaagccatggncccctgggccccagcanaatgnancctgatganctggggnaancncaacggnacaggntacaatcgtggtc

SEQ ID NO: 134295 - DNA, 557 bp, Arabidopsis thaliana columbia
  unsure (1)..(557): unsure at all n locations
gagatcttggaccggaaaactcagatcgttggagaaaccagcgaggagctgaacaatgtggaaggcacgattgagctcaaaggcgtccactttagctacccttcgagaccagatgttgtaattttccgggactttgatctgatagttcgtgccggaaagagcatggcgctcgttggacagagtggatctgggaaaagttctgttatttcactcattctccggttctatgacccgactgctggaaaagtcatgatagagggaaaagacatcaagaaactagatttgaaagcattgagggaacacattggtcttgttcaacaagaaccagcacttttcgccacaacaatctncggggaacatttttgtatgggaaccgaaggggcatctcaatctgaagccgccgatccgctatgcncgcaatgcccaaagttcataacccnncccanagggtccctccnaagcgggaacgggggtnaaattnnggggggaaaaaanggtncttcccaagcctttcaaacccgatnttttttggggccaagcttgggtaactggggggc

SEQ ID NO: 134296 - DNA, 379 bp, Arabidopsis thaliana columbia
  unsure (1)..(379): unsure at all n locations
ggccgatagaaaanacttantgaaatgttgataaaataaaataaacagaaaacgatatgagaccaaaaaaggtcatatatagcttcttccttcctctttactcctcggccttctcaacggcgacttcctcagcagccgcaacctcagtctgtttctcctcaaccacctctgtnttcttctcctccttccacaaaccggccgggagttttcggtcaacttcctcaagcttttcttcntcctccttcctcaaactaaccgggaggtttccggtgaatcaacttccgggccttccncggcctttnnncccccgggttttccttncncngggtttccntnaaacctttccttccccgggctnntttcaaaaaacaaatttctt

SEQ ID NO: 134297 - DNA, 414 bp, Arabidopsis thaliana columbia
  unsure (1)..(414): unsure at all n locations
gatttaatgtggagggagatcaaactactggctgaaacaaaacccgtcattgcgtcaatgtcagatgtggcagcaagtggaggctactacatggcaatggctgcaaacgccattgttgctgaaaatttgacattaactggctcaattggagttgtcactgcaagatttaccttggccaaactatatgaaaagattggcttcaacaagggaactatatctagaggaaatatgctgagcttctggggggctgagnaaagaccctttaaagcnagaggaagcagaacctggttgagaagtctgccacaggcatggatnaccagcnttttccgngnataaagncagccttatccagaaccgatgncctgtncgnccaaanttggaanaaatttnccccgggnnaaatnttgggcccgg

SEQ ID NO: 134298 - DNA, 607 bp, Arabidopsis thaliana columbia
  unsure (1)..(607): unsure at all n locations
gaaattcaaagaacgttgtttgcgaacatagtacagacgatcacataatagaaacgccacgataaaaaaagacaggaaattgaaaagagtacagccattcgaacatctttatttaatattatctcatcgattatataatattcgaaacatccgctagtagcttcatttgaccgtcgctcatcacctcacggtgttgcagttggtgctggcgctgattttgtaaggaatattgactttgcatgcgctaggaagtccagctgcacgggcagtgttgagaccgggaccaacggctttagcggcagattgaaggcaacggcaagcttgctgacggtctgggggttgtactggccatgtttttaaggttagtaaacgccgttgcagcacccttgggtaagtggagacctcgggtcaagtaggcaatgancctgccaggttnccgtgacggtgccacactcataagcgcgtccctgtaattgnccggcacaatcatnaagcaagncatcatgcaacttatcatccagcaaatgaccctagttgggtttcnttgtttgaattggggtnttccggntgggaaattggtaaacggcggancctgacccggggcant

SEQ ID NO: 134299 - DNA, 581 bp, Arabidopsis thaliana columbia
  unsure (1)..(581): unsure at all n locations
gcataatttcttcatgtggtattgaattatataaacaccaataaatatctaggctaatacactttttcctttacgacattagaaattacaaatcttttttctttctttcttaaaactctcattaaaaacaatgataaatcaaacatgcttcgttccagcttggttactgttcttgcccatctcaagcgcattcccatactcaccatcctccacaaaccttgaccaataccagtgtgacctccacacttgacccatctcctctatcggaatccctttcgtctccggcaagaaaatgtatacaaagatcggcatcaccaccacgnaaaagggggaaacaagggataacccaaactttcaaatggcaaagcacggtcaagaaggtttgcgnggtaatgnacggtgnagntcatggtcacggggccggggggtactctggggcgncgggccttttntccaanggggnggttttacccgggnncnaccacccctgngggggnccacgggcacgggaaaccgncacattggtggnatgncggtttaacncttttgggtccccttgggggccccagggggcgggtgna

SEQ ID NO: 134300 - DNA, 610 bp, Arabidopsis thaliana columbia
  unsure (1)..(610): unsure at all n locations
ggctctactcaagatattcgggaggtcgatcactccttttctttcaattatgatagaaaaggttatccatttccagacagcagaagttattgcggcgagtttgctagaaaagttatcgggtcgtctcgtgagttccctcccgttgaatcccctatagcaaaaaatctctaccaaatttgggcttgtaaggaggttcagtcgattaccaccggaaatgcattatacaattttctcgaggaacaggcgagagaggtgagggaggaaacggtggccgttcagaaaaacgaaagaccgcggaatttattgcagcaactcgtttgtgtaacttgaactcacagagctcttggaaagtctcaaaaagtcggataattttagtcgagctgagcaatcaaaggntgagaagtnccttgaccgatgntcttcggaactggtcggtcccaatggagccggtttaaagatgatggtgcaattntaaagccagntcgatcggctaaaaagnatatgcttncaaacgngttcaagcgaccccttcatgaatccaaccgagggtccggaanccttaaaattggnaaaacgggccgaccctagggncattggggctaaggtnaaa

SEQ ID NO: 134301 - DNA, 575 bp, Arabidopsis thaliana columbia
  unsure (1)..(575): unsure at all n locations
atcacagcttagttacaaagatctttaatcaaagacccttttatctctctctgtcaaaccagagctcacgaatcattttttttctttctgttttccattattagttcaagaagaagatgtaagaacacaacaacaacaacaaggtcgctaacctcccttttatttctcatctcatctgttccatggagactagcgatttccgttactgatagttctcaatcaagcagcaactttcttcgacgtgactgagttcacaatggttgcaaactcaggacccttcaaggaggcaccaccaacaagaaatccatcaatgtcttcttctttggnaagctctgcactgttgcctccattgncagaacctccatatatgattctcggtttggagnaacttcctcagagacattctcctttagccaacggggggaggtacatggactcttggngctggtgagngatgaacttaccaggtccaatgccaaaagggnggatgganacnaaatggccagcngggagntnggaaagctnagtggggagacatcaanggtgctgggggggnattctgaanccgggggtaa

SEQ ID NO: 134302 - DNA, 610 bp, Arabidopsis thaliana columbia
  unsure (1)..(610): unsure at all n locations
agcttagtcgctctctgcaattttgcttctcaatagtggatggtcgtggactccatccaactgtaggaacaaattcgttagaggagacttgcttattcatttatcgaaacctgatggatagtgttgattgtttttcaccggatgcaactctaattgtgaagcttagtggattagtatttttctcaaaccttatttgttgtgatgcgatctttgcacctgttcctatttgtgtttgtatcttgaggatctatattcccactagcaagcctaaccatgtcaccccaagcctaatgggcgaanatcccaaccttctcaaactttttggataaaaccgcctcaaagaaaactccatccgagctccgctggattctttgtggattggacttggtgaattcccttggnngaatccaggaaaacttaantcccccaatggngataccatctttnggaaccttaactttgnaagcgagggaaaagctccggccggnaacctccnccaatgggaacccttttcgaaaggcctttngggggtaaccggancgngggtanttatggnnccaaggtgggnccgagannttcgggnangaangcctcaaanttgnanccctaa

SEQ ID NO: 134303 - DNA, 620 bp, Arabidopsis thaliana columbia
  unsure (1)..(620): unsure at all n locations
ggnacaagtgtagaggatcttaggtttgatgttaagaagaccacatatgatgcaacataatacacatctactagtaatatgtcttattgaacaagtagcattatacatcactctctaactcgatccgaccatcagttaatttagatgatttattcctacactttttaatttagatgatccaatgattcatgctttagtgtacaagatctattcaatattaagcgtagaaactataagtagaagaatctgcaatgatgttcctcaaccctccaattgttgacgctaacattatgaacactccctacggtaatggggatcccaattgacggaccaggtgncgctggatcccccttgggttccttggatgntaagcccaccattatacctggggnggggaggaaggaggtaggtggcaaaacccaatcccncccaaagnagccctagaagggccncccaaagaagggggggaccccccccccatggnccatggtaatgggggcattaaaggtccgggngggaaacccccggaacaacccatggttnnaaccaattggtanccggggggngnattctgaacccgggggggccccnggtttagngggccnccngggggggccngc

SEQ ID NO: 134304 - DNA, 593 bp, Arabidopsis thaliana columbia
  unsure (1)..(593): unsure at all n locations
gaaaaacttcgcctcttccagaatccaacggtgttcctgaaggcaacatagagtctaatgttgtcatttctcatgaggaagaggctcccatcttgataccaacacatggaattgcgaaaagaacctcatggtttagttgctgcggcttgtttgatgtggtcacaggatccagtagataaactcagaaacagtgtgttgcctacaaattggaagctgcagaagtgttatagcggcgaagaattatcggtttcctctctcgatcacctgtgaaaattcagtaacttgatgaatgaatgtctctcaaatcacaaattttctcaaaatgatagagtactcatcttcctaagtaatattncagaaccaggatatgcttacaatttcctgnccctttaatatatggccctanccaaggtcccttttnaggtttttccattnctggcatncggtttgnaaatggacccattttccctggccggtaattggtncgggggccggnaattccctgaagcccgggggggncaccaaggtcntanacggncgcaccgnggggngncccacnttttggncccntnaggaggggaaattcggcnngc

SEQ ID NO: 134305 - DNA, 514 bp, Arabidopsis thaliana columbia
  unsure (1)..(514): unsure at all n locations
caaaaccctcaccggaaaaaccataaccctagaggtcgaaagcagcgacaccatcgacaatgtcaaagccaaaattcaggacaaagagggaataccacctgatcaacagaggttgatatttgctggtaagcagcttgaagatggtagaacattagcggattacaacattcagaaagaatcgactcttcacttggtattgaggcttaggggtgggactatgattaaggtgaagactctcacagggaaggaaattgagattgatatcgaaccaaccgatactattgatcgggatttaagggacgtgntgaaggagaaagaagggtatccctcctgntccaccaaagggctaattcttacgnccgggaaaacagcttagctggattgnccaaancgggcaaanggcctnccacccttgaagggnggnnnctggtcctcaanctgggtccttgncccttanggggnggntttggcctcccncggnaaagaancccttgaaggancccttttccccttg

SEQ ID NO: 134306 - DNA, 445 bp, Arabidopsis thaliana columbia
  unsure (1)..(445): unsure at all n locations
agatggttcaaactccaaacatggctcacaagctcaacgtagagaatctttaaatgctcaagaagacagagttgagccatgtnatctaagcncttctctttactacggtggtcaagacgtatacgctcgatccaccaccaaccaaacttaccctccagttaaaaatgaccgtagaagaagcggngaagatgacgctaatggacagaacccgcaagatgtttcaagaggnaactggtggcaaggttctctttattactaaagaaccacttcctttagtttctttgtaaatctctccnggaacacctgnngctcaagcccaantcctnattatcttnctttacccaagacttttgttttaattaaggttttttncaggnaaaaaaaggttttttgggggttttnttgggttaggtattannttccgggggttttcnccctnggtggt

SEQ ID NO: 134307 - DNA, 283 bp, Arabidopsis thaliana columbia
  unsure (1)..(283): unsure at all n locations
aaatctaaaacgtttnactttgtnctgcactactcaacctcaatggccgcctcaacaatggctctntcctcccctgccttcgccggtaagncgtcaagctttcccccgcggcatctnaagtccttggaagcggccgtgtgacaatnaggaagactgttgccaagccaaagggcccatcaggcagcccatggtacggattctaaccgtntcaaagtactttggttccattcctntgggcgaattaaccgaggctnaccttnccgggagaggttccccggngact

SEQ ID NO: 134308 - DNA, 379 bp, Arabidopsis thaliana columbia
  unsure (1)..(379): unsure at all n locations
agaaaaaaaaaaggtgaccgtattctccgtcgattgtagccgcctgaagaaatatcttctcctctctcgttgaaccacgaatttnctctgatatnagtgtttctntagccatggcgaacgcggcatctggaatggctgtgcatgatgattgcaagctgagatttctggaactnaaggcgaaaaggacacaccgtttcatagtttacaagattgaggagaagcagaagcaagttgttgttgagaaagttggtcaaccgntccaaacttncgaggagtttgcaagcatgttttncagctgatgnaatgccgttacggccatttacgnttttaactttntcaccntcttgggaatttcccngaagngcnaggntcttttttt

SEQ ID NO: 134309 - DNA, 340 bp, Arabidopsis thaliana columbia
  unsure (1)..(340): unsure at all n locations
cactcaagggttccagctgaggaacagaagaaagtttttantcgcccccctcgtggttgtcgcaaaattgtacttgcaacaaatattgctgaatcagcagttaccatcgatgatgtggtttatgtgatagatagtggtcggatgaaggaaaagagttatgatccctataatgacgtgtcaacgntccaatcttcttgggtatcaaaagcaaatgcaaaacagagggcaggccgngcaggccgtttgccaagctggnatctgttatcatctatattcttaaactccgggcagcgtcttttncccgaaatatagnggtncctgnngttatgtgnatnccnnt

SEQ ID NO: 134310 - DNA, 377 bp, Arabidopsis thaliana columbia
  unsure (1)..(377): unsure at all n locations
aatgttggaaatnattctnagtggtactacccgtccggattcacaaaccagcaacatcaacaacaaaatcatcaagccgttcctttctatgggtacccttccgcctacgttgccccgaacatgaccttcaatcaaaaagttggatatgtcggaggaacctatatgancggatactatgcacaantgcaaccacaaccgcaatcgcagccacaaccgcaatattaccaccntcacatgtatggtggaggacgagttatggttggggcagcaagtccnaatggtgcctttttncactgtcttatcccttattaatcaattcttnaagncatngggttttccacnaccctttnanttttnggaanccttctttttttttt

SEQ ID NO: 134311 - DNA, 462 bp, Arabidopsis thaliana columbia
  unsure (1)..(462): unsure at all n locations
ggttatggaactcagagagagagattggggagagactcgatcaaaccctttnatgcttgtcctctctgcttgaagcctttcattgatccgatgtgttgccataagggtcatgtcttttgcagagagtgtatacttgaatgtttccttgctcagaagaaagatatccaaaggaggcttgctgcacattcgtctcaaaagaagcaagataaggatgaagaagaagagaggctaatgttacaaaaggcgagagagctcgacgaatttaatcagcaaaaccatagtgcaatgccttcgaaacagtgacaagattcacaacgnggataagaatggttttcaatnngggcaaaccagttttaaagcggctttcctttttaaggaagnagccnnttttgggccaattanaaagccttttgggtnnccattaggcttcaccnngangttttgggtnanngtttggnttnc

SEQ ID NO: 134312 - DNA, 384 bp, Arabidopsis thaliana columbia
  unsure (1)..(384): unsure at all n locations
cttacaacaacaaatcttaaacgttttactttgtgctgcactactcaacctcaatggccgcctcaacaatggctctctcctcccctgccttcgccggtaaggccgtcaagctttcccccgcggcatctgaagtccttggaagcggccgtgtgacaatnaggaagactgttgccaagccaaagggcccatcaggcagcccatggtacggntctnaccgtgtcaagtacttgggtccattctctggcgaatnaccgagctaccttaccggagagttccccggagactacggattgggacaccgncggacntttcaagntnacccccgagnacatttggaaaggaancccttgaacttannaaggttttcnncagcagggtgggnca

SEQ ID NO: 134313 - DNA, 315 bp, Arabidopsis thaliana columbia
  unsure (1)..(315): unsure at all n locations
cttcccaagtgtgtgtatgtgtnananaggaactatagtgtaaaaaattcataatggaagtctgcaattgtattgaaccgcaatggccagcggatgaattgttaatgaaataccaatacatctccnatttcttcattgcnattgcgtattttncgattccncttgagttgatttactttgtnaagaaatcagccgtgtttccgtatagatgggtacttgtncagtttggtgcttttatcgtnctttgtggagcaactcatcttattaacttatggacttttcactacgtattcnagaacttgttgcncttgtaat

SEQ ID NO: 134314 - DNA, 506 bp, Arabidopsis thaliana columbia
  unsure (1)..(506): unsure at all n locations
tctaatcggaaccaaaaccaatgaactcttcaccaccaccggcgaattccgccaacggattacaaccaacaacggcgagaacggtcaagatctgaacttaaacttcttagacaagattcgtctctcggctaaacgagatgcgaaggaagacgaaggagaagaattaccgacggagttgaatacgatcaatagcgccggcggatttcttgtggtttctcctgataagctttccgtgaagtacacgaatacgaatctacatggtcacgatgttggtgttgttcaagctaataaacctgctccgatcaagtgtcttacttactactttgagattttttttaaagattctggtattaaaaggcaaattgctatttggttttactaagggaaacttcaaatnngtggcaacctggttggggagtnacaactgtggntatnatggggntnntgggnnccttttngnggccagggaaaggngaccttttgcccangtttaaaagatntnnngc

SEQ ID NO: 134315 - DNA, 403 bp, Arabidopsis thaliana columbia
  unsure (1)..(403): unsure at all n locations
ggcatgcaccattcgagaatagagataattggngatatccaccatcttcttcttatggttcgagatatcaagatgaacacaaagctccttatccatccagttcatacaatggtgtccggtgggataatcctcctcgccaatataataacagaccctcttttcatccgaagccgcattctgaaggtcctgctccagttggaatgagagatccgggaatntggcatcagagaagtgactagagaaacttgagagagttataaacnggtaaacgaagagggtggtgtgaagcaaaaangccaaaanaccgaggtgatgtggctctaatttaaaaagggancggttatgtttttgnggntgnaatagtgnttatnntaangagtttgngtgtancatacatngtttc

SEQ ID NO: 134316 - DNA, 468 bp, Arabidopsis thaliana columbia
  unsure (1)..(468): unsure at all n locations
aacgcaatcagagagagaagcgagacgagagacgataatgggaggagctttatcaactgtntttggaagtggagaagatgcaacanctgcagggaccgaatctnagccaagtcgcgtcctaaagtttagctcttccgctcggtggcaacttcatttcaacgagatcaaagaatcaaacaaactgctggtggttgatttctcggcctcatggtgcggaccatgtaggatgattgagcctgcgattcatgccatggctgataagttcaatgatgtttgattttcgtcaaattagatgtttgatgaaccttccctgaatgttggctaaanaagtttaaatnttngccgggcaaatccctaccctttttttncttggttgaaaagggggtaaaggaaatttnaaagaattccattnggnnccnaaaaagnccgggcctttttgagaaagtttncaaaccncnnggcntaatt

SEQ ID NO: 134317 - DNA, 283 bp, Arabidopsis thaliana columbia
  unsure (1)..(283): unsure at all n locations
atttcatcgaacacttggngatcaatatttgaaaacgaagagcacagccaaaattcgataaaccctaaggaacagtgagatggagaagaagaaagcaatgcaaattgaaggttacccgatcgagggattgtcgattggtgggcacgagacgtnatcatatttccatctcttcggatagctttcgacattggtcgttgcccacatcgngcaatttctcaagacttcctcttcaatctctnactctcacatngntcaaatcggtggnntancnatgnatgttgct

SEQ ID NO: 134318 - DNA, 475 bp, Arabidopsis thaliana columbia
  unsure (1)..(475): unsure at all n locations
cctttactcaaacaagaaaacaaaatcatgtctcgatttgctatcttagtaaccttggcacttgccattgccactgtttcggtggttatagctcaagtccctccggagaaacaattcanagtcgtcaacgaaggagaattcggtgaatacatcactgagtacgacgcaagtnacagattcatcgaatcatcaaaccagagcttcttcacatcaccattccagctcttgttttacaacactacccctagcgcctacatcttagctctccgagtcggactcaggcgtgacgngtctaccatgcgttggatatnggncgngaatcgcaaacaaccccgtncggnggaaacggtacaattttaattngggccgtaaacgggaaaccttgtnctngcttgaaagntttcggncgggttaanttggnaagnttntcncaaggtttccaaaaggggtgcccgggtttccaaatnttttccca

SEQ ID NO: 134319 - DNA, 440 bp, Arabidopsis thaliana columbia
  unsure (1)..(440): unsure at all n locations
ctaaactcgaaccctaaagaaaaacaaaaatggctgccatagcttctactctctctctttcttcaaccaaacctcagagactttncgattctnccttccatggctcagccatctccgcagctcctatctccatcggtctcaaaccacgatctttctccgttcgcgccacaaccgctggttacgacttgaacgctttcacgttcgacccgatcaaggaatcgatcgtgtcacgtgagatgacgagaaggtacatgacggatatgatcacttacgctgagactgatgttgtcgtcgttggtgctggatctgctggtttaacntnctgcttatgaggtcagtaaggacccctnattgtttcaaattngccatttatttnagcaatntttttagnnccnngggggggntggggnttngggtcggttgggnaagnttttttttcc

SEQ ID NO: 134320 - DNA, 444 bp, Arabidopsis thaliana columbia
  unsure (1)..(444): unsure at all n locations
tggcttacaacaacaaatcttaaacgttttactttgtgctgcactactcaacctcaatggccgcctcaacaatggctctctcctcccctgccttcgccggtaaggcgtcaagctttcccccgcggcatctnaagtccttggaagcggccgtgtgacaatnaggaagactgttgccaagccaaagggcccatcaggcagcccatggtacggatctnaccgtgtcaagtacttgggtccattctctggcgaatcaccgagctaccttaccggagagttnccccggagactacggattnggacaccgccggactttnagctgacccccgagacatttggcaaggaacccnttnagctagaagttntccacagcaggttgggcaaattnttcggagccctagggtncgttttncctnagctttttgctangnacggnntaaagtttgg

SEQ ID NO: 134321 - DNA, 450 bp, Arabidopsis thaliana columbia
  unsure (1)..(450): unsure at all n locations
taattganaggcgntccaaagcncgaagggcaccctcactaaanggaacaccgnancccttttggtcaggttccancctttgaagatggagacctcaagctcttcgaatcaagagcgattactcagtacatagctcaccgatatgananccaangaaccanccttctccaaaccgactccaagaacatatctcagtacgcaatcatggccantggaatgcaagtnnaacatcaccagttcgacccagtggcttcaaagctttgcttttgaacanaatattcaagtcccatctacgggtttgaaccacngaacgaagcccgttngttngccnaannaagaaggctnaattttncccanggtcnctttgatggtcntaccaaaggctcanggcccctaaggaatttcaaagtttntttgggnctgggtngaaaaccntttcncntttnaact

SEQ ID NO: 134322 - DNA, 450 bp, Arabidopsis thaliana columbia
  unsure (1)..(450): unsure at all n locations
tgggaatggggattcggtgtttctaccattgctatcttcgtctctattctcatctttctctctggatcaagattttataggaacaagattccatgtggaagtcctctcaccacaatcttgaaggttcttcttgcggcttcggttaagtgctgctcgagtggaagttcaagcaatgcggttgcgagtatgtccgtgagtccctcaaatcattgcctatcaaaggggaaaaaanangtngaatcacaacgagaattggaaananccacgtcaagaaagaagcttttgcctcctcgggcncaactaaacttaacagttttgaaaagttnttaaattgggaacctgccggaatgaaaaaaccctgttccantanaattggttaaaantgccccagtcccnaccaacttggaaanaattttcaaanantggtcttgaaaaatgcttcccgaantt

SEQ ID NO: 134323 - DNA, 450 bp, Arabidopsis thaliana columbia
  unsure (1)..(450): unsure at all n locations
caagatggtaccancgaaccagatgtatcactaacagaattgttggaggaggtgttcaataaccctgatgacttctcttgcgaggaatctatcagtcgagagaatccancagtctcaccaaatgggatattttcatctgctaaaatgctgcagtctgcagcaccagaggatgctttcttcaacgacttcatggctttcactgatacanatgctgagatggcgcaattgcagtatggttcagaacgtggagcttctggttggccaactgacnctaaattcatactatagtgatttnggttcagcnccancctatgatcnatcactancaccnaaaaacanccctcccccnaagggannanggatatagatcccgggctcnaacanccncntaaacccggcacaattncaggattgaattacccnnggtttttnnnccaagggaaaantccc

SEQ ID NO: 134324 - DNA, 450 bp, Arabidopsis thaliana columbia
  unsure (1)..(450): unsure at all n locations
cgattttaaacttcttcttctccaagaccacttctcactttctctctctcgctctctcttggaaaccaaaacaatgacgatgactcacctgaatcgtctgatcttgatctctcttctcttcgtctctttacttctcaaatcctccaccgcttcttcaaccgtcgtcgacgaaggaaacagaacatcaagaaacttccgttaccgaacgcaccgattcgtttccgaggtttanccaccaccctttancacgtgaactcctcaccgttcgtgtgattccttcattcggtcccttaacgcgcggtttctatgttgcatttgagcttcaananaaatcccaaccggttttnaantccngaaangnanncaactttctttttcttccctccctcccctcccgggaagaattggaattcnaaangggtttnggggngttctaaanaaaaaaaaaat

SEQ ID NO: 134325 - DNA, 450 bp, Arabidopsis thaliana columbia
  unsure (1)..(450): unsure at all n locations
ctttacttctcagagcctcaaagtctaggtcgaacccagagacgatcgttcaacgttttcttggacaacactcaagtgggttcgcgtcccatcgtaccggtttttgggaaagcaactcaattcattttgagagatgtagtggccacatcggcgtcccagatagtctttcagtcaacggatgactccgttttgccacccctcatcaacggattggagctgtactcgataagtaataccagtccanacagtggaagcggcggtgggaaaccaaggcggcggtagtacngaatgattcccgaaagttcttggaaggaaccaaaacaagccaaaaatttggggaaaangtgggggcnaaaancanttggaaggaaaaaaaaataaccaatttaccactccntccttngggtttactttcnccncccncctttggcattcctccccgttccncgt

SEQ ID NO: 134326 - DNA, 450 bp, Arabidopsis thaliana columbia
  unsure (1)..(450): unsure at all n locations
aaatcctctcactttcacttctcttgctcttggccgctacggtctcggcatccgttccagggctcatcgaactcgtcgattcgaaaaccatctttgggaacgtagccgaactcttagagaaagagaaactttccatcaactacgccaactgcagaagctggcaccttggtgttgagacctctaacatcatagacttcgacacggtgcccgcaaattgcaaagactatgttgaagactacttgatcacttccaaacagtnaccaataacgactccaaaacccgtgttgcaaaagaagntttatttctatgcccaaanggacttgcccttaaaagaaacgacaccgtccaatgtttgggatcttttgaacctaaaatgaatacccctcctcctctaattattccccttactnacgccaaaatttttggattcccggaaacataaaaaaaacc

SEQ ID NO: 134327 - DNA, 450 bp, Arabidopsis thaliana columbia
  unsure (1)..(450): unsure at all n locations
aaggaaatgaattcaagtcctaaaatgaaacacgatgtgttcataagtttcaggagcaaagacactcgtgacaacttcgtaagccatctctgtggctgtctacgtaggaaacggatcaaaaccttccttgtatgacgaactaccagctgacgagaggtatgaagagtcgttaaaagcaattgaagtatcgaaaatttcagtcattgtgttctcggaaaactttggggattcnagatggtgttttaaaatgaaagttgttagcccatccttgaaaatgccaaagaaaagttttgggtcagattgtgaataccctggtccctttaccatgttgaatccncctcgacatttgaaaatcngaacaggaaatttttgganatgcctttggctaagcgaacggggataaagcccaaacnacttcccnaaattggaaaaaattttttttaccnnaaa

SEQ ID NO: 134328 - DNA, 450 bp, Arabidopsis thaliana columbia
  unsure (1)..(450): unsure at all n locations
agagctcgagattctccttccctatacaactctcatctgtaatcgatacagatggcagcttcatcagcttgtcttgtgggaaatggtttgtcagtgaacacaacaaccaaacagaggttaagtaaacatttttccggcagacagacaagcttttcttcagtgattaggacatctaaggttaatgtantgaangcttctttggatgggaagaagaagcaagaangaagaaaganattttctcaaaatcttgtttaagaaatgctggggtccggtttgggttggcaaattgggaaaagcaaatgctgatgaaacaaggtgtttcctncctnccaaagatgttcntattcccaggtttcctaaaatactttgggataaaggatanggttgaataatttttgaatttgttttnaaaaatngggaatattnactttttgttgggaaacttgttnc

SEQ ID NO: 134329 - DNA, 450 bp, Arabidopsis thaliana columbia
  unsure (1)..(450): unsure at all n locations
tgttcatattcacacaacgttgctcccaagggaaagttcatagcatttgtgtcaacagacgctgaaactgataaccctcaaaccaagctccagcctggaatcgaccttcttggtcctgttgatgagctgttcttcnacatctatgatagatatgagcctgtcaacgaacccactttgggacnactgcttcatatcaacgaatttatgatgctacaacacacttttgacacaactgttgtttgaatgttttngaaccantgtttttnanatttgaatccnccggggaaaagggaaactnggattncttaagnttgttgggattctttaaaacgccaaccttanttttgcntncccnaaaggaaggaattggantnggaanaaatttttggcnaanctncnggtcccctcccccnnggtcaaaaccccccnaaatngaatgtttnacccggg

SEQ ID NO: 134330 - DNA, 450 bp, Arabidopsis thaliana columbia
  unsure (1)..(450): unsure at all n locations
tgatgaagcaagcccgctctttgctctccaggagcctttgtgaccaaagtaagtcacttttcgaagcttcgacgttgcgtggttttgcaagctggtcaaattcttcaacccctggacgtggattccctggtaaagatgcccgcaaagcctagtggtcgattggttcgcaccttattctatcttcaaaaggaaaagctgctctctctgttggaacctggttcttcccaagtttcnctgaaaatcgaattccgggaaaatcttcnggaataaaattcgtcngtgggattcccttnaatngaatgaaattttttattgccctggntaattgggtggaagcntttantttccaantnggggaaaaaanaaaaccaaaaaatttttnggntttgttcnccctnactngaaagttnggattccctttaanttnanncaatgggggttncccaaaaa

SEQ ID NO: 134331 - DNA, 450 bp, Arabidopsis thaliana columbia
  unsure (1)..(450): unsure at all n locations
caagaacgtgacagtcacaaactcttacgagcatttccatagccaagacgtctctgcagccatctcatggcctggaatgggctcaacagaaaaactggggaacccnaaacagagcggggtttaacggaagcaccaataacttggacaatntctccacagcttaaccatccgcctacaccggtaaaacnanctggggactgttggaacgattaaaccnctcccccggaatggggatcnttttcgaagcgccaacaaaaccggattcttttttncnnatnanaatttttcccccgaactttngggcnctgaaaaaaaaaaaacttgtttgtttttgncaaaggaaaaaaaaanttnggggaatcccccctggaattntncnggattttttttnncnccccccccanttnggaaancttccccgggggaatntttttcccggcttcccttngg

SEQ ID NO: 134332 - DNA, 400 bp, Arabidopsis thaliana columbia
  unsure (1)..(400): unsure at all n locations
gaagaaatggttaagaagagagtgcagaagaaagcagaaacgtttggacaagaagtaaaattaactctggctatggcgatgagagtaagaagaagtataaagtggatccattgcttgcctctcgcatctacgggggaatggcttatccctctcactaagctcgttgaggttgagtatcttctacgtcgtctcgattgaatattatttgtatccaaatctggccctgtttaaagtgggccttaagttttttaagtggggcctgttgatatttggtcnngaatattgaatncaataanttgaaatgaanccaccnccagtccatccncttnatttttttnnnnnntnnccctcctccccnnntttntnaaaannnccccccaaggggggggggggcccccgg

SEQ ID NO: 134333 - DNA, 500 bp, Arabidopsis thaliana columbia
  unsure (1)..(500): unsure at all n locations
aagaaacaatgcttctcctcgaattcgctgcttgtgatgatcttgactcgttcaagagagaggttgaagagaaagggcttgatttggatgagtcagggttatggtattgcagacgtgtcggttctaagaagatgggtcttgaagaaagaacacctttaatggttgcagctatgtatggaagcataaaggttttgactttcatccgtttcccacctggaaaatctgatgttgaacagagcttgtggtgaaaaanagagttactcccgcttccacttgtgcctgtttgcctggctgttcctgttgaaatatgaattgaattcctcccatgttccttgcttgatgcctcccggctttggtttaactccctgtttgaatgccnaaatngggaatccacccnttnggatnttnttttgtttccccaattttccccaaggttttggttggctaattnccccaaggaagaaaacggttaattntntcccncncaaaaaaagaaagna

SEQ ID NO: 134334 - DNA, 400 bp, Arabidopsis thaliana columbia
  unsure (1)..(400): unsure at all n locations
attacctagaaagctggagacaactctaaagactaagatctgagattgtaagatcattttggccattatgatgaagatgatgactcgagttctttcatcgccttcctcacatgtctcgtcgctcaaatactcacctcgcagagtgattccgagcttcacgagatcatcttcgtgctgaaactctaaagagtcatcaacttccttcaggctcctcctccaccaagcttatgttcctgtggaaagaaaaacattttcctcngaaagcagcttagcccgacgaatgcccctttccttcccctattttgttccaccctaatgcttccgcgtttcccaanggatgttttccaaaaaacatttcctcccctccanaanggcccanaattgggttttaaaggagcct

SEQ ID NO: 134335 - DNA, 400 bp, Arabidopsis thaliana columbia
  unsure (1)..(400): unsure at all n locations
gaaacagagagcttctcttctttctccattattcatcactttcttccccgaagatgcgtcctttagacgagaccgagacaaccgtcgtcttcgagaagctcttcaaattcgtcggcaacaacctcaagaagatcgtcgagaacccatcagacgaaggacccgaatctacacccggcagctactgcttccgcctcccagaaaaacagagtctactacgtcagcgaagccctccgttgaagcgagccacaaacatctccaggaaaaaacctaatctcctttccggaaaccctgcntcggggaaattacacttcacgcccgggtagtttcccatcctgaacgaattatgttcnctccaatatcttttgggnggggaaattgcntaaacaccaagggttttngg

SEQ ID NO: 134336 - DNA, 400 bp, Arabidopsis thaliana columbia
  unsure (1)..(400): unsure at all n locations
cacaacttcatcaattatgactcttggntcaggaggatctaccgttgtngtaccgaggaatnttcggttgtcggaggancttnaacgtggggagaanngtattgggganggaaccgncanctcttggaatggatgatggacatganntctanntncgtnctntggactggccnccatcntcggtcctccaccnacacntgttccntgcaacgttacaaatcttatcctcctngaacnctcctttatntggaccantataattcatccccgggaannaaatnctnnccccccctctgtnccncaantctccnccnatcccaccnnttnttcnccnaccntgngggcttcgttggttntnnccccnacnctaaanancattnggacgntcgggntnggantn

SEQ ID NO: 134337 - DNA, 400 bp, Arabidopsis thaliana columbia
  unsure (1)..(400): unsure at all n locations
ctcgtgccggcctctctcccaaatctctctcctcgccggagatcggctcgattcctccgtcaccaccgcatctaaccggagattttccttccgtcttctctactcacaacgcagagcttcaatttctccctcgcagggattcggatcagttcaatttcaagtttctgaaccactcatggatcaggcggagctgagttatanagcaggtattgaaaagggacattccatgggaagacttacatgaacactaagctggtttcagctaaagggtctccaactctttaangngcctatgattaaaaaaacctgaaaaattttcttaaggggcacaattttggcntcnnantgaaaaaaataggtccccaagctttatgtttccaaccttccctttngtttaang

SEQ ID NO: 134338 - DNA, 450 bp, Arabidopsis thaliana columbia
  unsure (1)..(450): unsure at all n locations
caaagacagacttgctctgcagaggcttagagaagccgctgagaaagcgaagattgaactgtcatctacttctcaaactgaaattaatctcccatttatcacagccgatgcatctggagcaaagcatttcaacatcaccctaacaaggtcaaggtttgaaactcttgtgaatcacttgattgagaggacccgcgatccttgcaagaactgtctcaaggatgctggtataagttgctaaggaaatttgatgaagttcttcctagtttggaagaatgacgcctgttcccccaaggttccaatcctattngttngcggaaattcttttggaaagantcccaagccaaaggtgttcnatcccntgaatgaaggctgtttgctattgggaanctgcccttcccagggtggtntcccncccccnggtgaanttnccaaaaaatngttgcttcccng

SEQ ID NO: 134339 - DNA, 400 bp, Arabidopsis thaliana columbia
  unsure (1)..(400): unsure at all n locations
ctcgtgccgattcggcacgagcggcacggagcaaatggctacctcagagactcgagtcttgttcttatctttgtgtctcatccttggcaaagtagttttgtctcagtttgatgagttatggctagtaggggacgatgatccactcaacgccttgcagacgaggcgtgaaagaaagagaggagaggtgtgattactcggtggggaaatggacgttcgatgaaacgtatccgctctatgattcaagctgtccatatctgaattctgcactaagtttgccaaagaaatggaagaacccgactcttattacccagaaaatggagatngattccctaaggctttgttccactaccaaggtttgaccccattgaatttcctttgggaaaattgaaaangaaaaaaa

SEQ ID NO: 134340 - DNA, 400 bp, Arabidopsis thaliana columbia
  unsure (1)..(400): unsure at all n locations
ctcgtgccgaattcggcacgagcctgttgatgccaatgctcattattctactgctctggaactggccagattgactggagattacttctggtatgccggtgccttggaaggcagtgtttgtgccttactggtagatcggatgggtcaacgtgatgtggctttagaagatgaagttagatatcgatacactaatgtttatcttgcactacagaaagtcatttattcaagaaattgctcaganagtttccccccctaagctttgaactcgaaagcctacccctttaagcctgggccagattcccttttggcaaggaagggaaacttgggcttaanggaagttattaaaaacctaatttaacaaattgccagcttgatgggttgccaaattcttttaatttga

SEQ ID NO: 134341 - DNA, 400 bp, Arabidopsis thaliana columbia
  unsure (1)..(400): unsure at all n locations
cacgagcgacnnancgccatgtcgctnactattccggngaatctcgttctcaacccgagatctngcaaatctctcantcaatccgtanctaaatcntccgcaagattcgtctgctccgatgactaatnctcctcctcnncaantcgatcnntgaaagntntctccgccgccgtcancctctcttccatcctcctctctgctcctatgcnagctgtcgctgatntctcatgttttgactcccntgcaaagactcacaacnnttcgctnanaganaaaagcctacncatcaagaaggcttgaatcttcttctttaagatctaacgnnccctgaagtctgccccctgatctttgctcctcaatgctcagaattngaaaaaactctnngcanggttcgacaact

SEQ ID NO: 134342 - DNA, 450 bp, Arabidopsis thaliana columbia
  unsure (1)..(450): unsure at all n locations
tcctcttggtaaagaacttgaagatgccgttaatgccaagtttcctaatgccaaactcggtcagggatacggaatgacggaagcaggtccagtgctagcaatgtcgttaggttttgcaaaggaaccttttccggttaagtcaggagcttgtggtactgttgtaagaaatgctgagatgaaaatagttgatccagacaccggagattctctttcgaggaatcaacccggtgagatttgtattcgtggtcaccagatcatgaaaggttacctcaacaatccgggcagctacagcaganacccattgataaagaacggttggcttccatacctggaaaatattggattgatcgatgacgaatgaacaactttttcctccttgattcgattgaaaaaaactttatcaatttttaaaggtttttccaggttactccccgnttgaaacttaaaggc

SEQ ID NO: 134343 - DNA, 450 bp, Arabidopsis thaliana columbia
  unsure (1)..(450): unsure at all n locations
atctcctttcctttcattgtagttaacgaaaanattacgataatggcaacatcanctatccagcaatcctccttcgccggccaaacggctctcaagccctcntncnaactcctccgcaaggttggtgtntccggtggtggccgtgtnaccnngcgtcttaccgtcaantttactcctcanaantatctggttcggacncagacccntcccnttnttctttnnggancnnttcttcnnganaaattttccgtctctancntnnntntgggagnaatatccccnggacaacttantgctnggganncnccctttggactnctntngtttnaatcccngtagnacntttcctcnaacanaaactcntntaancnntttaaattttntnttcttntctcccctcaatatggggctttnctgttttgnggttncctntctcccggaatnntactn

SEQ ID NO: 134344 - DNA, 400 bp, Arabidopsis thaliana columbia
  unsure (1)..(400): unsure at all n locations
atctcactactctcactgttatcccttanatcttctcttcaancnctcaatggcgtccggngatgttgagtatcggtgtttcntttgatgtctacncntgggctactgatnacncagctcttnnanantgcctacccccacntatggtnnacgtcattngantccaagnatccnttaaactatcgtgannactggaanatcnangggattcntgangcngtcnccnttcncncngattanggatccccntgaancggatnaccantttnngagggatntgactccgnacccnttaattntcggatngnnncgnttcancnntctcnncngggggcnanaanggcctcncntcctttngaagnnnaatctggnctcncccggccgnntcgctctctcngng

SEQ ID NO: 134345 - DNA, 400 bp, Arabidopsis thaliana columbia
  unsure (1)..(400): unsure at all n locations
gaactggtgtctcttccgatccaccaccgtacggcgccgccgaattttccaccactcgaaactggaaatccagtagctaaccggattggacaagctctacgattcagcaatgttagaatgagaaagcccgcgtatttaggaacgatcttatctgagaaatcaagagcaagaacattaacgacggcggaagcagtttccggaagtggagtttcgcttcccgccgctggatttgactgaggataatatccatttgggtactatccgaaagctcgtatcgaactagcacaactcttccnactccatccggttggggaataacnggaacaagtttaanttttagtggaaactaaaacngancattccntttaccaataattttaaaaaggcaaatttttnggca

SEQ ID NO: 134346 - DNA, 450 bp, Arabidopsis thaliana columbia
  unsure (1)..(450): unsure at all n locations
attgacaacgtcaaagcaaagatccaggacaagggaaggaatccctccggatcagcagagacttatctttgccggtaagcagcttgaagacggaagaactcttgctgactacaacattcaaaaggagtcgacccttcatttggtgcttcgtctcagaggtggtatgcaaatctttgtcaagaccctcactggtaaaacaatcacccttgaggtttgagagttcagacaccattgacaatgttcnaagcttaagatccaagaataaagaaggaattcctcccggattcagcagaaggctttatcttttggccgggttaagccactccgaaagattggaccccncccctttgcanatttaccacatccccaaaaggaattcnaaacttccctccttgttgctcccntcctcccgtgggtggtttgccaaattnttttgtgaanaacccttta

SEQ ID NO: 134347 - DNA, 450 bp, Arabidopsis thaliana columbia
  unsure (1)..(450): unsure at all n locations
gnaaaaaagggggatcagttccgtcgccgcttcttcgatttttgacgccgccgcttcttcttcttcctcgcaggtaagtcacacaggtaactgaaagatggggcgtgttagaaccaagactgtgaagaaatcttctcgtcaagtcatcgagaagtactactctcgcatgactcttgacttccacactaacaagaaaatccttgaagangttgccatcatcccttcaaagagactcccgcaacaagattgctggattctccacccacttgatgaaacgtatcccagaaagggaccaattcccgtggaatcttcactccaagctttccagaaaaaagaancgtttgaacgcccgcatggactttggttcccccgaatnanttcttgcccttccaaaactgatgaaaatttcaagggtnggaaaaaaaaaaatcntttgaaaatgcttggttc

SEQ ID NO: 134348 - DNA, 450 bp, Arabidopsis thaliana columbia
  unsure (1)..(450): unsure at all n locations
cgancaacaacactnagcnaaacatanaagctcaagccgagagagacaatggnntctccattcacganctcgnncggtgttcttannccacnnacatgcnntggccagactncagcctcantctttaaccccctacntgatgttgtctctctcggatctcccaaatagactatgggaaatgatctttggtatggacctgacnanagtgaactactctaggancccttttccgnnncagnctccgtctttgcntcacngggaanaatacccctggncggattttnggntnnggaacacccngccnggttttatnctccatggnacccctgganannccntttttgnccnanaaaaaggggacactcctcggnntgntggattcccantggggnanattgggnttttnttttnggganctttctnggttngntatttaacnccctgnaaant

SEQ ID NO: 134349 - DNA, 450 bp, Arabidopsis thaliana columbia
  unsure (1)..(450): unsure at all n locations
gttcctaggatttattgtacaaccagtgagtggtgcattagattttttctcattgactgttgatggaattggagcaagttgtagcagatgtttggaggttttgagcaacaggaccgccttggaaagaattagaaatcctcgtgctgttcatgctgatggtatactcagggaatatgatgagaaggaagctataggccagatgctccttcatcctanccagaagcaattcggcactttggctgtacagaaatattccagggaaccctccaaaatttgctttgtctgattgctatgaaanaacatttccttgttcccatacaaacgcattgtccntggtgaacccacnaaaaattcctgtttattacagtgcccctgattctnggatnaaatggattaaaaancccccccanatccnttttggaanttnccctggggaagaactttatnggc

SEQ ID NO: 134350 - DNA, 400 bp, Arabidopsis thaliana columbia
  unsure (1)..(400): unsure at all n locations
tcgacatcggaagctgctggaaaaacaacggcaagccctgcgacggtgacgtaaccaccgacgttactcgttactcggagatgatcataaaccctgaaaccccactttggtgcaaccccaagagtcttcacaactgtccaccgtaccacacgtttcggaacggcaccagagttcaccgtacggaccaccggagcttcccttacgaagcttaccacgtttactgtgcgccgggaaacgccgaacatcttgagcttccggtggggacttgttgatgcttatagtaaccccacaaagctncaagaaaattcctttccagcttttttggcctccnccccgggttttgggggttgaaatattggaatnttcccnacccccggttngggttgaatggtttgggttg

SEQ ID NO: 134351 - DNA, 450 bp, Arabidopsis thaliana columbia
  unsure (1)..(450): unsure at all n locations
gaaaccgctgctgagcaattagaagagagacaaagtgattgggcgtattctaaacctgtggtgtttcttgacattttgtggaatcttgcttttgttgccatcggtgttgctgttctgatacttagccgtgacgagaagcctaatatgccgttgagagtttgggttgttggttatgggattcaatgttggttacatatggcttgtgtttgtgttgagtataggcggagganacgacgacgtcacccggangatggtggtggttctgggttgacgaattcttcntcgcagcaatatgtttcgttagcgcaattggaggatanaagaaanactantaatcctgcgaaacatctttgaatccacccaatacgaagttcctccttccanctgggtgggaaaaattggaattcctactgggtttcctgccaggaaggcccaaccctatcctaattg

SEQ ID NO: 134352 - DNA, 400 bp, Arabidopsis thaliana columbia
  unsure (1)..(400): unsure at all n locations
tgagacatcaatggcatctgttcctgtggttcctggctctactggccgatctgaagcaaacgatggcctagttgacaatcctcttgcatttggtagagacgatccctcacttcaaatatttttgccaacaaaaccagatgcttcagctcagtcgggttttaaaaaccaagctgatatgtcaaatggtctccgtagtgaagactggatctcgcttangctangcgatagcgcctctgggaatcatggagatcctgcaactacaaacgggattaactcaagccatcanatgtctacgaaggaaggttctatggatactacaacagaaaactgcgtcgttgcttctgggtatgaatgaacgtagaacnagaacnaggcnaaanaagcaaagatcagaataatc

SEQ ID NO: 134353 - DNA, 450 bp, Arabidopsis thaliana columbia
  unsure (1)..(450): unsure at all n locations
gaaaagaaaacaagacccggatgagttcttaggctttcctattggactcagtagtggaaaaactgagaacagctccagcaacgaagatcatcatcatcatcatcagcaacatgagcagaaaaatcagcttctttcatgtaaaagaccagtcactgatagcttcaacaaagcaaaagtttcgactgtctacgtgcctactgaaacatcggacacaagcttgacagttaaagatggatttcaatggaggaaatacggacaaaaggttacaagagacaacccgtcccctagagcttactttagatgctcgttttgcaccgtcttgttccagttaaaaaaagaaggtaccacgccacgccaaaagattccatcctttactttgtttgcgaacntttcgaaaggggaccccttaaccccttngggttcccaaatgcttccttgaaagggggatgc

SEQ ID NO: 134354 - DNA, 161 bp, Arabidopsis thaliana columbia
  unsure (1)..(161): unsure at all n locations
tggnggatgtggaggagnngcagntggncatgctggnggtggaggtagtggnagnggaggaggatcannatccggttcnggngnagaacnagatcatgcttatggnnanggaacnggagntggtgatggtgccggtgccagtgctatggntattggaangg

SEQ ID NO: 134355 - DNA, 450 bp, Arabidopsis thaliana columbia
  unsure (1)..(450): unsure at all n locations
gcggctcggattgctctcacggattcttcttgtcaagttcgtgcaccgcgaactctgatcggatatgtacgccttgctcgctctgtcaaaacagttcttgttcggatatatgtaagcttcataacagcaattttccagataagcattggcatcaactacagagacttgttcttatcatcgggtcttgcgcatccgctctattgatcattataattggttgctgtgttgtgccacggattgtcactaatcctaataaagaagacggagcagcgaatcaattcaaatcttgcatangaaaacccgatttagaaactgatcagccacttgaaaatgtntcccctgctccatcggtaacgcctttgntcaatttttaaatctctgaacttaaaaaccgaacaacggtttaaaaatccataattaggaaagaactntggttgtctacaaccggtt

SEQ ID NO: 134356 - DNA, 450 bp, Arabidopsis thaliana columbia
  unsure (1)..(450): unsure at all n locations
ctcgtgccgagatactacgccagagagctccaaccaggaaacagattctactactctgctcgaaagtgattcatctaatacagctatcattcctgaaactagacaattaactcttgaangcttttcattgagcgtcccagctgatcagatganaatgattcntaaccattaatacgctgattgctgagttggnaattgaaaaaagaagaactggtgcnagcactggtcatctgaatttatctcnaaattgcgcatgtttcaggaacttgaaacaaagaatttttcccanaaaaactttnaaagcgccaaaanncccaaagggtttnaaactttgtttacnancgccnaaaaaantgggcccntanaacaattgttttcccccnnaaaaaaaccagnagccnggacactccttntttgtttcccanaaaaaaaacnccnnattgncaatta

SEQ ID NO: 134357 - DNA, 300 bp, Arabidopsis thaliana columbia
  unsure (1)..(300): unsure at all n locations
gaactanttcntccaagaaaccgtganctntanctntctcctcnagcagatggggcatcccccgnaaaccctaaggcttcntttttccccgaatnnnatctggctnagnaaggaattnnnttnctnaacattcggttnnggccnatggccngtncccnaattnttcncccaggaaagaattngtnttntttgggaaaccctaacnngggnccncnccaaaaaaattntcnaccccctttggggctnttnagttncccccccttggaactcttnnaagggntnctaantccccngaantgn

SEQ ID NO: 134358 - DNA, 531 bp, Arabidopsis thaliana columbia
  unsure (1)..(531): unsure at all n locations
tctgctcgttttttcgctccatttttgggtcaccattactcagcttccgttttaaatatcacattanatggacgaaagcggaggtgatagtggttcagtggccacacctgttcaacagcgagcacatgaggcatggaggatttaccaacactatcttgacaagactacacctcatgcaaattacagatggattggaactcttgtcgtcgctcttatctactgtttgagggtttactatattcagggtttctacatcatcgcctatggtcttggaatctaccttctcaatctgcttatcgggttcttgtcccctccttgtttgatcccgaaacctggtggggtctctgaatgggccntctctgcctactaaaaagtttctgantaatttcaagcccttttcnttcnnccgtcnccccccnaatttcaaattcttggtanntccatnaaaaaaaggctttcttccataacttttccnccatgaaattcttcccccgtgtttgaacttcccngtttttttgggccaatccgccg

SEQ ID NO: 134359 - DNA, 470 bp, Arabidopsis thaliana columbia
  unsure (1)..(470): unsure at all n locations
gctanctagagagtaaaaagaacaaagatgtcgaaagaagtgagcgaagaaggcaaaacccaccatggaaaagactacgtggatcctccaccagctcctcttctcgacatgggtgagctcaaatcctggtctttctacagagctctcatcgctgagttcatcgctacactcctcttcctctacgtcaccgtcgctactgtcatcggccacaagaagcaaaccggtccttgtgaccgcgttggtttacttggtatcncttgggctttcggtggtatgatcttcgtcctcgtctactgcaccgcccggtatctctgggtggtcacattcaaccccacctgtgaactttccggtcctgtttcttgggcccgttaaggtctcttttgggtgcgaacntcctgggttacaatgaatagctccnntngtcctgggaacccattttgtnggtgttgggttttccnttgaaaaacttt

SEQ ID NO: 134360 - DNA, 465 bp, Arabidopsis thaliana columbia
  unsure (1)..(465): unsure at all n locations
cgacgacatggcagctacctctctcactgcccctccttctttctccggtctccgccgcatttctcccaagctcgacgctgccgccgtctcctcccaccaatccttcttccaccgcgtcaattcctctacccgtctcgtttcttcctcttcttcttctcatcgctcccccagaggtgttgttgccatggctggatccggaaagaagggactaaggactccatcgccaagcttatctccgatctcaacagtgcaaccttggaagcagatgtacatgttgttgtgtcacctccattttgtctacntcgaacaggttcaantcctccgttganagaaccgtaattgacatatcaaggtcagaaatcttgggttggggaaaggtggaaccttcnctggtgaaattcagcgtggaaaaacttcaaaaacctggggngnaantgggtcattcttgggcaatcccnaaggaaa

SEQ ID NO: 134361 - DNA, 399 bp, Arabidopsis thaliana columbia
  unsure (1)..(399): unsure at all n locations
gtgggagcgactgtanttagtaaatggactcccctatgtgtggcttcgccgccggagagaaactcggcaagtctcaatccacactgttctccagccagggttaattttagaacagcgttggccgcatttcgtcctcagttccgtcttttctctcgcaattccgcgtctcgccgccgtcttcgcgcttccagctccgccgaatcgggaatcttccttcctcacccttgtagcttctatggaaggacgtttgaaggaaaacttacatttatgggtgaaaccctgatgggcattactaacgaaggccttgagcatttattaagggatcttaagtggcttaaaatccattcctttcccttaaaccttgatttgaaattacaatccactttcaaggttcccaag

SEQ ID NO: 134362 - DNA, 445 bp, Arabidopsis thaliana columbia
  unsure (1)..(445): unsure at all n locations
ctcgtgccgcttaactactatacttcgacattttcaaattataatgagaagccagatccgtctaaaccaagttggaagcaagattctcttgtttcctgggaacctaagaatgtatatcacagcgccattggtagcatgcctcttactgctgcattgcccgtctacgctaaaggatttagaaagcttttaaagtacatcaagggacaaatacgcaaacccggagattatgataatggaaaatggatatggagataaacttgggaccacanattccggttgacgttgggtactgctgatcattacangaaatattatctttcccganggcatcttcctggcttatgaaacgaagnctatttgcctccaataanggtgganaatttacgggaattacnttttgttttngntcccttggtttgggattactttccccaaatggggcnaa

SEQ ID NO: 134363 - DNA, 483 bp, Arabidopsis thaliana columbia
  unsure (1)..(483): unsure at all n locations
tctcaatgagccagtcaagattcattataaagtctttatttagcacagcaggaggtttcttacttggatctgctctctcaaatccgccgtctctagccaccgcgttttcttcttcttcctcgtcctcctccgccgccgccgccgtcgacatggaaactcacaaaaccaaggtttgcatcgtcggaagtggaccagcagcacacacgggggcgatctatgcatcgagagcggagcttaagcctcttctcttcgaangatggatggctaacgacatcgctcccgggggggtcaatttaactacaaacaaccgaacgtccgaaaaaacnttcccctggggttccccctgaaaggtattcctccngtattgaatatccgtttgaaaaaattcncaaaaaacaaatccngaanaaaattttggaactaacaaantttnccccnggaaaacttgtttaacaaagttgaatttcttccnttcnaaaaacc

SEQ ID NO: 134364 - DNA, 526 bp, Arabidopsis thaliana columbia
  unsure (1)..(526): unsure at all n locations
tcatcgtctcctctccaccaagtgaatctctttctctctctctttttctccgcggaaggaatctcttcttctggttgcgtttgagtccgtacgaaaacaaaagaaaagagagagatggcggaagagaagaaagctccaatcagtgtctggactaccgtgaagcccttcgtcaatggcggtgcctctggtatgctcgctacttgcgttatccagccgatcgacatgattaaggtgaggattcnacttgggtcagggatctgcagccagtataaccaccaacatgcttaaaaaatgaaggcgtttggtgccttctacaagggattatctgctgggtttgctgaaggcaagcaacttacacnaaagcccgtcttggattattccaatttgctgactgccaaaagncattnaatncttattgaatggaaaacccccttcccgctttttttctaaaaaggnccttattttttntccttgaacanctggggggctntttgggtgcttggntttcnggtaattcccaccccca

SEQ ID NO: 134365 - DNA, 476 bp, Arabidopsis thaliana columbia
  unsure (1)..(476): unsure at all n locations
ccgccgacgacttctggggtttctattccacctccaaactccatcccaccaaccaagttaacgtgaaagaggaggcagtgaagaacgagcaggcaacagagccggggaaacggaggaagangaanaatgtttatagagggatacgtaagcgtccatggggaaaatgggcggctganattcnagatccacgaaaaggtgtttagaatttggctttgggtacnttcaacaccggcgggaaggaaanctgccatggctttattgaatttttgccgggcccaaanccanaatnccgtggggtgaatnaaagccccaaagccttcaaactttccccccaaaattnttggcacccattccctcccctccctcccttaaattttantacttcccttcccgncccggtncatccgnccancgaattnaaacccggatttaagccctccccggggcgaaaaaaaaaggttcctggcnnttttntc

SEQ ID NO: 134366 - DNA, 431 bp, Arabidopsis thaliana columbia
  unsure (1)..(431): unsure at all n locations
gaaaaccagagatggcgatgacgacagcatctacggtatttgttctaccggccaatgtcacctcggtcgccggcgcttcgtcgtccaggagctccgtgtctttcttgccgatgagaaacgccggttctaggctcgtantcagggcagccgaagatcctgctccggcttcctcttcttcaaaagattctccggcagctgccgctgctccggatgggagctactgccaccaaacccaagcccaccaccgattgggtccttaaaaaaaaggtcttaaggtccaanaattccttaaggaaaaaaatccttatttggttccaagaaacgtttngggttncngtttgttngcccgtttgaattcnnggancccttaagaaatccaatacccccnggtttgtttggtccccggtttccccaaaaaattcaattttacc

SEQ ID NO: 134367 - DNA, 383 bp, Arabidopsis thaliana columbia
  unsure (1)..(383): unsure at all n locations
cattttaagagtcgatggaggcttaaagagtggtgttgatgttctaatggctgcagctatgggtgctgatgaatacggattcggttccttggcaatgattgctactggttgtgttatggctcgtatttgccacactaataattgcccagtgggtgtnncaagtcananaaaaaaaattacntgcaagattccctggtgttccnggtgatcttgtcccactaacttcnttatacnttnccnaaaaaagtgaaaangtttctttcaaccnccagnttggggaataccnccnngtttttanattgaacnttcctttgggacccaaacnctaattttcctgnaacaacccnccaaaaacntttttcccccntanttttaaaaactcc

SEQ ID NO: 134368 - DNA, 320 bp, Arabidopsis thaliana columbia
  unsure (1)..(320): unsure at all n locations
gaaaactttgtgagcaaagagcgagaaaatgagcggagccggtaagaaaatcgcggatgtggctttcaaagcttcaaggactatcgattgggatggtatggctaacgtccttgtcacagatgaggctcgtananagttctctaaccttcgtcgtgcttttccaatgaaggttaacncacagctcccanaaccaaaattttagttccngggaacctgaaaccttatagaattnggggaatttncttatnaggaaaggggttttcgggaaccctgggncntttgtttgaacnaaatttnccaagggaaagccttttttgaac

SEQ ID NO: 134369 - DNA, 381 bp, Arabidopsis thaliana columbia
  unsure (1)..(381): unsure at all n locations
cacaccctaaaactcagcaacaatggccgttaccttttcagatctacacacagaggagggtgtcaaatccgtggaggagcacctcgccggaaaaacctacatctccggagatcaattgtctgtggatgatgtcaaggtttacgctgccgttccagtgaaacccagcgatgccttcccccaatgctagcaagtggtacgagtccgtggctncccaactttgctaaaagtttcccctggaaaggccgttggaattacaattccggtggctcctgctggctgctgctcccanctgnttgaaaacttgaaggcaccctggccancttgccgcttgaatgaatgaatgaatnacatggattctccttttngggtgaaccaaaaacc

SEQ ID NO: 134370 - DNA, 409 bp, Arabidopsis thaliana columbia
  unsure (1)..(409): unsure at all n locations
cggagtaggaggaggagggaacaagccgtggacagctcctgccttaggctatcctccacacgtggcaccaatgcatcatggtcacttcaggcctttgcacgtatggggtcatcctacgtggccaaaacacaagcctaatactccggcgtctgctcatcggacgtatccaatgccggccattgcggcggctccggcatcttggccangtcatccaccgtactggcatcagcaaccactcttatccacanggaatattgggtattggcatccatccnaaatcatttccaaagccatncgggtgttttccccccccnaagnaanaattttanggaancccnacttaaatnccctccccccaatcgaaaatttccttccccctnccgnaaattgaaaaaacccttttnaattc

SEQ ID NO: 134371 - DNA, 416 bp, Arabidopsis thaliana columbia
  unsure (1)..(416): unsure at all n locations
agagattcagctgcgttgggcaaaatcccagacgaagatcagtgattagtcttttgataacttgagccatggcaactggtaaaactgtgaaagacgtctcgcctcatgacttcgtcaaggcttatgcttctcatctcaagcgatctggcaagatcgagcttcccacatggacagacattgtgaagaccggaaagttgaaggagcttgcaccatatgatcctgattggtactacatccagaactgcatcctatggcaaggaaagtttaccctgaagggaagaacttggtgtttggtgctttcccgtaaaaatctatggtgggaaaaccanaaggaacngttattcccccccccctccccttttttgcccaaaaccagtgggttnggtttttgcccccgtccccattcccccccccaa

SEQ ID NO: 134372 - DNA, 453 bp, Arabidopsis thaliana columbia
  unsure (1)..(453): unsure at all n locations
atcaaaagattcttggtctccgatccagtcacctgaagattctccgagcttcttttgaccacacactttcaatggcggatgctgtgaacgctcaaactccatcgctctccgagcaatatcatttggagaaagaagtgaagcaagacacaagtgcaaagcctgttgaagtgaaagaggtggcaccagaagttactacacaagctgaagaggttaagacggagcaagctaaggaagaatctcctgttgaggaagcggtttctgttagtttgaaagaaaagtcttgaatcctgctccctgaaatcaacggaaagttggcttcctgaaggctccctggcttgcngccggaaagaacnatgctgaaaaanactccctgctggctggcttgaaanaaaaattaatgaanaaaaacgctttagttgaaaaaaattttgcttgaaaaaaacccccctgaat

SEQ ID NO: 134373 - DNA, 433 bp, Arabidopsis thaliana columbia
  unsure (1)..(433): unsure at all n locations
cttaacccacaacgcttcttcgctggatgggccaaaaaatacggtccaatcttgtcatacaggataggaagcagaacaatggtggtgatatcttcagctgagctagctaaagagcttctcaagacgcaagatgtcaactttgcggaccggcctccacatcgtggccatgagttcatatcctacggcaggcgtgacatggcattaaaccactacacaccgtattaccgagagataaggaaagatggggaatgaaccacttgttcctcaccaacacnttttggcccaccttttaagccatgttaccgaaaaagaaagaaggcttaggaagaatgaatggataaaattccaaccaagggccgccggaatnaatccccaaanttattcnaatataanttgaagcttattttttgaccttccnncaaatccggttgtt

SEQ ID NO: 134374 - DNA, 407 bp, Arabidopsis thaliana columbia
  unsure (1)..(407): unsure at all n locations
cactgtggtctgcagtgacggtgtaaagattcaggcttccgtggttcttgatgccactgggttttcccgatgcttggttcagtatgacnaaccttacaaccctgggtaccaagtatcttacgggattgtanctgaagttgatggtcacccattcgatgttanacaaaatggtgttcatggattggagagacaaacatctggactcatatcctgagctgaaagaacggaacagcaagatccctacgttccttgttacgcctatgcccattntccttcccaacccgaatatttctttgaaaaaaacttcctttttaatttggctagaacctggtccttgaaaaatggaaacaatntccccaanaaaaaaatnggntggcttnaactgaaacttcctnggggattncaat

SEQ ID NO: 134375 - DNA, 404 bp, Arabidopsis thaliana columbia
  unsure (1)..(404): unsure at all n locations
cagattcccaaataatagtaatactcttcctcttctcaactctcaccagtcaccagcagatcatcggagatgggcggagacggaaaagttttcaccttgtccgaggtttctcagcacagtagcgccaaggattgttggatcgtcatcgacggcaaggtttatgatgtgacaaagttcttggatgatcatcctggtggtgatgaggttatcttgacttctacagggaaagatgcgaccgatgatttcnaagatgttgggacatnnttccgactgcgaaaagccatgcctaaatgaattactatgttgggttgatattggacacagctactggtgcccnggtttaaagcttaattttggtgcccccctaccttccaacaaaaagccntggctactcccaggaataa

SEQ ID NO: 134376 - DNA, 435 bp, Arabidopsis thaliana columbia
  unsure (1)..(435): unsure at all n locations
ttgggaattttcaaggagtgtcgaaccttaacagtggcggttctacgggaacaactactcaaatcaacgactttgggggtttccaggcttcgaaatcaaacacattctcatcaggaggtagcttcaatgcttcaaacgttgattttggtgtgcaaccaagtggtccacaatcttcgagtgcaaacgatgatccattaggaatgttctctaattccaaaccctcagctgcaccacctacgccacagaccgaagattggggatttgaaagttttgacggtggggctggttccaccaaccganctttgatggttttgccacccgccctcccacccggggtgttttcccacttacatcnagcntaanaaacaangggcctttgaataaaccanaaaacaaggttcnggtatgcctgaatgcccataaaattggctcccc

SEQ ID NO: 134377 - DNA, 429 bp, Arabidopsis thaliana columbia
  unsure (1)..(429): unsure at all n locations
aatcagagaaaatgccgccgaaattggatccatctcaaatcgtcgacgtctacgtccgagtcaccggaggtgaggtcggagcagcgtcttcactcgctccaaagatcggtccactcggtctggcaccaaagaagatcggagaagacatcgccaaagagacagcgaaagaatggaaaggtcttcgagtcaccgtgaagcttacggtacagaatcgtcaagctaaggtcacagtggttcccatcccgcagcggctcttagtcatccaaagccctccaaggagcccagaaaaganattaggaaagaaaagttgaaagaaacatccnaacatttattgggcaaacatttccgttttgaatgaatgtttaatttgaanaattggcttaaaaataatgcgttcccctaaatttttattccgcttaangaatttga

SEQ ID NO: 134378 - DNA, 348 bp, Arabidopsis thaliana columbia
  unsure (1)..(348): unsure at all n locations
cgaccaattgaatccacgaggaaatctcagtaaatactatggcgaccaacgaacccgagcacgagcacagagacgaggaagaggccggagctaacgaggatgaggacaccggagctcaggtcgctccgatcgttaggcttgaggaggttgccgtcactaccggcgaagaaagacgaagatgccgtccttgatctgaaatcgaagctttatcgattccgataaggatgcgaatcatgggaaaaggaaaaaaaggaacttgggtacttgttgaaatttcctttaaaagccttaagaaacactgggaaanattccntccccctttatgaaggcaatcctaaaacttttgaa

SEQ ID NO: 134379 - DNA, 310 bp, Arabidopsis thaliana columbia
  unsure (1)..(310): unsure at all n locations
cccttttgcccctcttttttacagatttcactctctgctctactactctctcctcctcctcctcctaaagaaagttcttaactctcctgggttcttcaggtttttccttttctggaataaaaagaagaagaaatgggtgttcttgatcatgtctctgaaatgtttgactgctctcatggtcacaagattaaaaagcgcaaacagttgcagacggtggagattaaagtgaaaatggactgcgaaagttgcgaacggaaagtgcggcgttctgtcgaaagcatgaanggtgtgtcttctgtgangttggaat

SEQ ID NO: 134380 - DNA, 429 bp, Arabidopsis thaliana columbia
  unsure (1)..(429): unsure at all n locations
cttcgtcgacacattctacaatctcgtcaccgacatatacgagtggggatggggacaatccttccacttctcaccatcaatccccggaaaatctcacaaagacgccacgcgcctccacgaagagatgggcgtagatctgatccaagtcaaacctggtcaaaagatcctaaaacgtcggatgcggtgtcggggggtccaatgcgaacgattggcntctcactcgcgaactaacgttngtcnggattaccaataaacgaattttcaggtgaacanaactccgtctcccncaataanaaaacttggtctccaacccncttttgnnaagtcgtgtntttgttacttcccccaaaatgcggtcnaaaaaaaanantttccanggngttttttccctccaaaacccctttttncccnccaaactggaaaaatttt

SEQ ID NO: 134381 - DNA, 570 bp, Arabidopsis thaliana columbia
  unsure (1)..(570): unsure at all n locations
catctgaagaagaagaagaagaagaaaggagccatgacaatgtttagatctatctccatggtaatgctgctcgtcgcacttgttacattcatttctatggtttcttctgctgcttcgtccccagaagccgactttgttaagaagactatctcttcccataagatcgtcattttcnccaaatcctacngcccctactgcaagaaagctaaatcagtgttcagagagctggatcaggttccttatgttgtcgagcttgatgaaagagaagatggttggagcatccagactgcacttggagagattgttggaaggcgaacagtaccgcaagtcttcattaacggnaaacatctcggagggtcagatgataccgtagatgcgtatgagagcggtgaactcgccaagcttcttggtgttccgggaacaagaagctggaccccaaggtanatatagttggagaattgtaaanccnccggaatnctagggnaacaatcaattcccttgaatngggncggacttnnaancctggananttactgcttaagnanttcaagccnttcggtnaaaaaaaac

SEQ ID NO: 134382 - DNA, 286 bp, Arabidopsis thaliana columbia
  unsure (1)..(286): unsure at all n locations
gcttgtacaccggacagttcacaacctttgctctctgcggttttgtccgtgctcagggagacgctgacagtggtgtcgacccacgcgtccggaaaccaggtgtttaaaagttaaaactataaaataaattcaccaccagtccaccatgcataattgcatctctatatacacttatgtcttataagtatgcatcaaaataaaccatggtgagtttgtaattcagttccttcagaaatgtgtggaataatgttttataataataataggatatcnctcagtttgaatt

SEQ ID NO: 134383 - DNA, 562 bp, Arabidopsis thaliana columbia
  unsure (1)..(562): unsure at all n locations
aaaaatatgggtatccaagaaactgacccgttaacgcaattgagtttaccaccgggtttccgattttacccgaccgatgaagagcttatggttcaatatctctgtagaaaagcagctggttacgatttctctcttcagctcatcgccgaaatagatctttacaaattcgatccatgggttttaccaaataaagcattatttggagaaaaagaatggtatttttttagtcctagggatagaaaatatccaaacgggtcaagacctaaccgggttgccggatcgggttattggaaagctacgggtacggataaaataatctcgacggaaggacaaagagttggtattaaaaaagctttggtgttttacatcgggaaagctcctaaaggtactaaaccaattggatcatgcatgagtanggctcattgaaccttctcggngaaccggagcnctaagttggatgatngggncatgccgatatccaggagnaancagtnccaaaacaggttcgtatgganccgatcanacacgnctngcccnggcgtttccctgangntggngtntc

SEQ ID NO: 134384 - DNA, 350 bp, Arabidopsis thaliana columbia
  unsure (1)..(350): unsure at all n locations
gcgggattacccgctgcagtntaagcatatcaataagcggangaaaagaaactaacaaggattcccttagtaacggcgagcgaaccgggaagagcccagcttgaaaatcggacgtcttcggcgttcgaattgtagtctggagaancgtcctcagcgacggaccgggcctaagttccctggaaaggggcgccagagagggtgagagccccgtcgtgcccggaccctgtcgcaccacgaggcnctgtctacgantcgggttgtttngggaatncagccccaatcnggcggtaaattncgtccaaggctannatatctttgatgtttngaagncgtgaaacactttagngttt

SEQ ID NO: 134385 - DNA, 395 bp, Arabidopsis thaliana columbia
  unsure (1)..(395): unsure at all n locations
tgatttttctcaaccggtggttggtactaccggtgatgattcgggagaaagagctaacggcgagaggagaggtatagccgtattccagttattcgccgccggagtcgccggaacgatttttaacnccgggggtcgttttagtagacgacngggctgccgccgtagatcaccggaatctgagcngcagccctgtctcttcatcgtcgtcgaccncctcgatcttaggtccagcaccgcctgaagcagggggagcatcatcgtccataccagaggcaccnggaccgccggcttcaccaacagctccttggtacatcttggcaatgattgngttgcaganactctccaattccttcatcttgtctttcgaanctcagtcancctnagncancanggnt

SEQ ID NO: 134386 - DNA, 585 bp, Arabidopsis thaliana columbia
  unsure (1)..(585): unsure at all n locations
gctaagaagcttgagcacgaggacaagaagccgtcgtggaggatacgagagagtgagtgatgattcaactttcagtttactcggagcaaagctaaggagatcgacgagtgttccttactacgcaccatctataaagcttggagctggtggtgttccgaccattcttgaggagcttcctcgtcagaaatcaaagaaagtcaaaccaacaggcaaatttagtcacccaatctttagtcctttctacggaaagaagaagaagtcgacccacgcgtccgcctccacctacacagaaactagagggacaaggtggtgatggaggagattcttgggacgatggtgctttcctaaatgtaaagaaagtatatattggacaaggctcgaacggtattgtcgccgttaagtttgagtacgagaacgacgctagtgaaggttgttgttggagatgaacatggaaagacnacattgcttgganccaatgttccacctggatatccgnatgatacatncatcattggggggtccncgcaaggcttgggctgactgggtntacatcctngggnancaaaanncccccctttgctaanc

SEQ ID NO: 134387 - DNA, 455 bp, Arabidopsis thaliana columbia
  unsure (1)..(455): unsure at all n locations
cggaacgntggtcaccagntctaatatcacaaagaaagagtttctttaactagcttagctcaaagtgtttgcttaagacaagaagaacatggcgtcttaccagaaccgtccaggaggtcaggccactgacgagtacggaaacccgatccagcagcagtatgacgagtacggaaatccgatgggaggaggaggatacggaactggtggtggtggaggagctacaggtggccaaggatacggaacaggtggccaagggtacggatcaggtggccaagggtacggaaccggtggccaaaggatacggaaccggggaccgggagactnnagggcttttgggaactgggcggagtgagcttagggncacccacgggcncaaannagccaaccctcccanccnanggnaannntggggttgggttggcnctttgnggatgngaaatttcctttttacccgg

SEQ ID NO: 134388 - DNA, 474 bp, Arabidopsis thaliana columbia
  unsure (1)..(474): unsure at all n locations
gaagaagtctaagaagtgaagaggatatatagtgtgaagctatatcgatcatcagttcacggattagacttcttcttcggtacagctgcagttggagcaggtgtagcagcaggtgctggagcagctacaggcgcaacatctccaccgggacccttagctaaacgctcctctctcctagcatgcttcctttctcggctagccttgttcttcgccctcttagcctcaaactgatcagacagagtcctctccctagccttctcagcctttgacttgtgggtactctccatcaagacacgcttgtccttgaacacattancccttaaaacgcatgtacatggnnangggaaangggcttggnaaaccttntttgggcncccggaatttctntaaaaagnggcctaagaaacanggntccaaggggtcccattnttaaatcgggagggggggcttnaggggcccaagtttgnnncgggg

SEQ ID NO: 134389 - DNA, 481 bp, Arabidopsis thaliana columbia
  unsure (1)..(481): unsure at all n locations
gccggaagtctcgaagcttgttacacnctaggaatgattcggttttattgtttacaaaacagaggaaacngcgcgtcgttaatngctaaagccgcgattagttctcacgcgccggcgttatatnccttagcagtgattcagttcaacggaagcggtggttcaaagaatgataaagatcttagagccggtgtggctttatgcgcgcgtnccgcttttcttggacacntcgacccacgcgtccgctcatcacncaacctgagctcacaaagctaaacaaaaaaaaaaagagcttaggcggagaagaagaggagaccaaaacaccaaacaaacaacaatgggctgtctcaactatctactcaacacaagctctcaattcaactcatttcttaacccccttcttnccccctccaaacaagtcttcntctaccgtggtnaccnacaacccaacggngntncaacnncncttanttgggcnagaaac

SEQ ID NO: 134390 - DNA, 320 bp, Arabidopsis thaliana columbia
  unsure (1)..(320): unsure at all n locations
gagagaacaagttggtcacccttgaagtcagttgacgacatcgtatnggatgggagtgatagtctccaagccttgagctcatcatttttcttcttcctcagcttgaaccccacagcacatcttgacagcngcacatgctccacaagaacatggatccncttccttatgatcttatcgccaatctgataaacccacctcaagcaaaaacttcaaaaatcagagtaaaacgnacggncagtcatagctggtttcctgactgggggccagttgcctaaancaaggttnnccaaaatttggnnttttcaaaggtttnnttgggg

SEQ ID NO: 134391 - DNA, 389 bp, Arabidopsis thaliana columbia
  unsure (1)..(389): unsure at all n locations
tcttcaccccgaggtgcttggagaggatgctgagaactggaagataacagtgagagaatactggtctctcttgtctcctctgatattctctgatcatccaaaaagacccggcgatgaagatccatcaccgccttataacatgctcagaaacgtactggatatgaatgctcaattcggtggtctcaattccgccttgttggaagcaagaaaatcagtctgggtcatgaatgtggtccctacagctggacctaaccacctncccatgatacttgaccgnggggtttgtcggagtttttgcccactgggngggaancatttcccgggttttccccgganaanatnngccccngggaaantngggnaaaattntttnggggnttttaaaaaaa

SEQ ID NO: 134392 - DNA, 560 bp, Arabidopsis thaliana columbia
  unsure (1)..(560): unsure at all n locations
gaacattgantaaagagagangtttttangggttttcnntgtacctatttataagaaatacnctaactgaaactttacttcttcatcaatggcttatnctaaggttgcccttcncctcgtcttcaatgtcatcttcttcacttttgtcagctcgacntcggtcccttgtccaccaccaccgcccaagagcnaccacaagaagcccgcaacgccatctcttaaacccacttgtaaagacgctcttaaacttaaggtatgtgctaacgtggttggatgtggttaaggtttctcnaccaccaaacgtccaactggttgcgctcttatcaaaggtctagttggatcttgaagccgcgggtcctgtctttggacaggcctaaaagggtaaatgttcttggnatcaaccttaatggtccccatttcctttgaacggtggcccaaancattggggggaagaanggtccatccgggttcaaangggccnagnggttacccatttnaaatngggggccanaaccaaattccaaccnggttcaaanccggttgggaacctaccatggggg

SEQ ID NO: 134393 - DNA, 585 bp, Arabidopsis thaliana columbia
  unsure (1)..(585): unsure at all n locations
ancccacanagtccagggatngtcaactacatgccagttgctgccatcaaagccaaacgaacaatttcaggtttgttgacaggtgcccaactggattcaagtgcgggataaacnaccagccgccttccgttgttccaggnggtgaccnggctaaggttcaacgagcggtttgcatgatcagcaataatacngcagttgctgaagtgttctcacgtatagaccataagtttgatctcatgtacnccaaaagagcctttgtccatnggtatgtaggagagggtatggaagaaggagagttctctgaggctcgtgaggatcttgctgccctcgagaaagattatgaggaagttggtggagaaggagcggaggacgacgacgaagaaggcgatgagtattaagaaagnccacaagaagtgtggtggtncccttggtttccttccttgtgaangacagtaatttatggcctttggtgaaatggnganccccacaggtnattttggngatggttacngggcccnccccnttaaatncccaattggggttacaaangnttcattccagggccccaaacaagttnaagggtgc

SEQ ID NO: 134394 - DNA, 546 bp, Arabidopsis thaliana columbia
  unsure (1)..(546): unsure at all n locations
aagcaagctggtgcatacaagggacaattcatgggacagtcacatttcttcgggtatgaaggaagatgcggcttgcccacaaattttgatgccacatactgttatgcacttggttatngcgctggagtacncctcaacagtgggaagaccggactaatttcttcggttgggaacttggctgctcctgtggaagaatggactgtaggtgggacngctctcacagccttgatggatgtcgagaggagacacggtaagttcaagcctgtgatcaagaaagcaatggtggaacttgaaggtgcaccatttaagaaattcgcatcacangcgtgaaagaatgggcattgaagaaccgatacatcagcctaggtccgatccaattcacnggacctggttcagactctctcagccacactctacttcttgaacncggggccaaaagcccccgnctaaccncatcccttggttttncggccncccnggaattccggatcagccntgtttaccnnaanaaacnncccgaaattcgaaaggancccccggttcntc

SEQ ID NO: 134395 - DNA, 668 bp, Arabidopsis thaliana columbia
  unsure (1)..(668): unsure at all n locations
acctggcctgnantncctgggctacccactgcngtcctggaagaatgaagaaagactggggctacaagngtcagctaagtgacgtctcttccgattcaatccctcttatgctcctctctctcctcgccgtcttcatcaaccatctccgatctttcctcctccgtctcacctctaaatcaaatcctaatctccccgtagacgacgtctctatagcatcgggactagccaacataatcgttctcgccgatcagcttagtttgaatcggttattctcgtaccggtgcggtgacggaggtggtggcggctccgattgtgttgtgtgtttgtcgaagttaaaggaaggtgaagaggtggggaagctggaatgtcgacacgtgttccacaagaagtgtttggaaggatggcttcatcaattcaatttcaattgtcctctttgnagaacngctttgggttccgatgaatgcgtcncaaaacgnacgaaggttgggagggatttatcccgngttcccccccactgggaaaagatcgaaaatgaaaaaancgatggatctgaaaatnaacgggggtgctggtcggttaaaaggggggccccttctttccgntttttaaggccctccntgnnagaactttntgtggttttaatccntgaatnattaaaaaatnccgtg

SEQ ID NO: 134396 - DNA, 440 bp, Arabidopsis thaliana columbia
  unsure (1)..(440): unsure at all n locations
tttttcttggcaggaacgagttatgatagaattaggcttgtttatcttgatgaaatgggtggaatggctatctccattccaaaaatatttacaatgttcactattttatcgatggcttcccttgcattgccgggcatgagtggttttattgcagaattcattgttttttttggaataattaccagccaaaaatattttttaatttccaaaattttcattatttttgtaatgngcaattggaatgatattaactcctatatatttattatctatgttacggcaaatggtctatgggtacaagttaattaatnaccaaaaacttttcntttttttggattccngggcccccgngaggtnattnccttccaaccncccaatnccttttacccccanaatnggggantngggggtttaccccggatttgggggccccnannngc

SEQ ID NO: 134397 - DNA, 404 bp, Arabidopsis thaliana columbia
  unsure (1)..(404): unsure at all n locations
ggtgacattgaaaccagctggtttcacggtggagaagacggcggctagaggattaccgtcgctcacaagagctcgtccctccttcaaaattgtcgccagtggcgtcaagaagatcaagaccgacaagcccttcggaattaacggcagcatggacttgagggacggcgtcgacccacgcgtccgactttatctcccaaaacacaaaaaaaaaaaaatggcttccactgctctctcaagcgccatcgtcggaacttcattcatccgtcgttccccagctccaatcagtctccggttcccttccatnagnctancacanaatccntcttnggggcttaaancagggaccggttcgtggngggnccgtttanaaggcgatgggtganattnaaggggcanngttntnt

SEQ ID NO: 134398 - DNA, 419 bp, Arabidopsis thaliana columbia
  unsure (1)..(419): unsure at all n locations
tggcggattgatacgatacaaaaaacaaaaaagcttcggtngggagaaattgacgaagaagaaggcgactatgatttccttcttccgcctaagcagatgattagnccggaccaaaacggtgtaaagaaggtgattgagtacaaattcaacgaagaggacaaaaaggtcaaaatcacnaccacgacccgtgttcagaagcgagctctcaccaaacaagccgtggagcgacggagctggaataagttcggagacgcagctcatgaagaatccagtagttacctcacaatgcggttcaacagaggntatcatccttggnaacgaattnagagcncctggggtagcaaccgngggaacangtcgnccccanggttccgggngaaatccgtttccananncctttttcaagggcncacttttta

SEQ ID NO: 134399 - DNA, 442 bp, Arabidopsis thaliana columbia
  unsure (1)..(442): unsure at all n locations
gaaaagacaagattcgcgagttcttcgttctgcctttttttttttttttgtgtgttcgagagatgtctgcctttgaagacgattccttcgtcatactcaacgatgatgcgtctgagtctgttccagtctcaggctcttttgacgccactgattctttctcagctttcgacggctcacnccaagtcgaggactccgtcgacccacgcgtccgggacaagcgttttagtggatctgtcaagttaccacatatcccccgtcttaaaatgaagatctgcatgctcggagatgnccagcatgttgaagaggctgagaagatgggggntggaaaacatgggatgttgnagccnctaaaaaagcttttccaaggnccaagaaancccgtccaanaaagctttgnaaaaaaantnccangggttttnttgggcccccngagnctngtnat

SEQ ID NO: 134400 - DNA, 479 bp, Arabidopsis thaliana columbia
  unsure (1)..(479): unsure at all n locations
atggacctggcctgnactnccagggcancccacanagnctgtgacttaacacgggacangtctgggggcattcgtatttcatagtcagaggtgaaattcttggatttatgaaagacgaacaacngcgaaaacatttgccaaggatgttttcattaatcaagaacgaaagtngggggctcgaagacgatcagataccgtcctaggtctcaaccataaacgatnccgaccagggatcagcggatgttgcttataggactccgctggcaccttatgagaaatcaaagtttttggggttccgggggggagtatgggcgcaaaggctgaaactttaaaagggaatttgancgggaagggcgggccggctctaagaaggatcccaagcctttacgtaacgccgtgcaatgcgaacggcatagncccttccaanagtggtcancnaaaattcaattcaccgggccggncgttttanaacgncntta

SEQ ID NO: 134401 - DNA, 400 bp, Arabidopsis thaliana columbia
  unsure (1)..(400): unsure at all n locations
ggttgaggttgaagacaagaacgttctgcagattagcggagagaggagcaaggagaacgaagagaagaacgataagtggcaccgtgtggagagagctagtgggaagtttatgagaaggtttaggttatcggagaatgcaaagatggaagaagtgaaggcaacaatggagaatggtgtgcttacggttgtggttccgaaagcgcctgagaagaagcctcaagtcaagtccatcgatatctccggggctaattgaatatnaagatgnagattanatatttggtgtntcaaantaaaaagccttgtgttgccttaaatttggtgtttttttcnnnggctttgcttgtcgnnantgaantttgttggctttttccnaaatgatcaaantgnattgtaatnatcc

SEQ ID NO: 134402 - DNA, 475 bp, Arabidopsis thaliana columbia
  unsure (1)..(475): unsure at all n locations
gaagaagtctaagaagtgaagaggatatatagtgtgaagctatatcgatcatcagttcacggattagacttcttcttcggtacagctgcagttggagcaggtgtagcagcaggtgctggagcagctacaggcgcaacatctccaccgggacccttagctaaacgctcctctctcctagcatgcttcctttctcggctagccttgttcttcgccctcttagcctcaaactgatcagacagagtcttctccctagccttctcagccttttgacttgtgggtactctccatcaagacacgctttgttctttgaacacattancccttaacacgcatgtacatgtcatgggaaatgtggcttggcnaaccttccttcggcncccnggaattccttcaanannnngcctaagaaaacgggatccaangganccactttntaaangcgnnnggggggccntaaaggggtcnaaggtttngg

SEQ ID NO: 134403 - DNA, 489 bp, Arabidopsis thaliana columbia
  unsure (1)..(489): unsure at all n locations
gatcttgagcgtgattttggcgaaagaagagatggcagaagacgtagacttagaagcaatagcaaatatgacagatgggtactcagggagtgacttaaagaatctttgcgtgaccgcggcacatcttcctatccgagagattcttgaaaaagaaaagaaggagagaagtgtggctcaagccgaaaaccgagcaatgccacagctatatagcagtacagacgttagacccttgaacatgaatgatttcaaaaccgcacatgatcaggtatgtgcgagtgtggcgtctgattcatcgaacatgaatgagctccagcaatggnacgagctctatggagaaggaggctcgaggaagaagacatcactgagttccttcatgtaagngaaaacagagaggttgtgtttgtagttatananaananatatnntnntaacccccccaaattnatgtgncnggnnttngnggaanggcagccccctgatgcaaaagtt

SEQ ID NO: 134404 - DNA, 489 bp, Arabidopsis thaliana columbia
  unsure (1)..(489): unsure at all n locations
atgaatgctccataaaccctactcttcttcttttacctccagcttcgattataccattccttgtttgtgaaggcattttagttggtaaggatgataacnggatacagcacgccaagtgacatgttctaatgagctctcgggcattcaagtcatcatcatatagagctgcagcaggacagactcaacattatcttgctcgaagttcattgcctgtcgtaaagaactcgtggggatcaccaccttcacctttcaatgagcttccgagagtgtcaagaggtgtgcctctgtcatatctctcagcctcgtcttctctgcttctgaatggagacaaaggtagtctatctgggacataactgngtanctgtccgcagaaaaaccctttgacnccacgagngnaaaagtganctccagttccgtttccccntggccagaaccaannggggngananttggttccgctnccnagcncgntgaatggggttngnacgt

SEQ ID NO: 134405 - DNA, 509 bp, Arabidopsis thaliana columbia
  unsure (1)..(509): unsure at all n locations
ctttactcactctctctctctctctaaaaacagagctcaacaataatgatccactaaaaaagattctcttttctcttcttctccggtgatttacttacttaacaatcatggcgtcgtcggagagattagcaagcgttgatccttagtcattccgtcaaaacttcaacatcgattcgtggctacnctctgattccttctcacacgacagtattatacncgctaaagctcttcacagatccatctccacntccaccgaatcatcncctctttcnccttcatctttcttcgactcttcaaccggcggcggcgatttttcnccncctcaaacnctctncaacggtctctttcgggtcagattcagaaatccccggcggtagtgntcttnggctcgggaaacgaaacgngggcctggtgttccggggggaaanaacgnaaggcggtccgggttcaaaagaaactcaancaggtttaanggggcgggnaattcggaatggnaaaagntncgggtt

SEQ ID NO: 134406 - DNA, 566 bp, Arabidopsis thaliana columbia
  unsure (1)..(566): unsure at all n locations
caatcaataagcgaccatgttggtgtaccaagatcttctcaccggtgatgagcttctgtctgactctttcccttacaaggagattgagaatggaatcctctgggaagtagaaggaaagtgggttactgtgggagctgtagatgttaacattggtgccaatccatctgctgaagaaggtggtgaggatgaaggtgttaatgactctgctcaaaaggttgttgacattgtcgacccacgcgtccgggaagagaatagaaaaccttgtaaatnggaaaggcaaaaaagaatcccagagagatcagccatgacctgcatcccgtaaaagttcccctagacaaaaggtcnnncaaaagcccctttgggtcnccaaaagggntaccttaagtgaagnaaaccggttggacctcggccaatgggntaccccaaacgccttttctttnggcccttccaaaatcctttacatccctttgggggggaaaaanccccctgnatttnccttgnnccgcaatttttntaattnccacggttccttccgaanaatgaattntngnanccgggttatatna

SEQ ID NO: 134407 - DNA, 554 bp, Arabidopsis thaliana columbia
  unsure (1)..(554): unsure at all n locations
aagaatagtttgatcatcttgtgagaaaaataatggctgcttcagtgatgctatcttcggtgacattgaaaccagctggtttcacggtggagaagacggcggctagaggattaccgtcgctcacaagagctcgtccctccttcaaaattgtcgccagtgggtcaagaagatcaagaccgacaagcccttcggaattaacggcagcatggacttgagggacggcgtcgacccacgcgtccgcttcatcaaatctcacaaatcttcaacacttaattcacaaatctcaaagcttcggataccaaatgggtccgtancaagcaaaccgcaaggnaatcccancggggggnaaagccccaaggggaacaactcggcaacaaaggggggggngggnaatcagtccgggnggccgggggngtttaaaaaccgcacagtttccggcctggaantgttgccctaagggaatctggnggtttttngaaggcnngggctnttgtcggaagttccgtccagggtttggtncgngaatcncncgggtttnaaaantttggttcnaa

SEQ ID NO: 134408 - DNA, 501 bp, Arabidopsis thaliana columbia
  unsure (1)..(501): unsure at all n locations
ctctcagatcaaacaactcatcatcatcatcatccttaacgtctgaccctaacaccgtcgacccacgcgtccggaaacctgacggttacgatgatatccctaaggagatcccagacaccgactcaaagaagcctgaggactgggatgatgaagaagatggtgagtggactgccccaacaatccccaaccctgagtacatgggtgaatggaagcctaagcaaatcaagaaccccaactacaagggcaagtgggaggctccattgattgacaaccctgacttcaaggatgacccagagtctacgtcttccccaagctgaatatgttggnctcgaattgtgggaagtggaattcagggtcnttgttcgncaaatcttgatnttgggtggccccancnttgncaaaagttgggagatnnanattnggggnaactcnggggttcggggaaaaagctttttntnggggtgnnaaaaaaattttggggggntctttgngggcccccgg

SEQ ID NO: 134409 - DNA, 607 bp, Arabidopsis thaliana columbia
  unsure (1)..(607): unsure at all n locations
agcttccttcacaatctcaaaagccatttttcaaatttcaagctcagagagagagagatgtgtccttctggtagaatcgcgattccgataaccaccaccgcgaatccaaatttccgaccagctttcgaaatcatcgacacagatcacgacggtaaaatcagcagcgacgatctccgtgcattctacgccggaatcccttccggtgaaaacaacgacgagacgatgatcggaacgatgatatcagtagcggacgcganacaaagacggattcgttgagttcgatgaattcgagaaagttctagaaacgacgccgttttctagatctggtaacggaggagacaatggattgatgaaagatgtgtttaaggtgatggntaaagacggagatgggagactgagttacggagatctgaagagttatatggnttccgctgggttagctgtaaccggcgatgaaatcaatctatgattcggttanccggtggtgatttaaacgacggggttcgntcgacggctgcttaaacctttgggggttnaaaaagccggtttttttnaccgcatttcaccttatttgtccnagtttgttgttgtcaaaggattggccctc

SEQ ID NO: 134410 - DNA, 599 bp, Arabidopsis thaliana columbia
  unsure (1)..(599): unsure at all n locations
ggcttccttatcgacgataactcaaccatctttagtccacattcccggtgaatcagtcctccatcacgtaccaagcacgtgctctttcccatggaagccaactatcaacacgaagcggattatctgttcgccggctaggaactccagcgaagtatcggcggaggcagaaaccgaagtggnatctagcaccgccgttgatgaagcaccgaaagagtctccatctttaatatccgctctcaacgtcgaacgcgcgctacgtggccttccaattacagatgttgatcattatggacggcttgggattttcagaaattgttcttatgatcaggttacaattggttacaaagaaagagttaaagagttgaagggacaaggnctagatgaaggacaactcaagaccaagatggatcttatcaaaggggcatatacgatattggcgncccacggggccgnattttgctaaccggncgggccggcatcaaagggcttccccggggcaatctccggntccggttttccggttgggaagcncccttganggccaatggntagggagcagcncaatttaancggcagggtgaactgtttggaggttaacc

SEQ ID NO: 134411 - DNA, 635 bp, Arabidopsis thaliana columbia
  unsure (1)..(635): unsure at all n locations
aaacaaaatggcttcgatgggtggattacacggtgcatctccggcggttcttgaaggaagcttaaagatcaatggctccagccgtctgaatggctctggaagagtggcggtggctcaaaggtctagacttgtcgtcagagctcagcagagtgaggagacttctcgccggtccgtgattgggcttgttgctgctggtttagctggtggctcgtttgttcaggctgtcctcgccgatgctatttcgatcaaagttggccctcctccagctccttccggtggccttcctgggacagataactcagaccaagcaagagactttgcattggcattgaaagacaggttttacttaacagccatttgccancaacagaagctgcaantaagagccaaagaatcctgcaaagggtatccatnaatggtgaagccattgatccgacagggaaagcttngccatatggtcnaaaacgtcttcggtccaaggnttttaanctccgtaatgncctnaancaacatttccccaaacccaagggtnnaaangnccccaagggttcnccncaagcttttgaanaccgaaaantggtttcgggaaaaaaaacctcnggnggnaanattcngaaaaccccctttaaaaattc

SEQ ID NO: 134412 - DNA, 467 bp, Arabidopsis thaliana columbia
  unsure (1)..(467): unsure at all n locations
gaagacggtctcttagtgaaactcatcttctcgtagtatcgaattgagagaagagaaagagtgagtttaagctcgtccttaccgaacctagcacgcggattgggtttagagagaggccagaggtaaagagagtggagtcttcggaagccaccaagcgccaacacaacagatctgagctggttctgcccgcagccgatgttagtccagtgacgagtacagatcagctcccaaagccgctcgtcttgtgccgctttgtgccagatcttgctcacgcaagatgacattagctaaggtctttgcggtcgacccaacgcggtccgggntcccggtggttgtttaattttaagtnaaaggggtggggganaatttgaaaaaaagcttttnccccttaagntttttggnttttccaaaatncctttnggttttccccaaaattgnaantngggannaagggaatttccnggggt

SEQ ID NO: 134413 - DNA, 573 bp, Arabidopsis thaliana columbia
  unsure (1)..(573): unsure at all n locations
gtgtaaagttgataaagacattacataaaaataaataaaaatcgaaaaagctattcgaaattatggaacctttaatgaaacgtccaattattgatcatcttcgtgaacaagaacggaaacttcttcgccgcttggccaccgtgatagccgtcgtggtggatgacgccatcgtttggttgtaaacagaggagaagaaccgctcgatctcatctttgttgacgatgatctcatacttggacaatgacgtcataagctttctcttgcaagatctgatgccgagagacgacggtgtggaaaggtggaccggggttctgcggtggaagaagaantggtggctgtnggtggggaagnatccttgtgggccggaanaagttgggattggtgcaacccgccggccggcatcaaccnctgttggnggttggcccggatntttaatggcctggtgggaaattcaanatngggcaaaattttgnattaaaccaaatccatcctcccttggtaaaaaaanttnaaaggaaangnccttaaaattgttttttggttgggggttanccgaccctgggcncccnccct

SEQ ID NO: 134414 - DNA, 550 bp, Arabidopsis thaliana columbia
  unsure (1)..(550): unsure at all n locations
agaacgttgaatttgatgctttgcgcattgtctacaacaagttccattcagttgtcgcatttctgccaactgtgtccactgttttgtcgcctganantattgagaaggagtctgaaattggaggaaaacttggcgagcttgactcatatgagattgaaggtggggaaacaaagggagaaatattgcagaatctggccgagttccaattctcttgtgtgatgttcaatgcggttctggagaatgcatgtagtgagatgggagcaagaatgtctgccatggacagctcaagcagaaacgcaggagaaatgctcgaccgtctcancctcacatacaacaggactcgtcaagcttctattacaacagagcttattgagattaccctggagcttctgctcttgaagctgctaaataaagcccatccgtgtnagtcccctttccttcgctttgnaattaccccaccttgaagngaaaangngtaaaattactgacagttccttgcngntcctgtggccaccatggtgcacgtttanaaaaccgatccccgggtngc

SEQ ID NO: 134415 - DNA, 502 bp, Arabidopsis thaliana columbia
  unsure (1)..(502): unsure at all n locations
cattcttttccttgtgattcattattttgcctagttttacttttcaaatagacttctaacaaaagttatgactgaaaaccaattatatagctttataaccatgaagagttcattgtctaaatgcaaacagtcttctcctttgtctttccctttgtttggtctgatcaacttcttcctcatcggttttttcagatggggttcttttgctcagttattttcctcaaggtccgggctccttggttcaacaccagcaatggggtttccgagaagaaggagcaaagaancttgnaggtnccaaactccgtncaaacccggaggaataaccgggaaggtggatgnaggangggccttgcncaaaaaaaaaatggtaaggggatgggtnatgaaaaagcttanggggtttnccccgggcccaagaaaacgggggggcttccaaaaacagnncangtnccaagggggggttccnaaccggtcnaaagnaaaaagnccaanctttagggng

SEQ ID NO: 134416 - DNA, 546 bp, Arabidopsis thaliana columbia
  unsure (1)..(546): unsure at all n locations
gggagggaggagagtgtagcagatcggcgaaaatgacaaccagattcaagaagaacaggaagaagagaggtcacgtcagcgccggacatggacgtatcggtaagcaccgtaagcatcccggaggtcgtggtaacgctggaggtatgcatcaccacaggatcctcttcgacaagtaccatccaggttacttcggtaaagttggtatgaggtatttccacaagctgaggaacaagttcttctgcccaatcgttaacctcgacaagctttggtcactcgtccctgaagttgtgaaggcgaaatcaaccaaggacaatgttccgttgatcgatgtgactcaacatggtttcttcaaggttttgggtaaaggtcatttgcctgagaacaagccgttcgttgtgaangcgacnttaatttcgaagactgctgagaagaagattaagggagctggtggtcctgttgtgcttactgnttaagttaggngaattatttnctaacccggttttgaaccccatgnggttacaccttgtgccttgatttgaancaatc

SEQ ID NO: 134417 - DNA, 637 bp, Arabidopsis thaliana columbia
  unsure (1)..(637): unsure at all n locations
ggccgggtcgtgcctccggcgctgttactttgaagaaattagagtgctcaaagcaagcctacgctctggatacattagcatgggataacatcataggatttcgatcctattgtgttggccttcgggatcggagtaatgattaacagggacagtcgggggcattcgtatttcatagtcagaggtgaaattcttggatttatgaaagacgaacaactgcgaaacatttgccaaggatgttttcattaatcaagaacgaaagttgggggctcgaagacgatcagataccgtcctagtctcaaccataaacgatgccgaccagggatcagcggatgttgcttataggactccgctggcaccttatgagaaatcaaagtttttggggtccggggggagtatgggcccnangctgaaaacttaaangaattgaccggaagggcggccntccaagaggntncaaaccttacgtaccccgtcattggnnnggccatagcnctccaaangtggccccnaaattcaattnccnggcggcggtttaaacgnnttacctnggnancctggggttnccaactaangccttgagaaacccctttgaactgncaaatnaaagccnccggtgcctccaaagtgcctnatggat

SEQ ID NO: 134418 - DNA, 578 bp, Arabidopsis thaliana columbia
  unsure (1)..(578): unsure at all n locations
gaagaagtctaatccgtgaactgatgatcgatatagcttcacactatatatcctcttcacttcttagacttcttcttcggtacagctgcagttggagcaggtgtagcagcaggtgctggagcagctacaggcgcaacatctccaccgggacccttagctaaacgctcctctctcctagcatgcttcctttctcggctagccttgttcttcggcctcttagcctcaaactgatcagacagagtcttctcctaagccttctcaagcctttgaacttgtggntaatctccatcaagaaaacggntggtccttgaanacattaacccttaaaaggatggaacatggcaanggaaaagngnctgcaaaccttcctccggccccccnggnaattctttaaaaagnnggcttaagaaaaacggatcccaaagggatccaanttttagaangggaangggcggcntanaagggttcaaaggtttaggnacgggggaatnggagggaaaaggcccttcanaaagggggncccaaaatcaaattcncggggggggggtttnaaagggggnaatggggaaaaccngggg

SEQ ID NO: 134419 - DNA, 567 bp, Arabidopsis thaliana columbia
  unsure (1)..(567): unsure at all n locations
aaggtttcatatcagacaagtttacnactggcaatactaatgaagagaaacagacatcaatcttaaagccttcccccggtgatgttgatgctgcaaaagttgctgctatgcaggctgctgaattagtgaataaaaaccttgttggaacgggttacctgacaacagatcaaaagaagaagttattgtggggaaaaaagaaaagcacggcttcagaagagtctgctcatcgttgggataatgcgagtgcgctaattggtgaccctgaacggcaagaaaagttcaacaaacttatgggtgtgaaagcgaaggtangttaaacccaagagcaanacccngggcgaagtcggagggctgagaagcagnaangagnttgcagatgggatctngagaagccagtnccncagncaaggggttaatggagggtgagatgggccgaccagtaagggttagggcctttgnaaccccctttgggaaatttgttccncanactcctttgccncccttctaaagcaaacctttttagcaatcctnccttttggaccccnnctanccttnngnaatcccctt

SEQ ID NO: 134420 - DNA, 543 bp, Arabidopsis thaliana columbia
  unsure (1)..(543): unsure at all n locations
aaggtttcatatcagacaagtttactactggcaatactaatgaagagaaacagacatcaatcttaaagccttcccccggtgatgttgatgctgcaaaagttgctgctatgcaggctgctgaattagtgaataaaaaccttgttggaacgggttacctgacaacagatcaaaagaagaagttattgtggggaaaaaagaaaagcacggcttcagaagagtctgctcatcgttgggataatgcgagtgcgctaattggtgaccctgaacggcaagaaaagttcaacaaacttatgggtgtgaaagcgaaggtagtaaaccaagagcaaaacctgggcgaagtcgaggctgagaagcagaaagagttgcagatggatctaggagaagcagtacacagccaggggttaaggaggagagatggncgaccagtagggttagggcctttgaaccnctttnggnaattgtcccatcncctggccccctccaagcaancttttacacctcctttttgaccccacaacccttgcnaaaccccttattccagtt

SEQ ID NO: 134421 - DNA, 556 bp, Arabidopsis thaliana columbia
  unsure (1)..(556): unsure at all n locations
agaagtcatgactcagaacgatacagtgaagctgataggttcttggtctagcccttattcccttagggcacgtgtggctctacacttgaaatctgtcaagtacgagtacttagacgaacctgatgttcttaaagaaaagagtgaactccttctcaaatctaaccccatccacaagaaagtccctgtcctcctccatggtgacctctccatctctgagtccctcaacgttgttcaatacgtcgacccacgcgtccggaagaagtctaagaagtgaagaggatatatagtgtgaagctatatcgatcatcagttcacggattagacttcttcttcttcggtacagctgcagttggagcaggtgtagcagcaggtgctggagcagctacaggngaacatctccaacggggaccttagctaaaagggtcctctctcctagcatgcttcctttctcnggnnagccttggtcntnggcctcttagcctcaaactgntnagncagagnttctcccaacctttnagctttgnttgngnanncncatnagaagntgtttgaangc

SEQ ID NO: 134422 - DNA, 503 bp, Arabidopsis thaliana columbia
  unsure (1)..(503): unsure at all n locations
tgttgaaggagagtgggtgagaagagctttgactactttgattcgaccttcttcgcatcatctgaaaagacgagctgcttatcagccacgtcctagtcgacccacgcgtccggctagcaacgcttgcgccggatcaatgatcgtcgaagctttcgccggaaaagacacgatcaaggtcccgtatgaatcgaaagggaaaggaggattcaagcgatcgtcattgagattcgtcgctgtctcgagtcggactagagttatgttctacagtacgttttacgcgatgagaaacgacgatttctcgagcttatgtggaccggtgatcgacgacgttaagcttctcagtgctccgaaggccgtgagcttncggcgacgagttgattcacnggncaatgaatgatgncagnactgtggggttcccncgcnaatgngaaattggnnttaggccatggccacggttttgtgtggttaaactaatgtttgcaanaaanattcccgcacccngt

SEQ ID NO: 134423 - DNA, 480 bp, Arabidopsis thaliana columbia
  unsure (1)..(480): unsure at all n locations
aacaaaccaaaacaccatggagcttaaaaatacaatctttctagtcatacttctatcaataaccattctccaatcttcatctgcaaccccaaaccggtcggaatcagaccagtttattgtgtcttcatgccaaaccacccaatatccatcactatgcgtgcacacactctctgcttacgccaccaagatccgccacaacaatgaccaagatctcgcccagacngctctcatcatcagcttggctcgagccaaatccgttacnatcttcgtcgccaaacnaaccaaagagacaccaaaatttaaacgtagggnatatctagcaatcaaagattgcatcgaagtgntaggnaatagcgtggnccgggtagctcaatcgggtaaggacttgntcgagctggcatgctgngggnagtgnggcntcntgtgggaatgggtnnggtcaaaatgggnagtgccggtttnggngggaaggctatggtt

SEQ ID NO: 134424 - DNA, 568 bp, Arabidopsis thaliana columbia
  unsure (1)..(568): unsure at all n locations
ctaactctttccttattcttgtaccatcctaaatcagtaagtccttaacgtacgcaccatgtgtacgttagagaagcgcggcgatctctttctcctaaccctaaccggcgaagacgagcacagattccaccccgacacgatcgcctctgttctctcgcttcttgaacaagcaaagtctcaatccacaaaaggatccgtcctcatcactaccggtcacggaaagttcttctccaatggctttgacctcgcgtgggctcaatccgctggacacggtgctataaaacggatgcaccaaatggtcaaatcctttaaaccggtgttagccgccctcctcgatcttccaatgccgacgatcgccgccttgaacggccacgcggcancctcgggggtgatgtttgcgctgagccacgactacgttttcatgaggaaagaccgtgggggtctatatatgagcgaggtgnacatcggggnacggtgccggananttttcggnggtngngtggcaaaggttggnaggatccaaaaggngntgtnctancggganaantaaagnaaaacgnggctggtt

SEQ ID NO: 134425 - DNA, 497 bp, Arabidopsis thaliana columbia
  unsure (1)..(497): unsure at all n locations
ggncgnntnatggaccnggnctggactncctgggntacccactgcagtcctgaatttcncnttanttcattccnttgtcttcatgcttcatntcatccatttccaggtgctcagctaaccccaactttctatgacaatacatgtccaagcgtctttaccatcgtacgggataccatagtaaacgagctaagatcggatcctcgtatcgctgcaagcatccttcgtcttcacttccacgactgtttcgtcaatggctgtgatgcatcgatcctgttagacaacacaacatcctttcgaacagagaaagatgcggctccaaacgcaaactcggctcgaggatttccagtgatcgatagaatgaaagcagcagtagagacagcatgtccaaggactgtttcatgcgcagatatactancatcgnagctcaacaagctgtaaatttgnaggaggccttcttggaggggtccttnggganaganaagcttaaagatcttgcc

SEQ ID NO: 134426 - DNA, 292 bp, Arabidopsis thaliana columbia
  unsure (1)..(292): unsure at all n locations
gaagaagtctaatccgtgaactgangatcgatatagcttcacactatatatcttctttagtctnaatgcaggtgctganctgtttnccgtntgcaaattgttcatgccggcgcacaatgtgctggagcagctacaggcgcaacatctccaccgggacccttagctaaacgctcctctctcctagcatgcttcctttctcggctagccttgttcttcgccctcntagnntcaaactgattagacagagtcttcctcnctaagnctttntcagccttttgactttgggggatac

SEQ ID NO: 134427 - DNA, 573 bp, Arabidopsis thaliana columbia
  unsure (1)..(573): unsure at all n locations
taatcaaccaaagtcgaaaaacagagttattttgtcggatcaaaatggtgaagattgagataggaagtgtgggtgactcctttagtgtagcatctcttaaggcttacttgtctgaatttatcgcaactcttctctttgtgtttgctggcgttggctctgctcttgcttttgccaagctcacatccgatgcagccttggaccccgctggtcttgtcgctgtcgctgtggctcacgcctttgcccttttcgttggtgtttccatagccgccaacatctccggcggacaccttaaccccgccgtgacactcggtctcgccgtcggtggcaacatcacagtaataaccggtttcttttaactggattgctcaatgccttggcccatcgtcgcgtgtctcctcctcggcttcgtaacaatgggagacgtaacgaccaatggagaaacggcgggttaggagcaattaaggagaagttntgnaattgtgggacctttnnctggnaaaaagnaagcaaaangggtgtcnaaaaaaggnacncgggcaatgccaatnaaanggtaacgtggnaaaccccagc

SEQ ID NO: 134428 - DNA, 453 bp, Arabidopsis thaliana columbia
  unsure (1)..(453): unsure at all n locations
aattnncccccggggnccccctcaaaatggtcccnnggggatcccggtacgggggccnatnctaatnaccccngggntttttnggaaatgggtttangccngaaaaccgattccggccccnacgancggttggttccactgcgagaagaccccgctnggtgtacggccggtccggtaggtttcatgatcagctcaacaagaatttcattgctttctgaagagaagtgtaggnatgtctcagcgtttgtgcatatgtacttgtatatatagctatcaatctggggaaagctagggctcttttatatgttgtgattgcttgcctgaaaagtcatcaaaaagggttcgcttcactcgtatacttatttgtatgtagcttttttttcttgtngatcacgatttgtctttcaatttaattgtatttataattgatatatatatatactcttcatcttt

SEQ ID NO: 134429 - DNA, 502 bp, Arabidopsis thaliana columbia
  unsure (1)..(502): unsure at all n locations
ccaaaggnccccncccctttgggggttccanccccccaggtnttaacttttgtnggaaatggccggcccaaaatgggnagcccttaccgtnaacccaganatttcttnggancggaaaccattggnttgnatnngcgggaacnccccgnntttaaatggtcccntttggaccggnccgccgatntttccccgggtacgcgctttcggtgcttcacctggaatattatgtgcccaattgggtttggaaattcgagtggaaatgtgtggaaggtgaagaagttgatctatccgagaagcaacagttcatcacaatggtcatgaaaacccctttcaaagcaaatatttatccaaggagaaagtgatatttgcttttgtcatattatcaaaaaggcccattgggcttatttgtcgtatgtatattaaaaactttgtctcatatgtattaaaacaatttgggcctttaatgggtttcaatataaagatgtcaacacttttagttttc

SEQ ID NO: 134430 - DNA, 506 bp, Arabidopsis thaliana columbia
  unsure (1)..(506): unsure at all n locations
cacaacgcggaaacgttcagccntctagggnnacnncccnttcnaaagcaaaaagggccctggtgcanaagaanccncanncagctaatntggcaaccccnngggcaggnactacggattaacggcgatgaccanatcgggaggcncgaaacggagccatgtgccccttcttaaactaaagggtaaactgtttattncggttgcnccttgttcagagattcaaacttttgttttcactggcttctcttcttttcaagttttggctgatgaaacgtaactatgcaagactatgtagaatactctgtttttattctcttcggtttggggtttgtgttcagtttaaagcttgttagtagtatacttagaatcttctggtgcttgcttgctttcccttcttcttcccttggtgtgtttctattgatttctggtttataaagtattttttctatctccggtttagtccggttcgtcttggctttgtttaatcaaatcattgattcctctct

SEQ ID NO: 134431 - DNA, 557 bp, Arabidopsis thaliana columbia
  unsure (1)..(557): unsure at all n locations
aagtnatggtcggggcccnnccctatnacaaaccacaggccgggtacccgccaanaggatacccgncnnaacccgttagggcttggcaaggggttgggggcctaagtcnaanccagccccagctggctactcttcttcctcggngcaaattactggattcggggcntggaaccaaccaagcttatttaccatcgcagcacccattttcacttacgttaggcctcttagcatcccatttttgcccattgttctcgctatcagagaatacatatggaccatacgcagcactcgagtttgcgcttgtgggcatgttggttcatatattctatgctacagttagactatcggcgacctattctatactctttgcagggattcttggttttgggatagccgtgtgcctaaactcgttgtaccttcattatttcgcttggcgtgtacgcgttgcacaaaattcaagtcctgtatgaaatctgttttcctttgtttctcgttcttcctttgtgtatgtattatgaaagaagaagttgttagtgaagagattcatcagnttcagc

SEQ ID NO: 134432 - DNA, 537 bp, Arabidopsis thaliana columbia
  unsure (1)..(537): unsure at all n locations
ctggtggcatcccnnnttgggnagnaaacnttccccaaccnagggtttnnaaaatgggnaccctttggcggtttnncccnanaaaaccgggnaaattcccccctaatttgatttggncaaggccccnaatgnggggntcccatagatccgggnggaggctgtgattccattttgngggatgaccgtggaggaactaccaacaatggggatcaacagatatccgggattatgccaagctctcaatgacattctggatgggatggccaagaaaggcatgtctgttcctgtctgattgactcccaagccgtgagatcgcctcatgatgattaatttgtattagccgagcaacggatcgagtctcatgccaaagtttttgccaaattgctgtgttttggggacagtcattttcaccttatttactttcttgcaaattcatgtctatgtctttaggttaattgattcagagaggaaaagattaggcattgaatgaggatttttaagaaagttgaaaagaggttcagggtacatttttacctc

SEQ ID NO: 134433 - DNA, 512 bp, Arabidopsis thaliana columbia
  unsure (1)..(512): unsure at all n locations
gtcngagcgccgggccgttcccactgggagcaggattccccgggttnacttgcctgcacgcgnggatccccctgtggcccttctttgctcagntgtcacccctcaggatctctcaccaattcgtncaaaaatagtctgagagttgccaagggaaaacaatatcaaattccattgcatttcctgccatatcttgtgggatttacggatatccttttgatgaagctgctgcgataggtatttcaaccatcaaacaattctctactgactttaaagaggtgcattttgttttgttcgcggacgacatattcagcgtatgggtaaacaaagcaaaggaggtgctacaaaaagcctaaagtccaatcaatggccgaagatacacaaaaatattccccaatccttcgcacaaacaaatcatttgctatttgtgttgcgttatgaatgccttgtgattattcgttacatttagatttggtaataaagaaaattcttgcatctaaaagaaaaggtttatc

SEQ ID NO: 134434 - DNA, 521 bp, Arabidopsis thaliana columbia
  unsure (1)..(521): unsure at all n locations
ccggctagctggatcgatccaggctcttagtaatgccncattggaacccctcgtcttggngggcttcccacttgcccncagatntgtgtggtgatgtgtgcccctgcaggaggaacatggagcaggcaatctcttncctagtaaaatctcctgttactcacctagagatatacgaaggagttgttgggaaaaagagaggagaagttactgaggatgcagcccgatttggtgagcaagtacggtggtttttgatgagaatgctacatctccaacaagtgaaaatatatgggcaaacagaagatacgttaccgctctttacgacattgccactgaacttcggagacttgaaggaaaagcttccccaaatgttcagatatctgtactccaagcttaagcaaaggcgtgtagtagagtaattgtgaccaaagttgaaagtcttttgtgtgcatataatgattcaactttatggctctgaaaatgcatcttgttcttaaggtaatgtaattaaagagatatattac

SEQ ID NO: 134435 - DNA, 508 bp, Arabidopsis thaliana columbia
  unsure (1)..(508): unsure at all n locations
ccacggccggcttttaagggactgtgacntccggcatgctcncaaggaaaggtggccccctcnctttctttcncggncncatggccctgccccnttcatcgccaaggctntanccnctggtgccttcccggtgttcctgacacgtggaacgagctcttctatgcattatttatgaaacaagaagctccttcttcttctaaaagagttgaagaagcgaacagtacaggaaatgttacaatgtcgtgatgcctggacaggacaaggaaaccacaacaagctcttgtttcttaaagctgttggcgtttttcttaagatgccaagcttaaagatcaaaaagggttctggattttttgattgggtgattagataattgggtgggggaatatatgtaattaggttggtaatcttaatctctggttgtaaagataaaaaaaaatcttaaaattatttttcgatgattcaaagatatacagttttgggcctagcccnataaaagtaaatttccggg

SEQ ID NO: 134436 - DNA, 530 bp, Arabidopsis thaliana columbia
  unsure (1)..(530): unsure at all n locations
aacattcctcgaggcagtggattntnttaggngtnttgaggtctgagaggccggattggaaccaagtctttactggaaatcatttnccggttggaatttccnattggattttgatgctccaaactctataagccttcatgaccctagagttaacccagaaacanccattttgagtcaccgcaccttgtaagcctttgtgaaccaagagttaacccagaaacgagcagctggagccgccacaccctgtaagcctttgtgaccatgagttaacccgaaacgagcagctggagccgccacaccctgtaagcctttgtgaccatgagttaacccaaaacgagcagctggagccaccnancacgtacggcgcgcttgtaaaacaagtcgtagttagagattatgcttctacattgacatcttgatggtgtgtaaccagtttcacctttcatttgcatctggatatttgtattgctaatttaacattttgttagacgttttgttttgtatcattagtttcgctgggtctttggatt

SEQ ID NO: 134437 - DNA, 416 bp, Arabidopsis thaliana columbia
  unsure (1)..(416): unsure at all n locations
actgtgnttgtaagtcatttcccggcgccagatggaatcccagatgatatgaacccgtcctgncgtcacaaactcggtttgaaagaacttccacatggaaaagagctcaagagaattgtgcccaccagagataactgcttgtctgaagatagcataatcgtctccgataatggcaagatcgttcaggacatgattcttctgttgaagaatgtcgaatgcggcaaggtcgagatccagcttgaatggcttaaaaatccaggtggtagtggactctgaaaaaacagagatgaagtagctttatgattttctgtgtgtaataaaaaaaatctcagttaataaaatagaacagagtactactactctgttttgtaatggaaatatatttggttttagatctaaccgaaaccgttttggtt

SEQ ID NO: 134438 - DNA, 519 bp, Arabidopsis thaliana columbia
  unsure (1)..(519): unsure at all n locations
accaccgggtccaggagggtctccaggctgancctgtgtggganctcttctcttaaatgtgngccctggtcttccggcagctgaagngcaggtctatatggccaaggaagtttggctttacaaagatgtctgacccagcaattgcaggagtnccaaaaggaagtgcagcttacaatattcaaaggaccctcaatgctggagaagaaagtacctaaggcgacaacgggtttatcagaatctacaactctcatctgatctgtttcgttaaaagattcgtcaagattttggtgttcggatctttcctcttctttgtttttgttttctggaagatggaaccgttttttggtaattttttgtaatatttttgaatatagatagtaggttttacaaagaagtcccagaacagttccatgttttgtatagagaccaaagagaataaatagaaaacagatagctataaacatgttcttgggactaagttttttattaaccagaaaataaatcattttcagaagtatt

SEQ ID NO: 134439 - DNA, 266 bp, Arabidopsis thaliana columbia
  unsure (1)..(266): unsure at all n locations
anggnaacggntctggantaaaaacaccgttcnccgtncgtncccatttntncttatagcatctcctcggggcatgcccgttgtttttatcatcagangctctctgcccgttactaccaattttttggacgcagaagaatgaaagaggatgattgatcgatccaagttggtttgattgtaccatttacatagaatgcctttgtaatgtttaactcttcatatacataaatggttttatactctctcaatcacagctaatttgagct

SEQ ID NO: 134440 - DNA, 303 bp, Arabidopsis thaliana columbia
  unsure (1)..(303): unsure at all n locations
ggttccccccgtttccaaaaaaaattcccaggctcccaaattcctaantcctgtaaaccntggggaaaaaaaaaagaaagcgttgaatatgtaaatgatgtgatttttgggttcgttgttatttgcntgttctatttgtaatttttttattanccnnnanatatatatatatacgtngattttgattaagtttgttatttgggggtgngtaaaaaagttctaggcgtttagngaaatcnaatatgtaatacaagttatacaatctgtatggaaataataaaggaaggatccatttgtgtgcct

SEQ ID NO: 134441 - DNA, 403 bp, Arabidopsis thaliana columbia
  unsure (1)..(403): unsure at all n locations
anntcttnattcatgcatcnctgcatcagnccctttcgatgcggatcagggagccaattntcgtctctgncncggttnaccggatatattncggagcagggaaaatgccgacgntcagaccgaacaaaacggngattctcagacatattgttgaagcacaatactatagagtggaaagtgttcgagcagagagtgagaaaaacggttaggcaaaccaaacatgtattggttagaccaacgggacgcagcgtttaccgttatccaagatgtaaagaatgtatgtgtaatgaagattgattatttggtttacattgttggttcggttttttaaacggtcttcatattttcatggcatttgtagcggctacacattctagtgagtaccaagcttgagtttggtncc

SEQ ID NO: 134442 - DNA, 411 bp, Arabidopsis thaliana columbia
  unsure (1)..(411): unsure at all n locations
atngggnccctgtttccggggccctgacccctaccnctgggtcccattttaggagcttggctcttatccccnacntaatgggggggtccattttgatgattttaggtaaatttgggatttttaatggtttattatgaaatcttttcaaatcccattttaaagcaagggatttagatttgtctttttttttttaagagattggtatgcaagtttaaacaaaaaaaagctactaaaatccctttagaataattaagaatccaatacttgaagtgttttcaataatagcggattttaaaaaataatatttcaaatgcttgattgaatacacttccgcaagacaacatccccttttagtggttaccttagaccaactccagcagtagtttcttagtagaaactcatacaattaac

SEQ ID NO: 134443 - DNA, 406 bp, Arabidopsis thaliana columbia
  unsure (1)..(406): unsure at all n locations
tttntgnttccaaaanccccggnatttccgngntggtttncccggtttccgacattcgaganangccgggagatgccnaanatggtttccagatgncttgaagtggggancccaaaataccctgcctggtaaactaaaggtatccccaaaaaaccccgggtctgactgactgggattggtgcagtgacattgtttgttgcgtctaacttgtgacctgtgtttgtacaaccattataagagatatcatatatctacttgtgtaaccacatctgtactttcttctccttccttcttttttcatggggatctcaaatgatgatgtcttgcaagaaccttcgtggtgtgtaattgactttgtaagaaccggtaatctcatatccggtttagcttttaaaaatttgtatcc

SEQ ID NO: 134444 - DNA, 393 bp, Arabidopsis thaliana columbia
  unsure (1)..(393): unsure at all n locations
ccntggcccncttattggccantcaggccaggggtcttagcccnccganccggggttnttncccctttggatatntngcagcatntngtataangctgatggagaaggcagatgatcaaagaactctgtatattgtttctctctataacttggagttggagacaaagctgaagaagacagagacattagaccngcaaaaaaagaagaagaaggaagaagataagcctcgatccttgggtgacgagtatctatatgtttatatgtnctatatgttatgttgtacagaagaagtcgtgtccacaaatatcaattnatgtcagatgtctagtaagtgatcatgtgtagcatacaaactggagtaatttaaaaagtgaataaacaaaaataattact

SEQ ID NO: 134445 - DNA, 540 bp, Arabidopsis thaliana columbia
  unsure (1)..(540): unsure at all n locations
cccangtattcccaccgtggcttagncttnccnatgggacncccaatgggngttgattnncattccggatgctgccaantcaanctcgncaactcccatgngnggcttcctaaaattggtgaaggttgggggaanccattgcgttcggccaacccccttgtggtttggttttgtgccggaggatgaagatggagtcccggagcatatgagagaatatagagcagctcttatagaattccaataaaaaattggctttggatccccgagtcgaggtctctcagatttccattggagatggtatcacgctctgtagacgtcttgtttgatcaaaagactacttgaagagtacgtagcagaaccaaagttggagagtttggaataaaagtgttagatggttcaatnaccgcttcgtcttttgtcacaactttgcttgtaatggtgtgtttgattgatgctcactctttatcttctttctatgttgtggtttcgtcgatgttgttctgtctggcaacaaaactattagtacactaaattactttt

SEQ ID NO: 134446 - DNA, 549 bp, Arabidopsis thaliana columbia
  unsure (1)..(549): unsure at all n locations
attccttcagnnngaggttgtatgnccccanctctggncatccccggtggtcaatcatcangnntncccaattntatgcncgnatagtgagnatgggtgatggagaagccacnngatcgtcctcattgcaaaaccnatntcgcngctggggaagagcttncgtatgattatctctttgaggttgatgatctgaagagatcaaagtgccctgcctttgtaaagctccaaactgccgcaaattcatgaactagagctctcttaagtctaaaccattcttgcaaacgttcaaacttgctttctaattgaacagtaatggcggtgggaagctaaccgatttgtttcctcggcggctagcttacgggaaatcccttgacatgatgctggcttctttccgattgattcattaaatgtacattcagctagatacttttccggcgtagcaattttgtaaatgtctagaattcaccgactctaagaaaataacttcacagccaacaacctaaagttccaaaatgttgaagtgttaatatagcttttaacattttccat

SEQ ID NO: 134447 - DNA, 520 bp, Arabidopsis thaliana columbia
  unsure (1)..(520): unsure at all n locations
accccggccaggctntgtnccccnttccccctgctgggnncccnnccgattgatgncacggggtcaatgccggccctttcccccatttgcngnattcncancctgggaattggngatncaatggcatcgatggttgnccccaaatatgggntttgagatggagcaagccgggaaagaaaacggttgaaggaccagcagcgggaataacatcgatgatggcagtgtgctttgttctggncccaatattagcatcaatgggttatatactaagtcaaggatggtggtcgcttctggtggctgtgacagccnccgggatgttggaagcttacncggcgcagttagacaatgcctttatacctcttgtcttctactcactcctctgcttgtaaattagttaagcctagagtcaacattctacgttttttcacttcatgtacataacaaagtatcttactactaaccatacttcctcttgttaattgccgtatctctttaagagacaaatgtgttttttgatctc

SEQ ID NO: 134448 - DNA, 526 bp, Arabidopsis thaliana columbia
  unsure (1)..(526): unsure at all n locations
acactcaaacccgatgctagccgttggngnnatcccatggnnctttgnncnanacggaccncaggtgnccanatcncaggtcaaaccnggacccgttgatctgncccgatgggntgaggttgtgtgaccaagaaggaaggagaatggatngcatagacagagncatagcaggtggggaagagttctcaaagggaatggaggatgcacttgctgttgcaatccaggtgcattctctctgtcaatgaaaggcctaacatcagacaagttcttgatcatcttacttcaatttctgcctgagatttgtttgtttttntancncttctaaatttttctgtaaatctccatggatttcctttcacacatcatcccattttttcttcttcttttctggttttatgtttctctctagtagtttgatcagatgattcagaatgatcctcaggtgttcttacatttattttttgttgattatttttccccttccttgtaaaggtagaagaaaatctaatcccattgattctgacag

SEQ ID NO: 134449 - DNA, 580 bp, Arabidopsis thaliana columbia
  unsure (1)..(580): unsure at all n locations
aanggggtcatcccgggttcctngaangnccggccgggttantcttggggccccgggnnctccnggcggtaattcaccnnacccgntttcccatggtaggggcntacggttcaggccgtntggggcatcaaagtcgggcgngctggcatggttcnggggttnaaaggatcncccttcacccaatctctgnttctcccaatgtaccactggcccggnaccaaaaaggtctcccaatatgggaaatgctccagatgtcgtagggagcccgctgacaaggtcaacccccacaccttgcccctgaactaagcgcaaccacacaacaaggtggttcctgtgaaaaccaatcctaattctccaaagctaagagactacatgtagattaatgtaagttttattgccatcttcataatcaaatcacttgagacttgactcttgagacaatctatatagactactaatataatcaaattatagacttaaggtttcacaaaacaaaaatcatattctactgaatttgttatatagacaaaatcatcttcatcattttcacatcatatggataatgatatttatttaccag

SEQ ID NO: 134450 - DNA, 488 bp, Arabidopsis thaliana columbia
  unsure (1)..(488): unsure at all n locations
aaancctttncccccttntnatnncccnnaaccattnntnttgccccgttccaaaaaacccccgaaatnggtttcctccancnccccancttgatnatttttaagggggaacccnaacccccanaaaagggtaacccccgagttcttgggganaaaagccccccaagagatgataagttatataaccttgggaagctctttggtgcagattttagtaagttagggtttatctttgtcggtctttgtcgtctatggttgtgatgtctgtatggtgcgttccaaaacttagagaaatgtgaaaaagaggagagatcagagagatgatgaagaaaactatgttggcagaatcagttgtatagacttccgtggggtttaagttaactttaggtttgtttattgttatggtctgttgttattttgtggctgatgagaacagatgaacatgaacaacgcttttgacttgggtcatctcaacaaaaattaacatc

SEQ ID NO: 134451 - DNA, 544 bp, Arabidopsis thaliana columbia
  unsure (1)..(544): unsure at all n locations
aggnacctatgnggttgggntgcccgtttggccnngggncccntagctgtaacccgnttcccggtgnncaacccgttttttgacccncttggggtgagcccttagcttgaagaacttacccnggancttttagnggngatcaagngtctcaaggcggagaagaacgagctgaggggaggaaaagctggtgttgaagncggataaagagaagacaggaccaacagttaaagtctatgacggctccatcttcagggttcatacctcatattccagctgcatttaaccacaacaaaatggctgtttatccaagttacggttacatgccaatgtggcattatatgcctcaatccgttcgtgacacatctcgtgatcaagaactcaggcctcctgctgcttaaactctcaattgtttttttttggtacccatagggaactcatagagatttctgaatcacttggtttaggattcttccgtttggcaagtgtaaaagctttactcttgatcttgggttgtatttttcttataaaataaatataactccag

SEQ ID NO: 134452 - DNA, 481 bp, Arabidopsis thaliana columbia
  unsure (1)..(481): unsure at all n locations
aanccccccatttnaattggnggtgctgnagagncnaggccngntaatngntaaagtattatgattncccccangaagttttttncctgntttganaaactgcnatgtttccttttggttgaagttttgcaaaaagaggttcttgcttaaaattgaaagnnctgttgggatgtatatgtttgctgtgttgatcccattgagattgcataaattgttatgtgctttatcgttcgtgattcccttaaaagttggcagatgtgtgacncccttcaatttaaagttagcatgttattagtataagcggagcagaagagtaagtttgttatgctactaaaagaaagaagactaggtttgttaaaagggatgtgactggtcaggtgtttaagtggattttgagtctgttacaaacaacatatagaagaatgtgtactaagtagcttataaacttctttaacgcctttatatggaacatttcttagat

SEQ ID NO: 134453 - DNA, 508 bp, Arabidopsis thaliana columbia
  unsure (1)..(508): unsure at all n locations
atggngttacntaaancaaaaccgggngaacccntcttaccctttncaaaccaaaacttggnccgngnttangaattccncatcccctaggcttcctgggngatttaaaccggttttggtnngcaaaaaggggtttanggctttnggtccnggttttcaaatnattttccaggnggattcaccacttttggagagctccagttagaagcagcccaaaataccggaggtgatcaaggtactgtattgggtactcttggtctccatctcagccngttggtctcgctgtcctccggatcgtcatgtaactccatctgacggtgccggttttaaagaccaactcatcaatcttccctgtcttttaattacgggatgaaaatcttggtcatgttaattatatattcgtatgtttaatgtaattgtatttccccttttttatgtgaaagaaataaagaataaccagtctagtaaatttgaacccttcatgtatatgaatatgatgatgttcttt

SEQ ID NO: 134454 - DNA, 553 bp, Arabidopsis thaliana columbia
  unsure (1)..(553): unsure at all n locations
gntttcagctnaatcaccncgngtggcccgtcncatncgnagggctttntggagatcggtattatngggctgatnttcgggctgctccggaaaagnnccnctnagcgcgaagggaagtgtccccatnggtatgggnaaaactcgcncatcaanagggccatcatcgaccaaaacgcncgtatcggtgaccaatgtcaagatccataaacagcgacaacgtgcaagaggcagcgagagagactgatggatatttcataaagagcggaattgtaacggttatcaaagacgccttaatcccaaccggcactgtcatctgaagtacacataatgctcctttgtttatttcttcatctttctaatgccctatcaataagttttctttatggctttttaagccccaataaatctactactagttgtaatgctgcttacgaaagagattacgaaatcatgttttcacaataccattgtctcttttgagaaaaaagaagaccctatgaatttcactaaatttatcttttgtagcttattatcaataaaattaagtttcttc

SEQ ID NO: 134455 - DNA, 569 bp, Arabidopsis thaliana columbia
  unsure (1)..(569): unsure at all n locations
cnaggaaccganttggntttcnattcccaanccccntntgntcaaggtgtccttaccccgnttgctgatgnggcccgtatccagntncctttntggnctttcccgtgtaagttgggnaaggcnttaagtgcttggaaatggcttccnggaaaagtgggagtntntnggaaccncatgggctccggatttctcataacacgctttcataagtgcagttgtatcgccgtttgcgtcgtttgagaaagcccaaagaagtggaggagttttttgcaacaagatcaaagccttcgatggcaagaaccttgaagcagagcattgaaagggtacatatcaatgccaattgggtggagagtatcaagaaggaagataatctcacgcagctcgttgctcagctctcttcaaactaaaagaactccgctactcgagaattaactaatcatctgtgactcgtgatgctcatgttttctataagccaaaaacatctgttgtttcttcttctcaacaccgaattttaaaagcacttttcgaacttttggatttgccatcaataaagtttgcctttcgaggtc

SEQ ID NO: 134456 - DNA, 565 bp, Arabidopsis thaliana columbia
  unsure (1)..(565): unsure at all n locations
ccttccnnncggacctgccntggctnccnggccatgggattccggggggaggaatccnaggnttgcttccaccntactcatccnggacccccgcggtttcttcgcccanatcttcccggattancatcccgggatttctncacttctctctctcaggnaccggccngaactcccactgtccggagtgaggtgaatntaggccaagattgagagagatntgtatgcggctattaatagatgaaaaggttgcaatgaagatcggaccagggcattacgaacccaccaaacggatctcaaaactggtctgtagccgttgaaggcagagactacaaggtgtgggaaacatcttaagaagaaggttcccaatttttatgtgtatctagtagtaaataaaattgtccttggaggaaaatattatattatttcaggggaataagattaaaagttaaaaccagatttaagatttgtcccacttttttcaatgctgagagaatattcatattgttgtattggatgcttgtaaagtgtatgcataatatatatgaataataatatatctatttcc

SEQ ID NO: 134457 - DNA, 401 bp, Arabidopsis thaliana columbia
  unsure (1)..(401): unsure at all n locations
ccnnccnccgnaaatcccaagggnccaaaggcccaccccccnggaaanccttggaaaaggaaagggccnngaagtnttaaaggcaaacttnttccttcaccgtggttggcagcngncaaaggnccangangccaagcttcttcggcaaacaccagtcggagaccaaatttggattggggtaactcagatgccctatagttgcagcatcttcatgaatgagtggctgctagtaacccaagcacattttcagtttggcttcctctttgtatgataaataatcaaatctctgtgtgtgattcatgttgagtttcgtaacttttcagtttttttttttatgggtaatggatgatccttgacactattgtgaagattttgttgaagtttgttacttttttcttttt

SEQ ID NO: 134458 - DNA, 550 bp, Arabidopsis thaliana columbia
  unsure (1)..(550): unsure at all n locations
aaaaacacttcaggcnttcctnttanttttttacnaaaaggatgganttggttnaatcaagtntnccatttggattcccnccngcnntaagatccggnccaaccccaacangggtgatgncggcggcggttgcaccattccnattnttccggcccacaggattcctcttccaccgcagaaccccngtccaccttcccacaccgtcgtcttcttcggcatcagatctngcaggagaaagcttatgacgtcattgtcccaagtatggagatcatcgtcaacaaagatgagatcgagcggttcttctcctctgtttacaaccaaacgatggcgtcatccaccacgacggctatcacggtggccaagcggcgaagaagtttccgttcttgttcacgaagatgatcaataattggacgtttcattaaaggttccataatttcgaatagctttttcgatttttatttatttttatgtaatgtttttatcaactttacacgtcgacccactctataaatatacatgtgcgatcgatcgatggaatctttttttcttt

SEQ ID NO: 134459 - DNA, 304 bp, Arabidopsis thaliana columbia
  unsure (1)..(304): unsure at all n locations
aaccgacngtgcaattcggagtgatntcgctcgccatgaggatgctgcaatggcgtgctttnggttagggattgaatgngnctctnccttgcctcagangcgaccatccatgaaagaattggtgcaagtgttggngaaattttgngttttagtttgatttcntaattcgtatagcctaagtcgttttggcaatatagaaagttatgtgttatgtatgttttagatgtgttgcttaatgcttactttnccctcgcataatactaactcttnctttagagtttagagtgtgtttcactgttttgtt

SEQ ID NO: 134460 - DNA, 542 bp, Arabidopsis thaliana columbia
  unsure (1)..(542): unsure at all n locations
tccngactcggnggctaccncgactgcttcaatcaggggctgaaacccncggtctggacttcccggtttcgatcattcncctcccancnctntcatnagcttctagttggttccgccattgggtntggggatttagggtcaaggaaagcnccttattcatgggaagncgcatcatnccttaccccggagatcacttagtgtgcctgccgacgcatgggctaatctagatgaatataggaaggaagatctggtgcagaaaaggctgtgggagaagcagaatcttgagaattactttgcagaaatgcgtaaagaatcgaagcggagaagataggtcacttgtcgcttaccatgcaacgatacaaaatacaattcgagtttcagagacaccatttttaccattatcactctactttaatgttataagaacgaaccagttacaagaagagacactagtataattgtacggtaccaggaaccaaatctcaatttggcatatacaagatgaatcatgtctgtcaatggacatggtccagttttgactc

SEQ ID NO: 134461 - DNA, 511 bp, Arabidopsis thaliana columbia
  unsure (1)..(511): unsure at all n locations
gngcccccggganaaaaaaaccccntttngngggccccccccnaaaccccntngnggnttttggttgggncccnaaaccgggtccggggggattttccaagggcccttttcctatttcnnccccggtcaaaaccntttggcataaaggccacntcaccattngccaatacctgggagctgctaccccggancggtattcccccgagctgcaagatcttcttaagagccataagggagaatccgcaaggtcggtcagagtaatnacacatgtttatatggaggaggtagcctatgattggattgaaccagtttttatctttctctatgttaatttttgatctttcgtttcttggggattttttggggtccttcttaatattcttcatgtgtataaaaacaagtgctagtatcaatattgagggttttgaatacaacaatgatgacaaaagggttctgtatataaaacctcttgtgtgtggaaaatagtcattcaaatgcagtttttgtttgt

SEQ ID NO: 134462 - DNA, 489 bp, Arabidopsis thaliana columbia
  unsure (1)..(489): unsure at all n locations
cccnggtaaaggcccccntngcccntgaaatttcccgggaatggtctnccccaggaagatggtttgancccccttggggagtcccatggncgctttcatgggggaaggttacccgngacaacccncgggnatctntgncactgaagctgtaccaaaggatctgtgtccggttaccagggcgtcagagtcctaaccagtctgtatagacaggacatatcttcgtttgaagggagtgagatctacaaccaagcggatgcagccgggtttattcgtctttacgggcttccaatgaaaattagagctatgcttaagaaaattagctagaaatggttttcattcatgtcttacttggaattgagagcctgacattagaacacatcccttattgtgatgcgtcgtcatagcttcagcttctttcgaaataattctatcatctttcttcactttggaaaaacttgagaaatttaataatgagtgcctctttctttt

SEQ ID NO: 134463 - DNA, 550 bp, Arabidopsis thaliana columbia
  unsure (1)..(550): unsure at all n locations
cccccggttttgggnccccccccttaaccnaagggccccttcctgnggggntcccnancccccccnggntttnggtnggggtggngaantttcccccccccctnggggaattttngnggcctttccnggggggnggggttcccnccctnttcccccatggaaaaggccccaaagggtgttggnggagtcttggagatatgggaatgaagcnctggcctaaaagggtccgttgcccgggtaagtttgtgaaccatagatctcaactttggggagtttggacttggagacatctacactccacaacacacagctgttcgttacgctctcgtgatggctcacatgattgctaccgttcaagctgtgagaggctaaaccaaaacataacttagtatttctaggtaaaattatgtgctttgcaatattagtgatttctttctttggtcatgtttatctataagaagcattgagaaaaaatgaacttataaaagactttgatagaacaagttgcaaactccagaaaaaacttgagattatagcagattgtgatttg

SEQ ID NO: 134464 - DNA, 458 bp, Arabidopsis thaliana columbia
  unsure (1)..(458): unsure at all n locations
tnagaanttggttnaccccccaaacccccnggggnaaancccnttcccattggnaaaaagnaccnttccgatattcccanacnggttnnacccnccaaaagaaatcnccagaggggagtgaccccaggattgtgcagatgctttgaaacggaaggaagaatgntggaatggagcacngtgtgtttgtgactcaggggctgtttttgttgttgtttgtgactgggaagaactaatcagcctctttagtttgattagtgttctgaatgtttctaattatgcagacaaaattaataatgagagtggcttgaagaagagattggtgtctcgctcgcatcagtctcatctctcaaatcttgtctcttcttagtctgtttctgtttgtcaggttatgtaatccctttgtgttcccaaacttgtagactctgttttgtcaaattgcttatgttttggttttgctt

SEQ ID NO: 134465 - DNA, 568 bp, Arabidopsis thaliana columbia
  unsure (1)..(568): unsure at all n locations
ttacccaaactttcccgtatttttgaaggnaggggggtcctncccntttcgtnttggcccccccccaattnccccccttaaaccgggggccccccacccaatttcccttcngngngcggcnccnaaccnttcccccantngtcatatccactgngngctttcccctgtacaatccaacctctaagtcagctataagccaaggagcttgggataaaagcttggttgtggagtgttcaggtaaggaaacaaggaatcagcaaatgatcttaaagaaaaaacgttcctcctttgtttcatcaaatccaacaacttcagcgtcatctaacaattccgctatagatggaacattgggaaaaagaagagtttccatctctcctatatgctaaattcccagcaaacatgcaagagcgcacgttcaccagacttgatgctggaaacaccaatagctaaaccggccattacttgtatctctgttcatagaggacatttcactccttagtttttaatcttgtttaaagctctgtatactaacataaacatgcatgaatcagctttaaagcaacaaaag

SEQ ID NO: 134466 - DNA, 532 bp, Arabidopsis thaliana columbia
  unsure (1)..(532): unsure at all n locations
tncnganggcatctctcttcctngacgtcttccacccaccagtggggtnncattcagcttggacccaagaacctttgatatgatgatggacaancccacactcgcaactcgatgcagatttacccggggaatgggatgccggacaatggcccaaagctgatgtctaatttggtattcacagagttgcgtaaacccagagacggaggatttacctggaatgggtcaattcaactgcttactctgccatcggaacttctccaatgcatcagtgatggattatcatttcaagactaagaaacacaaaaagcgtgtgaagaagatanagggaccagcgccacactcgcaactcgatgcagatttagctggtggaatgggaatgccagagctgatgtctgcctgagttttacagttattttccttatttagttaatggaacccggaattttgttgtaaaactataatctcctaaattaatgatacaggttttttgtctgttgccaagtatctatcatgcagttactggtttagcttc

SEQ ID NO: 134467 - DNA, 509 bp, Arabidopsis thaliana columbia
  unsure (1)..(509): unsure at all n locations
cctttcnaagattggnccccggattgggggaattccaaggggnttcccaggnaacccngnttggtaaaacccntggcgaaccctttctgtggngatngntacnngnttggagaacncttggntatgggttcaaaaccggccnggagccataggggangcnnccttttgggatggagaaatcnccccagggtatatcatctttgccataaagtggctttgtttcaactcaaaaccgaggagaaaacactgaggttcattgagaaatctggttgagttgtgtgtcttaagccaaattccgaagatttggttttgaaagatggtttgtcgcctcctatatgtgttctactacatatacgtaccatttgtaattcactctctaacttaatttttttttgttgttgttccactctgtgacaaccacaggcattttgtggctattttgtaagatcgttaagctcaataaaacaccctacagaaacgatggatgatccatcatggatcacattctt

SEQ ID NO: 134468 - DNA, 564 bp, Arabidopsis thaliana columbia
  unsure (1)..(564): unsure at all n locations
gncccggcggatcccgggtgccccnccgnccccgaaaaattgcgncccggtttcggcctntagcccctgttaaaccccgccggnannctgggncccttggggtgngggccaaatgccgggaacccctttggggnagccaactttccncccnccaaggnggggggattttaggggatattgccggataccggncngngggngccccncatccattnaaggggnaccggcttaacccttatctggatctggattaggaaaaatgtancggaaggtgcccagcgtcgtttccccttctcttcttgaccagaagaacatagaagaagaagaataagaagaatttaattcaaggttattgttattgtggttttgattctgaatctgtctatgaatttgatacaactcaaacatatgataaaatcagacaagctatctcatttcttcttaaaggcttcataagcactccctgtcgtagacagtgacttgtataatcacatttcagtatctttgtcatggtcttactgcaacattctggcatcttgtgtgttgtcattttgctcttaaact

SEQ ID NO: 134469 - DNA, 350 bp, Arabidopsis thaliana columbia
  unsure (1)..(350): unsure at all n locations
ctantnccagggatagagngggttatatggggagatgancngagctggaacgnccaaggggagggnggaaagcggcgtcattgatgagatatctaagncggtgggccgccggngataccnntaacacgtcggcggaaacgcagagcattgtngtgccaacgccaagtaggatttttagtccngttttatgatttttcatttttttgttttcccctcttcttcttgtgtaaagtttnaatgttttttttttctttcctgatgatttgaaaagaaattgattcttttacaaagtattaaaagctgcaattgtaaatgtaaattcgagaaaagaacgagagattttttccctt

SEQ ID NO: 134470 - DNA, 579 bp, Arabidopsis thaliana columbia
  unsure (1)..(579): unsure at all n locations
caccttggggnntccnattgggnntttcttnaggnnttccnaaggcncngcacatnaacncttaacncggttggaacaaaatccccctntatcggaattggccaatnnaggccctttaaggntggaagaagggtatttnggggattgctcgagtccccaacggttattgnagaagcngtccctgaccaactaaggggttttattgggtcaagctactacccacgttgcaacagcttcctgaacctatccaaagattactctagccaatggtctaagaatcccccttggtggaacttaccaaagattcttcatgatatcttatctagacgacgagattcttattgtaagagataccgcaggngtgcctgaagttctaacgagggtggaaacatcgtctccgatgtcttcatcgagtgttgtagagaatcttgaatacaacagttaaaaacaggttctcttgttactctgattctctctgtaaatgtaagaacaaaaagtgtatacaacttaccgacctcactatagtatatctccggacacactgagncctcttttcttaaatcctattcgtcttttgtc

SEQ ID NO: 134471 - DNA, 581 bp, Arabidopsis thaliana columbia
  unsure (1)..(581): unsure at all n locations
cngggcttcaattcaaaccgttggacccctgaccntttaaccctgacaaccttgtcaaccgcccccaccattaacggcaagatgggnctccggtccaacgtcatgctctagctggacccccgttcanttaatcttcagcggatcacaacgctnccttaaacctgacgagngaaantcaagctcgtgatttttgccgnntgcagcaggnaagttatcggcagacagagctgtgacgagggaagatgccgagggagtggtgagcgcagagatgaggaatanccctaaattgtgtactcaccctggtggtgtagcggcttctcttaccgtcgctgctaggcttaacgagagagttgatatatgacaagacaaatccggcgagaggatcgatgatctttcttttttttgtttgtttgtttgtttgttcgtctctctttcacaacttaggaaacttgttatgtaaaatcgtctacagcttttggtcctttagccgatatgttagaaaatccggcggggagaggatggtgttcacaagcttgtgacatttaatcgactagcttttttgttcttttttgtatcttact

SEQ ID NO: 134472 - DNA, 414 bp, Arabidopsis thaliana columbia
  unsure (1)..(414): unsure at all n locations
caancccggacctggggngaatgaatccccaaaggccaacccgggtttggaaaggggggggcttccaatgcnaaaggaccgggtttggaanncagggggccaaancttangttcccccaatggggcccaattccaangggtaatgggcctatggnaggntccgaatccngcctgctggnccaccgnaaaccncatccgctggctgtttttggtttagctggcaaagcaatcatgtaagagcaggtttaaacctataaaacctcccatgtagcaagtttncttncattatttatgtgaatattgtttgtaggtaagagatacagttgctttgcttctccttgtcttttgtatacttgtcccaagttgtttaaaaaataatattgagcaatgtaaagtactttattactttttacc

SEQ ID NO: 134473 - DNA, 577 bp, Arabidopsis thaliana columbia
  unsure (1)..(577): unsure at all n locations
aaacttaaggagccccatggcttcgtnccggcgcttaacccttcnggtctncaaancccccggtttcccagagccggaancttncnggganctttgaaggncattccnggtgggttccngnccnattcagngctgggncaatcacccttggtcttaccggagcttcaacggactcccacttgtcacaaccgatcatttcttcgtccttagcnccgtaggttactacgtggncagagncggcggatatgtgcaagatgaccacaaacaagatttgatttgtttgtccaatactcaaaccaatgaatcggttaagcccaatggagttctaggccaaatcttatttgatgtttatattccgaagaatgttgaggattgggatataaagctatcagaaaccgggcggtctaggcggagaccggggaagagatttatacgtagatcgagattgtaacatctgagttatatattatatataccatgagtacccatttgttttcttcagatactgttgcagaggtattccatttggttttccctcgcaaagattaataaattaataaaataagatcttttttgc

SEQ ID NO: 134474 - DNA, 595 bp, Arabidopsis thaliana columbia
  unsure (1)..(595): unsure at all n locations
aaggnntcagggaaaccagggntggatgagggtcngcacccntgggccccggccacgctncatgngncccncccncttttgggnacctctttcggaagccnccagttgatgcaaaaccggnaggntgtggaataaggatctggatccnctgtggaagnttcaaactggcaggtgcttctgaagctgccntngcaacagttgtcaagaacccntgtcccaatgaagccgctgctaccggaaggagatgagaaaaaaggtaccngcgccttggaaacccntttatccgaacaagaattacgatatcaaaagctatgaaacaaaaaccgattctcgcttaatgaatggttgtgtgactggaaaataaccctgaagatgtagactactgaatcttgcttgatttgatgattctcagatgttttttttaagtttatcttcttcacctcaaaggtgataaattttccagggcatttgttagataaatttgtaaactctgtttaagtttcaaccttttaagtatttgtgttgtttttgcattagtgattgattcttctgaacttccttcttcttctttaatgataaaagctactttagcttc

SEQ ID NO: 134475 - DNA, 579 bp, Arabidopsis thaliana columbia
  unsure (1)..(579): unsure at all n locations
cccgatggtaaatccncccccatggttggaanttttccnttttggaaccancnctntaaaacctttgtccaaacctggtttggaaccatcntttgccaaaaantttccgtcggccactgggaatggtnnnnccgttgttgtattgagttgggaacnatctgcggtaaaagncccttgaggatgccgttttggaagtggtctgccggtnccgaaagccattggggaaacgagtctggtggtaaaaaggagcagtgcagatggcggttggggaagcgagtctggtggtaaaaagagcgatggngagggcggttgggggaatgaacccagcagccggaagagcgatggcggtggtggtggatggtgaagaaacacaacctcggctacaaatgttggttgggtaattaaattacgaaggcaaaaggcaagacataatagtataaacacattagtagtaaattagctttctccctaaatgccttttacttttactttgattctctgcatttttgtcttaacctgtcggtattagtatcggtttatgtcttgtcccgactcttaacgttccaggaaagtcttttt

SEQ ID NO: 134476 - DNA, 405 bp, Arabidopsis thaliana columbia
  unsure (1)..(405): unsure at all n locations
atcccccccccttnanggccnttttngggntcaagncccaatccccnganttgngggntttgggaccatagtntggcaccccncaaggcgntttcttctccaaaagntggcaacaacaacaacaacaatnataatngcaagggaaactctaaaaagccacctaagtcccaaatcattgatgtcgattttgaggagaaatgattattagagacgagaatgaagcagaaggctctattggtgcactaatattcaagtgaagataaaaatatgtgtttatagctgaatcgtttactgtttttgtctgttttgagctgtagcaatcgtgttgcttgttgtgtacatgataaggtttctttgtagacgaacaaatctagtttccacaagcctagagacttgattgaaact

SEQ ID NO: 134477 - DNA, 532 bp, Arabidopsis thaliana columbia
  unsure (1)..(532): unsure at all n locations
cncgggggnccgggnttnnnnaanggggnccccaattgttnccngttntngtccccaacttggccncaaaggctntggggnngtttccttggaaaaccccttcccattggggnccattngctnggaanccccctttacaaaagggcatccagagtggaaagtgcccaaccaccggttatcctatgggaatggaatgattggatgaacttatccaagggtgccggtggaagccgaggaaatcccatgaaggtcccttgcgaaatcattcgggttcccacagggtggtcattttgtgttcatagacaacccaattggttttcattctgcagtgctttatgcttgccgcaagtttatatctcaagactcctctcatgatcaacaactcctagatggtctacgattggtttagtcatagtatcttgttccttttaccttccaaatttattctatatgtgtatacaagtatatatgaaaaagaacataaaaaagaattactttctttatttgaatattcggttgtgtattggagttt

SEQ ID NO: 134478 - DNA, 578 bp, Arabidopsis thaliana columbia
  unsure (1)..(578): unsure at all n locations
aaccnntnggntnttnaggtttnccnttccgttccttcgggngcgttccgatggnacccncctttttagtcctnccgatnggttaagttttccggacttaccccctgtgtttttnaaatcggccnccattccagggccaagttaactttgggatgctaaatgtggaccacccgaaatgggagcnaagagttggatgagtttggtgttgagggtattcctcatttcgccttcctcgatagagaagggaaccgaagaaggtaatgtggtcgggaggctcccaagacagtatttagttgaaaatgtgaatgccnttgcagccgggaaacaatcaattccttatgcccgagccgtgggacagtactcaagctcagagtctcgtaaggtgcatcaggttactgatcccttaagccatggataaagagagtggcatcactatcatgcttctggcagatgatagaagttgtttctaactctatagtgcacaaaaaaagtagacaggaaaggaaagtcggaaagtagcaatgtttcaaattgatcaaaagaatcccattggaactataaatgttgatatcggtttg

SEQ ID NO: 134479 - DNA, 459 bp, Arabidopsis thaliana columbia
  unsure (1)..(459): unsure at all n locations
anggcccgnggnttttccccanntccccgggggggtttccaccccccannntcngttctttnnttgccccctttaagngnatttcgggccaattcccccccccgggatntggtttgggnaaccaggncccgtggcaatttggggacaagactntatggcattggtgcctacccggtgttcctgaccacatgggtcgatatattagcggaactcattctcactaacttaaaaacagagtgaagacgctatcnggagtcgagaacagagacttgcttgagcatatggaagctcaaatgtcggaaaggttccatcttttggttttaactgtaaatgattcatatctggatgaaattttgttcctttaccaagacatcttctcaaaacacaaacatttaacttgtattgtgtctcttgcttgtaactactgtttccatgaagttaatgtttttgcaattgggg

SEQ ID NO: 134480 - DNA, 590 bp, Arabidopsis thaliana columbia
  unsure (1)..(590): unsure at all n locations
cccggcccccnnnacctggggaaaaaaaatttggcccaccccaaaccccnaattttttcccccccaannaaagcccccaaggccgggttctggattccnggnaccttgggaagggnancccccccaaacctggggggccaccccttaatcncttccccccccngaagggnaagcccgctgaaacatccccnacccaagngggggcccggccataaccttgtggccacctgngtantccggggaaatgtgggggtancccttggaatcctactttatccggcttagatattgtgtaagagtgagttgtgctagtgaagttgggactggctctatgcttcttcttgtatacatttctgagaatctgtgcccatcactcaggaaaagatgcatagatgtcgacaagttattatgtttgtttttttggtgtatgttatggtttttttttttggaacacttagaggagaacgtttgcagtaaatatgttgtggttttgatttgcattcattctggtaaaagtcttgctcatttggaacaatttctaaataattgctcaagttctgtctccggatcaataaattaatatttctatc

SEQ ID NO: 134481 - DNA, 431 bp, Arabidopsis thaliana columbia
  unsure (1)..(431): unsure at all n locations
ttccccaaaggnaccncccntgaccctggttcnnngnaantanattcatcccntacatctctttcncgggcattccgtcgaacgngttccaccgcatcaactaattttttgtcccccgngtanccccaaatcatctgggtgtaccgactcncgtgaggagatggaacnaggattgagattctctcatcgagtctttctggacaacgtggggattaaagcncgaaatggagtgtgtctctctcagctatcctaacttagttacacttggcagtatcgataaaagttttgaactcaagttaaatttcgatggtctgaaaatttaggtataaattgaggaataaattatggtctgagactgtgtctgattctgaattaatatcataaaaacgagaacccaagttgtaatatcattcagccactctccaaaacgc

SEQ ID NO: 134482 - DNA, 310 bp, Arabidopsis thaliana columbia
  unsure (1)..(310): unsure at all n locations
gngcccctccttaaagggaagaacctccttgtggaaaggngaagccttaggaaccagngctttcngatacttccgaaggtgaagntgaggcccctccntagntttaaaaaggggnngaatctgatccnaagnggcttgaaattgagttgcgaaacaaagccactcgagtcattgaaagccaaagaagggcattanccactaagtcccttgtccagcgttatttgaacatcatcttttatgatactatcccttgctagatttatgaacatcatcttatgttgtgttttttcttacatgttccaaactttct

SEQ ID NO: 134483 - DNA, 447 bp, Arabidopsis thaliana columbia
  unsure (1)..(447): unsure at all n locations
aggaccccgattgatggnctntaatccaatcaaggaggtggcacccanttgcttcccagtcacgcgncgttttcagcccccatgccntcgaagatggtgganccagccagcttggtggatgatgactcagactttgccaagagaagctttgtgggaaagaaagtgccattcctaaagtaatggaattttctggcnatgccnaggtctgatgcaattcnactgctatcaccataccatggaggaccctgaggcntgtgattccagcaaactctttgggtaaaccccaaacccagacttagcccgcgtagaactgaactgaggccggtttattttaatttggatgagttattattggtttattcatttctgtatttgtacattaactttacacagacacacttgagtaaaagaaaataaatagttttatcaataaaaaagtggttgcat

SEQ ID NO: 134484 - DNA, 439 bp, Arabidopsis thaliana columbia
  unsure (1)..(439): unsure at all n locations
tccgccaaaaacggagatcgtacctttgccgatggaaaccnancccnagtttnccnctggaaatcccgacggacttccggtaccatggnaagccccccgagttccccatgtatgataatgattcccggtggggaaagcccgtgccgttaanantggaccgtccnataaagttnntgggaaantttccgccnttcccgggaaggaaaggaaccgggcctttgaatttggaggtggttttanccccggagactatggctgggattgaatctgaccggtgagtttatgcgatacgtgactaataagtaacggagtttatgaataataacgttaacggtttttctctgtttttcttttcttgttaattaagaacttaacgatgtaagattattgtaatgtgactttgtaagttgacccttgaaaagaatgttatacatttgct

SEQ ID NO: 134485 - DNA, 430 bp, Arabidopsis thaliana columbia
  unsure (1)..(430): unsure at all n locations
atncnctacggggatccaagtttatgttncgtagagtgaggaagactgcgtntgccctgagcaagatgcccncgagagagatggctgaatgtaaaaggagcctnggacctgtgnccgtatgagtggatgcagagccctcttgaagagtttctacgagtaatggcagaagnaggaagccccaaggaagactcttttgcccatttcccagcatttcaaaatcgaggagagcgtcaaaattgatcctcgctactgctttgtagtctaactagtttcgtttctctaggcgtatcaaacctctctctcaattgttatatattatggaaagacttcttctgtaaacaaagttaaaacatgagaagcaaatgctttcagaccctgtgacttgaatgtgtttctcataagcaaaagatatatagagattatattaact

SEQ ID NO: 134486 - DNA, 519 bp, Arabidopsis thaliana columbia
  unsure (1)..(519): unsure at all n locations
gagggttaaccccgggtttccgnttttaccggccggccattaccgntcgaccgggacttnccccaatgngncaacccntaatccaaacccggtcacanttaacccntggacgatntcnttagggtcaacgttgactttcccttgtaccggtaacccaagctttgacatacncttggtgaaaggagggcccncttggtgacgtttcccttgacgcttggggttacaacgtaacgatggtaacngtngtgtgagttttagcgttgtctcccagtgacggctcaaggtggccaacttttctacggtagagaccacattgaagaaggaccggttcaatattcagcgtcgatgttagatgatgatcaagttcagaatttgccttataggaatttgatgggagctcaattacttcatgatattgtttgagattaaaagattaggacaaaagttatcgatacatattttccaaaaccgattcggttatgtaacggtttagttagataaaaaccaaattagatattt

SEQ ID NO: 134487 - DNA, 524 bp, Arabidopsis thaliana columbia
  unsure (1)..(524): unsure at all n locations
ccacnggttccntttccccngaatccttgggattcccnnaaattcccncggatttccccctgggacttcttcccnaggaattttttattccnttgccgacccnaaccnctccgnggccntcaggccanattnccngggaggaggaggaggaggaaggagaaggnagagttgaccaaaaaccngggaaaggggangcaaattancngttgatagttccattgaagggaggatccaggttgtccccggtaaggatggtgaagccccagaacgtgaaagcattaggaagtgtagatgaaatactatgaatagagataaagaaatagaagaaggtgtggttacgaatgtggagagggttttgtttgttgtatagcgtgaggctaaagagagccttccttataaagggatccaatgggatatggaaataggattggtgtttgttttcgttaaattttgtctaatgttaactaggggaaaagttatctgatagtattagcatcttatggcaattttattcttttgaattc

SEQ ID NO: 134488 - DNA, 503 bp, Arabidopsis thaliana columbia
  unsure (1)..(503): unsure at all n locations
tttttacccccccaggnatcnncccggatcgtgtgcaggatncnntggnccgtcaatgcncnatcccggtggagtcgtcgtcggcgcacgacgtttcntcttangggtgatggttccatggctctccgacaagcttccaaagcagctgcacgcttcaccgacgagggagaccaacaaaagccaaaaccctaattgcaaatgtgggctcctctttgaagatgggcctctcttttcatggcccaataagatatctacttcggcccaattctgattttttgggtcaaacctaattaacttttggcccaggtccgttttctttattcgtttggcaaaccctattttatttaagtcttctaactttgctgagaagaatggtcgtggactccattcttgcattgttatgacattgatagatagggttgttcaaattcatctaataatcctggtggaagatatctttaatgttgtcaattgtggtaatccatctaagaaacctgtgatac

SEQ ID NO: 134489 - DNA, 202 bp, Arabidopsis thaliana columbia
  unsure (1)..(202): unsure at all n locations
acaacnacagaaacaacaatgacatatcttttagatagntngagngaagaaatttctttctgatttttttttttgttttgggggcatttattattcataatcttttgttcttatttntcatngcaagaacaaataacctanccttagcgttagtgaagtgtaaactagaaaagaaaagtcataataatagaaattcaanttt

SEQ ID NO: 134490 - DNA, 461 bp, Arabidopsis thaliana columbia
  unsure (1)..(461): unsure at all n locations
cggtccattcgntggctggcncccacagcatattttggaacgnggccggggaatagtgccaacnttgngttatcagatcncgtgcagtattccgatgaatggaatggttgattcgtttaatgtcncagtggctgcagggattctgatgccccacgcagtctctgatagacccactcgtctgggaagccatggagatctgtcggaagcngagaaagagatattgatggctgngttctcnttcgtcacagtagaagctcaatttgcattgcttacgngttcgctaaacgtaaacaacaacactntacctccncctaattttgaaaccgttgtcttattctctcgctgttttgcgtgttataggcttcgaatgacnccnntaaaaactctttcgaactctttttttggtncgacgcttgcttcatgtacaactcttaaattctataaaagacatccttntgtcg

SEQ ID NO: 134491 - DNA, 517 bp, Arabidopsis thaliana columbia
  unsure (1)..(517): unsure at all n locations
aggattcanccngtaaatccccnttccaggccctttnccttttggnacccgggncaaattcagggccccnaatttgaccntacccncgatnttttggaaaatnctnttcccttttggnggagccccccgatgctgtttccngaaaaggnccgaaggatgnttaggaccattggcccacttgagattaaaggttgttaagcctgggcgcttttgacgagctcatgaacttctttctgtctagaggctcttctgtgagtcagtaccaagacaccgaggtcggtgacgaatgaagaagccttgaagatattggaggccaacgttatttccgagtttcttagccggaaaattccatcgtgggagttacatgagttacactccggcagataaacccgcagtcataatatctgtgagatttgagggcaggggaggagaacaatgtttacgacttttcttaatttaaacctctctgtttttttccagccaacaaatgctctgttcttcaagtttttatctttac

SEQ ID NO: 134492 - DNA, 491 bp, Arabidopsis thaliana columbia
  unsure (1)..(491): unsure at all n locations
cccgcgaacgactttcgattctcccacttatggtgatttaggcaaacggtaaccaancctgtgncaccattatgtagtacngtgtancaccgatctggattctcnccgaagctcgacggaatcgcgacgttgccgacgggttggagaggacacgtggcgnttccggaggaggttgaagaagagtttgggtttatgaatgtgaaacggcccatgttggtttgtcgggttgtagcgggtcgggtcgggtgtgatttgattgatgatgatgacgtggataagagtgatggtggagggtatgattctctggttgggcagagtgggaacaagagtggggctctgttgaggatcgacgatgatgagcttttggtttttaatccaagggctgtgcttccttgttttgttattgtgtatactgtgtaaccggatttgtgatcctgtgtgtttttgtttatattttgttacaattgtgaagtgtgaaacgctttaggttt

SEQ ID NO: 134493 - DNA, 504 bp, Arabidopsis thaliana columbia
  unsure (1)..(504): unsure at all n locations
aatttccatcatagtncggaccnggagttttccggngagctcacttccncttgcccccaaacttggggttntgtacccttaaaccccaactntccgcgatcaaattagatctcacgactatgaggacgaagactcaccgagtatcgtcgatatagaaactccaagctccagttccgatcagtgaagacgaacaagtttatcagatctctgcaacaattctgggaatcgtcacctcagattagacctccagtaagaagtgagaaagcatggacgacgactgtgaagaattgagctaatgagctgaaccggatccggtgaaattgcagaaccggatcggagaagaagaattttgcatttgtgcatctttatttttaattgttacgtttgagccccaataatcatagatattgtagtgaagaccaaatttcatggtggatcaatcaaattgtattttcaaattttcgtagtgtaataacggaaaaaggaataaaaaggtcactgagt

SEQ ID NO: 134494 - DNA, 492 bp, Arabidopsis thaliana columbia
  unsure (1)..(492): unsure at all n locations
aactccggacccgggtttaatccgctaacgccngtcccgggnaaccaaggtggctttggccattcgccngngccttaagnggattagtggncgtaagacaagttatagagatgtgttnccgggtaaagatgaagcttaggttttgatgtaatcttctncggtttttcaattctctgtatttctctatctttttagtttatcaagtttaagttttatttggggtttcttcttcgtttgggtatctttctgttttnccttaaggttcttcgtttgtttccgtgtcgtctaggttaagtcaaagtaaagagatgtaattactggttagatgaatcttaaggtttccatgtaaccgtttgtactacaattctctgnacttctctatctttaatattatcgaatttaagttttatctttggcgtttaaagttcagtatttggacatttgatacacatcacatgagattaaataagatggttgacccaataaaaccat

SEQ ID NO: 134495 - DNA, 462 bp, Arabidopsis thaliana columbia
  unsure (1)..(462): unsure at all n locations
tccagggtctctttnttcccnanaaccccccnntttncccaagaanttttaggggnaaacccttttgcccaaaatgnttttncnccaccngcnaagagaagngngctaaattncaggttgatgcttntagaaagcgggtttttggatgcagaagggatcaaagggaaggaatggttcaagcatcttgtgtatggaccngcggctgagccagagagcaagctaggattcttcccgggaatagcagatgccattgcgatgaacgcatcagagggaataattgagcacgagatatggagagtcgcaagagcgattcagagagcaagcaaagctcttaaaggaggtttcacatgagaaaatctgaaagagttctcttttgtgtatatattgtgactatagattgtagaagaataacgtcttatgaactaattttcataaccatttatgaaacaaacactataatct

SEQ ID NO: 134496 - DNA, 488 bp, Arabidopsis thaliana columbia
  unsure (1)..(488): unsure at all n locations
tgagnnanactccggcngntcnttaaggatttcgggnaccccncggcgggccctttncccggggcnaattaaccggcntttncagggncncctaaggggaacccccagcgattccnccccccagggatcntcgattcgncgagtggaaaccgctctcnngtagtgaaagggaggaataaaaccggcggcgtataagcctgatgtggataagagaagaaagtcttacttaccttacaggcaagatttgatcgcgttttcgccgggatgggtagattccgtaattaacgaatgtttgattatttcctaattttattatttaagtgtgcatattcacaaagaggtcctcgtttgatttttaattttctcttttgaccatgtaatactttttggtgatattaaattcacttgtgttttttgtcttttttacttttccactgaaatgttgtgcaaagtgtaagactttcgaagaaatagagaatattttaacg

SEQ ID NO: 134497 - DNA, 502 bp, Arabidopsis thaliana columbia
  unsure (1)..(502): unsure at all n locations
ggtttgccccnnctgngacccccngacttttnncnggaantgcccctttaaagggggcccctggnaantcncgnctgcncatttccnctacaagtctgccccctgattctcttaacnctagacntcctgggccaacaaagngagagtgcttccccatgttcttgacgagcaaatccaatcataagtgttggagccaacaaagagtgcggagttgatgccactacttgtagactaagnacctgcagcggggttggatactgcggcttatggaatcccttataacttttgacacaaaacagtggggtcttgggttttaataaaggaaagagaagaggtggagtttacgaactgaaactgtaaattaatgcgaaatgacaagttttggtagacagaaaatggatagttgttgcatgaggctgttgtatctttttctttgattcatcagtcctgacatggatatatagttatatactatgggaggatcaacctcgatcaaaggaat

SEQ ID NO: 134498 - DNA, 500 bp, Arabidopsis thaliana columbia
  unsure (1)..(500): unsure at all n locations
gggccagactttactgggtcacaatgccgtnccgacntcgagctttaccggaggaaacccaacccnggagaccgatcttaccgcttcctggncccaagagctccaaagtcgtctagccccggtggtanccatgtaaaaggnccgttccagagaagctatagtgttcatgatcggtggaggtaactatgttgagtatggaagtttgcaggagttgactcagagacagttaaccgttaaaaacgttatttatggagccactgagattcttaacggaggtgagttggtggagcagcttggacttttgggaaagaagatgggattaggaggtccggtcgcttcaacgtcattgtctggtggtcactgagtgttactcactgttactttctttttttcttttggcttttgagagtttttttttattaatctataaaatataaatccccagtggtgaattatttaacaaacagtttacagtctcgttataacattttctacagaac

SEQ ID NO: 134499 - DNA, 494 bp, Arabidopsis thaliana columbia
  unsure (1)..(494): unsure at all n locations
ggggaccccaggccctgactgtccccccttgagatttntcnccccaggaccntacgccaanccgggatantggtgttnaacccccggnggngaaggttagccnttagtggggnatcnaagnaaccaggggcaggcgttttngtgttagggccagagaaagagaaccncgaagtggcncgtgatttggaaatggcgtacgaagggaggaatgggaggaggagtggtcgagtattgtattcataactccgattgtatggctattnccgtaaggaagaagagtaacaatggaggttacttgatcnccacgaaacgtcacaaagatttctggctcttggcttaatttttatttcaaacaaattcatcccaaaatctttttttttttttttttgtaatcgaaacgaatctttttaaagaattcatgttttatggattaattgataatctgtattcgttataagaccttttcttatatatgtaaagacttcatatttgtc

SEQ ID NO: 134500 - DNA, 595 bp, Arabidopsis thaliana columbia
  unsure (1)..(595): unsure at all n locations
cccaattgttttgaggaatnttagcccacacgnggggttttccgccancggggncctatatancggccccggncaccntcattcgccggtccgggttaccctngggnatccctggccncangnctngcccctttggccaaacccncttanacncccctgngctactggnaccntgccttatcgngggacgtatatgtggtttgnccttccaatcaaggccattacccgtctattcgccaaagttctgtncccgggtgacgtgtttgtgtttccccataggaatgatcccattttccaagtgaatatcgggaaaacgcctgcggtggccttcgctggattgagtagtcagaatgctggtgttatcacgatcgctgatactgtgtttgggtcaacgcctccgattaatccagatattttagctcaagcatttcaattagatgtcaatattgtcaaggatcttgaggccaagtttagaaactaaatctagtcaccacaatacgagtgtttatggttgtaacacttaagtaatgatgtaacaagagttaaagatttatgctcaatataataaagaaaggtgttgttcacctaatttgat

SEQ ID NO: 134501 - DNA, 604 bp, Arabidopsis thaliana columbia
  unsure (1)..(604): unsure at all n locations
ttggggttcntcttncnccggcaggnnccanctgccccccatgtgcntctgggtcccccccngataantttgncncccgnttcnccntaatcggcaaggtcanncccntgaccntcaggntccccccccattggtgccccgttcaggaatctntcaagntgggtatttcaaaggttcttattccantcgggttgtaaagccttttggtgattcaagcccggtgactctgccggagtccgatgctgtcaaaggattggncactcgacagaaaggaccattgatacccagtttgaaacatgaagaattcatggtgggaactcctaaagctaaaaacgagcaaggaggattcgagttcttcattgtgtctgctcagatcaaagatctgaacgagaaattgactgtctttggtcgagtttctaaaggacaagacgttgttcaggagatcgaagaggttgagacagatgatcagtatcaaccaaagtcgccaatagagatcatgtccgtcactttgcttcaagacatgtaaaagcttttttacttcttgtctctctctcttgtatgaaactcaagtgatttttcttgtgaatttgaaaccctttttatc

SEQ ID NO: 134502 - DNA, 586 bp, Arabidopsis thaliana columbia
  unsure (1)..(586): unsure at all n locations
gggnnattcnggccttcctttccactacccctnggacttcctcngtcgtcggatccggtgccccggnccggtttcccgagcggaatnttccgggacctttgaaggacnttcntggtggttccggcccattcgggctgggncaatcacccttggttttaccngaagcttcaacggactccccttgtcacaccngatcatttcttcgtncttagcnccgtaggttactacgtgggcagagaccggcggatatgtgcaagatgaaccacaaaccaagatttgatttgtttgtccaatactcaaaccaatgaatcggttaagcccaatggagttctaggccaaatcttatttgatgtttatattccgaagaatgttgaggattgggatataaagctatcagaaaccgggcggtctaggcggagaccggggaagagatttatacgtagatcgagattgtaacatctgagttatatattatatataccatgagtacccatttgttttcttcagatactgttgcagaggtattccatttggttttccctcgcaaagattaataaattaataaaataagatcttttttgcagac

SEQ ID NO: 134503 - DNA, 567 bp, Arabidopsis thaliana columbia
  unsure (1)..(567): unsure at all n locations
ccgnggttgtttcctgaccttgggctcaaacatccccttgttaggggccccttttttaccncctnatcattgcccncagattcntccncgttggggttcccttccgggttgcccccgccatcnggggttnaagtcccccccgnggaaanttggccggagattaacccgaggcagngcccgggcttagagggaagnganccnccaaggagtcagtcgaagatgagtngcagcagcagcaagctcaagatctcgtttgatcaacttgatcgctcgcggaggagcgttgactgccatgaaaagactcggaagagcgttgaccagattgagagggggaggaagagtgtggataggttggatagagttcgctccgagtaaaaaccacacactcacactcacacacgtataatacgtatgtagatgaaaagagtacataactgtttctatttaccgaacaaaataacatgtggatgtcgctcctcatattattgatttgtaatcttttatgcaatttgggatctctctcgccatctccttttgaatcaacaaccttttgtggtgggcttgaat

SEQ ID NO: 134504 - DNA, 268 bp, Arabidopsis thaliana columbia
  unsure (1)..(268): unsure at all n locations
ctgttttcccaaccaanttcancnncgttggtctctttncctaaggaggaaccgatgtgggccgttggaaataggattccatggaaccaaatgtgaaggncncanggggangttncaatgtcactgggaactgaactagtgtattctattatgtagctcgacttttgtatctttatacttctgaatgtaatgctcattgcctgaggtatatacattgttcctttggctctaactagattggtgctatgcagagacataagttgagacc

SEQ ID NO: 134505 - DNA, 537 bp, Arabidopsis thaliana columbia
  unsure (1)..(537): unsure at all n locations
aaaaagcccccacgcaaatttgcgttctgctggttcaccgtatctttctggaaancnggtttnncnaagnggcanttnaaagcctgcatgggatttnccnctactggtgcagcattggttggtgtatccagagttgatgacttattggcatcactggcaagatgtttttgggaggagcttatcataggattgactgtggccacattttgttatctgcaatttttccctcctccatacgatccagacggttggggacctcatgcctacttccagatgctggcagactcaagaaatgatgtccaagattcagcaggaatgaatcatctaagcgtgaggcaaacagagctagagagcgtacgttgatggagaagagacgtccatggaaatatcaagaagcaacacgcgggacaccacccgtatgcttcagaaccgctaagtgaagtctttgtactcgttatctatcaatcttaggcattgtcgcattgatatgtattggcttaatcacaaggcccaatattggttggaagcccattcgct

SEQ ID NO: 134506 - DNA, 568 bp, Arabidopsis thaliana columbia
  unsure (1)..(568): unsure at all n locations
ccncgtttcncgggcagcctttctcggngtttcccgggnccgtttcganccaatgtagccatgggagttccgtccggncctggtgtccacgtccgngccttggagtcctggtcgtcggtgtaaatcgctcagtctctgtcccgtgagccccccggaaaagatccattcagncccgatcagaagacgcccataaagaatttcttcctcgccggttcatacaccaaagcaggattccatagatagtatggaaggagcaacattatcagggagacaagcttcgtcatacatctgtgatgctggtgaagaactagcagagctaaacaagaagctttcttcttctgcaactgcagttcctgatgagctaagtctggtctaatgatgaaaaatgtttgaaagtagttaccaatggctaattgatgaagatttgagacactatgggtacatgaagaagaagcatatgtagaaaccctttatatagtgttcataagagaaagtatttgtaatattacaccatcttttgaaatcaaagattcttacaaagtacatcaatttaagaaagtttactctc

SEQ ID NO: 134507 - DNA, 619 bp, Arabidopsis thaliana columbia
  unsure (1)..(619): unsure at all n locations
cccgncccttnttncaacnaggggctaanttggcagaggntcntngctgaggggnttcaagcacncttcccaatttggtaaggnccctcgnngntacatcacgcggttttcaacgtcaatgncggatttgantcaaaggttttaaattccaaagggtggaaagtatcccatcggttagagcggttcattagncccaaacccacttcaaangatgctcgcactttcaacccttggagatggcagagcaactcggtaacgacaggcccttctaatgtgttcacaccgtttggtggagggccaaggctatgtcccggttacgagctggctagggttgcactctctgttttccttcaccgcctngtgacaggcttcagttgggttcctgcagagcaagacaagctggttttctttccaactacaagaacgcagaaacggtacccgatcttcgtgaagcgccgtgattttgctacttgaagaagaagagacccatctgattttatttatagaacaacagtatttttcaggattaatttcttcttctttttttgcctccttgtgggtctagtgtttgacaataaaagttatcattactctataaagccttagcttctgtgtacat

SEQ ID NO: 134508 - DNA, 336 bp, Arabidopsis thaliana columbia
  unsure (1)..(336): unsure at all n locations
ancccctnttnngncccataggggtntggggnctttncccgggttnccccaaccaaacccnggaggaggagctngtccaaggaagtngccagtaattcgtgtgattcaccgatgcaatgggaattgattatgataaaaaaaaaaggaatgaccttcttaaaactatttaacagttatgttgtttcttctttcttcatcagcctctttttgtttgcttcctttngtatggaaagcaaacgaaagaaggtaaaagctgttttttttttcaaattctgaacccataagtggaaggaacaaaaaggaaaaagaaaatgcaatttgcaacataattcttct

SEQ ID NO: 134509 - DNA, 429 bp, Arabidopsis thaliana columbia
  unsure (1)..(429): unsure at all n locations
ancaaaaccctcncncgaannnctnccccntttttgaccccccnaaaaaacncccggnccccctgcncccccnctggtcaattggtaaatccccnctctnaattggaagggaatntccatggaagaagcngaaattggagattatggaagtgatgaaggagaaatttgaaggaattgatcagattactgttgggagaaaacttttctcccggggagatctaaagatttctctattggatcgatttcgtattttagggatttgggtgaaattgaggctgtggatgatcagatgaagttgcagaatgataagattcgtgattatgttgatgataccattgttgttgagttcaatgtgccgtcttcttcataagtcttctaagtgtacctgtaaaatgctccaatttcattccttaaccgaaattttaaacc

SEQ ID NO: 134510 - DNA, 352 bp, Arabidopsis thaliana columbia
  unsure (1)..(352): unsure at all n locations
ccccnccccnaaannttcngggggggnttttttttttccccnccaatncccggttttttttnccccccaacncggtgggaaaagggttgctttagggcaancctnaagtctcggtcccagccggagatctcagggacatccggtcttcccgnttaattacatatcnccctatatatcaaagaagaaccacttggcgtattcatgcttttgctgaacttcgttggtgtaacttttgagggaaatgttttgctaaagtgatcttgtagccaaaatctgttgaaatggtcttctcagcaaatgtaagccaatagtcaccagtttcttccggtcgtttattgataagtttagctcg

SEQ ID NO: 134511 - DNA, 411 bp, Arabidopsis thaliana columbia
  unsure (1)..(411): unsure at all n locations
anncgaaacccgnnntttaaccccnttccnaangggggggncccagggaaaaattttncccaaanggttcccttttaaagaaggtggnaaaaganttccccctngaaagantttcgccccgaagaagccagtctcggggactgctcattttacgctctgggatggattcaacagcagcaaatgtggagtcgccgtctttcttcagaactcttctcttcagatttttggtacacagagttttaaattncctgatgagatttgagttaatttccctaatatctgaaaaataaagaaaagaaaaccgatctttgtatcgtccatattttgcttgtgataatcattcgggttccactctgcttttgtacagttataaatgtgtgactacttataacttaatagggtttaaggttt

SEQ ID NO: 134512 - DNA, 481 bp, Arabidopsis thaliana columbia
  unsure (1)..(481): unsure at all n locations
tgggtctntntnaaccccntgcccccntttcggtcaagtccccgttctcccccttatgccccncttggncccccccccacaactgccntgataccaaccggctaggaaaggggttaccattgttgcctgtccgtatttgatattcaccaaagcccgttaccggaaccagccncggatcaggcttgctgttgatagccaatggggattgtattgaagatggttcccaatggatagtaaagctccggccaagattccggcgagaccagcggttaggatcgcaggaggcgatggtgatagagaagaggacgaagaaaggaagtcattggtttgagaatgtgccatgtatttatatatattttatctcacaaattcaaagggtttatagaataatgttggatgaaggagacacaaaatagagttaaagttgtgtcagagacttgttattagattctaaagtgaaattgcaaaagattgagctgtt

SEQ ID NO: 134513 - DNA, 429 bp, Arabidopsis thaliana columbia
  unsure (1)..(429): unsure at all n locations
aaacnaggggttttttccgncccccgggccaaggttccgatttnggnggaattccncggggnctnaaccggncagaaaaaaccccctggnnnnccccggnagntcccccggaccctaacgtcccncgcaatgacccnccttccgaatcattncatcccccagccttgaataaagattggtagatcctcgtacattttaatatactctttgatggtctggtaatgtttggagagttgattcttctaacaacaaaaagaatttgtctttttagttttcttgtacattcaagagttgttatgtatctgccgctcttgaatttgtctgactagggaatgattctttttcccttttattacaacatgaagaacagagagatatgtgttaaactttgacttatgtttttggattcatataaaccagttttcatat

SEQ ID NO: 134514 - DNA, 430 bp, Arabidopsis thaliana columbia
  unsure (1)..(430): unsure at all n locations
catttggccccccccttggnttggnnggnaaacccccttggggntgccttttagagaagtggttcccctnctnccngnagtggggtngnggnanaccctaccaactgtngccaaggggaagggncttgatcccnggaagctattngcacttaagtttaagccaacaggagaagcaacgaacccatccgccaaattgaagccattcttgatttagcccctcaacttgaagtggtaggcagttaactagaatatcaatctatacgccataataatttttttaagatagaccctagagttagattgattcaggcgtttttgtttagaaatgaatggagtctaaataataggttttggctaaaaattccaaatccaaatgttgctgactatctctctgctcatagtctccaccacaatcatctcttcctctttc

SEQ ID NO: 134515 - DNA, 457 bp, Arabidopsis thaliana columbia
  unsure (1)..(457): unsure at all n locations
cccntgggaattggntccccggggnctccccactnagnctngtgccaagcngaccccttctgccanagggttgatgctaccaacaggtacctggtgatgaccncnttatccncagtgctggtgaattggtatggaatataccccatagagttgttccncggataataaacatgncccaagtagattcatttggactgtgattggaggttctatcggcagtatatgcctctacgttggtgccatcgggtggtgcaagtacaagcgccttcttgaatgagtcgaccaacaacatattgggagaggagaataatgtcgcattgccacaaatctatttaagctaacaagacttttatgtatatcctttgttcttgaggatctttactactctcaaacctttttttatccgtctccttcactatttgcatttctttcgatttaataaaagagcaaattgcat

SEQ ID NO: 134516 - DNA, 470 bp, Arabidopsis thaliana columbia
  unsure (1)..(470): unsure at all n locations
acgggcggaatggncanacagnttctggggnaaatcccccgntaaaagngtggnngntaacctccaattccgncatatggcccctgtnngttaagaactttcccaagaagcttccangaagatccctaaggatggcttcccccaaagngcaagatccaggtaatctctggagaatcttagtttgtcatctacccgtgccttctttcttgacaacgagatggtcttctcttcctcctgaagaagcatatccatgggttgactctcctcctccccaaataatagatcccatgttagagtatggttctcctccagaagatgatgattcctggttgtactaggctttgatctaaactcaaagcaattcaaatatttcctctgtttctgtcgttgtagtttacttttgtactctggcttttgtcctttttgtaactgagagaatgttgaactttatggtgtgtttatttcccctt

SEQ ID NO: 134517 - DNA, 458 bp, Arabidopsis thaliana columbia
  unsure (1)..(458): unsure at all n locations
aaaccttttncccantggacacccatcggcgggccccccaattnggccnaggaccaccaaatggngcgcccnaaggccgggnacagaagctgcaggcnccatactactactggatggattaggncaactacccaagagaatataggncattgtccgaatcccagaagggtcttttgctccagaggaagttgatctatgagctcggaatattttacgcagccatctgttttccgagtgcataagcacagatgtttctttctggtcaagcttttaattgttgtttcatcagttttgcttctacattttctctctcacagcttttattaactgagcaataaaagtttaagaatctgtaacctttttttctttttggctttgtacttcctgagttgatgatttcaacatttactgtgatgttactactttggattttacaatctattgcctatttttacatt

SEQ ID NO: 134518 - DNA, 487 bp, Arabidopsis thaliana columbia
  unsure (1)..(487): unsure at all n locations
aaagncgncccctggggncnttgaaaccnaaaggntttntntcccccccncaagaaaanntccccccccttnaaccccnacctgggnattcctttttncccccaaagtaccgcccccaggttttcccccaaggagtacctgctgctgggccctggagaccanccggattctagcncnaaanccttcttccaggggaacgatggatcttcttggatcccgacctcgttcacaactgtactcagtgccgtactgttcgttttgttcttctctaagtgcgtaaaaaaaaaactgaatcttttttcaccagctagatttggctgtatgaaattgattaatggtttttattagggttaatctatgtatgttttggagtgttctgttttgagaccatatcggtttctctattactagcgtttactcttttagtttatgttattactttgtctcacaacattggtccttttattcgatctatcgcttattcctt

SEQ ID NO: 134519 - DNA, 452 bp, Arabidopsis thaliana columbia
  unsure (1)..(452): unsure at all n locations
tccccggcttggnggacctgggnaaggtcngngccgngggacgacngcntngattcagaagctgagtccctcatcgattggatctagcaaagaatttaaattcgacaccacgaaagacgagaatatcgagaaggttgcaggaaacagctggagtttcttcccggggttacgatctggagtcagctaaccaaattaaaatgacatctcttcttcttcttcctcattaccaaagacagagatataaaaccctataagtaacaaaccttgaacatggatcgtgaaaaaaggtaagagatttgggttctaacaacttatacacactgaataaataagcttaaagctttgatttgcagttaacttctgtactcatgtagttagaaactttggaatattcttggatcagctcctacatctaatcttgttacattgatataaattgtttatttcttgtt

SEQ ID NO: 134520 - DNA, 215 bp, Arabidopsis thaliana columbia
  unsure (1)..(215): unsure at all n locations
gcctgcaggccttntaccagttggaccctttaaacgngngtctgagaagtgataaggtgagagagagagagagaaagngacnctttactctgattcaaaaaatcagtttaagaagaagattgtaaaaagtttcaagaactggngatttcatgtccgttttttttccttccttctgattcttagatcgttgctggtgtaaccgngctttgttnttg

SEQ ID NO: 134521 - DNA, 438 bp, Arabidopsis thaliana columbia
  unsure (1)..(438): unsure at all n locations
ttaccagcnngtgnttccatacaggtgctcgacncggaactgttctngtgcggttgtancggtatggtggtttcataaccggcatgtatataaattatcacgtcggaccggactttggtacgattgaagaaagagacccggggaggttatgtgataccgagaggaggctggttcgagttggtaagctgtccgaattattttggagaggcgattgagtggttgggctgggctgttatgacttggtcttgggccggtattggattttttctgtacacgtgttccaatttgtttccgcgtgcacgtgcgagtcacaagtggtacattgccaagttcaaggaagagtatcccaagactcgtaaagctgttattccttttgtgtactgagaattgagaaagttgaaaactagtttatcatatgttatgtgtcaatttgtttcc

SEQ ID NO: 134522 - DNA, 377 bp, Arabidopsis thaliana columbia
  unsure (1)..(377): unsure at all n locations
ttngggaccttgccngtggnaaacccaccctggnaacctccaaggggntttttgntggnngntttaggaagggaggaggggggangttgagncaaccggnttggaaggtgattaaggcatttttggttcccaccaaggaagcnggaggaaaggattgttgcccggggatttaccatataacccgatccatgcttgtctccccgtacaaatctncnccagtcaaaatgcttttgtagctaaattttgtttaattacggctcttgtaaatgtaaagaagcaatgagattgagatttgcaatgagacatctttacgaaccttatggagtgtgctgtatagttttgtctgtttaaagattttttatttattttcatgaatc

SEQ ID NO: 134523 - DNA, 477 bp, Arabidopsis thaliana columbia
  unsure (1)..(477): unsure at all n locations
tttnggnaacccccggnccggaccggcnntggaccgttaacccggcnttccngattccccnaaaggggccaggaacccgttcttaccggcttgccntcattttnccntggncccccggcttaggaccncggggccgaacctggntaggaccgggaatttaatgggatttccgtgaagaacctcggagtcgtcatgtgtaacccctgtggagaccgggnaaattgcccaggnatttgncctttttaanccatggncccaaggtgagtagggatttgtttttgaacacggaagagttcattgatgcagtagcctccaagctcaaaacacagttcaaagagcttcctcttgtctgaccattcctgggaattgggaacaatacaaaaataatgctcgcaataattcataacccaacacaaaacaaaaataatattggcgggtttatatgaatattttggttggaaataaacgtttttgctt

SEQ ID NO: 134524 - DNA, 594 bp, Arabidopsis thaliana columbia
  unsure (1)..(594): unsure at all n locations
gggggnggcatccctcaccattaanggtgcgtccnccggggtggtaaatgncangccaagaactncncggggggacttcccccngggcaacctttggcaaatcttaagcggtcttcccccgnttgggccccccngtgatatgncacttgcttcaaccccatctcnccnggnattaagttccggattggtcagagacgtagcncctttctggccgcggttatacggactgcattaacatggaaggnccntggtgtctctgctcgtagtggtatgaaaagtattaaaggagcattgacaatgccattgatgattgaaggttacaagaaaggtgtcattaagtttggtatcatcacttgccagaagccactctaagtctaaagctatactaggagattcaataagactataagagtagtgtctcatgtgaaagcatgaaattccttaaaaacgtcaatgttaagcctatgcttcgttatttgttttagataagtatcatttcactcttgtctaaggtagtttctataaacaataaataccatgaattagctcatgttatctggtaaattctcggaagtgattgtcatggattaactc

SEQ ID NO: 134525 - DNA, 587 bp, Arabidopsis thaliana columbia
  unsure (1)..(587): unsure at all n locations
atcgaaccccggcggatatccccaaagttggncagtccactgcggagtcacggtggcgccgcgttcccncgngnggnttgtgaatgaccgtggttcnggnaacngtcccggntaaggaatcttcgncagggttcctgctaaggaccaggccccccggtgaggattggatgtcaaggctctagaagatggnttcggttcccgngcccccattttcnctccttcccaaaaccggatncagaaactcaagccgcagcatcangaatggatctccaaagcccttaactctgatcaatgaaaaaggtcatactcgtaaattatgttacatgatttggccaaaactctcccaacaaatctgatttactggattctgcaatttgtttgttcttgtggtcttgttgtcatcttaacccttttgtttattttatttatttgatctccctacaagtctgggttgctcttgttggcttatttgtttgtcactagctgttttaacctttgtaatcggaaaaaaggtcggtctgcgttttctctatttcgaattcagacaatttgtaaaccttttgattgagaagaacgatcttttacct

SEQ ID NO: 134526 - DNA, 602 bp, Arabidopsis thaliana columbia
  unsure (1)..(602): unsure at all n locations
tnaagcggcggcttgctacattctgggaccatcccccatcccccntggatcccaaaagnggtgccngncaaagttccaggaggcccaaaggccctntgcgctgcttgtagaagnggatnccatgggcgtgcaacaatggcatcaactntgcatnccagatctgctgatncctatcttcacagggttggcagagctggtagatttggacccaagggtcttgcaatccccatttgttgcatctgcttcagattccagaggttcttaacccaggtacaagagaggtttgaggttgatataaaggaacttccggagcagattgatacttcaacntacatgccttcttaaacaagtagcacgtccctcaggaaagaagctcttcagatttcaaccttgtaggtgttcgaagggtgatgggggttcacaactatctctcgctccgtttgttttagtgttttctatgacgacatttttttccatatgtttagaacgtctgttgtactctttaaaggagattcgagtcactctccaaatcgcacagttaaaagctgtccagttttttgtacaagagattattatgtttgaaatatcaggatttagtctcg

SEQ ID NO: 134527 - DNA, 246 bp, Arabidopsis thaliana columbia
  unsure (1)..(246): unsure at all n locations
ataaaaacaaaggtggttcttgttacntcaaaggagctgccatgatcactgagcttgaccccagccatggttcttgccagtatgagtataacccctgattcaaacgacacagcaaagacaagatacagcaagatgaaaagctatgattttgcatttatacgttttctctatgtaatgttttcatnccaaagcagtatccatgtactgttctcccatnacacnccagtctgagataaaaatttcntc

SEQ ID NO: 134528 - DNA, 386 bp, Arabidopsis thaliana columbia
  unsure (1)..(386): unsure at all n locations
agtagagccacatggtgaaggactttggaagcagatggaagacagcgattgagttgatggacaaagacatcataacttccttcagtaacttcttgtgtgggtatggatattttgagagctgcattgacacaactattgctctattacacaagactcacagactgcatcaagaagatagatnggtggatncngctctgaaataagggatcttggtctccaatccaatctatcatgtaacgagatcaaggaaataccgcccaagaacttttctggaaagattagccattatggtggggccccttnaatggaaggagtaatggtaaagntnaaagnccaaaatttttcccaaaagngggancncnaaagccccngntttttannggggc

SEQ ID NO: 134529 - DNA, 600 bp, Arabidopsis thaliana columbia
  unsure (1)..(600): unsure at all n locations
agggagagaaggagcttaagagagcattcgtcgtcgtcaatggagatcttctctgcgtctgcttctctaactttaactggattcgttcctcgtcttcttcccttgctctctcctcaagctcgaacnacttcctgcaagccgttgctgtcttcttcttctactagactcatttcttgtcacagtcgtatagctccgtctcggtctctcgcagatcaatccgcctctactgggatcagtgttgttgattcggatcccatagatgttgtaaagaggaaagctatggacatagcccctgaactcaaaggagcttccatatttctggttggaattaataactttattaaaacgaacacggggaagcttttggctgaggcattacgatattacaactttganagggntaatttgatcacagaggcggctggtggaatgtggctgccaagctttaaggaancgatgncaannctttcaagaacagagactgaagcntgaacagcancaccaangggcgggtnnagttccccggaatggnagccaaacttaaaacttgcctctanaccgggccnttgncngcccccggatcnnnaaggggnncnncgc

SEQ ID NO: 134530 - DNA, 580 bp, Arabidopsis thaliana columbia
  unsure (1)..(580): unsure at all n locations
ctccgattcgcagatcaattagctgggttttgattccgttgtgcgaaggactttaagaggttttgcagatcgaaatcggaagagaagaagaagatgtttctcactagaactgagtatgacagaggagtgaacactttttctccagaaggaaggctatttcaagtggaatatgccattgaagctatcaagcttggttctacngcaattggagtaaagacaaaagaaggagttgtgcttgctgtcgagaagcgtatcacgtcgccattgctggaaccgagcagtgtggagaagattatggaaattgatgaccatattggttgtgctatgagcgggttaattgctgacgccgcgcacacctttgttgaaccatgccaagaagttgaaacncaaaaccataaggtccccgaatggggaacccgttncctgtaagggccncaaanccaagcnctgtgngntcngggctttccggggtttggnaaagggnaggganaaccaattnnccgnccgtttgngaancccccccaattngggccctgntaaaagggccacctttaccacccgncncccggaaannttgggg

SEQ ID NO: 134531 - DNA, 550 bp, Arabidopsis thaliana columbia
  unsure (1)..(550): unsure at all n locations
gaagaagtctaagaagtgaagaggatatatagtgtgaagctatatcgatcatcagttcacggattagacttcttcttcggtacagctgcagttggagcaggtgtagcagcaggtgctggagcagctacaggcgcaacatctccaccgggacccttagctaaacgctcctctctcctagcatgcttcctttctcggctagccttgttcttcgccctcttagcctcaaactgatcagacagagtcttctccctagccttctcagcctttgacttgtggatacnctccatcaagacacgcttgttcttgaacacattacccttaacacgcatgtacatgtcatggtacatgtgcttgtcaatcttcttcgtctctctgtatttcttcaacagacgcctaagnacacgcatcctacgcatccacttctagatcgcgaacgggcgcntagaggtcaagnttacgancgggggatggncgnaaagcctnaaagngcccaaatcaatcnngggcgcgttaaaggcgnctggaaccnggggtccactaatgctggggt

SEQ ID NO: 134532 - DNA, 551 bp, Arabidopsis thaliana columbia
  unsure (1)..(551): unsure at all n locations
tgggacaaatacataatagtcctcctggaggtgggagtgccgagtttaatcctacgttgcttggatcatttggaattaaaagatttagtaaggcccgttgcttttcttgccaaaatggtgggtcgtccacgtcttgctgtagatctcgtgagcaaaggtctgttagatcctaatagaatgaaaaaattactcaaccaatcaagtccaagagaagtcatacttgatattttgatgatcatatctgatctatcgaggatggataaggctttttataaatacatcggcgaggcttctgttttacagcctttgaaagaatatcttanccatgtgggtccaaatatacgtgcaaaagcttgtagtgcccttggcaatatgtgcagacacaatgggtatttcnaacagcgntcntgcgggacatcagntcatcgggcccccattgatcgatgcggctgaccgggccaaccgccccagaatccccttgtttncanttggaatcgggttncaaaacgnccccggttaaggcaaaaggtnttanncnnnnaacgtttttc

SEQ ID NO: 134533 - DNA, 529 bp, Arabidopsis thaliana columbia
  unsure (1)..(529): unsure at all n locations
gtgacggatcacggaatggtttttcttggtttcgatnacgcagagcttcgctcgcggtgcgggattagctggtaaagcgtttgcaacnggtaacgcggtttgggtttccgggtcagatcaattatccgggtcgggttgtgaacaggctaagcaaggaggagtgtttgggatgcatactattgcgtgtatnccttcggcgaacggagttgtggaagtcgggtcaacggagccgatccgacagagttcggaccttattaacaaggttcgaattcttttcaatttcgacggcggacatggagatttatcgggtcttaattggaatccttgacccggatcaaggtgagaacnaccccgtctatggtggattaatgancccgattggaacacctggatctaaccgaaccgggtaacggagcnnccaagttcnagcncccagcnttttttcaaangccaatcangttttnaaacgggagccnaagnccaattaacgnaacccaattgggtcnaaccgncccggtttttcaaacna

SEQ ID NO: 134534 - DNA, 557 bp, Arabidopsis thaliana columbia
  unsure (1)..(557): unsure at all n locations
aatcagcgacggaaataaatggaaggtcaaggttgttgtggcggcggcggcggaaagacggagatgataccgacggaggaagctctgagaatagtattcggcgtctctaagcgtctgcctccggtaatcgtatcgctgtatgaagcacttgggaaagtgttggcggaagatattcgagctcctgatcctttacctccatatcctgcttccgtcaaggatgggtacgcagttgttgcttcagatggtcctggagaatatccggtgattactgaatcaagagctgggaatgatggtttgggtgtgactgttactcctggaactgtggcttatgtgacaactgatggacctatacctgatggtgcggaccatttgtccaagttgaggnccctnaagtaattggagncgtctcaactgaatcaaaaagnggtaaaattcctgattnaaaccaaggaaaggncccntnaccgtanagtgggtttgatnttgagaaagatnaactgtncnacactgggnaanattgnncccaaaaanggctgtncaacccgngtacccngnat

SEQ ID NO: 134535 - DNA, 484 bp, Arabidopsis thaliana columbia
  unsure (1)..(484): unsure at all n locations
caactctctcattctcactaacagagagaaaaagcaaaagcaaaaatggctcgatctttcgctattgctgtgatctgtatcgtcctcatcgccggcgttactggtcaagctccgacttcaccaccaaccgctacaccagctccaccaactccaacaactcctccaccagcagcaactcctcctcctgtctcagcancaccaacaagtcacaacatcttcttcctcaagtcaaccaatggtccttccttcagcaaattcaaccaacaacaagtcttcttctcctcctcctggttnttccttcaacaaggtaattccttcttcaagttggnttttcttccttccttcccngtgggttttccttcaacaaggaaattcttccttccnggggggnaaattcttncccaagnttctttaagggttcccnncngggnnaaaggttcaaggtnanggacngggcccgngggnaaagtttncaattccaatt

SEQ ID NO: 134536 - DNA, 565 bp, Arabidopsis thaliana columbia
  unsure (1)..(565): unsure at all n locations
tttgttatcacccaaaaagaagttcaaacacaatggctttcgctttgaggttcttcacatgccttgttttaacggtgtgcatagttgcatcagtcgatgctgcaatctcatgtggcacagtggcaggtagcttggctccatgtgcaacctatctatcaaaaggtgggttggtgccaccttcatgttgtgcaggagtcaaaactttgaacagtatggctaaaaccacaccagaccgccaacaagcttgcagatgcattcagtccactgcgaagagcatttctggtctcaacccaagtccagcctctggccttcctggaaagtgcggtgttagcattccatatccaatctccatgagcactaaactgcaacaacatcaagtgnaatgggagcttacgtcggcgttttggcgttaagagtatgggttaccagnagtactagnattaaatacgggtatatatcttngntggtatttccatggatttggttttgcccangggttggccnatttcaaacanangtggatggtgnnnaaacntggaangnccttttgcnaaaaaaaaaggtc

SEQ ID NO: 134537 - DNA, 411 bp, Arabidopsis thaliana columbia
  unsure (1)..(411): unsure at all n locations
atatcagacgattggtgaggctttagcggaagtggaggagaagaatgagaaacctacgattatatatgtgaagaaaggagtttatttagagaatgttagggttgagaagacgaaatggaatgttgtgatggttggagatggacaaagtaagactatcgtctcngctggactcaacttcatcgatggaacccccactttcgaaaccgccacatttgctgtgtttggaaaggggttcatngctagggacatgggcttcattaacacagctggtccagctaagcatcaagccgtagctctaatggtaagcgcagacttatctgnggttccaacaagtggcnccatgggncggctttccaananncaattgnnccncccntgggaaaacggccatttttnccgggntttnngtta

SEQ ID NO: 134538 - DNA, 561 bp, Arabidopsis thaliana columbia
  unsure (1)..(561): unsure at all n locations
catcatcatctcttggtgacagaagaaaagagttgaggaacagagaaaatggcagcacaagcacttgtgtcttcttcacttacctcctctgttcagacagctagacagatatttggctcaaaaccagttgcgtctgcctcacagaagaagagttcctttgttgttaaagctgctgcaactccacctgtcaagcaaggagccaacagaccattgtggtttgcttcatcgcagagtctctcttacttggatggcagcttacctggtgactatggattcgaccctcttggtctttcagacccagaaggtactggaggattcattgagccaagatggctaagcatacggagagatcatcaacggacggttcgncatgttggggtgcagctggagntattgctcctgagaatttaggaaaggctgggctgattccagcanagactgttccctnggtcaaancggtgtnatccacagcagggcatncnctactgggaganattnancccttgtcnnaatggccgntggatcctnanctggggnagatgnnaccnggttntggaanag

SEQ ID NO: 134539 - DNA, 493 bp, Arabidopsis thaliana columbia
  unsure (1)..(493): unsure at all n locations
gatcggtggattgaaatcgacgttttcgttgaacccggcttgttcaacgattctgatacttaggcttgatctagaaagcttggagtgggaagaagcaggtagaatgccgttagagatgtaccgaggttttcaagaatcgagtaagtttaaagtttttggaggtggagatagggtttacttctctgctaaaaggatggggaagcttgcaatgtgggattgttggcaaggttggagatggattgagggcgtccctggttatgcagatggattgtgtcgaggttttgtgtttgatgctaagcttacattgatgccatgacaacagaaaaaaaggtccgtttgtgtncgttgcgcattattatcccatagaaggaaggaacngnanccccccgttaangntaattaccggatttcccgaattnnattgaanaagannccnccccctggnggaacggccnaaacggggnaccncggtccccagggcctngggnngtcc

SEQ ID NO: 134540 - DNA, 443 bp, Arabidopsis thaliana columbia
  unsure (1)..(443): unsure at all n locations
cgagctcactagtgagctctnctancngacgttccggccagagggacatgagaaagaaagccagncgaagataaagcgatacatgacaatgatggactctatgactaatgaagaactggacagctcaaatccaaaggtgtttaacgagtcaaggataatgcggatagccagagggtcagggaggattgtaacagaagtgatggagatgttggaagagtacaagaggctaacaacgatgtggggcaaggtgaaagggcttaagaacctagagaaaggnaatatngagcgcactctcaagaaacaagaactccgcagcaattgaataaggtcctaccgggtcaaatgctaaagcanatttggcggcttaantggtctccagnttcnccttnaacccaattgggttccggtnaaanccntttnggatttttcggtngcccaacnga

SEQ ID NO: 134541 - DNA, 258 bp, Arabidopsis thaliana columbia
  unsure (1)..(258): unsure at all n locations
gtgatctatgaatgaatcagagtggcgagctactgcttggatttctctgtatttgnaacttntactttntgcacatgataagttcatcactaatactgatctgtcccggttgagtattgaganagtggcganagaaactagtattggagatgcgctgttgtatgaaagactcgaggccaaaagtgcaaatgtctacatanggnttaaacgcttggaaaagcctcgngtccctcaacaggtntntgtcactggtatgga

SEQ ID NO: 134542 - DNA, 417 bp, Arabidopsis thaliana columbia
  unsure (1)..(417): unsure at all n locations
accagaagcagagaaacagctctggaagatgaaacttgcagggagagaacctgaagctgacctccacgacattgttatggcgatctgcgcttcacagaaagaggttaatgcagtttctcggctactgacacgagttgagttcatgggatctcagagaaagaagaagactctgtcatggttgctcagagggtatgtgaaaggagggcacttcgaagaggctgcagagacattggtatcgatgatcgactctgggttgcatccggagtatattgatcgagtggctgtgatgcaaggaatgacaaggagatccaacggccgaaaatgttgaagcctatatgnngctgtgcaaaaggcctttaaccctggtttggaaggcccttcncttgnnaannngcccnngnaaaataaaagtnggna

SEQ ID NO: 134543 - DNA, 500 bp, Arabidopsis thaliana columbia
  unsure (1)..(500): unsure at all n locations
antggtnnccctccncacgtccatcatggatccgngaagccgtttgtccctaaccgctttggtttccccatgncgcatcagtttggggccaggtgattgggtcaagancagagagccggagactcaagtctgtagctgagaagaagttgccattggaggtcccaaatccgtcttctgttgaagcagatcagatgcaatttgccggagtttcatcagatggaagatgcggtgataaagtggtgatgaagtggaatcccatgatgcttgatgttgcaagccctgtgtcttccggagcagctactgttgtctgctaaaaggattttgtaattctcttcgagganttatatatataattgtttttcttgtatttttttcggctgattgtatttaaaaagtttcttaatgtttgagaaaaacaagaataaagccattttttaaactgttaattgtattttaatgtaaaagacttgtttgattgaataaaaggaaagagaagttgg

SEQ ID NO: 134544 - DNA, 480 bp, Arabidopsis thaliana columbia
  unsure (1)..(480): unsure at all n locations
atttcacagtgtcnnccgagngccccaggtctgtgtttccggantatggntcatgcggttcgttncccccgtcnccttcctagctggggtctatcncagctggctttcggggatcattcattgcatacctggngtgcccccaatggggagggctaaagggaggacaagtaatggagcaagcgagtcccgtatttgcaaggatcgagctgaatccagagaaagaagaagatgagaagangccaaaggttggtaagaaaactggcaaagccaaggtcaaagtagtagagcaaactcctacagtagctgaagcttaaaaccaactccacaaaatcctgaaaaactgattacagcattcctctgatctcttcaattttatgaaatactgtaaatttatggntgttatgtaaacttgagaagctcttcatagttttgagggattataaaatttatcttcttatggtaaattctttttaacacatc

SEQ ID NO: 134545 - DNA, 469 bp, Arabidopsis thaliana columbia
  unsure (1)..(469): unsure at all n locations
cnngnngtncngaacctaanccntggggcctgaangggatttgggttttngggccannggtgaaaacccnncaggacctctgaagaaattggggaaccnctttggtgcccatcttcagggctaaaccatggtggntnaccacctttccacagataccgtttaccgggaccagaaccggatttcttacccgtattaaccgagccctttgagtcgagctgaggagcctttcattgttagacaggtgaggagattagagttggcccttgttgaaacgttggttgagaaaaggtttgaagcctgtggatcatagtttggtatcagatataacncagttttgttaaagttccatcagatttgtaagaaggattctcattttgctattgcaacaacaactttgttccttgttttttttttgtaattgaaattttgagtttgggttttggccaaatgcatcatgataaaaaatgcc

SEQ ID NO: 134546 - DNA, 511 bp, Arabidopsis thaliana columbia
  unsure (1)..(511): unsure at all n locations
tccccggacncttncctttccccacttatcgcccttggaactgtccctcggtccgncggatcccggcgcccacctccctggctancctgggcctgaccntgcacaatgtccgntnttgccacccgacagcggctcgngnttattgctctggtgagtatttcaccgcttagancntgagctcaagttgggcaactcgacatcgtgacccancgtaggtttgagttattttgtaccanccaaatgaagaaaatggaaagncctcaaaaaatgaagaatgagtgcatctgaaaacagaggactactctgaataaatagaggggttgctgctgatatttatttttactctgcggcggaattagaaaatttgaaaaacatcatgtattgataagttgtaaatatcagaaaaaggtgggggtgcaaaaatttgtactttttagcttttgaaagaggcaagtttttcgaatgtttgtttgatttgtaaacaatttcagaattatataaacttggttcc

SEQ ID NO: 134547 - DNA, 521 bp, Arabidopsis thaliana columbia
  unsure (1)..(521): unsure at all n locations
ccccgcggttttaagccttcgcattttttactcgcccacgcangcacgtantcanaccgngttctcccttgncgaaagcttcnggcaaacaagggcngttatgacccnctggtaagtcccggaccaaaccaacttgatccggttacattaatgcggcagcattcaaaccggggaccggttaagttcagggagcgttgggagcgcggtactagacgacgacgcacctcaactactagacagctgtgactcttacttcccaagcatcgtacccatccaagacaacagcaacgccagtgatcatgacaatgaccggagctgtttcgccgacgtctttgtgcccaccacttcaccgtcgcacgatcatcacggtgaatcattggctttctggggatggccttagaaaaccactctgataataaatgtgtgtttatttaagttcaagagtcatcttcttgttgtttccatgttgacgataattgttgactcgtggaataattccgctgttcaacggtatttttatc

SEQ ID NO: 134548 - DNA, 499 bp, Arabidopsis thaliana columbia
  unsure (1)..(499): unsure at all n locations
aaagcnggtccgttcttcaacccccgttcctcccttacccntacaancgnncatntggggtaccctntaaaaccatnccgnccncgggacaatgnctttcctcatcccggaccgaaagancccggttttagactgaccaggtngtcccgnggagttccagatcttccaaccacttgttcacagggggtnttcganccgctggttaagcttcttgaagaaaggaacgaccggtgcgttgaagcgagtttgtcagtattgtacaacttaagcatggacagtgagaaccacacagccatcataagagcaggagctgtaccagtattgagacgtatcgttatgtctcgacgaccacaatgggagaacgctcttcggttactcagaaatttacccgtttaagacatttttacagattattgtcatgtaaaattttggaatcaattagaataatataatgtatgatttgtcatgtgagacgaatatacgaaaagttaattacatt

SEQ ID NO: 134549 - DNA, 499 bp, Arabidopsis thaliana columbia
  unsure (1)..(499): unsure at all n locations
ggccnnggccgnaaatntcttgnnccgggggctgggnttattcgggccncctacccttttnaagggtttttatgggcnccccganccgttagcttgggnaatntcccnccacttggcagtgtcttgccgnccatcatggctaccagtcctgactttgcactcaaagctttncncggaganggtgccactgtagttctggagggncagaaggtattccctgtaagagcccaaagagcttggttttgaattcaagtataaatacgtgaaggatgcactcagagccattatgcaataaggtgacacacatgagcatctttgtaaaattgggtttgatcacagaaaatcaagatatccttttcttttcgtttctatatctttctttttgagtaaaactcgagatatgtatttatggtaaaaagtgttttcggtgatatctcagaaaccagagatcacagatgtgttgaggatattataactcagacatagcatctttctcatc

SEQ ID NO: 134550 - DNA, 523 bp, Arabidopsis thaliana columbia
  unsure (1)..(523): unsure at all n locations
ggtcctcccacatncntgnctccctttcacctatgagngacncnttgtacctaacgngcaaagttccaaatccatcgtgcaagtcatncnaaccgcncgtgccaatccggnnccagggatgggaatggcttcccaagcattgtantntcnctcaaggncagcttctatggccaaggcggaggctctggttggagttttccagagccnccgagaggagttgcntcaagtacaatgtcatttgnccttaggaactcccaagaatcgtgattggttcaacaaccctcgggggattagggtttaggtaagtataagaaccctaactttgtaagtatagcaagtactgaatgatgtttgattgttaggtttgtaatttttgtgtcacaatgttaaaaggtatttcacagtggtaaggtgctttatttgcgatttgatttggcataggaccttataagttctgacactgtagagaacctatggaaccttttcttatgtgatactataagaaactcgtgattttagctgc

SEQ ID NO: 134551 - DNA, 528 bp, Arabidopsis thaliana columbia
  unsure (1)..(528): unsure at all n locations
taatccccncgnngtgccgacgcgtcattccaatcctgggatgattgcnccccgtcnctcggtaggccatactggcgtaccggtccgntcaanccccggctcagggntttcnggtgaggaattcttanttggcncgatntcgatgggtncaggtcgatcttccncttctgattcaatctacttcaaagtggctttatcaataaggaagcttgatattgnccagttttaagactatacattcttgtcacgataatggtgtctctggctcttgtggagattcatggaagagttttctcgagaaagggcaaggaatgatggatgaagcggaaatgttaatcaccgagtaaaacactcttggcagtcacagganctgcgacaacacgcagatagagttgagtctctaagtcatgtttgtacatatacatacaataactagacaagtcttttctgtaagacttggtatgaaatgtcgatatatccattatgtacgtcttgttaaaactggtttccacgaaaatgttgtatctc

SEQ ID NO: 134552 - DNA, 507 bp, Arabidopsis thaliana columbia
  unsure (1)..(507): unsure at all n locations
tncattgcaacagtgngnttcccttcgcggaacccccggtntgccccgatntttgcaaggccaggtcaagggaagccncccgggttgccccagngagctgngataatgggccatncggcgcccatcactgccttctcccagccaatgtaagctgagtacttactactatgtctccaagggctcaaaaacttctcttagcctctgccaaaggatctatgaaccggcgacaaatcttttacttcttcccaaggacataactcacaagtcaaccagaaccgactggaaacggtgaaggctcaggcaaaagagagtgtcatctactcatcttacatggtcgaattcaattacttagtgtgtttcctctncattttggtttggtttggtgagtttagagagtgtttggtcagtgttcatgtctagtctattacatcattttcatatcttgcttcaatttactctgatatgtttgaagacacaaaatagttgaagtaaatagttaatctctgt

SEQ ID NO: 134553 - DNA, 522 bp, Arabidopsis thaliana columbia
  unsure (1)..(522): unsure at all n locations
ttttnttggttacccaatcatggnacnttgcccacgtgtaaggtnaccccgtgacgcgaaccatcgnggtcnacaacactctcttctccttctcttctttcctcccactccaacatcatccaccgcatccttacccacaaccactcttgggctccccgtgcgatggccagatncccttatgctggtcacatgatggctcaaccgactccttacgttgaacaccagaaagccgtcacgattcgtaacgacgttaatctcaagaaggagtctcttaggcttgaacccgacccggataatccgggtcgctttctcgtctcctttacgtttgatgcaaccgtctccggaaggattagtgtcattttctttgctaaagaatccgaagattgcaaactcacagcgacaaaggaagatatactgccacctatcactctagatttcgagaaaggacttggtcagaagtttaaacaatcatctggttctggtatagacttttcggtctttgaggacgttgagctgttcaaa

SEQ ID NO: 134554 - DNA, 422 bp, Arabidopsis thaliana columbia
  unsure (1)..(422): unsure at all n locations
taaccccgaaccccccccntngggctngggnaaggnccaanccccccccggaggggaagcctcccccgnggtccccnacgggtcatcatcatcatcatccnctggccaagtnccggntcccccncgngtatacccccttccctctcttttattncttatnggaacgcattcatttggtctactcccgcgaattagactctttttatgttcttggttactggcatgaacatttccctgccttacagaagaagaaaaaagtttcataatttgatggagatttgatttttagaaaaactggaaatggtgtgattgtggatttgctttgatggatnccatgatttgtaatcaatgttttatagtatgtaatgtaaagaagagagtactttgtctttgaattgtcaatgatcatttgagatttgcat

SEQ ID NO: 134555 - DNA, 515 bp, Arabidopsis thaliana columbia
  unsure (1)..(515): unsure at all n locations
aaccncagcctcttcccgggggntttcccnnaagtttccntccgggagaccccggggggaggtccaccnacanccngaccaagntttcccaanggcncttgtcttaacttcncggcccagttaacccccgttgttgacccaggggngnagaganncncaggattcttggaancggattagatgcntcaaagctaatgagtagaggaagaacaggttttaaaccatacaaaagatgttccatggaagccaaagaaagtagaatcctcaacaacaatcctatcattcatgtggaacagaaagatcccaaacggatgcggttggaaactcaagcttccacatgagactctattttcatctgatctgttgtttgtactctgtttttaagttttcaagaccactgctacattttctttttcttttgaggcctttgtatttgtttccttgtccatagtcttcctgtaacatttgactctgtattattcaacaaatcataaactgtttaatctttttttttc

SEQ ID NO: 134556 - DNA, 510 bp, Arabidopsis thaliana columbia
  unsure (1)..(510): unsure at all n locations
acccccaaccgngagttcttgtgncccggactggnctgcttgcaggctgaaatggactncatccggnttggnggccaagnccngatcttgggaagtttgcagggntcatcgttttgcggaattcccccccaccattntggccaggcccttgaattcagttnggttaacccccacaaagatatgttacggtagctcccaatgcctcagaatattccagacagggtacaatgtctctcgctctaacccaatgatgaatccccatagaattcagtttttggccaatcttccccattcattgctttcatataatctcttgccccaaatctttcattttttttttgggtgggcacgagttagttggtcggaaccctgagatcagtgaaggcctccatttgttgaaaagccggagattttcctctaaatatgtagcattatcgtatgcatcaccataacattgtaagttaaacccatctgtaaacagtactttagtaaagaaaagttgtttagtac

SEQ ID NO: 134557 - DNA, 465 bp, Arabidopsis thaliana columbia
  unsure (1)..(465): unsure at all n locations
aggttcgttacggntcccccgtngnaacgncccttccgggaaaccctaatggaggttncgaancggcccccntcctttttgggcacatcttcnccgngaacccncactatgttggatggggccttcatcgncccgtggaatnacgatttcgttctctaacgactctgcttgagaaggaagacacgtggcgagatctatcgacttcacggcgnaaagtccaccgtcgattttactcaaagctttgcttactgtaccaaaacaacctcttccaacacaagaaccncgaatccaagaagacgaagaagaagaagtgtttgagataatgttctgtttctccatgttttttttttgttgctgcttaactaacttttcgtgtgtaaatttctaaggacncacgacgatatttatacgtgtgatgaagtgtcaaatgtgnnctngaaataaagttggaattttaattttatt

SEQ ID NO: 134558 - DNA, 511 bp, Arabidopsis thaliana columbia
  unsure (1)..(511): unsure at all n locations
ancccntttttnaangatgntccccccggtttcnccggattcccggngntcccnngagccccnaatacccccccntgaaaggggaanaaanangggtttnaagaagggnngtgganaaattgggccttagagagttaancgatggtggtgacccctgccccctggtaggattcttcataggaaccaacatcaacatcggtccctcaagggtctaagttccctaagagcgtcttggtagggagaggtcacattgttcgggaagatttcagatgtgtgaacaactcgcgacaacaaaacataaggtgctggtgggtctacgggttctattccgttttatttaaaccgggaaatccatgggtgaatctgttttctttaagaaattcatctgaagttgtttctgaaccaaatttacaatacatgttaatgaagagagaaaagattacaatgcatggtcatcgaactcggaagctttcaagtttccccatgtttgtttattttgtgttcttaaatc

SEQ ID NO: 134559 - DNA, 526 bp, Arabidopsis thaliana columbia
  unsure (1)..(526): unsure at all n locations
tttccccgcctntttntggatttggcgttacattncccccggaccntttnnccttnttccccaacnntnattcgcncctttgggaagctnttccccttcagttccgtccggattcccgntcaccccaacngtccgttccattngcagttgtcgtcttcaggttagaattaagcttcgtgagagaagccattgccgaagaggttcacccactttgaccaggagaagtgagaggggaagggacagaagcgagttaccttctcagggtagactccgagatagaattaagggtaggttagaggaaaaccatagtggtaatcaggaaagaggtttcggggctccatgggcgagaagaagagaaatggaagacgaaagaaaatcagctcctaaaagcagcagagaggaaagtaagccagagccatctcttgggaagaggaaaagctttgaagaggatcatcatagtcataagcgatcaagggattcatttgcagctccattgcctttcagtgagattctcaagagaaaaaaa

SEQ ID NO: 134560 - DNA, 539 bp, Arabidopsis thaliana columbia
  unsure (1)..(539): unsure at all n locations
aaatntaccaggnagcnccnattttccaggttcccccattctggacctggaaggntgaattggttccattnnccgagctggngngttcctctggngcctccccccttccgctttggtggcccatggatgttccaactgtcccaaggctggngaaagcttcccattaaatgctaccaagtgtcccaaaagttgaagaatttccaaatacgtacgtatcctcccagaacagggaaatgagcttgaatgggaggacgaagataccaaaaatcgattcttgccttcaatcaaaccgtactagtacgtcgtcgactaaagatccattactcaggaatgggattcctcactgtccaaaatcagaatcaacgcttcttcttcttctattgttttatctatcttcttgtagtgcatttggattgtataattgatttgcattctgacacttctggaatgtgttgtgttgttcacttggattatgtttttcattttccttttgtattccctaaaacgttttgcatccttttcagactacatttttacac

SEQ ID NO: 134561 - DNA, 519 bp, Arabidopsis thaliana columbia
  unsure (1)..(519): unsure at all n locations
cccnttgcttcccntcagnccagcccctgagaancccaggggagctgtttttntaancccacttttggcccncnaacttggccagnggannctggataaacccggncgcagccctcatcgatgtgggnattaacccctgtgggganccaaaggnntcccgtggataccgatngnttggagacatttgttacgggggaggctagcaaagttgcatcagccatcacaccntgttcctggcggtgtaggnccaatggaccatagccatgcttctatccaacactttaacatcagctaagaggattcacaacttccagtgacgtcacttaaaaagaagattgctggccttttgggaaacaaacaaatcgtactctgttttttgaagccaatgatttactttggtctttaaagaaagttatcgttttgttctatgaaacaaaacatgtagtttttaagtcacataaattgtcttcaacattgtttgtctcttcttggtattttgagtcagaactagttttaact

SEQ ID NO: 134562 - DNA, 510 bp, Arabidopsis thaliana columbia
  unsure (1)..(510): unsure at all n locations
agactncctngtcggcggtcggncccngcgacctgcccgntgtgcgantgtnccgatgaggttggaatgctcatgtgcngttgctttcagntncgcagcattcatggcccacatggacagttgtcncgngctaaaaggatccagatgnggagcaaaaatgtccacctacgactacagagaggggccattaattccacacccttcgccaccagattggggtgaggctgcactattaaaaaatatgaaattcccacgttcaccagtctctgtgactgaccaatggacaagtaaatcaaccacaccgaataccagcgcctacgaattctaggatccaccaggtattggtttcttctcatttgtttcaatggaacgatataagatgaggcacagggttgtgaagcagtaggtaccgagagaatgtacatagtgacataacttgaactaccaatcaccaattttctatgtctaattttgtctactgtatgtaagattgaatcaaaaggtatttat

SEQ ID NO: 134563 - DNA, 417 bp, Arabidopsis thaliana columbia
  unsure (1)..(417): unsure at all n locations
ccgnnggaaattaagggngncccccgggnaatttttttttgtccggacccccnnacgttagattcccaaaggccgattgatttccacccgcaaggattccaggagcccggacnnnaaattggaggaagatganctctgtgaaangnggggagntcccaatttaggacccggaccccggacttcatgaatccggatcttcaacgggttataggccccagccccaagcgtatagaggctattncttttagattntggatttttggattactactgtgttggttttttttaccttacttttgtttagactttcttatacgtaattttgtggtgtatacaattcctagtatccgtttttacagtttttagcccatcttgggatgaaccaaaaaaaatctctatacaactagtttttcttgt

SEQ ID NO: 134564 - DNA, 551 bp, Arabidopsis thaliana columbia
  unsure (1)..(551): unsure at all n locations
anccccacacccatttcgtgggccctggccccnactcgncanttcngtccttcggntttgccaatcgatttccagagagntccagcccccttgctntacaagccgataacccctgcncccccaaggngtttccggaancaaatggngaagaaattgngaaactgnggcttccagggagtgcagtctctactgctgatatagcgaatgacttcnccattggaattgagggagaagtgttctccttcacgcattgctccaacaaagtcactgtcgctgaggcatctggacttaccggagaaaccatccagattgaagacttcattcgagaatacatcaagccatgagctccaacatgccttcatagattgaatctaccacaagtttcttatgctttgggctgtgactttgatttgagtttagagatccttttgtatatgagatctttggatgatttagggtgttcaaaactgagtagctgtattttcgagttagataatctgttttaaatcggaatgattttaaggaaatgttaaatgacttaattctcttgc

SEQ ID NO: 134565 - DNA, 561 bp, Arabidopsis thaliana columbia
  unsure (1)..(561): unsure at all n locations
aaaangntccaacnggttcgatcccggttaccccggtcgccatcggnnccaaaagtttttnccaacccccgcccgcttaaanccaacccggtaaatctttccggttancaccnttgcgacgaaaacccgaagattttaaccgncggatgantttncccggagagantcntcggagaagaggagagaaccttttgaggcatgtgttgtggtcgaatggnccggagacggagaccccgacggtggggaataaacaatgcnccggtaaggattttgttgttttggtggcgaggttgtttgtgattgagattttccggcgatatgattcgtttgatattgaggttggtacgtcnccgttaggaagctccgttaatttctcgtcgttaaggaaagctagcttttaggagccaagggtaaatttgtaattgtttatgttcgcacgtgtgtagtccatctgttttcttgttccagtttcgtgaattttgagaaaatgttgtataatctgttgctgctctacatgttcgtttttttgtcataatattaaagttcaagctggtaataagt

SEQ ID NO: 134566 - DNA, 568 bp, Arabidopsis thaliana columbia
  unsure (1)..(568): unsure at all n locations
gattccaagcctngtaagcanccngctctttagccgccngggnncaatcctggggatgttccccnnttnncagcttggtncaagttgatttgacctgggttngccattagggngacccaaagggcctccaccaccaccggcaaaggccaaacccaccaccaccaccaccacgttctcaaaaacccaatgcagccncntactgnggatgttcttgcaacttccgcttgacgtatctcacccccccatccaaaggctaaccacttgggaactcctcaattttttggtatctaaacatatgagggagtattacttttcagagtagccaactcaaaggattggtccataaacttttttttttntctttttcttttgatagtttttgcaatagagattggagagtagatattagtgggactcgtcccgtgatgaaagttagagcatccaaaaagctcaagttcctaaattccattgaattttttgttttcttaatatgtagaattttcattcttatcaaaagaaaaacaaatgtagaatttcctttcattagatccaataatatttgaacggc

SEQ ID NO: 134567 - DNA, 534 bp, Arabidopsis thaliana columbia
  unsure (1)..(534): unsure at all n locations
aaggctttcccnggntgggggccccccgngccggncnttnttgtttcctaagggccatnccaggcccngccaatttccgggnacctttggccccaagcccagnaggaggttaaccccntgncnttggggggggtccaaacccntttgccaaagggtttntgggaggccttaggnttttntcctaaggccccatgaagggctggaggtaaaccccagngtgattttcccnccatcgttaggatttgggtttagncggtcctgaattggaancgggtttgcagattccccccctaatgctccgtgggaatatatagttgagattgatagagtctcaattgcaccagctttgagttgttgtacgtacagctttggtttcattcccaaatccttcaaatatttggttgtataagtatgagtggaaaacaaagtgtaaatttttgtttcttttggggtcgatgtgattgaaccgagataaaccggatcaaaatcttcggtttgatttatttatttatttaaatagatataaaattacgt

SEQ ID NO: 134568 - DNA, 417 bp, Arabidopsis thaliana columbia
  unsure (1)..(417): unsure at all n locations
ttttnttttaaccacggctttcattannncgtcgcctcttttccgccgccaaattgantgntttgttanatcgncggagaagggnaaggggaaaccgaggccggttaggaggacggtttaggntgggaccgaatcggccncatggggaaattggttttggggaaccngngcattgagngaaganggnaaacgaagatcgtatcttcccgtataaccatgtgggttcttcactaatgttaatggtttaaccagaaatgttcatccctattgattaaaccgatctgtcgtaccaaaatctctaccgacaaatctttgccttttgtatatatctaaccttttttttggtttctgtgtattataaaaccttctttttgtaagtaaaagtgaaactttacttattaacttttcgtttgtatc

SEQ ID NO: 134569 - DNA, 531 bp, Arabidopsis thaliana columbia
  unsure (1)..(531): unsure at all n locations
tnttcgnnancttcctccnatttaangancccgatttccccgtgatctttccgtaaaaggaaaacganccttttcgcgcgttncncgcgaggaaancttntngggatgagccaaagccntggggaanttccgcggagattagagccccgccaagaacggagctaggtttggttaggnncntttgagncgccggaggacncggcgtttggcttacgacagagctgctttcaggatgcgtggttcccgcgctttgttgaatttnccgttgagagttaattcaggagaacccgacccggttcggattaagtccaagagatcttcttttccttcttctaacgagaacggagctccgaagaagaggagaacggtggccgccggtggtggaatggataaggggttgacggtgaagtgcgaggttgttgaagtggcacgtggcgatcatttattggttttataattttgatttttctttgttggattatatgattcttcaaaaaagaagaacgttaataaaaaaattcgtttattatt

SEQ ID NO: 134570 - DNA, 444 bp, Arabidopsis thaliana columbia
  unsure (1)..(444): unsure at all n locations
ggaaaccctnccccctncgntngatcccccncgganaaanccccnngcgttggcccgtttccaattgggccttttcnaaaagcttgggacnctgccccntaggncntttgcagngacccgtgggattacagccccattgngaccactttctgcggttaaatctcagcaaattaaggagaatatccccttctatggaatagattgcaatgacgtgggaaacagcagcagattttgcttantacgcaagtcgttaagatgattctaaagatcgacgatgtcatctccaattctgaatactgatgtgttgctaccattgtactaccctttggcttcttgggtgttttttgtttgctttctattagcttttgatactcttcgacatcgttttccttaacttgttcccttcgttttgcaaccttttctataagaacatcgtcaggtctt

SEQ ID NO: 134571 - DNA, 450 bp, Arabidopsis thaliana columbia
  unsure (1)..(450): unsure at all n locations
tgtggggcattcnccatgaaagccaagggcntgtaaatgatgtatgcgagncagtctcaggcctgcaaaatggaaaggncncggaaaccncagaagaagagctctatttcggaatcagtacagggaaaggtctgacaaagttcaagtgcaagagcaaggctgataagcagacatgggtggatagcatccggaatcttctccatcgagtaactgctgttgaggtcgacacttctcttgaaactataaacattaacgatagcacataaatcatgatgtcttgtgttaacggtgttagtgttggttattttcattacaagccaatgatatgtattgtttcaagaacatatacatatctgcaagtaggtgtagtgtttttcatcttcgtcacttgtttttatttcagtcaaattgtaaacattgttttgtggaaataatgaagaagattataat

SEQ ID NO: 134572 - DNA, 510 bp, Arabidopsis thaliana columbia
  unsure (1)..(510): unsure at all n locations
angcagngaggttcanaccgttacccnttcnccggccccnaccggggtgtggactgtcanccctgnggacttcggccaaanccccatgctcgntgntgtgatcaaccctccagatccncggnactactactcagtacaggcntacagtgttggtgatccagtctgattaacccaatttatgctagaggcggnttcaacagcgtcatcaggaaggacattttgcngtggatggtgcagaagagataaagccgccaaaattcatcaaaggcccttctgtttcttagattacaacatactcagaaggaaacacttgtctcaaccgtatcactttgtatgagtttttaataaccggtggattgataggaaaatctcctggacaactaaaaattgtgactagtattacttacttgactaacacgtctatctgttcttcttcttcttctaattacaaccaggaatgtcttctgagagattttgggttctataatcaataacaaaacaatcaggttt

SEQ ID NO: 134573 - DNA, 491 bp, Arabidopsis thaliana columbia
  unsure (1)..(491): unsure at all n locations
aaaacccaatnttgntcaaccggtggctttccataatgatcgancggctgggcattctaccccatgtnggtcggcacgtncttacgctcttcttaaatnccgggatncaatgaagaaggcgctcaccacaagacatcctccaatagatgtttattgtatctgtagggaagtgacagaggtaatggagaaattgcatgccgcggatgctgaaaccatccctcttgccagcaatatacaaatggtcaacatggtgaataactacgtcattatgtcctacgggcttcttcacgatgattatgaatacggagccataactgagagttgccgaaaggatgtgctgctcttattgagggagttatttccgaggaaaatatatttgtgggaaaattaattccatcaacaagtcagtctaattaacaaaggactagaaattgtaagtttctttcggtgctaaacacatgggccaaaccttagagccaacatccgtgttt

SEQ ID NO: 134574 - DNA, 493 bp, Arabidopsis thaliana columbia
  unsure (1)..(493): unsure at all n locations
annggccttnagtgtttatatngggnaganttggggggcccccctaangaagtgncccnaaaaacccttttttcgggctttngcatccggtttttccccttgggatgggagnattnccccctcttccttccttggagnaagctgncctaattccccccggntaccaatggaatttaggtgggccagnccctttaaggccncctatatggaggctttaggtcctggtttccaactttgggccactggggtcntactcctacttggtttggttttgtataatatctctgaatcacattgctccggctagcaccgaattttaatgaagcngcaagcacgatcttatgggcaatgatggaaaagcagcaggcgcaatttcgttctagtcgaagacttggtctcatgaattctgatataaatgaaaacaattgttgcatgtcatgtagatgcttttaccgatacaatataatttatatatataaaaaactttggttac

SEQ ID NO: 134575 - DNA, 489 bp, Arabidopsis thaliana columbia
  unsure (1)..(489): unsure at all n locations
gggggaacttttgggagtcaacattccccccttatggaccattncancngccttctgaagatggcccatccttggggtgtcatgccgngcgtctaaacttccatcgaagatgttgagcccttctcatgaagagcttatcggtgcacttgatagagggaatactagatcaggtgaatggaacagtttacgtctcatgggcgcaaccgagggtgttaggaataccgcagatcaagtcattgagggatcagctagacagctgggtcgataaggttcacaccacattgttatctgttgaggccgagacacctgatcttgttgcagcttaaactcttctttcctcttttttccttcactgttcgtttaagctacagattgtaacattctctgaggattaaatgcaacttccttttaagtttttaggtattacagttatacttttgaactttgttctccacagacacatgaatctatcctattaagttgagtttc

SEQ ID NO: 134576 - DNA, 479 bp, Arabidopsis thaliana columbia
  unsure (1)..(479): unsure at all n locations
tcggctgatcnggaancnccgccccaaagttatccagatctcccgttgtggacttctgtggaagagtagncaaagggaccatgtttgtccggtatgcaaagatgaaatgttagtggaggagaaagtaaggaggcttccttgtagtcatttctatcatggagagtgtatcataccttggttggggataaggaatacttgcccggtttgtcggtatgagctgcctactgatgatcttgagtatgaaagacataagagctcagaaaggggcgatactggtttggcaaggaacgtgttgccgggtagatatagttaattgaatatttgaagtgatctattcttcaagttaatagacatggtttcagaggcaagatccttgaaccactttgtttatggtaagcacttatcgtgaatgtgataatgtttaagttgtatatattccttttgttttntgaaatnaatcatgttaaactttgaaccct

SEQ ID NO: 134577 - DNA, 388 bp, Arabidopsis thaliana columbia
  unsure (1)..(388): unsure at all n locations
gattngggaatatggggnnccccaaggttncccaattntaacccaaaatttccannggctcnattnccacnancaggncaaggtttttcaacnagccgcggcccccgacgnggccaaaccattcccttctcctccgnagatggattcttccttcaccagttactccctccgacaaaaactctgggcaaaccgatgttcacaattccactccgcgctctgcctctctggctcacatatgccgctctctctctatttcggcatcgatgttctttgtctccgttttgtatgcattgatcatattgttgtaaaatctcttcatcgatcttatattatgtctcttactaatttaaactaaactataattgaatggactaaaacgaatataaac

SEQ ID NO: 134578 - DNA, 548 bp, Arabidopsis thaliana columbia
  unsure (1)..(548): unsure at all n locations
gagncccncccttcttttcgcnntgngcctttnacccaagaancatccnggaagtccncggtaatnacccncntcgncgnagntgatnttgttgatgctacccccccccggagaaagattgccgatatgncattngggantggaaacganccgttgaaggtccgttgaattagggtgttcttgtaaagacgatttggctgttgctcataggaccaatgcgcttnagactttggttcaagatccaaaggccgacaaaacctgcgaggatttgccaatcgttagcccggaacgtcggcggtgcgaacgaaatggttgggtcaacgatggaagagagggagttgagaaacggtgaggaaacagcggcgggagaaggcggaggagcaacggtggtggagaacagatggcaaccacagagagtggtgaatttggtgttagcttgtatggtttttgggttctttatatcatggatctttcatttccatgtttcctcttcttcttgaacccataataatacttacggtattgcaatcaaactacacactttactt

SEQ ID NO: 134579 - DNA, 458 bp, Arabidopsis thaliana columbia
  unsure (1)..(458): unsure at all n locations
anangcgcgnttgatnaaactagnttgccccagttgagcttancaagccgagaatgtccaaggctntngcncctcctgtagnaggaaccaaaatttagctgtcnnaatctgtctgtgtcccattttactncaggaggtttcaacggaaatgtggtcatattttactgcaaaaagtgcatnaagaatgcgttatccctccaagctaaatgcccgacatgtaggaaaaaaatcactgttaaggaccttatccgggtcttccttccaaccaccagntgaatgatacagaaacatcactngtagccatggatngtggtctagcgattctacctccaacgatgaagaaatgttgttcattagttgtngtttgttatgtcaatattgttctgttttgtaagagaaatatctaggaattatggaagacctgattttctaatggatatcgttcattggtgatcttc

SEQ ID NO: 134580 - DNA, 521 bp, Arabidopsis thaliana columbia
  unsure (1)..(521): unsure at all n locations
aaatttgggnagcccacccggcatncanacagtgggnattttcagttcncccaacnntcttattgaacgtatggctgnaagctcattgngaatgtgcaacnccngtcangttgagaagcncccataaatgctgngtctcattcgggcttnggaactgagctttaagctttgatttcccatgtgacttccaccaggattgatactantaccgtatgccaccactaaagtagcaagatctctaatgtatggtgatgataccaagaacttcaagctttccatcgttcccatcttcggtttctccttcttgttcttgctacgggttggaagaggaacatatctattgacccaccaatagaggagacaaatggcgagtcccattcccaccacaatgctcatcatggctttcaacgaaactgcccagccgtcaactccaggaccaagattctttctcaagttagagaagtatttcacggttcttcctgagaaaatcagtgcaacattggctactagttctagatcgc

SEQ ID NO: 134581 - DNA, 494 bp, Arabidopsis thaliana columbia
  unsure (1)..(494): unsure at all n locations
aaanccncccngggcttnctttncttccctataccccccangcntttgggcgttctggaanttntgaagtcctcattgntccaaagccntcgtcaaggtgaagttttttttcccccaaagaacncggaaagcgtggagcttatgagcacatttttcgacgaggaaaatctccccaaccgaatttggagggaaagctttgttgcagtataactatgaagagttctccaagcaaatgaaccaagacgatgttaaaactgctaacttttggggattgggtcacagtaacaataaccagctgcacgcgagcaacgggttttctggagctgagattgcccctgagccaatccaaaaccacccttgactggttctgaaggcaatgtattattaaaaccaacccttttgaaatggactaaccttagctcttgatgctaagtagagaggttgtatgatttagacatagcatttgattaaaataaagagggtttgtgtgtatt

SEQ ID NO: 134582 - DNA, 384 bp, Arabidopsis thaliana columbia
  unsure (1)..(384): unsure at all n locations
gctcgcgagacttnttcaaggtttcacttggaagctcccngagaactgagacacgtgtcgagctgatggagtctagtcacgatatgtttctggcctaaacccgttggttntggtcggtgagcttagatngccggagcatctctncccgacggtgaagtgagatgagacgacgccgtatatattttatgnaactncttttatatantcgccccaccaagtttggtcaattccggntnccagaagataattggtcaaattgtgaacaaacttgtgtgttggtcttggttctttttgggncncntgnattgtgnctccttttacctcttcttttgttgttttcaataaaaacttttattaccatttcaataaaaagattatcaaatt

SEQ ID NO: 134583 - DNA, 484 bp, Arabidopsis thaliana columbia
  unsure (1)..(484): unsure at all n locations
tgnccgtgtggtccatgggcgttcntcttcccacccgtgtgtggngattcctcccncatctgggatcccntgggccggngtnncccncctctctgcggngngcccncatggcttacagatctgcatttttcccggtcaaggaccgtgatagatggagntctgtgtgagcagttccccgacacttccaatggacttgcagaggaagatngcagacgagttggatagaacncctgcggagattctgaagaagctcgaagacgcaaggaacaagatcatttgataacacncaaaaagagagagagagccattgttttgttgaaggacaaagtagagagtagagaagaaagaggttataatagattttgtaaagctcttcaatggtttgttaaacaaaaccccgctcttgtgaaaactgatgaattaattgcaagtttacttttgaatctacaactttgtttagagtatatttagttaggctttgaag

SEQ ID NO: 134584 - DNA, 475 bp, Arabidopsis thaliana columbia
  unsure (1)..(475): unsure at all n locations
caagccncanggccccatgctcccttggaccctttccncggnnattcnccncnccnccaaggnntaccaccgtggncncacttgttggttagtaaccgaaccgctggattccncggagntcccccncgntatggtgaggtttaccgccacgacaagtcggagccagacaggtgatncgttaccggatgaagatgtgtttaggtttgaacgtgaaaatgccggtaatgcttcatttaaattccaagagattcctttcaccaacgagtctttgtgatggaaatctacttttgcttttttcgttatgttatattttgggagatatgttttgatacgtgcatgtanagtaattggaacactcgaggagatgaactaagggtaagttagttatatttctatatttagtttgctccggtgatagatcatggatgcttgttcagttgttcctttctttgtaatggaaggatttgttatcttc

SEQ ID NO: 134585 - DNA, 509 bp, Arabidopsis thaliana columbia
  unsure (1)..(509): unsure at all n locations
anccaattatgagngttcagtgngngccctaagttgtctgctgncaacatatggcctggcttacanccccggagccgtctggatcagaagtcgaggctgaaagccagtgccatatatgcagaaggaaagcaacatgccttagcaataggcttcaccaaaatgtcagcaaaggacataaagagcattaacaaaggaataggngttgacaacatgcattacctcaacgacggtctctggaagatggaacgactagactgaggacaatgtcaaatgtgaatcagtgtcggagagatatattggtctccttttatgttctctctaaacttatggagcttttgtccggatcaaccttagctttggtttgatttgttttcaaacatttgatacttattttatgagggaacgtcaaccttagctaaggttacagtttctaattccgtataatcaaacaagtaagattaaaaagctgttcaaatttatttcggtcagaatatatttaaagtcatcct

SEQ ID NO: 134586 - DNA, 525 bp, Arabidopsis thaliana columbia
  unsure (1)..(525): unsure at all n locations
caacccncagtncgattgttgccnaggtaccggttcacccngagngaaaagaattnggatactcnggaaagctcngncatcgattgtaaccctttagtttggagatggnattgnccattcgggacaagtgcttctacaagcatgcgtatcatgatggtcgtttggaggaagtggttttgcggcatctggatgcagaagatgggcagactgtgatagcaaaggatataaggttgtccgacttccttgagaacatgcacatatgaacagagtctctcttagcacaataagggagaaggcaaagatgttgtgatgacatctttttttctttcttcctggggtgtttcccattcattgtaacgatttgatttgagttggaagattatgtcttagaccccaacgcattatgacttgcgttaagaggggatcattttattaattttgtatttttaacaaatatcactacttcctgcaaatcaacgcacatgagctatacggatgtagtaacgtggggctataatatttatc

SEQ ID NO: 134587 - DNA, 411 bp, Arabidopsis thaliana columbia
  unsure (1)..(411): unsure at all n locations
ggggtttccggnttaccangngggatggccnatgcncccnttggancccttggcaatcnccnaactgggatgttggctaacttcattgctacccccaataggaacntaagncttggggggncctttcttacgacttggccgaaaaattaaccggtggccctcattttccnttaaccatctggatnccttaaaggagggtttccacagccnaggttccccgagatgttttttaaagcatgggaaatgccggtaaggttcttctgtcttagcttagtggtgtagatgttggtgatttctatttgatgcgaagctgctcatcgcatttcctnccataatctttaggttcagtactctagtatgttgtcatttgtcagtgtttttcaaatctgaagataatattggtttcctctc

SEQ ID NO: 134588 - DNA, 461 bp, Arabidopsis thaliana columbia
  unsure (1)..(461): unsure at all n locations
ccatggntgganccnggaggnaagggncggttagttgtgggatggnggacttgtggngaaagagtgggtcctgggcaatgaccnaaatgggnaaattnaaggacntctttcccagggntncctaattggtccccctgttgttcatgctggaacattgtcttggtttgatacnccccttgatttatggtaaaataattaaagttttgaatttttattacatttagagttttgagatttgggtacatcttcttgccccctttacataccaactaagtacattcttttgtncntaatgggtagattaaggtgtatttcttttcaagntcttgtttcgtttctgttgaatttataggttccttttcatgtcttcggtaaatgtaaatataatttctaagtgttagcggtaaatgtttccggtaatttggttctacnctataaactattacttattgtttgggact

SEQ ID NO: 134589 - DNA, 491 bp, Arabidopsis thaliana columbia
  unsure (1)..(491): unsure at all n locations
ancccntggggccggnaagtaangccaaccnaacggcttggncgggagtctcaaaagcaccacattccngcctttcccccccgnnttntcggaaggttgggaattnnctgnccnctgtagaggaccactggngatctanntccttgctatcggcccacaggctttacgatgctcaccctcancagctcagagattcttcaacccaccatgtttacacaaccagtacgtagaacatgtactggaaacagaaagggagaacatgagatgctgtaagatagagtacaaatacacagttggagtaaagtcttaccagacgttggtgtacggaggaatacttgtggctggttttctcgtttatttccttgtcattttcttctcttctcctccttctcgctagcctacaccttggtatttacggtntactagatttttgtaagtgtaacaatttcttgttgaagacttacttttatgaactaattttttcgtctgat

SEQ ID NO: 134590 - DNA, 493 bp, Arabidopsis thaliana columbia
  unsure (1)..(493): unsure at all n locations
ancaaccctgtcccgacctncgaacggccttgccncattcancgagttccgngcntgacccgccggctnaggaagccagacgacccgagaaggactncactgcacgtgactagctgcaaggatcagncggagtntgaaggaagatgatgncgatgncgaagatagttcagaatccgggaaatcggagatggttaaccccccagtcgcctgaagcacaaaacaagacattgtttactcgcaggatcttgaagctctttcgatatccccggtaaagaggctatcctccatgatctgaagcagagagataaactatagtggaggaacagcaacttaaaaaaccttgcttttgtctagttagcttctggaacatgatttctggattggaacaagcgtttgaagttgacttttgtctttggattcatttctgtattgttatgtcttattttgttagaacactagttttgtctttgacatacgtgaacatttttcactc

SEQ ID NO: 134591 - DNA, 381 bp, Arabidopsis thaliana columbia
  unsure (1)..(381): unsure at all n locations
aanaaagggccaatttccaaggnacccncgggnccaaacccttgcccgntntaacccatgggctttngcagggattcggtttccttcctcctttccttcatcaaggattccgntttccttccactttccccnaggnagacggtgtccttccctcgttnccataccccngccatccggcacatccctacaatgatttaggggaccccgtttacaatcacgancccaattgcaaaatcatgtgaaatgagttttacagaggaagattgatagagagagcatgatgnccaatgtttttttttattgtaaagaactaaagaagcactatgtttactatttagtcatatgaataaagctntgaggccaccaaatcaatttactgct

SEQ ID NO: 134592 - DNA, 520 bp, Arabidopsis thaliana columbia
  unsure (1)..(520): unsure at all n locations
atgcccacggtttcatcccgacctggccccttccacggctttcaactcggnttcncgnaacccccgtgaacatccccntcttccccggatctgtngcaactggnctgctgcttccnttcactcttctcaaaaatcgccaaccaagcgaatcggatcgatggagagttttcgaatgcattggcttcaaaaggatggacaatttccaaaacgaaagagaatccgacgccggaatctactaccaacggagtgagctcagtgtatctgtttaggaaagtgtatactggtcggatcatgacccgagaaggaaacgggtcgtgtagagtaagagagctgagacttcctcaattggatttcaggaacgcacctctacggattctgcaatatttgatgttgatgactgacgatatattttnccttgcgtaaatttgaaactttttttttttgtttgttttaatctgtttttgatttgtttctttaatgtaatcatctgatttacaaagattggatctctttggcctgt

SEQ ID NO: 134593 - DNA, 508 bp, Arabidopsis thaliana columbia
  unsure (1)..(508): unsure at all n locations
ctttctatggttgagatttggaagggatgggacattccggacttgtgatacccgacncnaccccagttnttnccncnccaaaagtcttcatccggcaacttccggcggcagggacaagngacgagcangcattcacgacatacccaccgtaaatctcgaagaggaggcttctttggagcccattaagagctccattgttgttggagatcagcgttcaaggctaaccgcgtttccttggaaccaaacggacaacaatggaacacatgcagacgctttcaatataacgattggaaacgctattagtggcgttcattcatacggccaggttatgattggagggtataacaatgcagattcttgctatgacgcccaaaacacaatgtttcaactatagctaatgaagatccatctctctaattaaaaagtgtaagttaaattcttaatttttcatatggacgaaacaatcatatttggcaattgtataataaacgtccattgttttaattcc

SEQ ID NO: 134594 - DNA, 504 bp, Arabidopsis thaliana columbia
  unsure (1)..(504): unsure at all n locations
tttcgtttncccncccccngnttttcccggttgggncnccaangggggccccccccnggggntttttaaccccttttaggnaaaatgngcngngccccttgggccccnggnacccttgggncggcaaaaccgggnggcccttttntcgggaaagaaaggggaaccccagggtgcaggccttttcgggagacccntcgtggtgtccaaggcccgntgataattaagtcaggcccccggattgaccgccgcagtgattgctagaagcgcaggggttggagaaaactacaaaaaactttgttcttgtgatggtactgtcatatgggaagctacaaacagcgatttcgtggccagtaaggtttaataacaagtcaacaaccatacattttataaaacgttacgttttttagtgattgagaacttgttttgtatcaaaacttgaggtttatattgaaacaacacaagctttttgttttgtaccaaaactctctgtactttcaattgcgt

SEQ ID NO: 134595 - DNA, 511 bp, Arabidopsis thaliana columbia
  unsure (1)..(511): unsure at all n locations
ctaatnganccngtttncaacccggnaaattnccaacggtccccgggtaaaaacctnngccccgaaaaattggncccccccccggnttgngttcccccnaaanattcanccncgggnttgccccttcnccggaattgcnccttcnccggaactgctcccggcnccgggcaccagtggctcgactccccccaggaacaaccggcgggaaggtcccaagggaacgcggggtcattgacgaggaacgtaaaattttggggtccaaatttgggaattttggttttgttgggttctatttttattttctgaatggggatctctctctagtctctcttctcttcttgagtctctctctattttttttttttttttggtttgttcgaacaataatggagccccatacttttgtactgttttagtcttagggccatttactttgtttcaccacattacttagagttattggattgtatggaccattactatcatgagattgagatcatcttatcttctt

SEQ ID NO: 134596 - DNA, 435 bp, Arabidopsis thaliana columbia
  unsure (1)..(435): unsure at all n locations
cccgggnccnaaannccnccntttccaaagggncccntggcccccgtttncnaaaanggctccganttgaggncnttccgggntttaaaaaggggtggagccccaaagattgtgcagagcgttttagctgctgcggttcngttcatgatcaaaggaagagcttgtcaagggagctaagctgttgctctcaaacgctacctctagctaagtcaagtccaagccttcttgaatgaacgctagtagttagaaataaatnaaaatagattaaatttccaatagttttcttgattaattattacactattgggattgttgttcatttcctgatgattgcaattgattattgtaatttctgcaagattctttagtaatgaaatctgaataaagtttggcagatttcctttgttctttcttcaatagaaagaaatcttcagc

SEQ ID NO: 134597 - DNA, 500 bp, Arabidopsis thaliana columbia
  unsure (1)..(500): unsure at all n locations
accataaagtttnaggggtcggccaaaatccccgggganccccccccgggccccnattccctgtttgnaaccccccccggccaaacccaancccccccaggnttccatcctggacccncaaaccccaaacccntactccctgtggngccagtcgtggtgnnccccgcccagcatgatcgttccccagacgaacggctgattacgagcagtccggagccggctacttacatcaaattcacccactcgttggagctcttgcctatttcgtcacgcctatggtccaactctagtttagtaacgacgagtgtgttagtttaagtaaaaataaaaatgaaggaagttttttctttatttttacttttatttgttagtaatgtagtggaccgaaaatcggatcacaagaggacattggtccgagggatggtttatttggttcgttataatataacgtcaagtgtaatcttattgtggttattaatgttatcatcctattaattact

SEQ ID NO: 134598 - DNA, 489 bp, Arabidopsis thaliana columbia
  unsure (1)..(489): unsure at all n locations
acnaccagctggtgngaancttnccctggcttcacnccagcatcttttccctgnccctatgcggatatgtgctatgtgctgttnggntgagtccgagatcagggtccccgccagtcccagttccatgngggatctcgtccaaaatgcctggagaatgcccggaaatcgtttggcacagacgaagatcttctcctgataaacttggagaatatgaggaaccagaacggatattagaatagttgtcatcatcatcatcaaatcagttctggatgagaatgaaacctgagtgttttctcccagaagaacatgaggtgaaaagtatacgtctctatacatacgtctttacatatggatgctgccaaagaagaaggaaaagatatacatatgtcatgaaatatctcagtatctgtttgcgtttatgagattcttgtgttggcagttataattccttgttgtacaaattggtgaatagaaaagatttgattgatt

SEQ ID NO: 134599 - DNA, 481 bp, Arabidopsis thaliana columbia
  unsure (1)..(481): unsure at all n locations
tccgggncngctaanctgggncttggaaagtcgnggggaagttntgccccnggggctntgttccccggaanattnccancncncgacctggcangnctcnccncagaatctcccccccggnngtacttcaccgtatccccgcggaaaccccttgatcagtttaccagtcgcgataccaccaactgaagaacatagtttctactgccttggtgtgatgatatgtccaaatgcatctttattttttacttctgcggttggatcacacctctgagtcgtccgtcccaataaatggtgtttgttcccaatcgctagaccctttattattgtcttcgaaactgagcaagccaggttgattattctttttgtaagagaaattgaaattcttgtataatttatgagattttgcatcttttttttggggtaccaaattactggttcagaacaacatacatttgtttgtcttattactgtcacgaatgtc

SEQ ID NO: 134600 - DNA, 494 bp, Arabidopsis thaliana columbia
  unsure (1)..(494): unsure at all n locations
aagacttcnttntcttggactggccctggntcgntncaggcgttnccttccttaggncccgntccctcttggtccncatgatgccgtaccngaggccttgngcccatcgcacccnccagggttcttatcccgggaagccaccaatnctcatctacaaccgcaataactggtgaagaggttccaaagaccctttagtggaactggagcaggaatggatattgtggtgtccaagcgtcaaagcttatgttggagctttgaacaaaatgatggacttcaaagaaaactccgccacaaaaatcccttcccaaaaaaacagagtcgctgcctgaattaaaaatctttccggcaaataccaaaaagtcagacagaagttaggttcttttattttcaagtacatagtttggtaataactggagtttcggagtttgcttgttgtttatcgaagttgcatgtcaaaagagtttggtgtactatatatatcttgatttaacttg

SEQ ID NO: 134601 - DNA, 500 bp, Arabidopsis thaliana columbia
  unsure (1)..(500): unsure at all n locations
atgaacccttccccaancatnntggaccctcgtttccccggcatccccnttctnttcctcattgccnncngagnttgtaagttgggggcctncgatntcccaagtggaacaatggtattgcccaaccgcatggcccatgcatagagatccagaggtatgggaagatcctgagatattcaacccagaaagatttgaaaaagaaggagaggctgagaagctaatctcatttgggatgggacgaagagcttgtcctggagccgggctagctcatcggctaataaaccaggctcttggaagtttggttcaatgttttgagtgggaaagagttggtgaggattttgtggacatgaccgaagacaaaggagccacattgcccaaagctataccattaagagccaattgcaaagcacgttctattgttgataaactgatataaatgttttacgttgaaaaatgtattctatttaatgacatgtttttaattatgtgttttggtcttc

SEQ ID NO: 134602 - DNA, 506 bp, Arabidopsis thaliana columbia
  unsure (1)..(506): unsure at all n locations
atcntcccngntcctgttnagcacnctcgttgaccaaatggangtctttcagnangtcccncgggaaagaaagccgaggagatgagtcagagtgatgctgtgcttcaacaccgagggaggccattggntaaagtcgaggaatcattagaatgtagtcatcttgaaactgactggaaaatctaacccaggtaaccaaacgactaacttaattaatcaccgatgtgctctgcagcctcacaagattacgtatctaagacttttatgctgggacttgacgacaatagcgaaaagaatatagcgagtatgtgggtttaacttgtcatatggcaatagtttgaaaactacattgcacaacctcatgggcattgatattttgtagctgttgtaacttttaagaatgatagacaaaagtcaaaacaaatgtgtttataattttcttattcattttgtgtcttcagtttaaaaagaaaaacaactatagacaatcatttttaagatatattgag

SEQ ID NO: 134603 - DNA, 503 bp, Arabidopsis thaliana columbia
  unsure (1)..(503): unsure at all n locations
anagccccccaagcgcncgaattcacgtgttacnccccccntgataaaatagnggnatttcccccgngaaattgttcccggggaaaaagtncgaggtggtgtttattgtgaccctgatgacacatctttgggggtggaagaatgaagtgncccctgacgctgaaggtggttatgagtgatgaagccgctaatgtgaaagcgaagaaattgtgtttggacgaatacataggagaaaattgggtggatattcctgttggagactttgaggcaccgcaagagaaagaggacgcaaagatctttttctcgatgtatcagcttttgaacactgagaggaagagtggtcttgttgtcaaaggctttgcaattcgtccagcgcagtaaggcacaaaaccaaagcatattggatctaatttctgttaactatatttatataacctctattatggtttaaagtttgtaattttttcctgtaagtcagagtctgtactttcttgttttcgtat

SEQ ID NO: 134604 - DNA, 524 bp, Arabidopsis thaliana columbia
  unsure (1)..(524): unsure at all n locations
anatgngctnattcccgatgcccccccancgnttcctcngtctcantgtggggacaantcactttacaatccgcgctttgcctgccgatgctggaatccnatgcgggacccgctgttcctgtagtctgganatttaaacagtacncctcttcttgatctggactatgttgaagacagtgctggaggagctgatgtacccgtcggtatctaccntaaattagacaaagtgtcactccttcagatggatgccaagttaccgatggaaacatttgagacagtgtttgcattggcttctgaaggttgcaaggcaattgcagagagaatacgcgaggtacttcaagaaaacaccaaacagctagagtatcgccgagctgcataaactttagagttagagaaaaaaacgtaaagctccaagatttttgttaattagattttgctgttgtttgtggaagttgaggataaaaagctagtngtgcaaactctttttgggaaaaatgaatcaatttggtaaaaagatcaaactg

SEQ ID NO: 134605 - DNA, 520 bp, Arabidopsis thaliana columbia
  unsure (1)..(520): unsure at all n locations
cacaatgaggttannnacggcctcctgnnctatgttattaaagctctcccccttggntgcgaaatccgttcaagccncttcacccttacacngcccaagcatggagtttccactnccatgaaggtttagggaagtgggtggagatggaanctctgggatgttcagncccgaaatgcttctaccgatgggtcnccccgaggatgttagagtcatcgcttggggtctctctcttgaaagaccaacaatgatattatacggtatcgacaacatccgagatttgtttggacacaaggtggatctcgatcttattaaacggaatccgatctgccgaattggaatctaagtgatatattttgattgtctttttgattcaagatactctatttggttatctcttggtattttcaattctacctttggttactggactttacaattccatcttaaacgtgtgtacactcttaattgcaatctggcttgtcgaattttaatattcatttagcatttggttttgtacggt

SEQ ID NO: 134606 - DNA, 530 bp, Arabidopsis thaliana columbia
  unsure (1)..(530): unsure at all n locations
aaaatttaaaagntcntccnttggaccccccaatncttgnccctgagggccccccgtttggctggnaaggtttggatccttgccggcaggaccaccggctcgnttncccgnttccnggccagcttaagnttaatgctaggcccccnaaaagncttaaaggaaggcatttgncggttggtncgactccctctggtttgacatcgagcctggctttccactccttgtgcagggaataggagttgtgcaatccctcagcaggctttaggattaggaagtgggactcaaagcacttacttctcagagtcaggaaccttctcgaagctgaagaagatctaaaatatggaagacagagatacaagtcttgaaaagccgagcactaaaagtgtaaaaatgaaacaaaggtggaaagaaactgctttctctatctcatgtctgttttaaggtttcttcggtcacttaagagacaaaaggcattgttttgatcactctttggaaacgttttataaattttatttttgtattagagccat

SEQ ID NO: 134607 - DNA, 475 bp, Arabidopsis thaliana columbia
  unsure (1)..(475): unsure at all n locations
ttgggccaagtccagncctcccatgcannanccgggaccgcctcctaggccntgccccgttgcatcttcatncnggngaaggtttaagggnaaanccgccagggganaccaccgngaccccntcggncatttccnccagntggccatcnccattggagctgcttggcgtcatgagcccccccctcgagttttaaggcctnatataaggagcttgcgtcgttttgatccgagttcctcttggnctataatatcgtattacttaatataacgaagtgggtctattagaagttttcatatatgtttgtgtaatgtgaatgtgttattttattcttagcacaatgattttcatttttagtgttttttttaaaacagatggattgaaagtactatgttataagtttctttatatcacactgtcaaaaaaaatttattgttacgataattttgttgttgttgttgaataaaacattccaag

SEQ ID NO: 134608 - DNA, 562 bp, Arabidopsis thaliana columbia
  unsure (1)..(562): unsure at all n locations
ggttgccnttgnacnaaggtttnctgccngccagntnttttgggggccnacttcacttcgngnaagggccccancttgccgcttcaaacctttcctgaggnctacngaatccnggtccngncccccggtttcccccattcaagggaggaagtcccnagctagatattttgttgcccggctntaccggcacataaagcccccccttatgngcaggaagcaagattcccccagataagaacattgnccgacagagcaaagaatgaaactaaagagtagttttatagagtttgatgaagccagtttctgcgaatggatgaggagtttgaaagtagtgcctcctgagcccaggtagtcatacattttantcttgcttcatcgtttttttttgccnccttttactgtcagaacattttttttgttctctgtgagtcttttgtttttaggattctctttatatgatctccagttctctcaagtgaattatatactttgtccgttacagcaaaataatgtgtagagatgttgaccgtgatttttatttttaccattttacagtcgatgt

SEQ ID NO: 134609 - DNA, 531 bp, Arabidopsis thaliana columbia
  unsure (1)..(531): unsure at all n locations
tcntngctcaatctngcggtaggttcgatgtgcttacccgngtccgtcggttcaanncngtggtgggtctnttccaagtcgngcagctccaagctnttaaaccatgtccgcatnccnttgcttngcattcaggcagcaaatgatcccatngctcctggagagaggtatccctcgcgatgacatcaaggcaacccccaaactgcgtgttgattgtgacaccaagaggagggcacttgggatgggtggcaggtgaagaagctcccaacggagctccttggaccgaccaagtggttatggagtttctgcaacatgtagagaatcgtgaaaccattaacggggagagatctttcgaggatgtccatgatcagattcaagtctaattctgtttgtccattcttcacttggagtggtatgtttcacttgtacactgttgttgcgcacaagaataataaacatgtaaagaatcatagtatataagacttcttgcatttcctcctaatatagatgatactatcttcaagttccttagtt

SEQ ID NO: 134610 - DNA, 452 bp, Arabidopsis thaliana columbia
  unsure (1)..(452): unsure at all n locations
aatcctgcctnaattcctaggacntttncctgaggntgtaagggaggaatgaagggnaaaactgaagnaaaaggatttgttttcctttcgatgataanccttaggacncagatgtagttnagaaagaaaaaatgtaataggtagattagaaagagngtgctagttnaagcaagaagaagagntcgttatttaatnccttttagatnnaggagttgtttagtgtatttgtgagatgctgaacagagggtgagagtgagtgggtaggtactgtaggagaagaagaagaagaaaagagtctttttaggttctatgactttatttatnnttctttgttagtagtgttaaagagcctggttgtggtaggaaaaatggtgatngaagagaagaaagaaatcaatgcaatgtattagatgtaaatggttggcatattaaaaaagaaaagttgattttcc

SEQ ID NO: 134611 - DNA, 533 bp, Arabidopsis thaliana columbia
  unsure (1)..(533): unsure at all n locations
aancttcnccnggngggctcccaanccacctcgggccaggtcncgctntccngcaaattntgcccccttggnaaggctgaactgcttctgtgcttcaagngcccacccttacataaatttttatccagggcaanttaaggtcaattatatacatnccccggtaaaatttncgaaaatgaaggtaaattgttgcatgtctatgcaagcatgactatcttagttgactgttggtgattttaacgaaccatgcagctgctaagcactccttatatgaagaattcatcaatgaaggatccatgggggggatgggacagagaagatcacaacaaaaggggaccgaagcatcttgatctaaggagtagagggctttgtttggttcctatttcatataccccaatcgcataccgcgataacagtgcaactgactactggaatcccacgtatagaggttctttgtatcgttagtgactagtatagcaaaaagtgtgtagagagaaagatttgattaaattatggtagtggtaaaccattcc

SEQ ID NO: 134612 - DNA, 502 bp, Arabidopsis thaliana columbia
  unsure (1)..(502): unsure at all n locations
tgttcccatggtggtctggaaggacccagggggaccntggacctaaagtgtgtggctgccttggctacgnggcgntgntttacatggcgctatgcacggctggtgaaggcatgtcacaaacctggaccagccttggaggaatgttataattggactataaacccatggcatggatggatctcttctgctgcttttaaggtggctcttaaactggttccaaacaacaacacattcatcaatgtgcttgcggcgaaagacgagacacaccaaatggtccaagatgatattacaagtctaatttcgttgctcattccacttctaagccaactccattctattttggaattatacgaagtgagcaaattaaagtcaccgtgaggaagagaaccgaagaaaaagactgaagggtatagttttggttattgtaacaaagtctaacttgtagcatcactcctctttgataagttttattaatctctcttttttaacgagttacttatct

SEQ ID NO: 134613 - DNA, 516 bp, Arabidopsis thaliana columbia
  unsure (1)..(516): unsure at all n locations
ggatcangggtcccaatgtncagctaactgtatactnttggngccaggcncaaccccctgaatggacagctcagctcctttaacccagnggcncgtaattgctgcagatgttgaaactagggtctgaaaacttggctgaagagctgtttaaaagcaatggcacacaggtgacacccacagtgaaacaaatcagtttgagtaaagtgaatgtgaagtcgaggccattgttatcaagggctncttcagctaagtgttgatatggaagttttcctgatggcggtttggcttgcgggatgtatataacaaaactcttacttatacaaatggtctcgtgagccgtagaatgctctcttacatctattcgttggtttggcttttttcccccaaaacttgggtcttatgatattttggtttgcactttggaggtttttcctcgaattggagtttgtttattgacatgtgtagtgtccacttttgaactttgacgcaatttaaaataaagtacatgtggggaat

SEQ ID NO: 134614 - DNA, 548 bp, Arabidopsis thaliana columbia
  unsure (1)..(548): unsure at all n locations
antaagggttccnnagacgnggtttccnagtattccggacnncgncctgtncaaagctttcggncatgttaggcnaatgtaaccacgcttagcntaacttcggatgngggataaggtcgtacttctncctcaataaatacaccatatgtacccagttgngctancatttttttcagcgacagccaaaatcaccaccgcttctgctacgaacatgttaagccatccttttaaccgttgctgccaccactattacggccatcacaagaaaattcatgcaagtggaaacggtgatagtagcagctggtatgacacgttggtagcagtagcggtggtaatgccgatagcgtgagcggcaatggaagcattggtggtgtcagaagcagtcatcaacggggactttctatttttgtatcatgtctatttgacatagtagataggtcgaggattgaagtctggttagatgttttatatttttaaacacttgcaaatttttgtagatttgttggattaacattttattattgattcttgagagaatttgataagtt

SEQ ID NO: 134615 - DNA, 570 bp, Arabidopsis thaliana columbia
  unsure (1)..(570): unsure at all n locations
ggtccggttcncccatgggccttcttngntgccctcatnattcctggnncacnccccttagntctccggttcccctccttccatccccncaaaagttgagcttggggttnctggatggtatccgatggngaaccagggggnganccnattttcccggcgagaaagaccgttagcnttaatatcttacccggaaaaagcttggcgtggnttagccgcaaagaaagacggtgttntacgaggttagaaggatctttacggtcaaaagaagctgcaaaatattggatgagaggaggaacaagaagaaaacggcggagatcaagaggaaagaaacggtgatcggaggagttcctttggcaaagatgtctataagcttatcgttgaatcggagatggaacctcgtgtggccatggcacttaccatcatcctcgaccaaatgtttcgatcttcttgattttcatttttttaaggtttatttttaacgtgtatattagttcctttttgtttatgtaatttatgcaatgtgttccttcctaaatgtacacatgaatagagaactttttttttcgtatt

SEQ ID NO: 134616 - DNA, 357 bp, Arabidopsis thaliana columbia
  unsure (1)..(357): unsure at all n locations
ccgtaancctcttcccgcnaatgggancccnaggcnttcngcagcagaccccncgngtccntcatcngcgncccccaatggncggctccggttggcccgtgaaccgatnccctaggaaggtggatggaggccataagggcttactcataattatgcagagacttggttggttggggtaattgtgnggttcaattttgtctttgtctgcgtcgtttgcttcaccagtcttagagggcggaggtgtgtagcatttgtgctatctagtaatttatgtttttaattgttcttcaattatctagagtgttggatctaagctaatcaaataatgaaactatattatatttccttacggtatac

SEQ ID NO: 134617 - DNA, 358 bp, Arabidopsis thaliana columbia
  unsure (1)..(358): unsure at all n locations
ccaaaggaaaacncttttttttttgaancntctggattnacccntnaagngtttttctgccnggttccnggagncccaaggaaaacctgatcctgatccggattcaaacccgtagaagtaggaaaggaggagnnntganttgtctcccgaggaagaggaaggggagtctcgtaagccatcgatacagcactaatagaaggagaaactgagtctatgctatgtcaattgtcctggaccaagagttatggttccggtctgaatgagattgcgagataatgtagtaatgtacgattgttttttttttggtctatgtatactgggtttataaaagcttaatgagtccatgactctttttatt

SEQ ID NO: 134618 - DNA, 564 bp, Arabidopsis thaliana columbia
  unsure (1)..(564): unsure at all n locations
ggtcccnaccccgccgactntgtgaccgacttgnccggngtcccccntatattatggcagccgggctnnttccgcccttgaagctganttcttctgngaccntaccccggaaggagccccttctggttcaagcnggnccccggnaaatgttcccnccttgaagaccctcacagnctcagaaatcccaaagtgtatgatgttgatgctacattgctgacaaacaaagagaagacgcttgaagctttggttgatgtgttcttgagngggaaactgagtgttgattggttgggatttaaggttcatataccaattgttattgcgtgcgagagtgtgaagcagngtgatgtgataaatggtctcaaaccagcgtgcgatgttcgaatcttttccgaatgaaaacaatgagagctattgatacacaaagaccctctgatctttgttttgttctgttcctttttgttgttgctnatttactcgttgtagattgatgaatacatagaaagagagaagtgactcaactttgtttctctaaacttaacatcaagaatccacaagttatctacc

SEQ ID NO: 134619 - DNA, 431 bp, Arabidopsis thaliana columbia
  unsure (1)..(431): unsure at all n locations
ccgagnattntggccccggcaaccnggntttcagggccttgaaagctggtcccnnatgggttaaccngctccnccgnattgnatgccanccatncccatttgggtggtnccaggatgagtgggaattgggagagagaaggccatatnncagtccncaataattacttgcagatcaaggcagtcgtcactgctctaaataagcctgcctggatctgatctctggagtgtggtttcagcatcataaatgctcaaacaaaagaaatagactctataaagttacaatagtnataattaaggtcatggtttgtaatttgagtaacggattgtgatacttctaataaatttctcattgttgtttattcatcacatagctgttgttacactgagacttgtgtgttcattttggttttgcaagatttctattgaaactg

SEQ ID NO: 134620 - DNA, 529 bp, Arabidopsis thaliana columbia
  unsure (1)..(529): unsure at all n locations
atcccntcgtccgcgtggggntttctgncgtaggattnacccccncatcncggcttacgatttccggancacggggnntgacgattcgcgcatctgtgcttggtcgaagtntggtncnccggcgacagagatntcccggatcaaggggaaagtcatgatcggtaaagtcaatggaatccaacggtggaagagtgacaaaatccagtgtcgtgtcccccaaagtttgtaccccttacttactctactactgtcactctgtgcctaaagttcgggtgtacgagtcagatcttttggatcccaagagtaaagccaagatcaaccatggtattgctatatgtcacatggacacatcagcttggggtgcgaaccatggagccttcatgttgcttgggtcccggccaggtcagatcgaagtatgccattggatctttgagaatgatatgaattgggccatcgccgattaaccatgttgtagcaaaatgaataatgaatgttaatgttttgtatctctatatttcagtaacgatac

SEQ ID NO: 134621 - DNA, 405 bp, Arabidopsis thaliana columbia
  unsure (1)..(405): unsure at all n locations
ttggtnccaagcccctttaggcccnattgggnccaaccctntnngnaaaagnntcntcctgaggctgngggttccagaaggncnttggggtattggttgccgnccnaggaaaggtgagacatgaaggtggccaaggntatgttcatctggtttggcctaaggaaccttccactttgaggcaattagtttcaactggtgatgtattcccatgttctaactatgtgtgtttatattcatcgtaataacttttgatgttttagatggtttgctgtttgattttctatttttaatacaatttaaaatggaatgttaatgtatatgttatcctgcaccttcattattatcaatttctaatcatcattaatcctattgagcccattatagacttagtgagtgttttttctt

SEQ ID NO: 134622 - DNA, 533 bp, Arabidopsis thaliana columbia
  unsure (1)..(533): unsure at all n locations
ttnancggtttncggttcccnccgngagtttcccacagncttcggggccnntcttggtnctggcttcncggaggcgtcaagctcanaccggtggcaatccncccaaaccgntntgccgagccnccaggctccaaccagatcttacccggtgaaccccaccactntccacaanctgaggtaaaaggaacccnttcctcatctgaagcaaaagtcgagagagaaagacaactgatgttactcttttagaggacacacaggcgtaaaggaccgacttatggcagagatgaaggaagagagttgcagaggaaaagtaccgaacttgatgatttagtagagagaagtaaaagtttaggtttgtttttgtttattatcgtccataaagtaataatgattcataagtacattctctttgtaggatttcagtagctttcttttgttaaagctttctgaaattgaaagccttttgttttttctctatggctgtttctaagtttgaattttaaggaattgtaactcagttcctgcttcttgtt

SEQ ID NO: 134623 - DNA, 511 bp, Arabidopsis thaliana columbia
  unsure (1)..(511): unsure at all n locations
aggctccgggggattnccccggattnccgctgntccaccgaacccccatcttttcgtcgtcttcatcaccgtttccccccgtcttntcttccaaatcccccccgtgttaccgtcaaagngattagaaggaggaagaatccgtgancccataccttccgaggaaatccgaccccggcattggggaccataaccagaggagaggaatccggaatccggaatccggaggaggagaggagggataaactcatatcgcattcatgacaccagtaagttcgtcgttcaggctcgccgtggacggtggttgttgtggtggtggaagacgacattgagaagtggtggtggtggttgtgagagaaagaaagagaaaatgtgaaagaagaaaaaaaggaaaggagaaacaaaagttagtggttgtggttgagtactagtgataatgggtttatgattggtttcaaagcctttcaaggcccttttttaatatataaaagttaaaatggattaaagttggttt

SEQ ID NO: 134624 - DNA, 345 bp, Arabidopsis thaliana columbia
  unsure (1)..(345): unsure at all n locations
tctncgggcccctanctttccccccgttccccaaagnaatggcctttgcntgngtngcccaaaaaagnganggcccntaagttgggtttggttgcccctcnnnctgggncaaattatgtgaatatgtaatgtgctttgtatatgatgcaaaaagggtagaaatggaaatataggggttttagtgggctaaaagtaagaataaaaacaaaattagtttttggttttcatttatgtatgcatggtgtaaatttggtttggttaggtgcatacatggatcttgaataatgaataataacaataaattaataatgagaatacctacctttgtgtattttttgcgatttt

SEQ ID NO: 134625 - DNA, 485 bp, Arabidopsis thaliana columbia
  unsure (1)..(485): unsure at all n locations
ccntaacgggggggccccctttncnggggnaaccccttgggnccaaggtttttcccccnccccatttttcgncngtntcccctggggntttgnggtttccccnagntgaanctttggccccgtcatgtcnctgntgaattccaggcccggtagaggaggggttccaattgnncaaacaaccccgaaataccggtcttgccagcaggnattactaagccaagacatagacttgatcaacacggtttcgaggtcaatcaaagctggaatcatttgggttaattgctacttcgggtttgatcttgactgtccttatggtggctacaagatgagtggtaattgtcgtgaaagtggcatggacgctctcgacaactatctacaaaccaaatccgtcgttatgcctcttcacaattccccttggatgtaataaaattgtccataacacatagaaaaaaacttaatccaatgataataaggcggcttgaatt

SEQ ID NO: 134626 - DNA, 406 bp, Arabidopsis thaliana columbia
  unsure (1)..(406): unsure at all n locations
ttttttcccnggncttnnacnagnaaccncccctnatgnccccngaatgatgcccccccaaatccntccccnantttttagaaccngggngcatttccggtttcccgttttttaaagaccggaatnaaatgggtaagtttaccgaagctcagatgatgatggtggtggcatcagaggcacactacatgattgttgatgatgaatgatggtggttgggacttgggaggaatgcaagattgttgtatcattattttctttttttatttttgggttcaaaagatgttatttgggtggttaggtggaacagtggatgtatgttttgggagcatcggtgttagttagacagctgagttggttctaataagctgcacttttggctctctctagttgttgttgttgagaaact

SEQ ID NO: 134627 - DNA, 439 bp, Arabidopsis thaliana columbia
  unsure (1)..(439): unsure at all n locations
cttttttnncccgngnggaaccttttgggccntgnggtntcntttttttnccngtccctttgaggnggccccccctttttgnngcttagccnctacaaaaaaccccggtttttgggntcnggacgaagaanttcgcaattgcgggtcttattgctgcagctctactcattctgatattttgcttcaatgatcacttcatcgaggagaacaacaagagaaacaatagcaaccacatggagtcgagagaagttgagaaaccatctacgatcacaatatcccctgaaatggattctctgctaagatccataagcaaagaaagcctgcaagtgttcgatgaggttcccaagaacagcagcagcgttaagccagttgcttcttcacacgaagaagaagcatcagaagctgtgaatctcactgtaaagactgcgaaagacaagaa

SEQ ID NO: 134628 - DNA, 484 bp, Arabidopsis thaliana columbia
  unsure (1)..(484): unsure at all n locations
ttcttcccccancggncttntgccccccntcggggaccccggaacgggggttccaaggaaggaacccccttgcccttgggaaaggggaanccttccattttggtttgggctaagggagcggtcactnagccatttagatcgntagaccccctgaaaggagnttccatactcccggaacttgattaagattccggcagaatctgaagaagtcagaatgtgcttcttcctttttatccccaccgaaaatagttcatctgcatcagagttgtgttaatgtcggaaagctaagatcgaaaaaattacttataatcaccctggaagcaaagcataaggggtttacatagttgtcatggcaatacgtgttgttgtttccccctttagtatggccatattcatctcccatgtaaatcattgggacaccctggtgattaatagttcagaaagacagaaaaggaaaaggttaagcnatacactaatttcaatg

SEQ ID NO: 134629 - DNA, 499 bp, Arabidopsis thaliana columbia
  unsure (1)..(499): unsure at all n locations
acccggttgnacccaagcngggccccggaaccccccnttggttcccggccnanaaccaaaggcctncccgggaccttaggccgggcccccntggggggacccgcccaaagtctnaccnagggttgccccngaaggggngtntagcgacccnctctcaactctgtttgttggtggngttttcaggtttgaganggagaaggagaagaggtttggtttgagaatttgtgtaaatagatgaaaagattacaagctttttacagggaagtgtgtgtactgtgtacngtattgtatttttgcggcctctttttttgtattctttacgtaaaattatttcttcttgaaaacacattgaagaaatagcagaagctgggcatattagtatttacagagccccatctgaatctgtattttctcagatgcaattcttgcattatttttatagtttgtaacctttttgtattcttcatgttttgcttcaatgtcaatggtaatttttgtt

SEQ ID NO: 134630 - DNA, 461 bp, Arabidopsis thaliana columbia
  unsure (1)..(461): unsure at all n locations
gccaggccaatngcnaaanngccncnagttgggnccttgatcttgatccttccncttaagctaagncaacccggnaagacaattttggnnggggccagaaccagcagcaccaacaacggatcaancgttgnccttgtcgctatgtccccgggtcgtcttcgtggaaaaaagagccgactgatgaaagatgangnggatcggacggttaagattggtcaggagngtactctggatctgactctatgaattatatttaagaatgagacaaattctaagtgagatcttgaggtncttaccgatatcttaatattcagtgtcgttgttgtttatcattaatcatgtattttctttattattagaaaggaaacaaaaatgtttgattatattaacggtcttgagtttgtttgataccgccaatttgtatcatcacatatataaacaaatattactagccacatcat

SEQ ID NO: 134631 - DNA, 565 bp, Arabidopsis thaliana columbia
  unsure (1)..(565): unsure at all n locations
ccncgncnncattcagtttccntggcgctggttccgaatntctntnccggttcattgttcaagnaagnttaagggttgaggaccaggcttngtgaggaccactcaaggcccaggtggtcttttcaaaggncatatccgatattgtcgnccgtggaagagagaagatgtacgattgggngtctagcaagangcgaaaaagcagaacggtacgtgtggccatttgaggttgacatcatggaaccatccagggaagagccacctcctcaggaaccggaagatgtaggaccaacgaggattttgggatacttcattggagcatggcttgtccttggtgttgctctttcggttgcgttcaatcgttagccaaatttcgtttctttatagctcttcttttcatatcttcttcctcacttcaaatccgatgtttatttacccgattagatttgatgatgatgttcaagctacaacaatataatgtatctttgtatgtgggtatttacgtatctcgtttccacgttgtaatgcatagaatctaaataccaaatctgaattatattttttggac

SEQ ID NO: 134632 - DNA, 481 bp, Arabidopsis thaliana columbia
  unsure (1)..(481): unsure at all n locations
gggnggcccnattttgggcctggaacncccttnttgggcnttgggcnagggcnggttccggtttanccagggnctcttggtccggnggnaccccntgggtnccccgggggcttttattggtcctangccacantctgttgatcccccgcggggaaagctgggttacgttgccnggttcaattcggcacccgttgtctatttggattgcccgtcatgctcgggatgactggggatattaaccatctggtgaaacttactcccccagccaaaacccaaactcaatcttgtatatatatctacatatatactcgaaaacgtagatatatatcaatatcatttacaccngttattgctgattttagtgagttacagaagggaaatatttgtaactttgtgttgaattttatatcataactaaatattgtatatatgtggttgattcccttggtggnntatctatctatatgtaaaatattttgtg

SEQ ID NO: 134633 - DNA, 575 bp, Arabidopsis thaliana columbia
  unsure (1)..(575): unsure at all n locations
ggntccgacccntcttagggngcccnggtcncccagccnttttggaagagggccnggaagncccngagcttccccncttttccctcccnaancgccctcgggttccggggggaggagagcctttgcccaacttgctgatagacccatggatgcncttgngcaaattgctaggaagccccaagggaggagagattgattagtggtgactcatggaggagtgttgaggccaatttacttaagggatcacacaagcttccctctgccggaaaactcttgaatgcttcagtgaatgtggttcatctccgtgatcaaaaatggatcatcgattcgtggagcgatgtatcacatctatcatccgttggatttcttcaacgtggctttgatggagacgccaagccctagagaacctcctcattcatatcttgtgtcgatctataaagacttctataaataagtatctatttatcttgatgtttctgtgtgctttacttaagatgcgtaatcttcttgttgatcaattcctatcatcttgtaatttgtattactctattaataagagattttcatctttactt

SEQ ID NO: 134634 - DNA, 575 bp, Arabidopsis thaliana columbia
  unsure (1)..(575): unsure at all n locations
cccgttccgaccanggnggacccctgnccccggnaggcccatntgcccccttnttggcnggggggttngaccttanccttgngaaggtttgaagggaaggggggcccgncccccttggggaaatgggnggtccccggttcccccatggcgggattnaacccgtacccttggngcncgtatgtgaccgcaaccaatccaagggattgcttgagagttattccagnggaagtattccacttgaaggaaaggagatggagccattgtatttaggatggaagaatcaccctcttatcacttcttgtgcttggaggtaactaataaaaaccttgttcggtttcagaagagattagaaacttcttttaaagtttgcagaatctgtttgtaaaagtaaaactcatgcatgatccgaaggaacaagttgtcaaatgttgtagtagtaagtgatatgttgatgaccccatatatgtttaaggtttatgtttttttttttcttttctcacaacaaactatgatttgacatcaaacttataactctctgtttatgatgtgataaattaatgatatatggttttttc

SEQ ID NO: 134635 - DNA, 369 bp, Arabidopsis thaliana columbia
  unsure (1)..(369): unsure at all n locations
ttcccnncctnggcagnttcggncggggccgttgtgnttgaacccccggtngaaanggggggttccaagctctggttaagcccaagtgccnngaaggtttgtgtngtgggggntttccccttatcattggngccattatatattttttggcccgttgaggaaccaaaggaaaaaaaaccaaggnccaggaagactgttccctccccattggaaatttacgctcaaaactacaattgatatcttacagtttgtatttcatcttatttattattgcagctcagagattggtaagaatgtttcattagatacgaacgactttcttctaatactgtgggattctctagcatttaaattacaaatcaaagtggt

SEQ ID NO: 134636 - DNA, 488 bp, Arabidopsis thaliana columbia
  unsure (1)..(488): unsure at all n locations
ttccnttttggntaaatttccgaccccnttttttttgcccagttccccaaattaaagggccngtttcctttnanngccctttttggtgaaaaaacctnggnggaaaccncnccnctttgaaggaanttnanaagccnaaggggcttttncttaggnattgggagcntcgattttcccggccaagttccacttggtcgattgcttgcccgagattctggtcttcctgatcttgaccagcggggaaaggaaatgtcgtcaggattgttcctccgttggttatatcggaggaggaaatcgaacgtgcggttgagatcatggcccaaaatttgactgcgcttgattgaagctcttggaagagaaatgatgtggtgttgaagaagaacaaatgtttcatattcgatcttgtcttaaattagcctcaagtgtaccggtaaagatgctctgcacaattgaaaagaaataaaatttgacacaaaacttgatgaact

SEQ ID NO: 134637 - DNA, 547 bp, Arabidopsis thaliana columbia
  unsure (1)..(547): unsure at all n locations
cntcaacagcaagggccgaatgttgctcanccttcgaggnnttgngagcccttcagagaggtgccaggttcatcccccaaggngcttggaccgtagaagagtctgaagggccncagctttatcacatctgcgacatccagccattccctttttgaaagnccgtgttagtgtctactgggaatccctctgagtctgagatttggatcccaccattactttcagatcctgaaatgggagcaacggtgaggtcccatcgagtcctctagccaagtaatgtctcgccatctcggtcgtggttgtgtttctgtacttgggagggttttgctttgatagaagctctttcataggtccatatacttgctcatttggtatggtgtgcatgaagaaagatgcgcttgaaatgcgaggttcttcacctctatttgccaaaaccctgtgctccacacttacaaacttatcgtttgttataagctgcaagcaaccatttaaaaaaacgttttgagatttgtcaagatatggaagatccaattggtgtattaagtttctt

SEQ ID NO: 134638 - DNA, 553 bp, Arabidopsis thaliana columbia
  unsure (1)..(553): unsure at all n locations
cnttatncccccccnccatncttatggaatttgtaaanccccaggnttggaaaattattnccgtaccnntattgntaaaggtccgttgttattgncccnccgggnttaaanaattccnggnagccggagttccttgggataataaagaatccnaacccccntggggaaacgaactgtgntaccctagcgtgaggatgagtatgagaccacgcccccgtcgctgatgcttgaagagcggnatttgtctcgaagcagcgacgctgttggtcgtaaggccgactggtgtggcttccgatgataacgatgttgagctggtgacggagcgttcgccggagatggcgacgattgtatgtacggagaagctgttacggcgttgcttaagcgtaggagaaatgtgttagagatgaattctttctaaggcctagtgggctttttttgggcttccgtttgtttggccctttttaatgtatatacatacgcatcgtacaaagccaactgtactattggcgtacgacttttgggtcaaatgacatcaaatccgaattattcctct

SEQ ID NO: 134639 - DNA, 562 bp, Arabidopsis thaliana columbia
  unsure (1)..(562): unsure at all n locations
tcccttnccctacgtccgtgtggtttcaanaacctttggggttgagggaaccttccggncaaatcccaaatgtccatcaactttcaacaatttccccacttcccagctnctgggaatgccattcttgtcaaanccgnnncatttccttgcaatcttgacgacttgaatgncatnccagaatttntgaagccagttgccacntcttcccggtgaagttgaatgaggagctggcaaattcgatcctccctcgccccatccccatcaaagggaagtcatgatcgaggcgatagatggttggttctgacccaaggagtctctttaatccgggatcaatgaagaaaggaataaatcgcgggatagagagagagctccactcgtactggttgatagaatgaggggtttcccctgactcatagagttatagtctctttttacaatttccgtcagtctctgaatgttttagcaaatggttaattgatacatgagtagggtcgcgtatcgttgtttaggatgtgaatagatttcaattggtatggtataagtctctctgtataaaattggt

SEQ ID NO: 134640 - DNA, 559 bp, Arabidopsis thaliana columbia
  unsure (1)..(559): unsure at all n locations
ttanccttacccggaagcccagccagttggctcctcccncaatttcccccnctagntggcccantcaatccggataaggaatctggggncccacagtgccaggacaaggttgcncttccnatggttccggtacggattncttaccaggctaagtttccanggagacncccctctggtattaagattatcttagtaactcatcccaaggnccggagattttacgcgantccttgaaggtacatctacagtttataccgttgaatatgtcgtaaaaaatcctatatacagcccaggatctccaatcaagtcggagttgttcaacactgcacttgaccagtacgtaaggagcatctcttagtgtgtgcattacagatttgtccattggaacttctctccttcaacagaactatcgtctgaacaatctctgaaaagaagagagaattgtagtagagagatttatcttgagttcgactgttttctctgcaaatctatgtttcgtttaccctttttattaactccactgtattggcttgctatcaatgatgttcatggtttactc

SEQ ID NO: 134641 - DNA, 534 bp, Arabidopsis thaliana columbia
  unsure (1)..(534): unsure at all n locations
cggntcnctcttggcannccggtttggggagngggcccgggatntncgatngatgcacttttccctaaccattncccggcccngtgnggggaatccctttagncaactggatgtgtaggatcnncggtggggattcaaccncggaaccgcccccaagnttggaacggtcccaccggcattacaatctatcccgcgtaatccgattgttctagaccttgcctacaactgcatcgacttccccagttattgaaaacaggatgaagaaaaaaggaggcttctttagtagccgaatttcttctctctggtaaaagctttaaaccggctttctctctaaggttaaaaaaggatctcggattcattctccctttttatttaccagactcagaaacttgttgttgctctttcgtagcttctgaaacgaaatgcatgagatttctgttaaatttattttgtcacagaatcacaatttagacattttgttcttccattttagtgacacttggaattttggaaatagagaccagttttattggt

SEQ ID NO: 134642 - DNA, 546 bp, Arabidopsis thaliana columbia
  unsure (1)..(546): unsure at all n locations
ttnccctggngncnaattaagggncanctgagngggttaaggctcagngtctngcattcttctggacnttccgnctcactccggtcangatgtancancnccggattttccgaaggaccatgtcgtcacggccatgtttgtgggaatttcatcggcattgtatttgctcgctctctgcactaccagttctactcatggtacttctattcgctaccttatctactatggagaacaccgtttccccacttggntgcgcttgatcatgttcctcggcattgagctctgttggaatgtttatccatcaacaccgtcctcctcgggtttgctattgtgtctacacttgatcattctggtgggtctctggttagctccttcagtcgatccttatcagctcaaagaacaccctaaatcccaaatacacaaaaaagcataactgaaccttttgatgctcttttttttcttcttgtttccaagacttagagataagctaaagaaagtaacggttaacttaactatatgtgttttgtaaacatggtgatttataat

SEQ ID NO: 134643 - DNA, 544 bp, Arabidopsis thaliana columbia
  unsure (1)..(544): unsure at all n locations
tgtccngngcacccgttngagaccgacccttngganccgtttgcaacgattntntaacccgggnggtgacccnggggctnttcctngcgntcngatntattngtccgncgcttagagctggtggagagtnccaactcgcagttgagaccctcggcattcncnttaatccgcgccttcagattcttcctcgccgatcaaccaagaagacgttgacatcttcatccccccaaaaatcagcagatggtagcatggggactacgggtactcgtcttcctttccttaaggattgacatgtctgacttcagcatatggactacagtacatactacataagttggggacactcttgaacattgtacattttactgtaagtcttggtaaataaactgtttatatcgttgatcatttctcatttgcaatttatgtgttaccaatgcaatgctctttcttatttacccgagggggtaactctgtaacattgagggtgagagtgtgcaatctgtagatatttccttacctcttaataaatagaaatttctcaaat

SEQ ID NO: 134644 - DNA, 553 bp, Arabidopsis thaliana columbia
  unsure (1)..(553): unsure at all n locations
ttttatggggttncgaccntgncaagctggccnttncccntcatnggacccgtggggctttttatccccccaatgtnnccncatcccccttattggcttagggctgcnggttcttacctcttngcccaaggtgnaagaagctgcggatacncctatatatngctggacncatcatattattagtggncattctctgangcatttgtgtnccgctatggncccctgtctnccttacccctcatgcttgcgaaaagaccccgttccaaactgagaggattagcttgtataagacatggaagaaaggatccgaggaagaacggttcgagcatagctactccaacgttgcagtcgaagagactcggtagattattttgttgactcgtaaaatgtaagatgatctttttcttttgatagtttgtgtgtttacggttactggctaatagaattagatatagaaggtacagatttatgatccagttggaaactaatgttagcgatctgtaatcttatcaaaatgctgcactctaccattcataaatgccctttgtttctt

SEQ ID NO: 134645 - DNA, 547 bp, Arabidopsis thaliana columbia
  unsure (1)..(547): unsure at all n locations
cnatcanaaanaggacncgttggnttcccccgtctcttccnccnggacnttaaccattnccntngngnccccacatgtttagggggngccatttcgggaattgtaggncttgcctaaaggcccagtgagttgttccatggagtggtaaaggtaancccatgggtgagccttgatgagaagagncccgtgtcccgttggatcatttatgggaccccgtatgatttatatgggccataagattgaaaggagctaaagatcagtctttgttcgggttctcttctttgtctgagttaacagaagattcaagctttttctgaagagtttgttgtgagataaatgaagaagaatggagacattaaaggcttggctcctcggaaacataagttttcaaactggacacacaattgtaagtatgtaactgttcacatatttaagtctgctccatagtcaaacttcaaagttcaaagaactcatcttcttttttttttgggtcaagacataaaataactcatcttaaacggcaagatttgggctgttagtgggctgg

SEQ ID NO: 134646 - DNA, 530 bp, Arabidopsis thaliana columbia
  unsure (1)..(530): unsure at all n locations
acnccggtcccctggcccccggggaccttttncccncagggcccattctattccccttgtccaaggaacccgtcgttattgccgnctagattgaccgggacnggccagttngttatatacccnttttcccnggttaaaactncattgacccatcccccctgaggaccgaccaggcccaaaagatccaagtcaggaaggaccgacccaactcactcgcaggtcttttcgttaccagatagataccataaaaacaattcatttaaagtttctgtcttgggaacatgattttatactctacttgggttggtttagattcttcctttttttacggatagtattagagaatggcagaaacaaccgtcggagaggattccaaagacttgcctacctgtctttgttgtggtattaagccaaaccttggtttttttgttgtgcaaaaattgttgttagggtgttggttttttgtttcggatgatgtggcagaaacatattttaagctttgctctaatgccactctcaaattctttgtt

SEQ ID NO: 134647 - DNA, 532 bp, Arabidopsis thaliana columbia
  unsure (1)..(532): unsure at all n locations
angggcgngtttcaacncaancaagttcagcncggtatgcntgaaaccggggcccatggancatccatctgacnaagaaccggaggatcatgtcgtgccagaagtgngaccattctggtgncatcaggccnccggagatcgntagccaattcgcccttaggccatcccaccgacaacttacaacgatgcagttttttccagaattccatcgtcagaacagagaatggtgaaagaagagaacagtatcagtaacatgttctgtggaattgatgaccagtctgggttctggccatggcttgaccagcaacaatacaattgaatgtggtcgatctgttcttgtttgtattaaaattttcgttttctttaagtggtcagatgaaccaattcatgtttcaagaatctatatttagtctatatgcaccaactaagctagtagtttttttgggtaatgtgatgtaagagaattaatgggggaaatattcatcatattatatgataataatcaatcatatgggccatatgattagacatt

SEQ ID NO: 134648 - DNA, 568 bp, Arabidopsis thaliana columbia
  unsure (1)..(568): unsure at all n locations
agccttcanggttgatcccctggaaatcccgggacccgaaccancgncngacccggnttgcttggcctttgaccnccaacgaaccgnttaggcttccacaaaaaaccctttngnccnccggggnncaaggcgattctgaattccccncttgaatttnncangggaanccncnccctgaagatggtcgtgccttttacaaaccggaagaggagccancgaggaggaggaanttgaaggtggtgaaggaaagtgcttaaaggaaggaggagagtttacgccgttagcgacggagagaatgttgagtccaggtttgacggccgatagatgactgggatttgacggagtttctgagcatgccgcttttatcgccgttatctccacacccaccgtttggttatccacaattgaccgttgtttgaattctatttttctgtttgggtcagcttgttgtatgctgacgtggaattatgctatatcttttgcttattttatgttcacattcgagcaaaatttattcattcgtttatttgttttttaatacaactcttgatatttctaaattctaacc

SEQ ID NO: 134649 - DNA, 550 bp, Arabidopsis thaliana columbia
  unsure (1)..(550): unsure at all n locations
gngggccaaatttcccccccccaacgttccaacncnnngaacccggnnganttcnccaannnttcccgaaccgggaatttaangggnaaaagggttttgagnttccaccaaggttccaaatcccgggaaatccgggaaaganattatggggtccgggnttttggttgacctgccgtgtgtngtgtggtggccccatctaaccaaattccccaaaggngntggaagcctatgaaagtttgaaggcttaagcatgaagggggatttaccagagnggaatggatcataagggtaggggaaaggtattgtatgaaaccagtgttttggtgttntctatatctttttttttttcttttgatttagcaaatttttttctttcttagcttttaagaggtcttttttagctctctttttaagtttctgagctaagacaagaactttgctacctgagtctgtatctgaagactcttcctctcttccttcttttcttagcctttggtcaatgttttcaaatccgagtcagcaatcaaattggacaaatttcttgctcgcg

SEQ ID NO: 134650 - DNA, 566 bp, Arabidopsis thaliana columbia
  unsure (1)..(566): unsure at all n locations
gaaacgngnaaacttcgtacccttggaaccttcaagtccttccttggctntcnggttccgggctttggctcgccctngcntttaacggggngtntgtcccccaatggggtaatgtgagnaccaatccagggattcncaaaancnttgggnctaanccctgcntacaataaggccttggttccgaagggctgaagcacacgagaaacttgaaccacttcngaagattnctgtcacggacctgaaggaagatctttagaactttgatccttcaaatgatcaagctaggaaagggattcgacgtcttgaacctcttgctgctgagaagcgagaaaagatgaaagaagaagctataactaagctgaaggagatgggaaactcgattttgggtcgatttggaatgagtgtggacaactttaaggcggttaaagatcccaacactggctcctactctctttctttccaaaactagtttaatatcgtagttgctcttgatgtattgcttctaccacttaaatgtttagcaacaatctggttaatattgcaatgtgttattgttcttgatgcat

SEQ ID NO: 134651 - DNA, 540 bp, Arabidopsis thaliana columbia
  unsure (1)..(540): unsure at all n locations
anccccagccctaagggggncggctgaactgactccgtggtctgacgccccatcctgccggcttcattgggctggngttccccnaggaaccccccgnggtctcgtcagttgtgnatttcaccaatcaatcagagatgcgggccctatgattcgatctggcaancttcgcagtgttcttgcctgtaagatcagttggagtccaaggtgacaagagaacgcattctcatgttgttgctcttcgtgcagttaccagccaagatggaatgactgcagactggttcaattttgagcacaagtttctggacgatgtttcccggaaaatctgtaacagcgttcaaggagtaaaccgtgtggttctagacattacatcaaagcctccttcaaccatcgaatgggaataaagaaaacatatactgagtcttttatttatgggtgtctgcaattcttctaccatgtaaaatagattatcatcaaacaatgatggtgaatttgtgacggtgcttattattactattattagtagacaatggttttctgatg

SEQ ID NO: 134652 - DNA, 543 bp, Arabidopsis thaliana columbia
  unsure (1)..(543): unsure at all n locations
ctacaaggggcaaanntccctcncgtgacnacgngncggntntaccatgcacccaaacctccnactnntgtggcaccctngagtatccccgctngcccnggaatttccngacgatacaaatggnccagtcgggaatgtaggccttcttgctgccaggcttttataggcccgatactgatgcacccctcagatgtttatcttcgctcccctcatcccgccttctcgcagactcagggatcattgttcccacaaaataattgtgccataaacattttgagactttgttagttgttacaaagagtttgttattctacatgttttagactataaatgtgcttatagtgttatgtttctgcttaattaactacgtacgttctctnctataagatatcaataattaacttccatgtgaacatgtgtcatttagctataataagtgaatacgtactaggatacgttggtttatttatcaaaattgtacacattgcatttgcttcacaattgtttggatgactttacaaagcgcttgtttacttatggcct

SEQ ID NO: 134653 - DNA, 499 bp, Arabidopsis thaliana columbia
  unsure (1)..(499): unsure at all n locations
anacccccctttgccagaccnggggtcatccgtactccaggccatggtctntctttgnganatgtgtggtggtccnggaaatggaagctctcacccgaaaccgtgcgaaagatgtatatgngtttncgggaatgnccaaactgttacggtcgaggtaagcttgtttgnccggtctgtttaggtacaggtttnccaaacaacaaaggccttcttagaaggcctggtgctcgtgagctactcgaaaagatgtacaatggtcggcttcttcctgattcatgagaagattgttactgcaaatatgattttaagcacagagccagtagacatgatgatagaagcggatgaaaacttacacattgaggatgcatggaaagctatagaagaatgtatcgaattcaacatgtttttataatgctgctaggtttgtgttgtaaattctataaacataaaactttccttcttccccatacagactagacgaatcagtttcgactaagat

SEQ ID NO: 134654 - DNA, 541 bp, Arabidopsis thaliana columbia
  unsure (1)..(541): unsure at all n locations
aattgactgctcggggtgttccnccnccccttgttccaggnccccgaacgccctntgcnccttgtccanccaagggtgaaccaaagcctaaggaggttgatgtgcctganccagacccaaagtttacccnttccacggnttcgggaagccgttttggatggacgacctttatccntatgaaccgcaaccctggtgctgctaacagtaccggcccaatcacatcctgttgcaagtagtagtagtagtgggtcagagaagntacgcaacaaaatcgagggaaacttgtgttcggttcaaatgtagagcggtctactaaagagacaacaaaggttggagctgggaaagatagaaagcaagaggaagaggctgagaaggaagccaagttccaagcttttagtggtaaaaaatattcattgaggggttgaaccaaccaatgtgtggaaccaatctctcgtcttatttatgattttactcttgtgcttatgtattatctatggaatcaaacgtttaaaggaagaaaaaaaacacaaataaattcaag

SEQ ID NO: 134655 - DNA, 286 bp, Arabidopsis thaliana columbia
  unsure (1)..(286): unsure at all n locations
atcaatggantgggattgagactcggggttagcggaacacatacaagacgcaaatgctatattctcattggtattggatgaanaagatgttaatnncatacaagaggttaccnnnaaaggtaaagatcttctccaagtgattggtgactgcggagacgaataccgacgtatatgatgtgtanctatgtactctatactgtatacaatatcatcaactcatgtaattacacttttatgtgtanncgaatcatttttncatttataagacttctctggctttatttct

SEQ ID NO: 134656 - DNA, 552 bp, Arabidopsis thaliana columbia
  unsure (1)..(552): unsure at all n locations
annaaaaccgttccccgngcttaatgttggggcccccggaagtttaccngngntncntagatccttngccaaggncccccccccatttcangccncttccccntggagaaggncntggaaaattatgggggaaagccgactgggacctctgccaggcnttcccccgaccccttngngcncaagaagatgagcttgaacagtggantcttggagacgaaggtgatgttgaaatggaggatgccagaagacgagagtgaagaagacgcaagtgaagaagactgataattctgaagctatttgggtaaataccaattctcgtcatctttacttgaggttttaattcttttgatgttctttttntctttcttagttcttatggttattgttgttattagtgttgtgttgttgttgttggtgatgttgttgttctaatcatctcttgtttctttaactctggtcttgattatttgaataaaggatatctagagattgtgttgtgtgtgtttttgtaataattagagtttgataaaagaaaataaaatatttaaggtg

SEQ ID NO: 134657 - DNA, 520 bp, Arabidopsis thaliana columbia
  unsure (1)..(520): unsure at all n locations
ttgacccgggcccccccaggnctgagcttggacaggggcgatgtacctttggctccgtgtgggntgagtgggatgaggatgtgatgatgatgatgatggtgatggggaaatntatgggactggatcnggggactctcatatggagtcagnccctggatcccaaagataacggccattaccaacatccttatcggtcttttatggatccccaatatagatacaaggaaatgcggcagatcataactcccgtaggcaggaagcaactggaaccgatgttacaaantaccgcaaggttgtgggcgctgagctttcagagagaatggtgtatgaaatcaactgaagcttcaacaataccaagctccattgagctttggtaccattagtcattagataaaactcaaaattgtttgtattcatgtttcagttgttgtatatctatgactatgagacttgtacatggtgtctttctttaagtttgtattttctgattacctttatattgaaaaaatttctgtccaag

SEQ ID NO: 134658 - DNA, 525 bp, Arabidopsis thaliana columbia
  unsure (1)..(525): unsure at all n locations
gancccatccgggtttggtcccncactatcncagggcttgtgancatcataccaccggcaaatgggtctccaccagtcagtncccnggcccatgnaagtancgctattctctcttccctttatcgttcgccggttcgagctnccttagtagtncccttgtgactgtcgttcataaattctnccggtgggcatgatcgtcccggattggctaaacaagaatctcaacgcgggaaaattggattacttctattatctgattgcggttttgggtgtggttaatctggtttacttttggtattgtgctcggggataccggtacaaggtcggtttaccgattgaagactttgaggaggacaagtcctccgatgatgttgagatgacttccaagaaatcgatggaatgatttaatagactatccttagggacaacaagaagattgtcgatgttgtttgaataattactatgacaatgtatgtatcataatatgtaagaactagaatatataataaatttttacctttcatt

SEQ ID NO: 134659 - DNA, 573 bp, Arabidopsis thaliana columbia
  unsure (1)..(573): unsure at all n locations
aagcagctnttntccncggntcatcncggcttgtnagagggcaggatccagacccccgcaattggnnggtacggntttcaaagacttncggtctggttaccgancaaggagncaggatngatgatatgggtccccccatgacaactccccgtgctgcaacttcacaaggaaaatctcagcttgtgcaagccgcgaaaaccccaaaaatcaaactcctctctgacatgcttgctcttggtgatatttggcattgttctcctgatcgtgattatagtactcgcagcttgatttcgaacagcaagaacatttcgtttgtgtgtgttcattgatcttaaggcatcaatgactggaactacttggtatatattatatgttgaagagaacacttagaagttggttttgtgtttgtttgggttggttcagttcggtttgaggttctattggttaatgtaatagtgtgtgcgtgtgtggcttttttgttgtgcaaacattttgttggagatgacagaaactctgttttgtttgtgattctcctatgttctcctaaatctttgttgagaggaaacaaaaact

SEQ ID NO: 134660 - DNA, 420 bp, Arabidopsis thaliana columbia
  unsure (1)..(420): unsure at all n locations
aaccctnnggttaatnttgggggcacttttanccaaatccgggggtccccggntccngnaaanttccgggaattttgggntncctggttcctaaggatctnggcaggatcccttccaggttcccctaaggtttnctcaaccaccaaaccatttggagcccngngaaccaatccaacccacgggnattatgaattttggagtagcttacccattaaatgaatttttcgaatttaatgtggcagtagacataaaaactgaattataaatattaaaacataacattgtgtacatagataataatagtnttaaatatatattataattaataatatttaagtgagatattaaaaattaaaaccatttttgtataataaattgttattattaccttatattgaacaaaattaaatatttaaaccg

SEQ ID NO: 134661 - DNA, 576 bp, Arabidopsis thaliana columbia
  unsure (1)..(576): unsure at all n locations
aaaccctttggttnccgatgtccaccccggaggtgancatccccgatcaggtgggtgccaatggagtttgggaaccnctaaaagccgtgngancaggaancgttgtgncattngggaaatcccttggggattngtgaccccaaaccaatctccacggacttacaagcttggaccacaagattccggtcaagacatcggaagtcggagagcatcagcaaagacatggttcgtcgaggcttccggttcgtgggtcccactgtggttcactcattcatgcaagccgctggtcttacaaacgaccacttgatcacttntgtcgccacgctccttgcactctccttgcaaccaatccctaattattaatttttattttaattgaaagtggtgtttttatttaactttcgagtgcaaaatgtaggtttaggagaaaagagattgcagttttttaaaattggcaatgtaagataaaccagctggtttgatttttttcttgtgtgtgaggtgtttaaaatcacatgtataatggtttttgatgtatgtgtggtgtggcaaattgaaatagtaattgattttcat

SEQ ID NO: 134662 - DNA, 573 bp, Arabidopsis thaliana columbia
  unsure (1)..(573): unsure at all n locations
agaccttgcgcgtggcttcctgnaaccnncantncccncnactctgcacgggtcccaagtttaccgacttttaaggntggagccccangtggcttagactgngcttaaatcggcaagnatcnccctgnccttgaccgaagtgatttccgggagtatggagagaaggtcctgcaacacgtgtcgaactcattngaaccaaatcccaaatcttataatagctccagttaactacgaagggatccgcgtttcgggctttggtggatggtttcttctcagactttctctccatgatcctgttcttccccttaacatcgaggcacagagtgaggatgatgctgtgaaattaggccttgtggttgctacggcagtgaaggagttcaatgctttggacacctgtgccttgtccaacctcactcactcctcctaagattggcatggaacaatgtaggtaacaaatgcaaacaaatacagagagttcgagtttctttactaagacaatcattgcattgaagttatcaataaggtagtttttacagagaagacatgatcaatttattagagcttttgcttcct

SEQ ID NO: 134663 - DNA, 535 bp, Arabidopsis thaliana columbia
  unsure (1)..(535): unsure at all n locations
ccggnctgaattccagtcngantnncggtaccgtctncatccanncgtatggtccngngatacggccacgtatttnccaccgcngngttggaaggcccatttgttcgattggngcaccatgntggncgtancagcttgttaggcaagaggngnccatgtgaagaaaggggacgagcttggttcctttcatttggtggaagcacagttatatgcgtctttggaaaaggactcgattaagattgatgaggatctcttagctaacagtgctaggtccttggagacattagttactgttggaatgcaacttggtgtctcctttccaaagctggaaaactgtgtacttgagccctgaactgcttcaaactatgtgagttagtacgaaacgacagatgattttctatggtttggtttgatttgatttagttttcacttttcatcaagaaagaactcaattcctctctgtttaatacacaatgactttgctctgtatatataaacaccngtatgtcccgggcngtgatacttgttaatgttt

SEQ ID NO: 134664 - DNA, 513 bp, Arabidopsis thaliana columbia
  unsure (1)..(513): unsure at all n locations
ananagttggtcccctctttgcacgggttttaggcttntcggactttggnncaagggttanntgccggggaacttggaaagggtgcccggggtgaccccnttngcattgnccaaggcccaacctgggnctncccttcngcaaccacnccgnggcttcctctagtattcccgccaactcttacccacatttggaacccagcaaattccaagtcccaacaccagtgctggtttagcacaaaatcagagagtggagacggcaaatttcttgccggaacaggtgaaccgtgaaggcatgcagaatccatttgctcctgattctaatctgtatgaaaccctaccccattggaatcacaagcattaaccagaaaaagagtcattggttttgtgattttgattgaggtaactattgtctgtatttttatttactgtatgactcagcgacggtaaactcttaatattatatatatgattggacatgatggaagaatgtataagctatcgtgcttctaaggc

SEQ ID NO: 134665 - DNA, 487 bp, Arabidopsis thaliana columbia
  unsure (1)..(487): unsure at all n locations
gcnccccccnccccctgtctgtcgagatatccccntgncccttttaggggggtgcccctcngcggggggttccccaatcgnnggggncaggccttgctgaattcttcaaaaccctcggngggatgggcccccttgatctntccgcngntccagccnacttctagactactcgaaggtctgcaaacgtcgatgatgccctcgaagatttcntcggtatcacacagcaaaagtcncctaagtcaaagcaaaaagtagcagtagaggcaagtgaaaaggagcagaagaagcaagtgcacataaacgcaagtggaggaaacaaaagcagagcagtatcggctgctattaggttgtttgtaattttagtttcatgcttttgaaaaaaataactctttgttggttgggagagactaaaaaaagtaggggaagagaagaagaaaaatctacatatatatttttggtagactttttggccaaaaatccgttaact

SEQ ID NO: 134666 - DNA, 501 bp, Arabidopsis thaliana columbia
  unsure (1)..(501): unsure at all n locations
ggctgggggccttccnncttgcccctgggggncgtggttgcctgntgatccctnccccccaanccgcccagaaagtcagccccgctgctacgtctgtcnnttaaccccntgtngcctaaggaactgaancggaaaaggccagaagggatccagatgaaagcagctctgcgtgaggctaatttaccagaagagagagagagagttgggaagaagagcaaaagaccgagaggacatgttgcggggaatttattttattcttacaaaaattggtatctgattattttattaaccatattcaattagagaatagaagaatagagaaaagcccttttgtgggatatggttctaaattgttgtttagttcttgtgtgtcagttttggctctcgtcgaccaaagaagattaaagaaacctctaccttattttaactcaattcttttgtttttgcaatgtcctttgctttccaaaattgttagtcttacttttcactactttgatagac

SEQ ID NO: 134667 - DNA, 514 bp, Arabidopsis thaliana columbia
  unsure (1)..(514): unsure at all n locations
tggctcttttccncaggggctnnccccggccgggantgngaaactcccttcccnttaccacgggggttttntccccngaccgggnggccggaagcccgntaaaaagggcgtgcacacnccttntcacgcccactgaacaagggtcttgcaggagaactngtgaatgtccttggggaagcaggccangtagtgccagctgatcttttgaagtttggccactcatgtaaggaaaaaggaatcaaaatngtatggagctcatttcaaagaaatagctgctgatgctcctaaagctacgaagatcacattcgataattctgatgacgaagactagcttagtttattattttaatggtatcattattttattatatttacttggacaatgaaacctgcatttgattttcgtttgtggtctggggcttggcccgaataacaaaaacaaatatatttcagaattttcattatatttgtatgcaattttgtgttactagttattaaacttttatttgtccac

SEQ ID NO: 134668 - DNA, 378 bp, Arabidopsis thaliana columbia
  unsure (1)..(378): unsure at all n locations
cccggattgggcncccccccnttgggncnggcttaccnncaaaccccnttgggaaaacccggttgaccccctggntgnnggggaaaggaaaaggggaggatggattngaaagtttggaagcctaaangctncattncaaaagtnaattatatgaatgtacttaatatggtcacaacttgatgaagaaggatgggatgattctaacaagaaaacatgaagaccttttgttgtaatttgtatagtttggtttagcattttattatctgttgtttatgtaattctttttcttttggatcataagtaggattttgcttgttgatgttcggattcatattcatcttctgggattcaaaatatttacttctcgtttctgtgacc

SEQ ID NO: 134669 - DNA, 443 bp, Arabidopsis thaliana columbia
  unsure (1)..(443): unsure at all n locations
aaaanccccctttggggaccctttaaccccctttggggnaancccctttnccccggntttntccgggaantaacttccccgggttggnacccccccntaannccctttnggccccatttgccccngtgggggncanacccatttgggcnccccaattattttggtgggagggttgatattggtccnccccagctgacatgcctctgcaagtggctcacgacattggagaatcgctgcaagagaagctcgagctactagaggagatcgaacgggcttttgtgcatcttgattatgagtacactcacaaacctgagcacgctagatcccactgttagctgtttatcctttttaaagatctctacgtttctatatctttacaaattaatcttcactgtattgttgtttagtagacaattgtgagataaaggaatacctttgtaact

SEQ ID NO: 134670 - DNA, 304 bp, Arabidopsis thaliana columbia
  unsure (1)..(304): unsure at all n locations
ttnccccgggggntattgtttnccccccaggtnttnnaccngggggaaccccccntgaaaaggnggtttgggggnttcaatgtgtggaggaaggaccaggggttcnttgatcctttgtgatggcaagagaaggtgaaaaaatgattctgtaaataaatcctacgttggtagcatgtaaaatctttttcaatttaaatgtgaatgaataatcncattgtacagtagcagattccgaattctttaaatttgtatccatcaatttcttctgtcaattattaatcaaagtacaaacatcattttactt

SEQ ID NO: 134671 - DNA, 394 bp, Arabidopsis thaliana columbia
  unsure (1)..(394): unsure at all n locations
ccccggnanggtntcaacccggntttttccccccccccnctgttccngggttntccccgnaaaaaaaggccgcccataaaccccgtggaggagctgggaaaccaagatacncgtgtgcttcaaatgcttagtccncccagaagtgtnttntagatacnttgngtangatttagttgccagaagagtggaacgagttgccgaaatgcttcaaggatggagaagctgtggattttgtttccgctctttctttccagcctaggatcgaggctacagtttgaaattttttagcttttattgtatggattgtgtgtattctttctattcaggaaaatgcaatgtaacttgatttgtaatctgttgacattggttagaacaggaatgctctgttttatgc

SEQ ID NO: 134672 - DNA, 526 bp, Arabidopsis thaliana columbia
  unsure (1)..(526): unsure at all n locations
angggntcccccnggntaaccccntggggnnaaccttccnccaatcggggggttccccgccccctgggaaccccccgggngggccccccccccgggnacccnggcccaagggggtttggatggggntcccgaccccgggnnacccttggtaancccttcagntcccggcntcaaatcccctttggccaaaccccncgggnctatccacgtacttccccccgtcactgctttttgaaggaagacgnatgattccatttgtcaaccgctcacccatcatgatactttgcttagctaaattatcttttgttttttccttataattccttttgtttagctaagttctattttcaacattttgtatttctgcatcttttccattagagattttataaaaataataatatagaaagacaaaatgtataattaaaaaacaaacaaattcctttggaaaatctgagatagtggtgatgcatgtttgctacaacttataaaccaaaaatagtaagaaaatgagaagattaaatat

SEQ ID NO: 134673 - DNA, 408 bp, Arabidopsis thaliana columbia
  unsure (1)..(408): unsure at all n locations
gngggcccccaatttttccgggggnaccccccccngnntaaaagaattcccccccnnggggngttaattnggggggttgggnaatcccgnggaatggtccccccgagtngngccaaggttnaagctgccgtcgtgggcagagcaaatgtatatagacccatgagcagcagattgtggcataagaagcagaaagaaagatgtgggatttatattgcttttgtcttctgggcctctctacacagaatctaacaaatctggcaataattctttgatttgtgtttgacccatagtttggttactngtatatgtttttttatgttctttttttctttgtcattctcttgtccttcgtgacactatgtaatgattaaaagcaaataattgatgcatgagttcaaatgttctttg

SEQ ID NO: 134674 - DNA, 525 bp, Arabidopsis thaliana columbia
  unsure (1)..(525): unsure at all n locations
gntgactancggncacannacccccgnctaactntcccgggcatttcgtgagncccnatgggtccaggttcccaaaanccnatgcatctttggggncccnatcaacggtcaactttgggntttgcncncnggngccntcnatcaactgtacaacccagtcttcttaccaggcactcgacgagatcagtccattgacttcctctgttgggaaccncgatgaagcgagtcgtggtgattatctccactgttttggtgtttaggaatcctgttagacctctgaatgctcttggatcagccattgcgatttgcggtaccttcttgtattctcaggccactgcaaagaagaagaagattgaagtgggaggtgataagaagaactaaaggttttaagtgcaaaaccaaggtttacttgagctttttctttctttccaagtttttttttttcttttgctgtttttgatttcattatgagactagaattatcatttctgttgactggtttagttgctttaaagactttgatct

SEQ ID NO: 134675 - DNA, 572 bp, Arabidopsis thaliana columbia
  unsure (1)..(572): unsure at all n locations
ananctcccggccggattnccccccgtnggcacancancnggnaactccccatcaggncacgcagatccgnttgaggcgaccananggnatgngttggtccaatacggtatgggccgcaaactgntgctaaaggtacttcacgccccggatatccccttcgcagctcgtgcaggaaggncagtgnccaatgcaaaaacttncctttacaaatctccactcgctgattgcggattttccgaccgatgtgaaccaaaggtgttagaggacagccattgagcacgtaccgtattctttcaagacaagagcttcaagctttactgggctggtcctttcttctacacgtctgaacctacttactactaattatgatcttctgatgaacatgaaatttaacatgttcttggagaatcatttttcgtttgtttgattattcgtcgtataacgttgtctgcaaaatgatctaagagtttgttttctttatcttatatttcatgttgcatatatgactttgtcatgtatcttatgttttaatattttcttggtaaatgtatgggtttattggatttgttct

SEQ ID NO: 134676 - DNA, 554 bp, Arabidopsis thaliana columbia
  unsure (1)..(554): unsure at all n locations
gcgttccngnggntnacccagcctntgagggcccccaatcccggttttgcgcntttttcnaaggccncgggctggccncccagtgntgggggatcatgcttctnccccaggaaggtccngcattggcncttccctttnacccncgnctgatcggatacaagtttccccngtctggnttttngcccatcaagcccgggnaaaatcgngcttcaaccactgccagaaattggcggcggatgancctccggtgatatatgtcagacctggatatgaagctacccttgattcccttgtgcaagacactatccgcctcacaacttatgctaaagatatatgctcggattcctgcgaaaaatcggaaccaacacttgcctacgttggtcagacaaatacagcttctgtcgataagagatggtcaagactacttgaacttaagaagaagtagaaacctttttattctttgaatctctctgttcaatgtacttcaaagtcttaaaaagattttgatactgttcatattccaatatatacaaaataaaaaacacatttacaag

SEQ ID NO: 134677 - DNA, 540 bp, Arabidopsis thaliana columbia
  unsure (1)..(540): unsure at all n locations
cccccggnnnaaaccnggggncncccnggcncccggaaanaggggatttccttggcaagggaganattnnaccggaggacanttttcnggctanacttggtaggacggccnaaatgctatgggggcttcaagacagggtcnctgggttaacnctggacctttctaaagntggttctcttccttctgttggtaaagttgctgcccctccttctgctcgttgtggcctttctgtctctggagatcctcctgctactgccccctggtttatcctcctacggccggagcaggagcacccgcgttgtccagtggtgcaaatgcggcaactccagtttcgtccccgaggagttccgatgcgtccttgctctctgtatcttttgcatttgtcatcttcatggcactcatttcttctttctattgagtcttaaaatttaattgcttcttgttgagttatttttgtttgctatgtagctgaagagtttggtgttactgatcatatttacctttcatgtgtcaattttaatgagaaatctccttttagtt

SEQ ID NO: 134678 - DNA, 511 bp, Arabidopsis thaliana columbia
  unsure (1)..(511): unsure at all n locations
ttnctggngagantncngggnccacaaacngtgctttcccctcatngggaacaacaacggtccaaagctnngctcgaatccngcaagtgactcgtaggccatttccttcggaaggggaacccaacttngtggagngganattggaaggncggttcaggataaaggaaatttccaattggggacagccantagtagccgtattcttggttcagtaccaagcaagttacagagccgcctctgagctcaacgaccatatcggcggctcgctggctttatccatagttaacagtccatggccccngatattgttagcaggagttacatggtacttcattggagcaatgttactccaacttgtggaagctgttcaacacaagctagaagataaagaaacataagattcatagatcatatatatgtacatcatatccctctttagagcaggtactcgtgttcacctgcaaatgtancaaagaacattatactntncaacaaatatacacattgaatt

SEQ ID NO: 134679 - DNA, 555 bp, Arabidopsis thaliana columbia
  unsure (1)..(555): unsure at all n locations
aagnttcaaccgggtntaccttaagnggtcnanttcccagggcntcaatcncctnngccncagtntanttccgggctttgcctancggacnntgactttccngtttcggagggcaaatctttggacttgttgagatcttcccaggggngtccatgtgaattttctgaangcggaangaagcttgcaccgttggcccttagangnccttcagcgaatccacgccgctgaagagctagcctctgaagaagncggtggtgtagaaatgcatgtcttggaagatgccggtcattgggttcacacggataacccggatggtctcttcaggatcttgtcatcttctttccaggttctcagagcctagaggtgctgaacggtcttggttcggctctttttctgtgtaatacttgtggagaagttaggtctaaaaacagttgacagatacaatatcatatacattaacactgtgtccgtgtaatgttctgtgtgacataagtaattcagaagtaacatcatatggctgtatcatccggtattattcttgactcgatgtccttt

SEQ ID NO: 134680 - DNA, 545 bp, Arabidopsis thaliana columbia
  unsure (1)..(545): unsure at all n locations
acatgcagggcntgcnttggccgttcnggttngngattggctagtgccccgnccntgngccnntctgnggagnactgncttggggatggcatggtttcnttggcccccatgccgacccggaagctttccctatttccgggcccctgctntccgcaattccnaggcaccngaaggggnggtaccaaaaccaagggngcatatattattttgcaggcgcctgatttctcggatcctcaatttcatagtttcgaagctgttaaaccgcgaccaaaggcgcatccgtattatgactttgaaaatgtcattgattctgatgatgagatggataagtcagcaatggacaccaataacgaacaaccaaatagctgaccgaagctgaaaaggagtatcttgaattgatgttttttacagttgttgtgattgctcattatttgcaaacataaaatggaatcaaatgtaaagaaaagagatgaagaaaattatttgtagaattcacatttaagttatgtatggaagatgaagaaataagaaccatcttaaatctc

SEQ ID NO: 134681 - DNA, 563 bp, Arabidopsis thaliana columbia
  unsure (1)..(563): unsure at all n locations
atnnggccccaattccaanttccggagggagtcccngccnttggggcanttaangnccccggccaaaccccnatgtacggngacccctnacagggtttntgataacgtttcccggnaagganccgcccnggntgctntttccggtatagaacccntcgnggatattgggcttaccgttcttgaagctagggcttcatgtaccgnctcttttagcttgcatgccatgggactcgagaatgaagatggggaaaattatggatgctgaagcagtgaaacaggcagtgactgatgcaatcaggagctggggtgaaatcaatgatccacagaactagattgacccncttttcattttttttttatatataatttatttcttattatacaaaatataaggaaataacacagtttctatagtatttctgcttcttcttttttctttttcttctgtccattttgtagtccagaatttccccgtgaaaagggataatgaagaaaaatcaattgtatgtttatttatttcacgtaagcaatagaaaatacgttcttaaggtacatcacctaac

SEQ ID NO: 134682 - DNA, 553 bp, Arabidopsis thaliana columbia
  unsure (1)..(553): unsure at all n locations
tgccctccccngggcaancccnttggnggaccnagcttncacaagggagtntcnctancntcagcgnggtgccctggccctgacaaacctntcattaccntcttacaacccttttcgntgacggaattgtcccctttgggngaaaggatggcaagtctcttgggaagctcacctcccagggggacaactacttaaaggcatccaaggagtccccgattccccatcaatgttgttctgtcgataaaccacgcggtgtttgtgaatggagataccaatatcagtatagagccttcctttggtgtggaagcctctgagctttaccctgatgtcaagtacacaagtgttgacgagtatctcagttatttcgcttgatgaacttcattataaacgtaatttaccaccatgacgcgctagtttcatgttctgtatcaataaaagaatggttcttgtaatggtgaatgtgtgtgtgtatgtgtgactaatcagtaatcacagtgctttacctctgtttccgagcttcccaagaaatatgaattagtaatatataattcat

SEQ ID NO: 134683 - DNA, 506 bp, Arabidopsis thaliana columbia
  unsure (1)..(506): unsure at all n locations
gnnnccntaangggtnaggcccctnaagggacggcnttttcnaattcccnncctttttngaaacccgtacccttttaaangtttttggaccggtccttttntgngatcnccctccacttgaanccccaatttnccaaaccacactccaagtccctggggttcaccccggaaaatggcctgcaantcacccggaactcccttcggctgacaaggtttcctaggtatcgaggtggcatccttttatggctccaaaacgcccctattgcaggatgagcaagtacttccttctgtggagcccttttcacaatgtagttgatacatatgttttctacttgtttatagggcggaagctactgttactaagaaacctgcttttcctccatttccaaaacctacaagaaaactaataagtagctctctaagctccgggcttatagattactctgcttctcatcttctttgaacgttttatatatataaatatcagattctcgcttgtggacact

SEQ ID NO: 134684 - DNA, 508 bp, Arabidopsis thaliana columbia
  unsure (1)..(508): unsure at all n locations
cacnaaatttggaaattccttttcccccttnnnncccccccccccccngttngcatatnatnttccctttttaannccngttgtntaacaattccccccnggggngtnttccccnccntggggcgtttctcccgtcccccgcgtggtntgatgatgcctactgtttgcgaaatgaccatgacgcatgtgtatatgcgtgatggagttgggaatggggacagcatgtngtacacagcatacagtgcaacgctgaagaaatggaagagcaataaggtttgtgaccctgcttacaccgctcagtagctgcacagggcctcggctaaagaagccgccttttgctaagtatgcgaaacatgcctttgcaagtccgccttctttgtcgcaaaatacatcgccctaatgcgtcggccagtatattaatacatgcgttctgatcgtttcgtgttgtgtaatgatcatggattgctcgattaagtatattgacattcgtagagtcacgtaaatcacc

SEQ ID NO: 134685 - DNA, 455 bp, Arabidopsis thaliana columbia
  unsure (1)..(455): unsure at all n locations
ccaatggggttnctttnaancccgncaggnaacccgggnccttccgantttttggccggtttcnattaagccgggatnttccggtttncttcttcccgggagggccccgtctntgnntttcnccggatgcaanggaaggagtgattccagngaagtttgggaaagtttttcagaggaatgttggangaaggtgtctacttggcaccttctcaattcgaggccggttttactagcttggctcacacttcagaagacatccaattcactatcgcagcggccgagaaggttctaagtcggctctaaaatgtctctggaagcttccaggganccatgaatgtatttgaaattttttgatgtagagaaaattagattcaattgagagcaagcaagcaatctcacaaaatttaactgtggtaagaaaagtcaaaatgtctatgaagatttgttgacttttt

SEQ ID NO: 134686 - DNA, 473 bp, Arabidopsis thaliana columbia
  unsure (1)..(473): unsure at all n locations
ancggtgaacctatcatgcccgnggcatgcggttgagttgcgtccccntacccccgcttctcggttagcnctggggccngaacccatcggatgaaagaggcgttgggtgggatgggngctncagtttccagtggaattncattgacggaactagttggggtgattgtgctcggtttctcaagatcagaagtctttgtggtgtactacttcaagatgtatttggcactagtccttctcggtttcttaccacggccttgtatttttaccggtgttcttgagcatgtttggtccagctccaagacatgtagaaggggaaaggcaagatcatccgacttcggtttcatcagtaccttaggtgaattagtatttttgttttgtaggttttgtctttaattcatagtatccatttgtaaatggttaaaattgtttcaccccacagccacagataaaaacttaagttcagtgcatagcgg

SEQ ID NO: 134687 - DNA, 489 bp, Arabidopsis thaliana columbia
  unsure (1)..(489): unsure at all n locations
ccccccaaccctttcnnntggggnnccagnttttccccccccttnttaggggccccnccccnatntcngggcccctggaggcctttttagcccccccttcnggaaaccccgagcccccttnatggggccttnggnagaagcccntgaatcctttntaacccttgtgtttcttccaacaattgttcttgggggaatttgaagcctgtgatcgatctctcggtctccacacaggtgtntcaattatttacccatttaacaaggctttcgtnatttatcttggatttgttggtaatgggactgactcttgatgaatgattcatgatatcactatttgtttgtgttgtgtcaagtgtgtgtgtaaaaagaaactcgagcttaggtagaagcattgctcactaatatttggttttcctaaaagtaccagatttgattattttgttataatttctaagatgtaaaaaaaaactatagaagaagaagagtttgatt

SEQ ID NO: 134688 - DNA, 499 bp, Arabidopsis thaliana columbia
  unsure (1)..(499): unsure at all n locations
atcccggcgggttcntgggaatcncccntgtttgctaagngtggncccccatagccccttccaaggtccattgccnncaaagggatagtgtcctcngcctttggccngggnattgtcctgangatatggtgggattggggattaattaagtcgcatccatttctggttggaggtggatcagcttgaagaagctctgcaaaatgtgcttgtatgtcttgagatgatcgtcttctcccatcattccaacagtacgcttttccacgttgctcccttacagtggngaaactgaagctaagatgagattcaacaagagagattgattctgagngtgcagactctttccaaatttagaccagagaagatcttatcttcttctttttttggttaatgtgaatgttaatgttgttatgttaccactaccatcgtgattgataatgtacctttgtttatttgttttcctattttaggaaagaaagagcattataaagtagattgaatt

SEQ ID NO: 134689 - DNA, 472 bp, Arabidopsis thaliana columbia
  unsure (1)..(472): unsure at all n locations
ttccggaaccnngggcccttncngggnanccccccccccgtagcttngagngngacccngggcctgggnggttnnagttggaggcccatgtggccagggtcaaccaggccccccatntcatnggatttncccatccctcgctgngcgacctccaaacnggccaacaatcacccagtgctgatagatctcatctgaagaggaaactcgatcttggagttccagtaagactgttggttatgcactcttctcttagcttctccattttcatgttctggtgaaaccacaccattgttaagttgtcaatttactgctgcttgtgtaatctggcgatttattcttttccatatttagcttgattacaaaccagagggaccttagattcacaatgataatattttgttgtcccataggctttttattcattgtaaactgatcatactgtactatgaagtctatgattataaagctttct

SEQ ID NO: 134690 - DNA, 456 bp, Arabidopsis thaliana columbia
  unsure (1)..(456): unsure at all n locations
ccccccnnggaattncccggnnaggntttggggnccccccccanggnccctcccagggggtttnccncccctggtcnaagggcccaaanttttccggggttttccaatggccggcnttttcgaaggtcgtntcntccgaagtgctagaagacccgacgagtttttgaacccagcttcgagctgccagcagaggccagttggtgaaagccngtttagagagcaagtttgcagctgctagcgagagcttgcgacgaggtattatgtttgcaaattcgctttacttgtaagtactctcttgcagaatacagcttgctgtattgggtaaccatgggacacagcatgttgaaacataacttcatagagaaatgcttgtttgtactttcctatgtatctcgaatcgcgacgatagctctttgtttgccaacaagttagataatgaagaaatttgcngagctc

SEQ ID NO: 134691 - DNA, 487 bp, Arabidopsis thaliana columbia
  unsure (1)..(487): unsure at all n locations
acgggccccccccccccccgattttaccnanttttaagaaaaanaagttcccnncttatncgggttnngaancccannnctttttccgaggggaaacccggaaattttccngggaatttcccgagtttttaaggggttttctaaaagncaccntttcttggtgggaaantcncccggaaggttctgtagccgtcagggataaacgtaagaagcgacacgcctgagcttggaccgatcgggaatttgttaacggaaagcgaaagtgtttcgacggtggcatcagtgttggtggtgcaacagtatatagcaagccgtccggtcggaatttcgaagaacgtcacgactgaagagtcgctggttgaggattctgagagtccttagtgaattttctatttgggattccaagactcgaaaggtcaaaagattggcttgtataataacatgtgtttcatattgtaaataataattgcgaataaatgatttctat

SEQ ID NO: 134692 - DNA, 582 bp, Arabidopsis thaliana columbia
  unsure (1)..(582): unsure at all n locations
tttgctgcccttngcnttnggntnnctcattcgggcccgtgttcgggtgaaatgtcnngnggnccagaaanangtnnttggaaattttgggncaaaacgccngggcaggnggttttccnttttccaagggaattatccccncantcctgcgttcgtagcccaacagttgtcggattgcttcccggnactcctttcaatcggcagatcgcttaattgctgcaaaagcgggtgtcttaaaacctggnttcagaaagtgcattccagttatctgttggtagcgctggtaactcggttaagactgctcggatgccggcaaacttcatgttcacggcacctaaacaacagtacatatgtggaccgagtaagaacgttagaccaacgaggtttacaaccgccgacaaaaggagaataactgcagccctaatgacctggaacattacttgcgtcttccacaaagcaacatgaacaacgcaactctccaaaggaacattatcataagcaaatctttctccagagtttatatggatttgtattatcatgtatggtttatgttttaaccaaataaaacccactattttaatt

SEQ ID NO: 134693 - DNA, 555 bp, Arabidopsis thaliana columbia
  unsure (1)..(555): unsure at all n locations
ccccnncnggatgnntnccccccgggcccnacatncccccntgatcgaancccctggctcngttncccngcngaagcaaacccntgttaatgcttggngctagcaacaaccccaacagctggaagaaccctgaagngtttagccccagaggggttctttggaggaggatccncncgtggaagctaccggtaatgacttccaggtatgtgccatttggtgttggncgtcgaagcttgncccggggattatattggcattgccctattttggggnatcaccattggtaggatggtccagaacttcgagcttctttcctcctccaggacagtctaaagtggatactagtgagaaaggtggacaattcagcttgcacatccttaaccactccataatcgttatgaaaccaaggaactgttaaactttctgcacaaaaaaaaggatgaagatgactttataaatgtttgtgaaatctgttgaaatattcccttgttttgcttttgtgagatgtttttgtgtaaaatgtctttaaatggttcgttctacgattgcaataat

SEQ ID NO: 134694 - DNA, 351 bp, Arabidopsis thaliana columbia
  unsure (1)..(351): unsure at all n locations
cnantttaccagttttgnnggnntggnnnattaccccntggttagacccngttgaatttttttcaggactttnttcccccacttagcnaccaaagccagcaaccgcaaggcncaggagatccaggtgtctgcaccaccaatggcatttgctttagaggcaagtgaaagggaagccgacgcaggcagcgagagaggttcaggtcccctgcaagcttacaagggagatgaaggaagaaagaagaaaagccttttgtaaaacgttcacatttgagattctcttttattgtttgtgagttttaattatcacacgagtttgataatgatgatatgtgaagtagcgttttgatgttt

SEQ ID NO: 134695 - DNA, 428 bp, Arabidopsis thaliana columbia
  unsure (1)..(428): unsure at all n locations
aaccgattncccggtcaaggcctcgntcttaancnatggttntttcgtaaaaccccttcgtttcntgtggaaggagtccgtgatgatggttcngattnaggttangtgctaccggtagcgttcgagccagtgctgtaccgaatttcanccggtagtgattcggtacgtgcaggagaccggtgggcttttcntagaaacgcgtcgtttttgtggaggaactcttcggtacatgtgccaagaggaggagtcaataaagacggcgaaggaacttcggttaaatcgaccggtnnaannngctcaantagcggtacggtgagattaccggtttagttgacttttctttttagccctacttttcttttctcatctttttcatttgtttttgtttgggattgttgataaatacgcaaatacattttcaatttttt

SEQ ID NO: 134696 - DNA, 480 bp, Arabidopsis thaliana columbia
  unsure (1)..(480): unsure at all n locations
ccctcagggcttgccnagtantgaccnacctgattncagtntggagtcaaanggagcattgncccctgnccgaggggnacncaccccaaggccccagagntcaacnagagctgaccataagcttngtgcttcctccggttcntgagntagtacctgaagatgttcgaagaaacttggccaatgcggttttgaccggtttagtggcgnctatgcngcataaggttaatggaagcttgcttgctgattatagcaggttcaagantgaangaaaattacgaaaataatcgagtaaactctatttttgttgcctctgtttgaccatgtatagttctcaatccgttcatatatcagtaagaagctactagtaagttatttaactgatgtagtcaagttaagaaatcatttagtttttcagttggcgcaaattttccaaattctttggtttagctgaaaataaagttatatattgttttgattatt

SEQ ID NO: 134697 - DNA, 576 bp, Arabidopsis thaliana columbia
  unsure (1)..(576): unsure at all n locations
cgnngnctcccccggtntccagngnttngttnaatggcgcatttccnattcngcttgntntcngcagctngcccggtgttctagaccntttttgctggccggagttggaaagtccccaccaggnnttcnnggncactttttgctggtgncatcaaccaaggggaaaggntttaatcgtgggaaacggatcaagagggtgatgattcagtaatcactgctaatgtgcctttgaaccaacatgtttggctactccactttctctccggtccatgacacaaggaaaaggagaattcacgatggaatacaaagaacattctgctgtgtccaatgaagtccaggctcagctcgtcaatgcttatagcgccagcaaagctactgaataagcaaacccttcaatccaatatattatggtttgttttctcataatgttgacataatttatttatacggttcacacaaccatcaaaatcactcaacataaactgcctaatgggctatgtcagaaaatcacttatgtttattgggccattaggtaggtcacattttttggtatccnccagtcccaatcattttgat

SEQ ID NO: 134698 - DNA, 482 bp, Arabidopsis thaliana columbia
  unsure (1)..(482): unsure at all n locations
tngngttgtgcgaaccctgatntggacccattccgcntgaacggncctctcaggttctctattcgcgactggctgngatgccaagcctcgggtngaaaatcaactggatcaaagggntntacaattacatggcgccttatgtctcaagcaatccaagacaggcatatgtgaactacagagatctagacttcggacagaacaagaacaacgcaaaggttaacttcattgaagctaaaatctggggacctaagtacttcaaaggcaattttgacagattggtgaagattaaaaccaaggttgatccagagaacttcttcaggcacgagcagagtatcccacctatgccctactagaagctaggttcatgaaaccaataacattatcaaaaataagaataaatgataattgtatacaacatgattcgtctttctttatttcagacaatgtggacactactctaaataaaatgtcatttaccttac

SEQ ID NO: 134699 - DNA, 490 bp, Arabidopsis thaliana columbia
  unsure (1)..(490): unsure at all n locations
ggaagnnttcggncaaactnttcccggnaacgncccggccggaaggaaaggagaantatatgcctcncgtttggnacncnganctttggggatagaancatttgttataggtcnccatcatcagcaaaacgtgtggatggagtttgatttagctaaatcaagggttggtttcgcctggtaacgtcagatgtgatttagctagtcaacggctcggattaagagattgataggacttgtttaagtcttctgtgtcgtgtgtgacatgagaatatcttctagaccattgatacgtttttatagttttgtgagtatagcttacagtcttcttatacgattatggtacgtagagttttttttttttgtggggaattttgtaaggatgtgtattataggaaatcttcacttttttcgtttaaaaattataaaattagaaagcgatttagatattttggtataggttcccttcctcagtctgcaactaattccactt

SEQ ID NO: 134700 - DNA, 474 bp, Arabidopsis thaliana columbia
  unsure (1)..(474): unsure at all n locations
cccgcnaacgcgtcgnacgacaaaccnctcgtgaccccccttttggccctacacaaacgttcncgctctagggtctnatggcttggcngcgtggcttntatggnttnacgntggcttccacaagaacccaaatgctctgtatctttacttagctcagtttttgctctgtttggtttggaatccggttacgttccgcgtcgggtcgggagtagcggggcttgcggtgtggttgggtcaatcggctgcgttattcggatgctacaaggcctttaatgagataagtccggtcgctggtaatctggtaaagccgtgtttggcttgggctgcctttgtagccgctgttaatgtaaagcttgcagtcgcgtgagatctgtaaacgctatacgatgatgtttgtagagtctgagtcatatgagtgtttcttgttgtttttgttttttgtgatatataccataaaagatgtctttgcgatcc

SEQ ID NO: 134701 - DNA, 473 bp, Arabidopsis thaliana columbia
  unsure (1)..(473): unsure at all n locations
aggcctagcgtncggttcaggantganctngctcaactttcgaagnntgntggtagnccccnaacgtgggaaccngctaggggcgacttttntcccaacggaaggcgactactactactactnnctactactagtgtactgggatcatctgaaactgagaagcacagctctgatggagatggcgacaaggtggttggagggtcggcatttggctggaacttcataacctctggagggccaggcactgaacctgtttattctggaatgtcaaaggaagaatacagaagctctcacccaattatgcaagtggaggcagagcttgagttgcccaacacattctaagctttgttagtggtgtttgtataatattattcactttggtatccgttcatcccaatgttttatatgtatcaactgaaacaatggattagcttctacccatgaagccttaattagtacacaatatgcttaac

SEQ ID NO: 134702 - DNA, 477 bp, Arabidopsis thaliana columbia
  unsure (1)..(477): unsure at all n locations
ggtctcaccttcncggnccttttcatnttcccccaggaggtntngagtctcttttctcggccaaaatcctcngttccnngtnctggnaaccctaaaaaccgntgattgccntgttgcccattcatctctcaagatttnccgccctgcaaatccttccgaagaagcacacaacacagaaactgcacagagagtgtggaaaaagacgttagagctggtgggtcttcctctcgatgcagttgagaagctcatagaaggggaaaatatccaatgccggtatggagcacaacacgaatagtctttcaaaattaccacaggttaagtgacccattacagatcaaagggtaggtaattgagaaaatatcttttttttttgtttccttgtattaatctacacgatacagtggggaatgaatcccccaggcatgtagtttgcttgagaatgtttgattgttggataaaagtcaagctttagctacc

SEQ ID NO: 134703 - DNA, 377 bp, Arabidopsis thaliana columbia
  unsure (1)..(377): unsure at all n locations
cccaagattttaggcccanaaagaccatttgnttccaacttgggaattttgttggccgaatttncaattncatcccatttgnancagggagaagnttatgtcccgncattggacttgggtcggtgatggcaagtgtgacttggcccatcttggtgaaccgtttngacctgaagagttnagattgnncctncagnatatgttaacccagatctagtagagggagctggaatcgatgtttgccgaaaatttcctcttgttgtctttccatcttctgcttagtttattttcccatggaaaaccatttcctctccatgagcttaacgacctcacattgtttgtattattgtttgtgaaatgttaataaaacaatttcccct

SEQ ID NO: 134704 - DNA, 486 bp, Arabidopsis thaliana columbia
  unsure (1)..(486): unsure at all n locations
tntggtccaatccncggtccagaccggatngagacctggttggttggaaccancttnggcnnccgttncggtgatgatgtgacccattttngaccatttangcaagccttggggttggaatgngngcatttttctccnctttttccttgaagcagagtattcaagtgatcaagtctttatcgccaaggctgtgtttgaaggggttaagtttgagncccaaactatataaaacttttggagatccaatttagttaaagtgtgtaatatagagtctatgtagtagattgaatctatagaaagaaggtttggttagaaatcttgagaataagagtttggttgacagtttggaattatagtatgtctttagacattctaaattaccattaaaatctagataaactttaaattgaaaagcccctttttctgtaaaactcgttaagtccatattataaactttaaattgaaaaagcccttttttgttctttt

SEQ ID NO: 134705 - DNA, 473 bp, Arabidopsis thaliana columbia
  unsure (1)..(473): unsure at all n locations
aggggcccctggtttangcnggtttccgtgagtgaagnncgcngnccttgttcnntaccnatgggtattggtggataccccancncttccattttatgctggatggaatgcatcaggaatgtccctcatcttctcaatggctccgccagttcgatcgtatttatatactttttggtacctgagacaaaaggccgatcacttgaagaaatacaagcactgctcaacaactctgtgcaataatatcatttttctttttctttttgggtaaatgatcatatatataagtcgattgttgttatttggtgtgagtttgaatgtgatccgtgtgcgtatcaaattttggatgggaaatttgaaacagtaaaaatttgtatattcctcgtttgggaaaaatgtatgttttggttagttatatgcaaaaatgttgttgaagaagtttatacataaaaagttaaatacaaaaagatggtaag

SEQ ID NO: 134706 - DNA, 466 bp, Arabidopsis thaliana columbia
  unsure (1)..(466): unsure at all n locations
aaaaaccngtcnccaaacccntgnagatntcancagcccagatncccacttcacccccccccccancagttcaacnnccncaccaaaggtaagacatggccccngtancgtaaaaataaaggngctancgtttggtagagaaggcgtttccatgtatttgtgtatgttggggtaattgaattgggaataaccctttattttgagagtttttagaatcagtgagaggctggtgagggttaagagcattaagcttaggacaatgagattaacatctcaggtttttctctatctctatctcgtacacacggaatctcgctgcgaaatggtatgtgttcactttttctctaaatgttttcggaatctcgtgggatgttatttagaagtttggctcgtacagtttcaggttacnctaaattctaaagcctgcttgtaagactcaatgcnataaattttatagtctcttgtt

SEQ ID NO: 134707 - DNA, 467 bp, Arabidopsis thaliana columbia
  unsure (1)..(467): unsure at all n locations
anttcgttccccnccnccgnggnagnttancccggagggtttctgntggggaaatggggatctncgcagtggacnccnacagtcaactagtaggccggtacagtgagccagcaacncggatggacctgcacgaccgcttctagacgatcttttaggttaataaaacagnccaaacatatacaagcagttgaagctggtagctaagatctttagtcgggccaattcttcgtccatacaaggatacaagcttgttccgcatgttgccacccaaatccggtatggaggatatatgatcgtctcttgagatgggattgtgttgttcgctaaccgatctcattctccgttcacagagagtagaaagattatatatgtanagggcttttgattgttgtaattgtgcaatctttgattattttcttggtcactgtaaaataatccagcttttgatatatttacttgattaactt

SEQ ID NO: 134708 - DNA, 474 bp, Arabidopsis thaliana columbia
  unsure (1)..(474): unsure at all n locations
cccccnttcccnggggnccaaatctttngggntnaccggattncaancccccaanggaaacccnttcncccccaagggttggaaagaaattcnggnccccccaatatctggngcttcatcaaccgtgtgccatagggatgaaaggccctttcgagtgctcttggaaaaggatgttccaatgactttccaaatggccaatgggcgaggacagaacatttgcgtctgccacacgggagagcgaccatacatatgccaaggtcgatggatgtggattgtcgtttaggtttgtatctgactatagtcgccacagacgtaaaaccatgcactatgtcacatagaaaaaacggcactgaatgcttaaaaatggtggctgaacaaagtgaaatggcctctctttggaatcgagagttgttgtaacatgtaatatctggttggtttttttagttcttttctagtggtttagaccgttgctat

SEQ ID NO: 134709 - DNA, 392 bp, Arabidopsis thaliana columbia
  unsure (1)..(392): unsure at all n locations
gacnccccntnggggncccncctaagnnattttgccccccaggggttncaanggccttggtncccctaggtggaggccgggtccccngggtggnngcctttaaaggggccccggatcaaggtccgtgttggcccccaccaggaggnctgaagttaacgcttgaaatgtggttttgtaaggtaancggttctaacccccaaaaaacaaatcaaatgaaaaacaaaaaaaaagtttgggtttttaaaagaagtcttcttttttttgggtttatgggctgaaaaaattgttgtgttttttgtattttattttttgtttttcttcttcccaatgttgttgtattgttaaaataaacttttgtttcattacaaataagaaatgtactattttgcatt

SEQ ID NO: 134710 - DNA, 418 bp, Arabidopsis thaliana columbia
  unsure (1)..(418): unsure at all n locations
cgccctttggganctgntccccttcngtccggcccggatcccggntgccccnngtcngagggtttcnattcntggccctttgtcncaggaatccnagncaagcnttgtgaactacagggtctagacttcggccggaccagnaccaccgcaaaggttaacttcattgaagctaaaatctggggncctaagtacttcaaaggcaattttgacagattggtgaagattaaaaccaaggttgatccagagaacttcttcaggcacgagcagagtatcccacctatgccctactagaagctaggttcatgaaaccaataacattatcaaaaataagaataaatgataattgtatacaacatgattcgtctttctttatttcagacaatgtggacactactctaaataaaatgtcatttncctt

SEQ ID NO: 134711 - DNA, 425 bp, Arabidopsis thaliana columbia
  unsure (1)..(425): unsure at all n locations
ccttcaacccggcgggcagnttcagcccggttcaactgttgggcaaccttccncgtcanntgttgggattgaaggtgaagatctctgngttgttcagagctcaatgttgatggttgagaggagacatagtgactaacagagcagcaaaagcacttgcagctctcaaaggaaaagatcgagtaactccagatgatgttgcaaccgttatccctaactgcttaaggcnccgtctgaggaaagatccactggaatctattgattcaggagttctagtttccgagaagttcgccgagattttcagctgaataggagattcgattctgtgatcatttttctttaactttttctactctgtaaacggtgagaagaaccaaaactataaacaggcaaatctgattgaatatagagtctatgctttattcatt

SEQ ID NO: 134712 - DNA, 437 bp, Arabidopsis thaliana columbia
  unsure (1)..(437): unsure at all n locations
ctntccngcctttntcccganaatgaccncccggannctggtgctgggnactcnaccgcccccgggttcccncccggaggatntccatgctttttggccccccttaaggaaaattgtcccccttctgggaaagaagggaattgncgagctcatgagaattgctgtcagcttagaggagttgattttcaactctgctataaaccaggaggattaccttggcaagatatccttaaagatgcggactatgtaagagggcaactatagtcaacaagtggcgtcgttctaagcggtcattgaaacttaatgcatagataaatatgtctaatgtatctattggtttgacttatcaaacaccatttctcgtttctccagaatcnacnaggaaaaaaaagacattgtttggtgaaaagtaaaaaaacaaactagttgttttctcg

SEQ ID NO: 134713 - DNA, 480 bp, Arabidopsis thaliana columbia
  unsure (1)..(480): unsure at all n locations
ancactgnggttgtagcccngccatttngttcaattcccccgnccatttttgacaattggcntgccngtntctcgtcttgatgcncctccaagtgtcccagcccaaagccggcttcngtcaacgaaacgtgatggttacgggagactaatactaggagacataatcacgtcggtgaccggtacaaaagtctctaacgggcgtgatctgtaccggattctcgatcaatgcaaagtcggtgatgaggtgaccgtagnggttctaagaggcgatcacaaggngaaaatctctgtnactctcgaacctaagccggacgagtcttagaaacgtcgttgaaagaagtaaatatataacgtgtngtaaaaaagaaagtccggtgggttatttctgtatatcaattgttcggaaaatagatcgtccaattgtgtacataaaaaatcngtttacaattgcatacatgcaaagggtaaccgganataacc

SEQ ID NO: 134714 - DNA, 354 bp, Arabidopsis thaliana columbia
  unsure (1)..(354): unsure at all n locations
aaccccttgaggnncgggtncttccagannccttttttgcaagcgncnaagtcccccaaggaacctattnggttccangattgccagggatcntccatgttgcnngagacacttccccccagatggtaggaactatcggaaagcatacatgcagatatatgagcagcaaggaagnattagagccctggaaagaaactgacttcatttggttttaagagtaaaagtgaccagttttatcttggaatgagattagagatttgtttcacaactcttttggaaaaagatttttggacccctttaaaggatagagagcctgttgttgctatggatttatcataatganaaacctttggt

SEQ ID NO: 134715 - DNA, 350 bp, Arabidopsis thaliana columbia
  unsure (1)..(350): unsure at all n locations
cgatggganttngncccccntaccaaaacccttggcgnctttaaaggtgggatttccccnnccgagggggtaaaaagggaaccctcaattccttgggttcnccnggctggctccatttttaatgntaanaaaatanaggcctttttncccatttttcctttaagggattttccgaaggagtgcccttggtgggtcctctgcgtaggtgttcctttttattggtgtctttggtttgttaacttgaataatgaattattatttgtccctgtgaaaacttctattgtatctttgtaatcgtatggatacatttcagatgttgttatattagattgattggtaattttgggaat

SEQ ID NO: 134716 - DNA, 226 bp, Arabidopsis thaliana columbia
  unsure (1)..(226): unsure at all n locations
gggacccaaccaccacccngcnacttcttnccatgngggatccngngaatattaccgtgggaatcggttattcagaacttncgaanccngtgaagcaaacgagctagatttggaattgagattgtaactttgactttatgtatgaactcatattattggatataaggccatggagttgtttatacattcaaagcagttaagagaaataatatataggtcatttgat

SEQ ID NO: 134717 - DNA, 325 bp, Arabidopsis thaliana columbia
  unsure (1)..(325): unsure at all n locations
tcccgcnccggcttgatggaaaaangngttaaagttcncccaaaggtatnaagntcaaggcnccaaaatnatggcccttttnaaagttccagccaaaaatggtttaggatatatttttaggtagctccctattaaaaaaagcaataataagtgttttggattttggttccttctcttctgctaatccttgtttatgtttagttgaaaaagtttgcttgcattgttaagtctgttataatattattgtggtcctttcattcacagtangtatgtttatcatcatagtcaagttgatgtcgtggtcctctcacggaccagtncaagt

SEQ ID NO: 134718 - DNA, 537 bp, Arabidopsis thaliana columbia
  unsure (1)..(537): unsure at all n locations
aangcttntncgtttggaccgggaccnncnaacgttgggntacccccanttnttttggactggttaccnctccaattgtttgctggccgaccattnaaccggatnccgaccagtnatggtggatatgctgcttgctacncntacagttcagcaaaggtgcattngncggatgcccgcttgaaggaagncatttncacaacacgtacaagtgagaactcacggttctatgggagccagtcactagctgcgtctgacatcctccttggctctttgccaaggccacctgccgctgctgcactctaccgtgcgcttggcgatctgtatcagaagatggggngtgaaactgttcggtctccggcaatttctccattgtctgaagactaaacttgttcgattcgcttcatctcgttggaagaatgattgacaactatcttgtatagattcatgcaattcttgaatgtacatagtttgtggaggtttgatagtatgtggtttgtaaataaacatacattattatctgaagttataaattgtttc

SEQ ID NO: 134719 - DNA, 532 bp, Arabidopsis thaliana columbia
  unsure (1)..(532): unsure at all n locations
cnccccggtacnattggngtcccagggaggtcccttggnaacccntntgttgagagtgagtngatgatcccggtgtttncccggaggtgatggtgtaaaccccgtgatgagagnctccgagaagattanctggggttcgagaagaggtggaagagatggtggaggtagtagagagagaggtgntggctttgcgggtcggatcatgaggcttttcggatgttttagtggatcatctggatcccattgctgctgctgctgctgcatcatccgggtccgggtccagaattcgggttactcgtagaaccaggtcgttctctatgttcagtacggcgtcgtcttcgtcaaggagacgaaattggctagcgtgattactagaattaccaagctctcttctcaggtgaaaactaaacacgaaagaacacactcttcttctgtttaaatttttcctatgttccttattaagtttttgtctatttcagtgtaatgattatattcattcctaaaatttgaatctatgcgagtaaattgatac

SEQ ID NO: 134720 - DNA, 354 bp, Arabidopsis thaliana columbia
  unsure (1)..(354): unsure at all n locations
anagggttnnngtaggaaagacctgcnaggggncttccacnccnccctccaggacttggncccncctcttccactggatcctgggggtccncacnccatctgtangtaagtgacgagctggattcagctttacttgtaactgaagctgtcttattccatatagctggtctgaaaccnctctttttttggtataaaaataaaaataaaaacaccattttttggctatacacagccatagtttgtctctgattcttactgctaatgcacatttttttggtagtagcgagatcatcataagattgatataagtttttatcattattattattgttagaattatttgtggtttcttac

SEQ ID NO: 134721 - DNA, 507 bp, Arabidopsis thaliana columbia
  unsure (1)..(507): unsure at all n locations
anaacgggccnncagaacccngtncngtnaanggggtaaccggccggttattcccggaggntaaggatntccccatggggtttggaacccngaacccggcccatgggttccnccatntccttttgtgggaaggtaaattattgcccncgtggttntcaggcnttggattggagaccgagccataaggttgaatgtacccccgtnggatttgtgggttnccggcagccggcggagattggcgacgacggtgaagcngtggcngtggagattgatgataatcatggtgagcggtaacggctctaacgctttttttcaaggaaatgactgaaatgccaacagtttctttgactgttgagtttttttttttttttttgggttatttaattatgttttaaaaaatttaatgttaatttcttctcttaattaattagttttggctaatggcgtttctgaatcttctgatactaaactggcatgttattttaaataatatagttttttgccgtt

SEQ ID NO: 134722 - DNA, 301 bp, Arabidopsis thaliana columbia
  unsure (1)..(301): unsure at all n locations
anccnngggagggganttttttnggtttccccnggaaattttgggancccccccggggccntttgcaagcccaaagggaaagggatccccggagncnggattcatcattccntatccatcactagtcttttccacggntaccttgaaagaatcttttattcattaccaagatttgttttcaacttttgaatgtttgatttggggatcttggaactgcaagaaaattgatgatgaatagcgatggaaggcccttcaaagggcccaagaaaggccttgaaagaattccaataattatgatgtt

SEQ ID NO: 134723 - DNA, 220 bp, Arabidopsis thaliana columbia
  unsure (1)..(220): unsure at all n locations
ttnttgaagggngatttngggtcctattccgaaccctttaaaaaggttgggtatcctncgatggtaccatncggcgagttagctaaatgttatgtatttagtncgatatatatgatatttatnctttgatgttgttatntctatttaattgttattttgatatttttttgtaagagttatgttatacgatattatttgttgagaatagataagattttat

SEQ ID NO: 134724 - DNA, 208 bp, Arabidopsis thaliana columbia
  unsure (1)..(208): unsure at all n locations
tttnncnnatcctncaaattcccatccnggggccctaattgggggcttnncaatgaaaaggccctgggggatggtaattaagaggattttttggggtatttgatacacacgtggcgaatattcattggataagttgtattaatagccgtaaaatctgggaaaataaattcaaaatctcgaatatctgaagagaagagagagcccattc

SEQ ID NO: 134725 - DNA, 283 bp, Arabidopsis thaliana columbia
  unsure (1)..(283): unsure at all n locations
aanttngcccaattttggncccccnaaaangggnnccccgtttnaaaccaaccaacccngnaagggggaaaaaatggggagaaggggtaaccnccggatcgatgtgttcctgtctttctcggcattctttaactgatgatacgtttatctttatatagggttacaaaaaaaaagaagcattttgcttgttatttctgtcatagttttggtctttatttttattttgtaaactcttcacagcaatatgttctcccaagctacaatgtcttgttgtctttatttc

SEQ ID NO: 134726 - DNA, 526 bp, Arabidopsis thaliana columbia
  unsure (1)..(526): unsure at all n locations
ctttgccaanagcaggcnagcctntggggtggggacttaacccggtntagcaacccggccctgtaatcgacggcccgtggagatcgtgtggtncggacggtacgttggggngctcatggactatgccatctcgagaggcgcatcgattaatcagtataaggtaccgaggtgcgtgagcttcacacctatcatggagctgcttgactctagagttgtgtctgctcatttcagccccttcgttgccgcattggtcaccagaacgacgtcgttagataaaactttatatgaaagatatcaaccggatgatgtgcggttttagaatataaagctctgtttctgatgctaattaagactccctgttagatttcttattaggctttgtgaatcgtacaataaaatttgaagtacgtaccgatgtttttttccttcatcttctgttggaatccagctaataactagctttggtccaaaaaccagatatttttaaaatcagcatttaattattactacgccctaaattttcttt

SEQ ID NO: 134727 - DNA, 522 bp, Arabidopsis thaliana columbia
  unsure (1)..(522): unsure at all n locations
tgncgnnttttgggaccgntcaaccgatgccggtaggtgggaagtaacctttaccaggttgnccagatttggtatggtgagacacgtcgtctggaaggnctgaaaatgttttggaaagacatgatagcttgaatctccttagcttggcaccgaaccccttggaataagtaaaggtaacgatttctccgtcctctctccttaggaagagagtccaacatctcttggaactcgtagcttagcccttcttcttcttggccttcgcttttgccttccttaaggagctcgggcttgtgacacatggagaaacttgggatcgccattggaatgctctttatgcttgactatagaaaatgtttcttttaatggaatatttgtgtttggtgtaagatttcgtgaggaagttgggtgtttatataatagcccaaaatgcatgagatgatgcgttgtgaagagaagagagcagcctcacttaatcgaaatcttgttttccttccttttaatagtaacgacgagtcattatct

SEQ ID NO: 134728 - DNA, 527 bp, Arabidopsis thaliana columbia
  unsure (1)..(527): unsure at all n locations
aaangngggctgggaaagcctcccccggggaancctttttnagnttncttgcatggcnccntgntttcnggnccaaaagccaactttgggcncccattttggcccnnnaccccatccgggtggttaccggtttaaacccccgggttccaggaaagcttccacttaccaggcccccgtattttntgatggaccaggccagtgaccagtgctgagaccatccagtggtcatacntcttggtggataggnctaagctggaacttggttataacccctcgaagcctaaaggaaggattggaggagatgctcccttggttgaagagtctgggcgtcattcactactgaaattcaaatttcccatctttcaggtatttccaagaataatattcccttgaattcagtcactatgatgagtgatgactacatttttacttctcccgttacacttttaacccaatcgatttttatcttgttacaaaactgcttcgttttgatcgtgtatgtcaaataaatgtgaaacattgtgtgc

SEQ ID NO: 134729 - DNA, 433 bp, Arabidopsis thaliana columbia
  unsure (1)..(433): unsure at all n locations
canangcccnaattccgggnaaanggnccgggccccccaaggccggggggnccccacccccaagggntcctagggganaacccgtggccnnggatcccccggtgatggaaccnaagattggcccnctaatggtatttanggtngtaagagctnccatgctgaggatactngcatttggagatatggcgattgaggaagctaattcgtaggcacatagcttgggagattgctgagaggagacctatccgaggaggtattggcagattaaaaaaaaaaaagtctttgtcttgagagtttattattatatgtttcagtcacttgtttgaatatgattataactactgtagtagccttttgtatacactagatgaatactcatgagtatttttgtttttaaagttgcttaaaaaaatatgattatgttttttggttg

SEQ ID NO: 134730 - DNA, 386 bp, Arabidopsis thaliana columbia
  unsure (1)..(386): unsure at all n locations
aattncnncnccccaanacgccccccncggggnggtttncccctttgaaagggaanttnaaagggaggaggagaaattgtttggggaggtttaaanggatggtcccggtgntggtcccgactgatgaggtgaanccagaatcgccanattctgttgaaagaggctccaaaatcatctggctggtttggtggtggtncgacggaggaggtgaagccaaaatcgcctcattccgttgaagagtctccacaatcacttggctccactgttgttccggtgcagaaggagctttaagaatatgagaactgagattttcaagtttcactttggatgtttatgtgtgttttgtttgacgtctttgatgtattatggtataattccttgtttgt

SEQ ID NO: 134731 - DNA, 562 bp, Arabidopsis thaliana columbia
  unsure (1)..(562): unsure at all n locations
ttgggnttgggccccctnncccccttntttanccccngntcgggccntggcnatgcccngacgaggtgnttccnggggttcggctttctcaacaaacctgacctgcaatccnttcccgggnntaacgancccttggtacngccccngcgtttgctgatcagctcaaggatcgacagtctgganacgatgaagccgtggctttggatgaaaccatttggtaatgctttaggaatatgggttggctcctacaggtggctggggattaggaatagacagactctctatgcttttgcccgactcactgaacatcaaggaggttcttttcttcccggcaatgaggccaccacaggaggagtcagcagccgctcaagctcctttaacagaagagaagaaataaggagtctacacaagttttctgactaagcttagtcaattcgctattatgcactctgttctcaagttacttgtaattgcagaccatatttttcaaaaaaaaataccaattaattattatcaaaaacctttgtaagacttttttgcaattagtagtgatttcacttat

SEQ ID NO: 134732 - DNA, 363 bp, Arabidopsis thaliana columbia
  unsure (1)..(363): unsure at all n locations
ttgcggaanccccggttccccattncccncntggngccttcaaaggaagggnccccccttcagggnttngtattgnccaatttnggnatntaagaggacncattggagctggttccatatatccactggttggtacaatgagtacaatgcctggacttcctacaagaccttgtttctacgagattgatattgacactgaaactggaaaagttcgtggcctttcttaagtttggtngatctgtcaaagcttcaaggctttccttcatcgtcgtttctcacttccacaataaaaatttggcgattgtactttgatactgagtgtttttccattttaagatgaataataataaagtatcttttcct

SEQ ID NO: 134733 - DNA, 396 bp, Arabidopsis thaliana columbia
  unsure (1)..(396): unsure at all n locations
cangcttangcctagttgcggctgnggcccntggctctctggcgcantccccggccgttggagggttacccntgtggcccntatcctttggccaatgagggccctcccatgccggaccccatgngatgtgtcagaaggggnaccttgaaattgccgtccaaagncacttgggangaaaatcaancctattgtttcccatattgaggataagtttgttggatgtggtcaccatcctgtcaagaaagaaactgctcgtaatttcgctgcaaaaaatgctattgacnattttgctaaatttttcggagacctttngatatatcgaaaagaaaaagaaaaattatatttttataaatttttacagtataaattgtaatatctttctgttttctttttgtt

SEQ ID NO: 134734 - DNA, 507 bp, Arabidopsis thaliana columbia
  unsure (1)..(507): unsure at all n locations
tttcncccaggggtnggttaaccctgngaaacggggntttttntttttnaggngcccccncaccgtnnncccccccccccctttggnattgccacgcctttccngnggnagttccnctaaccnccatnattaaccttggnctatgcagcantatgcccccgcctccagcagtttacccgtacccacagcaacctggtcctggatcaagacctgcaccgtctccaaccgcggtctctgctatatcacccgactctgcacctgctgggtctggagcacttcgggatcctctcaacaagctcctgatgtttctacagctactggttcgtctcagtagagaagaaatatcgcttaaaaaatgtactgcaagtttcccgctattcaggacgaaggttttttgtattctgaatgaatcattttcttctgctttttaaagtacttcggaatgtattgtttcttcaaaacggttgttaacgaaatctatcagttatagaggcaattggttccatg

SEQ ID NO: 134735 - DNA, 505 bp, Arabidopsis thaliana columbia
  unsure (1)..(505): unsure at all n locations
anacccctggccaagctcccntcgcgacaaatncnggtgcncaccnntatgcaccaacactcggctcgttctgccacncaaatggatncatagttagagcccgaagtcataatgatgcagaancgtttagccagcttggtggcttcagcttgatcgagncacaagggctttggttagccatttctcgggtatgactcaaagaacagtgagagataagtttgctcggttaacgcagatggcgacgatactgaacttggaaaaggtctcagagattttggacttttggggagaaaactcaggacccatgacttggagactcacaccagctgaggttagacgggttttgggtctccgggtcgagttcaaacccgaatcaattgctgctctcaagttgtgatgttacttcttttctttattatgtcatctacacaactcgaaccaattctttcgaaatctgattggttcctcaaatattttaattgaatgaaaacttaaattaaaaatc

SEQ ID NO: 134736 - DNA, 503 bp, Arabidopsis thaliana columbia
  unsure (1)..(503): unsure at all n locations
ttttcaacttattnnccngggnaccngtncaanncggtcaatgtttccccccccaagccggtttacccgacccagaccctggtccatcaanccnaaaactgtncgattaccccgcggatgatcttgtttcgagtacctatncagttaaaaccgtatttgggtcgnccgtggaaagagtattcaaggacggtttacatgcaatcgtacattgatggtttcgttgaaccggttggttggagagaatggaacggtgattttgcgttaagtacattgtactatgcagagtataacaataccggaccgggctcaaacactacaaaccgggttacatggcctggttaccacgtgattaattccactgatgcagctaatttcacggtcactggtttatttatcgaagctgattggatttggaagacaggagtgccttacaccagcggtctaatttcatagtaatttgtgatttgttcttaatcattttcttttattaatttaatttaaag

SEQ ID NO: 134737 - DNA, 484 bp, Arabidopsis thaliana columbia
  unsure (1)..(484): unsure at all n locations
caggtccgtgctcagccggctgatccattcccntcatgcncagcagcgatggtgctgttgtgccagtctaggnttatccnccgtgggatatggaattcttcaggttagagaatgagcatttgaccaatgttgggaagtatcgagcatttaagncggttcccattaccgtttaactacgacgaggatgacgataaaggcaactagttttctcggtttctagtcttagattctgtaaagactgattcatccacaacgagtaggaggaagatggactagactaaagctggttcattgagatcaaggagatgtttcactcaggataacggatattcgctagattagccatagtaattagggtcactgatttgcacttaaaatttgtttcattgagagaaacatgaaattcatgggcatcaacaaagcaatgacttaaaaaccaaattctcccacaataacaaaagtaataatcagaaacattcaaagt

SEQ ID NO: 134738 - DNA, 537 bp, Arabidopsis thaliana columbia
  unsure (1)..(537): unsure at all n locations
gntcattaggcttacccccnnaanatccgggattccccccattatggatcacccaaaaaanctntttgctacggncnagtccgtccttatacactcaggtccggcntaatgcggtgcacttgtggacnccttcaattacaccgaccattacttgactcggttcttggccgttacgacggtaatgtgtaccccaaagctctttgaggaagcgttgaaggatcccattgaacgactcggtggttcctgatgggtaccaagaataccttcgacctgtgcttcagcagcaacttcgtaccgctaggctctgaagagttttctttgcttgatactcgatatggttaatcacattagacttgcttcgtccttcttcttcgtcttcttcttcttctcgctttgaataatttcgcagtttaaaaactggcgatgcccttatttatatgtagcaatgtaatagttaatgtacgatcgtcatatggcggaattttagtactatttttcgttttcaatgcaacattaatacaattgatcgtttctact

SEQ ID NO: 134739 - DNA, 509 bp, Arabidopsis thaliana columbia
  unsure (1)..(509): unsure at all n locations
cggcccgtccccggctntganggcacccnttttaagtcngngattcangaantggtgcccgtcccggagggnntcccggttngggntttttcaagnccttgcatagctgcaatgtgtttccaggacnccctngtntgagnccggtgatagctgatgtcgtaatggctttggatcacttggcttcttcctaaatatggatcgtcgtcaccgtcaaaagcnggataatgtgaccgngactaaagtcgatgaagngaaaacacttaccacagaatctaatgtttgtgtggaggngaaacaagagatcaagatatgctcagatcaagcaacttaatcatcaatgaggattcttaaaattttgatattttcttgatttgtagaatgcttcgtttacgtaagcaacagttttgttcgaatttcgactcatacttatatagtaaactgtagcaaaagttcggtttatcagaatcttaaaccattacgtatgggaaagtccggtttatcaccaaacc

SEQ ID NO: 134740 - DNA, 520 bp, Arabidopsis thaliana columbia
  unsure (1)..(520): unsure at all n locations
tttaatctgnntgnttcntgggatgcccagtgncnattatncgaaccatgcacccctcaggccnctacagtcancccccntgagaagantgcncccagggnccagctctncctactcaaactcagccagtngcancccgggaattnccaaggtcttggcatacagcagaagaggaagaggccgaggtagaggaagaggcagaggaggtcgaggcaaaggacgggccaaataaactttgtaagatgagctgtacacaacaaacacaatgcagtaggagagtattatgatgaggtaggattatgtgacatctcttttagatttgaatcccactctgtttgtgtttggtctttggccacttcgttatctttttaggttatcttgtagtatttgagttaggaggatttgtcttgtcgagttatgtggaattgtgtctctgttgtttctttcatttgtctgaaatctctaatgtttaatgttgtaagtttgaagcttggtttcgttccagctgacgaagctttgt

SEQ ID NO: 134741 - DNA, 341 bp, Arabidopsis thaliana columbia
  unsure (1)..(341): unsure at all n locations
ccgnttggaagggaaaattttggntccattaggccgaggcttnttccagtangncgttnntccnacaagccaaaagccaaggtttnagccgncccggttcccaaaaactggttngtaagctcggtttctgcctcaagcggagtagcgacgggctaaatcatgcttttctgcctcgggcaattttcattcaaccttctctaccaattgtagccgcactcgccgagctaagaaattactctgttaatttgggttgacaaaccaacaaagtactttgtcagcaagattatggctngttatttgttaatgttataaaatggnctaatcaataaagattttgaatt

SEQ ID NO: 134742 - DNA, 382 bp, Arabidopsis thaliana columbia
  unsure (1)..(382): unsure at all n locations
aggccccctagggncnaaaccgggaccctttttgaatgaaagggccgnnccaaaagttccangaaaccgttggataagcccngttcgttanagatgcagcctcggggatgcaaagggnttagacgagaaggnactcgcggctttggcatcggttggtgaactgaaaatgaattctttaacaatgcatcaagctngcaacattggttataaaacagaggagcnatatcaaacgatggtgttataaagagatgacttttttcattaaggttcttattgaattgtagatattagtattatttgtgcttggtttggcncttacattcattttagtttcacaccattactaccngtggnnatttcaattaactgataagattgaatc

SEQ ID NO: 134743 - DNA, 476 bp, Arabidopsis thaliana columbia
  unsure (1)..(476): unsure at all n locations
tttntntnngctctgtcctcaagagcntcacntcgngngtcacacctgtncantgccatgttgncccgcgttcaggnnttcatccgaaatcattacccgngctttcacccaagncgaggagtctgaatctgcttctggtgatggcacagtaccgctgcccgatctgcctggtcttgaatcagggaaggaagaagtgacagcggtttgtgaatactttcaacagtaccagagaaagctagtgcatttgtgcatggactctcaaccctacaccgactgatgaggaaactatactaccaaactctttcgttggctatgcaaaattacgcacatgaaatcatctttgaagaacaacaacaaaaacaagtttttgcatttaaatattactgtatttgtgatatagataatgtttctgcatgttgtaccctaaacccttcttctgtgtaaacttgatttaagaagacaagataattttctct

SEQ ID NO: 134744 - DNA, 432 bp, Arabidopsis thaliana columbia
  unsure (1)..(432): unsure at all n locations
cggngtantantgntngngtnaagccantnagccccaattncaaaagcangcgtaaacgaggggcntcaacaaccaaggattcaaggccttaccttccaccatnatcccactagaaacactgctcgnacccctgtctcgtccnncagtatctggcaaaaacggcagcgctttctctcctcaaccaagtggtggcgctatggcctctccgtcaaagtcaatggtctcaaagttctttgacttgatgttcggtgtttaaaagctacttcaatggcatttcccgaatgattcttctttacacatagtttgangtttttgagagcagagtggctaagtaaatcttagagcgtggtcaaaattaaaaattgtaagaggtgtttcaaattgtcttttgtattgacgacggctaaaaatttggtataaatctgattatt

SEQ ID NO: 134745 - DNA, 467 bp, Arabidopsis thaliana columbia
  unsure (1)..(467): unsure at all n locations
catctgcagcaacggcctgctgaaaattgcattacttattggaggaaatttgtggcagaatacttctcacctcgtgcaaagcagaggttgtgcttgtcacagtacgaaagtgttgggcaccatncccttggcatgtttccacaggcagctccggatatgtggcagtgtgatctttgcggcactaagtctggaaagggatttgaggctacttttgatgtgctagccagacttattgaaataaaatttgcaagtggcatcattgatgagctcttatatcttgaccaccccacgagaaaaacagatttccccaatggactgatgatgctaggaatttaggaaaagcaagttccaggnaaactgtacacgngncaattttcgggntggtccggtaagggccatcttcggaatcaaaatnccccccaananntgaanaanccngccttgggnnntttntgcnccngggccat

SEQ ID NO: 134746 - DNA, 517 bp, Arabidopsis thaliana columbia
  unsure (1)..(517): unsure at all n locations
attcaaccaaannaaccccagccnaactccgggtnctcaagttnccgtggggaantnangntggtggaattaagtgtnttgtaccggttttctttcntnggaagntctgtgtcgganctntggcttaaaatctttgcccccacagatccgnagatcagtnctgagcgagatgaatatggtttcaaggaaaccggagcaaccgatgtacctatgaccgaaggcctagaggagagaagagagatattgaatgagaaaatcggccaactcaattccgccattgacaaggtttcgtcgcgtctgaaaggaggtcgaagcggtagcagcaagaacacttcttcgccgtctgtcccagttgaaaccgacgcagaagcagaagctactgcatgattgaatgtaatgctctgctccattttaccaattcaaaactgccttccattggttctgtggtttttttgttggaactattcctaggggcttttctgacttttagatattgaaagaaaaagacaatcgtcgt

SEQ ID NO: 134747 - DNA, 509 bp, Arabidopsis thaliana columbia
  unsure (1)..(509): unsure at all n locations
ctgtntcggcggcnccncagcagtctccctgtaagcggttangtcaccnagcatggnntgtccagtaggcccattccggtncgtcgcatcaggattcccaagtcnttgtgancggtgtttcccggaaaccaagnttcgtgacagagccatcatggtttaaggtgacgtncctttggaaagtgctatgnccggagttgattgagtggggttgtcggttactgtacatgactggaactggtatgtccgaggatactgcactcaacaagaggatcatggacattcctggtgtacgtagtactctgtacccggaatctatcagaactccagaaatcaagtcggattagagaggggtcaatacataataaatggatgagatgtatcatgagtatgtgcaatgagtaataattatcaaagaaatgggtgaaaatgtaggtttgtttttgttaatggtacttttgactatgtatattaactatgtgtctttaagaataagtgagttgcctaatact

SEQ ID NO: 134748 - DNA, 505 bp, Arabidopsis thaliana columbia
  unsure (1)..(505): unsure at all n locations
aaacccttncnnaaacccccngngccccngcttnaagncccttctttngaggcccccnntgggncccttttttccgggtttcccggccggggttnccngccccngttttgtttggacccgttttngttggttnaanaagccattngagggagaagggccttcgaggcttctggagcctaggattcccccgtgntaaagggagcattggctcggtatctctctgaaacccaattcccaaagattcccccacagacgacaaaggagggatcggatggagaaactgaagtggaggcagagattccatctgttgtagcaagtatgtaatgatcaccaccatcatcatcatcatcatcagaaaatgtggtgaatgtatctttgtatgcgtaatatttaccgttctttgtacataaatgaaggaaagaaaaacaaagttggataagaaaacacaaggatgcacaacttgcacattgataaatgatgatgtaacaaactttttatcgtatgc

SEQ ID NO: 134749 - DNA, 563 bp, Arabidopsis thaliana columbia
  unsure (1)..(563): unsure at all n locations
cacccangtcttcncgtaggttcccntgnttcacccanaaccntcgttgntgntaacntntnctggaccccaactcnttgcgncatcatcntcatcatgcaaacnttcccccccgatcccagcaagacncgacggcgatctggtgaccccggtcagtaagttttcccnccgtggctttgacctgcggcttgaagttatcaatgtagtcgaaaaaatgtggtttggtgtcatcggagtctggtttatccagggacggagagaacgttgtagctaagacgttcttcagaatcagaggagagagaagcgatgtaagaagaagagttactgctactaaatccatgcatctgagggatgatgatgatggtgatggagagatggtcgtcacggtcaacaagaagcttagctacctccactaatggccggagatgtccgtcaccaggtgatggccatacaatcttgatcttcagacttcaacgttagtacgttacgttagtatttttttcttttaattgtcagctatatactgcactatcatacaattaaaggtaaccgacgtttaattc

SEQ ID NO: 134750 - DNA, 543 bp, Arabidopsis thaliana columbia
  unsure (1)..(543): unsure at all n locations
cccnncgggggtttcccgnnncttgggggggnttcggnnggnccntttccggggtnggggggaaaancgntttgccccggntttggccggggnctttggccaggtccgttagggnttatnccggtntggccaaagncttcaggcccaatggccatcccantattcccgttncacgatgggttttttccccgcatatgccaagaggtcatccaagccaacctaaactatgggcatccgcttaacccctgctttgagtccctttactcataacgtggcttcatatacaccgtggccaaactcacccgttatgaactatgcacagccgttgaacggctcagacacaaatctttacaggtatccttctgcaagtaatccctgacagcaagagtagtgtttgagtacttcaatgtctgtaatgaaaagcagattctatagatattagcctttaggagctccctgttctgttccgaacaatggctacttctttcttatataacaaacaagacatctacttttttatatctctgaattatattattatcg

SEQ ID NO: 134751 - DNA, 564 bp, Arabidopsis thaliana columbia
  unsure (1)..(564): unsure at all n locations
gnanttccagggntcgctcttcccaagnatggtgcggccccncgaatgcccnccccaactgggaagtaggcnaactgttccaggaacccggttnccattgaaaccnntccaccattggtccatcaacccngnggnaaaggaactggaaccagcaactcttcccacgtcatctactctcacccagaaccaaaccgtaaccggaccgggaagtcgtaggtgacatagcggctaactagaggatggttctttgcccatgtgaattcttgggaaccgtatatgaaagaaacgaatccggttctatgctcgtacagagtgtgttatttgtatagtggataccggttagcctatgaaaccggattctggagtccaaattgttgtttgtaacgacttagtagtttttggaagtgatctgtttcgttggtttgcgtcttgtaacgaacgcttaagcaagtgtgggttttttcttgtaaagtgtcaatatgttcgtttgtaatgaatgtatcaagcaatatttatcataattaaactagcttgaaatgtagtattacgatgttgttgtgttcg

SEQ ID NO: 134752 - DNA, 425 bp, Arabidopsis thaliana columbia
  unsure (1)..(425): unsure at all n locations
tttaanggatttgngaannttgttccaggatgatttgcngntngtggatnacccgcatggaagaaggaagngnttgattgctgcngaanctatagaagnggaggaacaacgagagcaaagatcatncaaagagaaagtagagattctgaagaggaagaaaatggaacttaaagcggcaagatntagcgaagcgcngtaaancctctgaggggtctgttaaaaagccgaagaagacagaagaagaatcgcccagcgatgaggaggatgacgaggattctgctgttgattggagagctcaacatctttgaataaactagaaaagactgtttaaaaatctgtaccctggtaaaacatacaatgttctatgagaatatacagtgaaaactaatcaatctcatgatatatacaattatcagtttcagagg

SEQ ID NO: 134753 - DNA, 542 bp, Arabidopsis thaliana columbia
  unsure (1)..(542): unsure at all n locations
acccgccttgcnaagtgganaaccaggcctaggcttcagggcccaggaggagccaaaaagggggccagtaaancncctaacaaccaggcggtttacgnncggtttncctaannggaccggctgtttcagggtggatcncaggncncaggttggattcaagattgnnttttgggaaaaactaaggaggtatgggggttgaagtnggagcngangttgaagtcaacggtgatggagttaaagctcagaaggaaaggaattaagatgaagaaatctgattcttcttttccattaagaagctcttttccgattagtgttttgatgaatttactcgtattctttgctattcgttaacttcattaatggtgttgattttcaggtttttcatttcttggttttgttgattttgattattgactatttcatgagttttgttgtgatccttagttccattttcttcattgcataatttatcccttattttttttgttttaactatgtattagtttccatcaacaaaattctatttgaaaatcattttatcc

SEQ ID NO: 134754 - DNA, 532 bp, Arabidopsis thaliana columbia
  unsure (1)..(532): unsure at all n locations
tctttctaaatcctgctggaaccccngnanctctggctgagaagtggggactccaaaggggncaancatgtgaaagaggnttgnctgggaagtgttgacgtngngctgatcaagcangcaacncaacgtagnggaagaatggtncagatgttgncagatagccaatggcatgtgtgtctaagcatccagattctaggccttcaaatggaggaagtggttaaccatgatggaggagattcgaccttcagggtccggtcctggttctggtaacagagcctcctcgccggagatgatcagaagctctgatagcccggtttagattggttttaaattctctttctctcattctcaaatcattatttatttttgcttttccttcttcttcttcttcataaaccgtttattttagttctctatgtctgactgcataatttattccaatcaatatctgggattgtagtgtaattgaaaccctcaccatgaatggttgtagttcttagattggttataagtgtgcgactngttttgaatt

SEQ ID NO: 134755 - DNA, 554 bp, Arabidopsis thaliana columbia
  unsure (1)..(554): unsure at all n locations
cntcccacggnacagnaacacntcaccccggntccgctttagnanagccantgcatcgttccagnnctngtcntacnggggaaatggnnattagtgctgcagntctttccggtattaaactcaaccacttgctggtaatggcncatggatgtcacnagttggcnacgattttcgactccttcttncaaggtggtgatttgtctgtggcttctctctgcccattggtagctatatatctctctgcactcttctttacatcgggaccatcctatctgtaaccaataccggctttgtacagtaaatatcaaagcaaagtagacaagtgttgcgggacgattcacaggcggttgtctcaccactacaaaatagtagacgaaaatgttataagcagactctcatggagcttatccaaggataaagattcatgagcttaactttggtgattctgagaatgcttttacttgtttttgtttagcttttcttgttattcaccatttgtngtataactaaacgccatatccagaatgaatataagatggtttctttgttcaact

SEQ ID NO: 134756 - DNA, 506 bp, Arabidopsis thaliana columbia
  unsure (1)..(506): unsure at all n locations
anacccncgcgaacccggaggngaatccgtgggaaggaagancattcgggatgcttttgttgacccgtggtgagactagncctactgcccgtttaacggaaaatgagattcccatcggagtttggtaattctggggaggtaaccgcggtgccggaaaagcctcatatatcagcagcggcgtcgttttgtgcaaatagatccgaagaagcttgtggatttaggtagagttgatcgccgccgttgagtttttttattttggtgggattagtctttggtcaacgtgtttgactattggatagtaaactacggctttctgaagatggattttgccaaaatcaagctttttatatggcttgtggtgaataatctctatgggaaatagctcaaacaatacttttgttataaaaaattgtaatgttttctgattgtaattgtagagtttgaatggccaaatatattgttcttaggagattaagagaaataatgtagtgtgttcttgttttttt

SEQ ID NO: 134757 - DNA, 275 bp, Arabidopsis thaliana columbia
  unsure (1)..(275): unsure at all n locations
anggcgaccngatggtntggagnactgtntngaaatggcctaaaaacttcatggtgctaacatcattactgacngcnacggagatatgcttcttgataccaaggcgacatcaacgagtctcttcatgccagaacccgaaggcgcngttgctcatggagatcgaaatctagatgtcaatgatttttttacacgtacatgatgaaatatttttaatgtttgttatagtctgatggaaacagaaaaagcaaaatcgangttcatnatatcttttgatc

SEQ ID NO: 134758 - DNA, 556 bp, Arabidopsis thaliana columbia
  unsure (1)..(556): unsure at all n locations
aagtccnatcngcatgaccccgggnggnggtccaggtatgaggtaggcgganccatgagggcctggcgacttaacttatgtgtncgccgtcaaatggatattccgtcatagttcctggattcagcccggtgatcaattcagtggtgaaagctcncctgtcaaacttattctcgatgaaacgacgtaattgagggcttgaaagaagtcttggtgggcatgaaagctggagggaagcgtagggcactgatacctccatcagtagggtacataaacgagacattgaagccaatccccgaggagtttggaccacgacgcagccttctatcgcatgcgaacgagcctctggtctttgaaatccagctcttgaaagtattatgatatttgtcctgtcactgactgttaatgaagtattttggctgtgagattatttattttctattgtaaatctgtaacaacaactgcttggaactacatatcttgatgagttctgctttaaggcttggattaataagggaattaccataccagtatttttaaattcactcaagaagtttcc

SEQ ID NO: 134759 - DNA, 563 bp, Arabidopsis thaliana columbia
  unsure (1)..(563): unsure at all n locations
tgcncccaagccatggtttncnggtaccgtcccccngccagcctnctgcttagngtggccccncaggtccgcgtattgcctatggcccagatgatntggnggttncagttngcgtagaccggncggtgttggttccngatngacccgtccctaatgctcttgtcatcnattataggccattgtatggagatatggncgaatgaccaagtattggngtgctgaacataggagtggtggtgaaccacaaccaagagagagatactcgatacccattcttcttgttgccttcacacgatgtggaagtgaagccattagaagaacttgtgagtcctgaaaaccctccaaaatacaaaggctataaatggggtaagttctacgtcagtaggaatagaagcgattttcgaaaactggaaatcgaaaacatccaaatcgatgacttcaaagttaaaacttaatatactatgtatcggctttttttttgtttaccaagctatgatattaatcaaataatgtgtgtgggacttaatttgtgtcggaaagaataaatttgattacttttgaat

SEQ ID NO: 134760 - DNA, 552 bp, Arabidopsis thaliana columbia
  unsure (1)..(552): unsure at all n locations
gnnccgantgnccggnttaaagggttcngnncgatgcgnacccncnntggccnctttngcccntacaaagctaagcccaggctnaaccatgttgcagcnccctcagggtaaaatttngccaaagggcagnccnggnaaatgtctatgtactctagtcaaaggccagggatggancctggttgggggttcaaagttgatgccaaccgtgcaaatgagcctccctttccgcttgtcatgtccctgcaaacatctctcaatgcccagatcttctacatctgcttccagattcaccagcctctcaaatatttaagcaattcactgaatcttcttctcagactgttggacataaagcggtctccacaagctcaagcatcaaaggaagagacaacaagcaatttggtttaatgatggctggtgctctctcaatatggtatataatgtaaaatcctctgtgatctaaagttgatgaacacaataaccaaaatcattatacgagtcatatctactagctgaagcagatgtatcatggcttattaataagaacttattgag

SEQ ID NO: 134761 - DNA, 542 bp, Arabidopsis thaliana columbia
  unsure (1)..(542): unsure at all n locations
agtaaagggnnggatccatggggggaaggttcacggttnaccntacggcttcccaaccangaggacttcancctntgtggccgggtcaatagttgacggatggctataatacccagacgttgctagtacagtcgacgatggtctcaaacagctgcaaaaggcggaacgtaccacaggngacaaggaggtatggtgatgtgtgcgtctgctctngtcattctctgcttcatcatgctggtactcttaatcctcaaggagattctgttgtgacacaaggagatccctcattttttaattcttttgaaacgcgaacaccacaatttttgcgttgcggagtgttctgtccacaaaatgtcctgaagagaaaaacgaactgtgttgtctatctcgctcagtggcttttactgcagcctcttctgctttcttttttatttcttatggcgtttacataggaaaacattatcacttttgtattgagtgtttgtaagttggcttcttacgagtttataatggatttatttactgtaaagaatatattaacc

SEQ ID NO: 134762 - DNA, 503 bp, Arabidopsis thaliana columbia
  unsure (1)..(503): unsure at all n locations
ccccccgcttggattaaanagctggccttgaccaatcgntctttnttntttcgccattccanccccgggcttattttttttgccccncccngcngccattngncccaactcccccgggaaccntgaattccccccgggacgnggaaggtgtnaaggncatggccagngcccagcacagctgaaggagattcaaaagcggaaaaggaacccacagaatcaagggaggggaagaggaattggaataatgaacaaaggcagaggaggttggacaggtgctggattcgatgtcgatggtagaaattgagatacatatatctagataatccatataccgaaagcgtcatttcgaatcagaagtatgtcaaatatattgttaccaggtatgttctatcatcttttaacatcgatggaccagtacgtagccacaaagacttctcattttctcatacacttgtgttactgaaaagaaatccatccaatcatatttggactgttcattgatc

SEQ ID NO: 134763 - DNA, 518 bp, Arabidopsis thaliana columbia
  unsure (1)..(518): unsure at all n locations
anacccgnnnggagtcatccccagggaatcntcctaggntagcttanaccttgnccgnccgtaacangctnacccttgngcctganccattgcaaccaatntccggatntgacaacgcgacaagcggctcgaggattattagctcttggtgagtattttcaacggcttaganccttgagctccaagttgggcaactcgncatcgtgaaccaacgtaggtttgagttattttgtancaaccaaatgaagaanatggaaagncctcaaaaaatgcagaatgagtgcatctgaaaacagaggactactctgaataaatagaggggttgctgctgatatttatttttactctgcggcggaattagaaaatttgaaaaacatcatgtattgataagttgtaaatatcagaaaaaggtgggggtgcaaaaatttgtactttttagcttttgaaagaggcaagtttttcgaatgtttgtttgatttgtaaacaatttcagaattatataaacttggttccaaatc

SEQ ID NO: 134764 - DNA, 530 bp, Arabidopsis thaliana columbia
  unsure (1)..(530): unsure at all n locations
anntgtttccnccntcgcnncncagatacttgngttccgaccatctcagnttttagcgatttccccgtacggncantggtcangcacncnttgcgtccttactctactacaattcccactgtactctcggaaaacaacatttgattngncgtgaccagagatcttccaacttgcttgattgggaaaagaagaaacgactcttccaagctcgcttacattatcctcactctctttctcaccattttctggttaatctattcaacacttgatgattacgaggactgaatcacgcttgaagatacacccctgtgacaggcgacaacaaacggtttggtcaaacccctctcttagtacttgacaccgcgcttgatacaatggcatgagaaggaaggcttttaggttatgtaagttaattaatgtggcattagagagctgtgtaaaccagattttatagtcattagaatttcattgtggatctttgtggtgaagccaagcagtgaattgttaaccatgattggaaccctctaact

SEQ ID NO: 134765 - DNA, 509 bp, Arabidopsis thaliana columbia
  unsure (1)..(509): unsure at all n locations
aggggaaccatgcnccggggggtctgcccaaccnatnggtgtgatccccgcgctgncattcatagtcgggatannggctggatgccctttccatgtccggctctcacactcccgctggcaaatttgtattaggngaagnttcttancacacttgtgagaaggggtggttgatctctttaggncagttgctgcaactcttatggaagaaatanccacattttctacagttgtagccatcactgatagttttgaattggagtccacaacatttnccccaccgattatctcttgcaggtgtcagccagtgctcatgaatgggtagtcgcaccatctcaggctccatggttactaagagatctagtgagaatttctcgttgaacttttggtctctgattnctcttagctcatgtgncggagataagtgaagaaaacaatagttattctattaataatcatttaatgattaattatttgtttttagtatattaataaaagaaagtttagatctg

SEQ ID NO: 134766 - DNA, 502 bp, Arabidopsis thaliana columbia
  unsure (1)..(502): unsure at all n locations
accccgccccntgtttttnccnaggcntgtctncacnggccctgtanncccccttctaccatggtcgccagagagcttntcccaagntncattgagtttatggagattttgntgggaattccacaaaagcttgggctagaccaaggatctctctgctgcattgctcggnccacggtctgagagatggtcggcttatgtagangacgggaaggttanggcggtgaatgtggaagaagcaccgtctgacttcaaggttacaggggcagaagtcatcttaggacagatctaaaaagtatttccagagttgctgtttcttctgagttgcaactgataataagtttgatccgaacatgtctcaaggatcagaccaagtaacagcttcacttcttttgttttgtttccacagtttcagtttaaataaaacttatgtgtcttgccgtttctcaccaaatgtaaatctggttcataatatgaataagaaaccaatgtggttgagggatat

SEQ ID NO: 134767 - DNA, 504 bp, Arabidopsis thaliana columbia
  unsure (1)..(504): unsure at all n locations
ggggttgggcgggggccccttnccccnttcgggttccgntaaanttnatggaccttggggnccntttncggtgatgganccntaggttngcctnccggtcttattggaccaccangggggcccaangatcctncattgtcccccctagctggccagccatttccagtttgaggattanttctccataaatcctttccctaacttgagcaaggtcacctcaactncgatgtggagaattatgagcncacatcttcacaagaattttgtaaataaaataangggagaaagtgtcaataaaattgttctcaaaaatttgttgtctgagattggatgaaatctgttgtttgaaactcttttggctctggattctcctctagctgaagccaactagggtcatgttaatataattcatattaaaaggatttggtataagaaatgacatcggataacttcatttacagaggttttgtacaagaaaatatatctatatatatcaaaattttc

SEQ ID NO: 134768 - DNA, 516 bp, Arabidopsis thaliana columbia
  unsure (1)..(516): unsure at all n locations
ttggagaggncttccgnatccaagggtgatcttaaccgntccctttatggcccccaggcgtccntcctatnntgngaagatcccttgaaggcatggcncatcancctctcagtgtccccatngatncatctggtagagagtcccagttctttaccgccgccntgtttgatggccggtncggggttgatcttgacccacggtgtggctgcggttgggtatggatcaagcaagggttcagattacatcattgtgaagaattcttggggaccaaaatggggagaaaaaggttacatcaggctgaagaggaacactgggaaaccagagggtctctgtggaatcaacaagatggcttctttccccaccaaaactaagtgatcatcagatcattctctcttatctgcatttgatcagcatcttacagtgtcttcgttttttctcttttgatttatcaacggaagtcttgtaacaactatgtgcaataatacctatatataagaagcagagaattgacaaatt

SEQ ID NO: 134769 - DNA, 482 bp, Arabidopsis thaliana columbia
  unsure (1)..(482): unsure at all n locations
aacccaaaccncgttccngaaccctctgggaattctcgncccccntcaaggcaaaccttcaggggcnggggtttctggaccncnccgcaatccggatcgtaccaatgcgtatccccccaaatgtagctccncaaggtgaagatccccggagaagttacgagttatataatcattaataatttttgttttttctcttaatcggcgtgcatatacaaaaaacaaaattagctgctatttttttattacgagatacttatttgttgttttgtttaccatctttttccgtggttgattcaacgagttttcagcaaattaattaggttttgttattttaattacttgagtgatttatttttgtgatttggaactcttttgagctcaaattgcttattaatctatgctgtgtctgtcatataggctttcattacagtatttttccttgttggtggatatttataattaataaattatgattgtaaatc

SEQ ID NO: 134770 - DNA, 468 bp, Arabidopsis thaliana columbia
  unsure (1)..(468): unsure at all n locations
aaagccgggcgttaggaacntgncccccagttncagtgcttctcatcnncancccctttgatggaagtgttgcatccaagcaaggtgtccggtttgtgttccacggatggatcccagatcatatttcgtttatccggaactggctcagctggagctacagtgcgaatatacattgaacaatttgagccagacgtttcaaaacatgatgtggatgcacaaatagctcttaaacctttaatcgatcttgcattgtctgtatcaaagctgaaggacttcacagggagggagaagcccactgtcattacatgaagagaagtgtcacatggtcctttcgataaggcaatttgggttcctgacttcagttttgtctgccatgtttatttgaaaattccagagcaatgaaatgcttatccttgtaacatatataacttatatacgtctttctatataaataaaagcatttctttt

SEQ ID NO: 134771 - DNA, 440 bp, Arabidopsis thaliana columbia
  unsure (1)..(440): unsure at all n locations
agaagcggcctcggnctcctttncttaggataagacntctntgcaccgctctaggagctncggctgcacaagcgaaatactggctgatcaagaagaaagagaaatggaacagttagctgcgacagtaatagaacaaccagctgaagaaactgcagagcaagttgaagtttctagacgacttggaatcgataatggatgaagaagagaaagtgatagagggtgtaaaggaaacaatcatccaagagagggttagcgttttgcaatgcgcgtttagaagcggtattaccaaacgttgggatcatacgtacgtgaaatgatcttcttctttcattcgtactttttttttctcttggggtagagttgttttctcattccttatggatttgttatgttgacttttgaggattatatgtatttagtattaatgtgttttattgact

SEQ ID NO: 134772 - DNA, 463 bp, Arabidopsis thaliana columbia
  unsure (1)..(463): unsure at all n locations
tgaccggtgtncncgagcntgtggccggttcttcatcggggggggacccggtgtccattctggaagccgtggcccactaccctganagncttgcagacttcaccngcaaggntatttcaaagccnttgacantgggttccnctggaggatgtgttggctgttccgagctatgaccacaataagcggcnaatttcgctgaagcaaaacacacaatttaccnaatcancaatattttgggncttgtaaaataaagangatcttggggagaagangacccanccaattttaattttaatttttttttttacaattacagtttcgtatttttatgaaatggattttgtttccatcgacagatataaatgactggattttgtccggtttgtctctccaattttcaggagtatttgtattccaataaataatcttttactacgtgtaatgcaaacaacttcagtggtac

SEQ ID NO: 134773 - DNA, 267 bp, Arabidopsis thaliana columbia
  unsure (1)..(267): unsure at all n locations
cgtaaccgnatcacannatgncccttcggnagganctaaaaatatagcagnggataaactttgggttatttaaatttccncctggaacatatgttnctgtgttttattttttagttggctttcttctttagttngtattttgtttataaaatgctgttttctctaaattgctaatctcaaatttatgtttttttttgttttgcttaaaaatttcaagaaagttgtatatatgtatgccttttacaatcattaaagtttttctttttc

SEQ ID NO: 134774 - DNA, 475 bp, Arabidopsis thaliana columbia
  unsure (1)..(475): unsure at all n locations
tggggttcttctctgggcgtgtccccccngtggtctcncaagaggggantcgcattngctggcaattgtgctttcncgggcgttcggggccctttttacnacnggtctatcgctattcccagnagatcattccnctggntggattncttgtgtgctggtcttgtccaaaccagctctctatgcggatttcttctactactactacataagctggaaaaccaacnccaaacttaagcttccggcttgaaaagancccgaatttttttgcaatagtatcaaaatccaggaagttacagcaatggtgacattagaaaagaaagacatggttaacatttgggtcctccctctttctaacaatgagttgaaaattgaatgatgcaggattgttgtttaaaatgtgttttttttttagtctttaatgcacattgtaactttcccgacgattttagacattgagaagaggcatcgttttatc

SEQ ID NO: 134775 - DNA, 353 bp, Arabidopsis thaliana columbia
  unsure (1)..(353): unsure at all n locations
ttgngggccgccccantgttgggaaanggccngttttttcctttccaaaggncnaaatttttaaccngannaaattggnggaaggcngngttaacctgatgcnatgcagggncccgcggaagtgtgttttcgaattgccaggttttaaatgcccgcatgcagaagctgtgcgagtatttaccctggtttttttttttttttttttctttcttcatgttttttggttccatggagtatatgtaaaaaaaaaaaccatgaatactcggttttatgtgggtattatgttgtaactctcacaactcttgttaaagcttttggcaatttgtacagtaagaaaaaaagaattgtctctc

SEQ ID NO: 134776 - DNA, 492 bp, Arabidopsis thaliana columbia
  unsure (1)..(492): unsure at all n locations
ggggtgggtttgtgcccnccacctnncacccttccctggctgngccctgctctgctaggcgctatctttccggcaacttggctcgccacttgtgtgtggtncntaaaccnccaggagaccgcctattgttggaatactgacaaggcatgatttcatgccggaacatgtcctggnctctaccctcacattgatcccctcaagtgaataaggtaataaagaatggagaaacaagtacgtgagagttctctaaagatctacaatgtaataatatgtgaatatcaaaaaattaaaagcccagatgaccaatgtcacttaggcatttatttcaattattcgttgagattgattatggaaaagcaggggaaggatgattgtgtaatgaggtgatacaagttttttttttttgggttttggttttcacaacatttattcaaaacaataaataaaaactaaacatgtaattatattataagtcgatatcaattttgctct

SEQ ID NO: 134777 - DNA, 461 bp, Arabidopsis thaliana columbia
  unsure (1)..(461): unsure at all n locations
acccgtcccncattggaaattntccggaagntgngantgcttggaaagggtgngacnntncagnngctctgcagacaactnccaccccttccggtttcagtgggaagaagaagcttgttctgtcaacaacaagttggcttggtggaaagaacgacttcctcggcattgcttacctcaccgttgggggaatctgtttcgtcttggcacttgcatttaccgtcatgtatcttgtgaaacccaggcgactcggtgatcctacctacttgtcgtggaacagaattcctggaggtcgttaaacagatgactgcatcatctgcgtatataaatctacttatctctggttgtaatttgatccaaaattgaaagtgatgatctttttttttttaatatagatgtgaaatgtatgtatgatgttacagttggaatatgctcattacatagaatgattgatgcttcctatc

SEQ ID NO: 134778 - DNA, 455 bp, Arabidopsis thaliana columbia
  unsure (1)..(455): unsure at all n locations
accctcccgtggtgtntgtccngccggcagccagcctgatattgcccncagntgtgtaggcncccttgtcgatgcagtngacatgttccgngtntggaggnttncatatttgngagcggtcaggggcttgcncggtctgttttcaagccaatgtcaatgctgttaactcatcctcaacaaagatgtgctcaagatgatcttgacatccccatgtctcttgcaaagaaagtgcctgtgactgaggcggcaagtgctgtagancctcncaatgggaacaatattcagatcataaactaatgaaacacttttttttttttcttgtatcttttggtcatgacatggttgtgagtttcgcatgtgaaaaaaatactcaaaacctgtagtgacaacttgttctagatccatcaagtaagaaactcaaatgtccagatgaatataaatgattttcttatttt

SEQ ID NO: 134779 - DNA, 561 bp, Arabidopsis thaliana columbia
  unsure (1)..(561): unsure at all n locations
accgattgtccccnncgggcccccctttnggttcccctttgggnaaattcnanggnatttccattttcccctnaacccgtnccgcccgggtnnacccggganccgnggtccgccttaagcaaatgtccccgacggtgtcgacgtaagaaccgcaatccaccatggatccgacccagtccacgtacttcgataatgcttatttcaagnatcnccaacaaggaaagggtttgttccacgtcagatccaaatcttgttcnacagatcaacggtcaagatctacagttaatncgttttgccaatagtgaaggagcttttagacaagctttcatcacagcgatcacgaagttaggtcgggttggtgttttgactggtaatgctggtgagattcgaagggattgttcacgtgtcaattagtgtgatttgaggttttctttcttttattccttaaagaggatttttttttttttaataataaaatttaatttcttgttgtcaaaataaggngttcataagtgtgaaacatggaaacttaaattaataagatgggtttatttcgttgac

SEQ ID NO: 134780 - DNA, 530 bp, Arabidopsis thaliana columbia
  unsure (1)..(530): unsure at all n locations
tcccttatnccaagggcnccaaagtgncanccccccagaancttttttgttgttgccaaataccncnnagaagnccgggcctctggaaagngngaangnttgtgtggtgatgtgntgtgtnctttccggatncgttgaggncccnccttgatttcncaggattaagtgattacaaaaggaanttgcagcttgagaagctgatggaccttggaactggtaaaagaagagagttgagcaatgaatggaaagcnctatgtgttgaggaactaaaattgaatatcaaccaagcttcgattttccgccaagcttgcagaggcagcaaatgatggtaaataaaatgaagaaacgccatttcagcatttggtgtttgtcgtttcggaattggcttgaaaaatatatagtttacttcttacttcttactacttattagccatagaccatttacctataaatgtggtttatgtctttagctttactacaacttctggtgattgatctacttgggaaagtatttgtaccatttcactttg

SEQ ID NO: 134781 - DNA, 505 bp, Arabidopsis thaliana columbia
  unsure (1)..(505): unsure at all n locations
gtnttccccccccccatgcccgggtnaaagggnctccgtgcttagttggactttatggaccngctgtccctccagaatctgtgtcccgtcaagcttgctgaaaaatatttcccgattggtncngtaattgancccagctgaagagttctatggaagattgactaagaagaatagaaaagcaactcttgctgatgagttggtttcagatcccaaagtttctcagtacaggaagcgtaaagttaaggagattgaggagaagagtagagctgttacaaataagaagtggaagaaaaagggaaaccaaaccacgaacaaaaagcaaagaaggaactgatttacttttgttagaatatgattatagttttgggatacttattttctgttttgattagaatattgatcatagtatcgggacacactttctgttggtgctatagattcaccttaccctgtaatgactcttgttgttttatgggcttcgattaaaggatttctgttatcggtt

SEQ ID NO: 134782 - DNA, 510 bp, Arabidopsis thaliana columbia
  unsure (1)..(510): unsure at all n locations
cccccccttccnctcttaacgaccgacccccgatncgatncccgncanatcccccacaataggcctattancgagcccccgcgttgatgtgccgaatacnaacttcccggtcagatcccgncgtatttgnccgaataggactgggaattccccccgaggtttaaccncgagtccgtttattagggaataaaggattgtatggttancccgttgcaggagatgatgatgaagagtaaaggtttgtctgtgatggccattgttgggattggacttgggagtggaatcgcgagcttgatgattagttttactngtgtttgtttatggttgaggattactgagaagaagattgttgaagaagaaggtaagattagtcaatctatgcctgattactaaacgtaagattaaatttttcttaattaaggattttgattgttaattacggctttgaagaagattcttgatactgtatgtggttctattcttttatatttatgtttcagttctgttttc

SEQ ID NO: 134783 - DNA, 519 bp, Arabidopsis thaliana columbia
  unsure (1)..(519): unsure at all n locations
cnggnaatcgngtnntccaacccccggtcccagcatttanganaatnnaggggccnattttgggttccaattgattttcnngnacccccgccncaagggtctttccaaaccancccntggataagaagcntctactttccggttgccaataccgatgaaanctgcttgcgaaaaccgatgggggatgagaatgtacactgtgatatcgagattcgacgaggaaggtaaagtcctggaggtgctcgaggatagacaagggaaggtaatgaagcttgtgagtgaagtgagggaagttcaagggaagctttggattggaacagtggctcataaccacattgccactctaccttatcctttgacaatgaatcaatgaaggactttgttgtgtagttcctgaactaaatcatctctctgtaacttaattatcttcgttttgattcaagttcctttggaccggtttgtcttttgttgatattatgtgtgaccttagattcctcatgaaattctctttctttcttt

SEQ ID NO: 134784 - DNA, 395 bp, Arabidopsis thaliana columbia
  unsure (1)..(395): unsure at all n locations
taaaaaggttttgnnccccttttnnttncccgnaaanttccccccttaaaatnttttnccnccnaccatcatctccaatntaaccccccatcactccaantnaacacttcacccccgcccactcaccccacccccttcactctccatcttcccgcaagcccaagaccccctcatcccgcgcgtcaatggaggtcatggtgggtggaaggggtaaagtgcagggcaggttggagccgattcgggtggggaatgaggtgggaggggatgaggtgacgagtgcgagtatgaagatggatagggaggtggatgaagtgttggagtttgtgaacgcggtggatgatggagatgaatggggttgaagggcatcaacatggatacagtcatttgatcgttct

SEQ ID NO: 134785 - DNA, 421 bp, Arabidopsis thaliana columbia
  unsure (1)..(421): unsure at all n locations
gtggaaantccaaagcccnagatngttccccccccatcanaggtcnggttcttcanccccccntatggntanggaccatcgctggttgctctanccgttctatgntgcaagccagctcaagtttncactgggtggagcggtacgacaaactactggttggttncagtcctgtgtttggtaggtatcttaacccttctcttccatgatcatgaccatggcggtcatgaagcacatcacctccacaggaaaatcattactctttagataccgtttcgagtctctgttttgcctatctgtcatgtctgtttgttgtagagcgtcttaaggtctattaatctttnctnttcgcgttgtatgtctataactagttgtaacgctctctgttgcacgtgaagaaacatatggaagcattaaattcctt

SEQ ID NO: 134786 - DNA, 510 bp, Arabidopsis thaliana columbia
  unsure (1)..(510): unsure at all n locations
ccccaaggccttgnncccgggngcttgcccccttanggaaaaanggccgnttcctgtcccaaagntcnaanccccccnttcccccggnatntgggcngccttcaggnccccaaaggcccganactccttccgggattccccgngccaaggcccctgttaaagggnccttacccatttaattcncggatttaaccaaattcttgcccacatggnttgaaattactcttgacgatgaggatgaggattaaggatcaagaagctagcatttgaatgagacggatatatcaaattagctctctgttcgaccttttttttaatatcttcttagctctactacaagttacaattggttatttttagtattggagaaacaggttgtgttgttacttctgctcagaattatgaatgttttttctcatagatcaaaagatctctgaagtctgacatgtgaattttattcaaaagatcatcacagcagaagtttcaaaataactattcgattgggctctc

SEQ ID NO: 134787 - DNA, 476 bp, Arabidopsis thaliana columbia
  unsure (1)..(476): unsure at all n locations
cccngagcngggttaaacccncctatcagnggacccnncccnatttttccnaagccanccntngnnatagattnttaccaggggttcttntgtttaccccacccagngaatctctgtaaccgntgcactnttacncccgtacatggcgggttgtttgatcctggatccaatccgcctgcacatgtcccaatctctttggacatagatgaaaacatggaggaaccaatgatcagagagatgatgtggaatgagatgctttattaccaccctgaagctgaaatctcaaacgcctaaatcatcatcaatgatcatcaagagtaagctttttccagttttttttgttttgctttctaaaatgcagcttcgatgttatgttatatatagcgagtccacaaacgcgggaacagatcgattaaaaccccggtgctttgatctcgtctggtttgatttagttgcagtgagtgagtagtagtaac

SEQ ID NO: 134788 - DNA, 469 bp, Arabidopsis thaliana columbia
  unsure (1)..(469): unsure at all n locations
ttcccatttctnnaccctnggaacttncngttccaacatcntggcgcctggaggattctctacacggtatcatgaagcgtcatggacaattcatcaccccgaaaggntggtncccgtggacaggagatnccgcgccagacacgatctttttacgccgagtactttaaattccgggccaggagcatcgcccaagaaccgggttaagtggcaagggttgaagacgtctttaacaaagaaggaagcaaataagtttacggtgaaaccttttatagacggcaataactggttgccggctaccaaagttcccttcaactctgatttttgatattttttgctggaaaaggctggtctgaaaactgatgcatggctagtcgttctttaatttgtttataacgaacatacaacattcccttctaaaacattttcttgtattggctttatttcaaagtgtctgaatttgtttctatat

SEQ ID NO: 134789 - DNA, 469 bp, Arabidopsis thaliana columbia
  unsure (1)..(469): unsure at all n locations
tcggagaccntttcacctgaaatccgcccaaattcctgngagatggcctccgctaatgacccccnaaagtncttccaaaaggnaaaggccgnttngnccttgcagantagagatgcttagggttggtttgcagaatttccctggcgagggnatatnccatggcgcaaaatcttgcaatttggtccgggatgtgtttcatgatgaacgggctccaagcgacctcaaggacaagtggaagacgttaaacaaaattccttctgacacggggaaatgggtaagcctttcaactgaaagacaaccgaattactatgtgtctgaagttagttctgaatgacctatcggacttagcaagcattagagcttagaagagtagtagatagggctttgcagattttgtacaaccttgcttgctcctagtttgctaaatgtatatggagcaaaactgatcttaccttttaacactaaattc

SEQ ID NO: 134790 - DNA, 452 bp, Arabidopsis thaliana columbia
  unsure (1)..(452): unsure at all n locations
ttggacngganatttcccttagnagcatgntgtgttctctgggaaganctaattcccggtntggaagatgncaccccgaggacntntccagttttggatcanccntagcantgggantctcagacgcttctcatgattccttggatgtggaaagnggnttgatagagctccgaaaactgggaatagagcaacagttgtgggaagcttctcgacgagaaatcgatcagcttccctcgcctacttcttcgaatcacgatctcgatgctgattcatagtaaagtctcttccttttctttgatagaagaaattttcgttttgtatatctctcgtcatntaagtttcacgaagaatctgttgtgtcattgtattttttatgttttcccttttcacacttaagtgtgtaagcttttggtattcttatttttgcaatcaattccaaaaagttttggagg

SEQ ID NO: 134791 - DNA, 444 bp, Arabidopsis thaliana columbia
  unsure (1)..(444): unsure at all n locations
tccagtngcccccgnngngtcgncaccntanggtcncccgncgtncagagacgctcnggcggagcgtcacgctcgcgttatgcncnacggngcatcaccttcngccaagcccactgnaccagttgcagtagcagcttaggagaggagcttcaggaagttgaactgtaagttgaaaaatctgtaatatccacaaaagaaaaaaaaagttttgctcactgtcacaacaggttagatcgatcaatcaatcaaatgttaatccatgagttaccccaaaattacatgaagcactttctctgcttctgtcaatgacagggggcaaatatgtattatgccgtttgtattttttttttattttcttactaaatataaattcattaaatttctttgttaacagacttgaggaattacacaataatacacattaatatttcgttcatgagtggt

SEQ ID NO: 134792 - DNA, 447 bp, Arabidopsis thaliana columbia
  unsure (1)..(447): unsure at all n locations
ggngtntttggcgnctctnttgcnctcaaaagcatnccccnttnctcttntaacggtccattgtcnccactacaatnccatggancctcttgcagaccctntctctggacaccattcttccttcaggatcctctcttacttcagaggtgacaaagacagagaccagctgttccacgtacagctacctcccacaagagaaatgagccgttccctttagactttatgtatgccagattctccttttttgagatgaattcgtcgacttgacatctctttgtctcttttatggngaaaaagttgggaaaagtgtgacaatggtctgaagcaggaatgtacaggttttgttagtggttgtgtttttttttttccagtgtggaatatagaatcatgatattttgtgtaaaacagaaaaaagttatcattatagtatagaagtttgctcttaat

SEQ ID NO: 134793 - DNA, 454 bp, Arabidopsis thaliana columbia
  unsure (1)..(454): unsure at all n locations
aggtgntgnntcctcctgtaaagaggtcntgacaccgtngaggctaagaagtgagngtagagatcgtgngaaggtntaaaccacggagagcgacgagaccgtatcgattttagtcgacgggctagaagaccgtatcaaaaatatgttgaaacttgtagataatgctattgaccatgaagataatgaggcggccacgagaattgtcctaactcagatcagtaagaaagtagagaaattaacaaagaaaatcacggaggttggtgaaagtgtggaagatcatagcaagttgattgcaaaggccagacttcaagttctgcaaaagatcaaccgttaatcttttgtttaacgatgtttgttgttcaaaatccatattttagtatgttttaatcatcccattgtacctttttaaaatattatatgttttgtaatttcaccatccgagagattggttgat

SEQ ID NO: 134794 - DNA, 458 bp, Arabidopsis thaliana columbia
  unsure (1)..(458): unsure at all n locations
ttgtcangnccttctgggtgtgtnnctgaccncattaaagctngaacncctctgaagggagatccagtacattngccacttaagtgtcagggnaaccaacattcgctattatattcttccggacagtttgaatctggagactttgctggttgaagacactccaagaatcaaacccaaaaagccaactgcaggtaagattccagcaggtcggggacgtggtcgtggaagaggtcgtggacgtggccgtggtggtcgttaagcattttgcngtaatcaaaagtctggtcctttttggtttgtaacagcaggattgtaaaagatctatcttgtagtgagatttggtgtcactaagacaaattcttgttatctctttaagttttcatgaatttgagatttgaaacgttattgccaaacatacatcactcaatatgttttattattgacttgatcactttatt

SEQ ID NO: 134795 - DNA, 437 bp, Arabidopsis thaliana columbia
  unsure (1)..(437): unsure at all n locations
tcgacgtctttcccncggatggctgtttgttatgattggaacnccctcaagatttgtccccccaaatcaagatggagaagttgcccgcttcaggttgattcccagtcgctcaagttgctaatgtggttccggaagactagtttttttaaggacagttgttccctggtcattattgacttcttgtttcggcacgggttaatcagaccagagtcaccaggttacttggatctataccgacgcctgaggaatggagattgctcataaggacgttactttctatctaatgttttaaagaaaaagctcactctctaataaattaatattagatactctgactatgtaataagactcatgcatgtatataatattcagagtcttcatgtgccttcatgnacatatatataccaatcaaggaagttataaaacttcatttatac

SEQ ID NO: 134796 - DNA, 379 bp, Arabidopsis thaliana columbia
  unsure (1)..(379): unsure at all n locations
atttntttnnttccggaagnccnnanattccnncccccntggaaggggaanangaggnggaagaggaangggtagaggccgaggccatagccggggaagaggncgtgtgtagattgtaatgaaatcatccaggcttgtggtgtggcagctctgaatctgtacatgtttgttttagggtgattcagaatttcagattttcgtgagaggttttgaatttgaacataaaggctgctaagtcatttatctttctttgttgctatagtaattctttgcgaaaagatgttgaagttcaccagtagcttcctcaacaactcatctgaagtgagacactcttaaaatgaagtttacattacaacaaagttctatctaaaacaccatt

SEQ ID NO: 134797 - DNA, 433 bp, Arabidopsis thaliana columbia
  unsure (1)..(433): unsure at all n locations
atnnacctagnnncncttctgtactacncatcaccaagggagagttttccgncttgcaaggggatacaattaggtnccntatcggaagacccangagtgttaggctgacccgagttatggaaggttggngtagattcttcgagaagatgtcgaggaaaaaagtgtataacgagtactggctaaagattaagcgatcatcaacaagtctacctggtctggtaacccgggcaaatacaaacgcatcttgagatcttatgttgattcaaatgaaatgaagatagtgatcggttttcttactggtttaagtagtttcccttagacccttacccgtgtttttgtttttgtttaagttacttttgccagtagtaaatattgatgctcatcgtcacaagtattgactctgtcgtgtttacgtaaatgaaaagttaccnng

SEQ ID NO: 134798 - DNA, 416 bp, Arabidopsis thaliana columbia
  unsure (1)..(416): unsure at all n locations
acggngataaagngtttcgnaagctgngtcgatttaaaccgnggttggatccctactttctcaaaagcctttggngngtccagaaagagtcgtcggttgcgacgctccacttatggatcttcccttcctttgactttctcagcaaaggctttcctgtcttgcctgtatccctctgtggcccgtaggacatgaactccgacaagcaaacctccgtgaccctcttctcgtacaccactccctgttcctcggagtagatgaagtcgtcgtggaatatgattgggcagccatctctggtgacctgcgcgatcaattaaaaaaataaagngatcagatcagatcttttttttttacatttcattaacagttttttttttttttggcgcaaaataagaaaatgtcaacgaattaggnncccc

SEQ ID NO: 134799 - DNA, 560 bp, Arabidopsis thaliana columbia
  unsure (1)..(560): unsure at all n locations
tcatggcccctccgctnccactgtccccggagtcccagcntgaccgatcgnaagcctnaaattccnatgtactcggngcaggctcagttaggntnttaagttggtagagcccgagnccnccggttggtttcaggtgctgctaattatgtggctatggtcccatcagggcaaatattcgacagttctctggagaaaggtctaccgtatctattncgcgttggctctggccaggtgatcaaaaggacttgatgaaggaatcttgagtatgaaagctggtggcaaacgtagactctacatcccagggcctttggcgtttccaaagggtctagtttcagctccagggaggccgagagttgcgccaaacagcccggtgatatttgacgtgagcttagagttcataccaggtctcgattcagaggaagagtgaaactctgttttttcaagtgcaaattgtaatcttccatacacaattacaagattctatgtatgatatttatctcattgtactcattcattgaagaacatcacattgattaaaaacgtcagtatttttcaattct

SEQ ID NO: 134800 - DNA, 553 bp, Arabidopsis thaliana columbia
  unsure (1)..(553): unsure at all n locations
anagttnggccacccccttncaccaacnannggggantccccagntncnccnngggggtcgganccccanaaatcagngggtaagttatggccagaggnggagcnanttggacaacataaggaaggatatcaggggcccatgatagaattttcggatccaaaaaattccccatggcggnccgttgctctnatttccggacaatctgaacaggaangtaccgcagagaacttgntccaagcttttatcatgtccacttgaataatttgctctgccccttaatccttttccatggaagtgtgttccatcaatctacctctcagtggatttctttgatcgggtttctcaggctttcctccttccatcaagctcatgtttagatatggttgcatctctcatcaaacatttcggtatctcatctcgactcagttacttttggtttctcgtgctagacattttatagtctttcaggaccattcttttcccctttccttgcgagctgttcgtactataactacttatctccgtgcaataaaacaaaatcgttcttatatc

SEQ ID NO: 134801 - DNA, 567 bp, Arabidopsis thaliana columbia
  unsure (1)..(567): unsure at all n locations
tcctccacttggacgtctnncncccnnggcagcnttntggtncctcaggccgactgttgatttngcncttccccnggacgccattcagggaagngaccctnatggtgngatntttngaagcttaattaaccgctttgcatgccggaagaagagattncagatntagatgncgatancgncggtgaaggagaaaaaggtcttaacgcagcagaagcacttagagcacaagtgaaccgcagagntgcaaaagagtcaaacctcaagctcaagcagtagcagtggaagtagcagcggaagtgacagtgatggtcgtagcaaaagcgtaagcagcggaagtggcagcggcggccaaagcagtagtggaagcagtagccgtggaagtggaggaagtgacgatgaagatgaagtcaactccgtataacaaccagctcccaacaactttgtcaaacaatatttccatatttgagacactttgtctgaataatttggttgaagaatccaaaagggtaaaaatttatgttttactacgaaagtagtaaatacaaatgatataaagatccagttact

SEQ ID NO: 134802 - DNA, 458 bp, Arabidopsis thaliana columbia
  unsure (1)..(458): unsure at all n locations
cccaaccccccgggttccaatgcctnaaaaaccccgtttnagaaccnnncnccggnaatcccccgggaattcccccccccaccaggtgggnnccccccnccnggcggcagcagcagcccncaaggntggatgggtccnaacccgggggggcaagggctcttttgggaatggntggtggtggtcccaaatcattacatggcaccaccatcttcaagctcaatgcatcaaggtccgggtggtcatatgcctccacagcattatggtggtcctggtccaatgcattagagngngaaaagaaagtccctcaaaagtcgaagacaaagaaagatgtttaatctctctctttatttctcttagctctgttttttaaagtttggaacncttgtacttgtgtccaaaagatgtttttttaaggataaaaccatttgagaaatgtattagaagctcttgatttctct

SEQ ID NO: 134803 - DNA, 592 bp, Arabidopsis thaliana columbia
  unsure (1)..(592): unsure at all n locations
aaagcagggcgggttcgccggacccccaantntnaccccttccaaaaggcttcangggaangggccnnaanaccnctcccgggggcaaancnctcagncnttncgacgacgtaccccccntanaccngtcttgngcttcttaacggcgtggggccaagggaacgtcacgccggcagattaacggtggcttggcccccttattcccccggttttggaccagaccnccattggttagnccgtttaagngtaaccggactccaccgtttccgttaacgccggaaaaatggtgatgtggctaatggacacgttgacaaagcagctgatgatttttataaagaagttttataaagaacttgaatcagcngaaaaaaatgattgagttcagctaaatattaatccgaattgtgtgtatcttcgtcatatttctcttcttccttaaatatttttttacccttttttctttctttcttttttttctctcgttttgtgctgattaaaatccaaagatgtaatgatattttggggggttttattttcgattcctaacacaattggatattatgaataaaaaaatatcatcggttctattngt

SEQ ID NO: 134804 - DNA, 583 bp, Arabidopsis thaliana columbia
  unsure (1)..(583): unsure at all n locations
ccgggttccccccnncggaatttnnaaccaaggncctttttnncccggtggnctataacgggccccccccgtcgggaacctttnttggaagcccncgtccnttnctttggnaaccgggtcattcaacaatccaattgcccccgntgcngtttcaacntaaaggtgcgggaacccaaccaacgngtntttgnacgggccccacttttcaggacccaaagggcgtcaanactcttcatatggacaggaccagtcacacaangttgtccagaggaggaggcactaaagggtcacagtaaaggaaccaatactcaacgccaacaccaatgacatgagaccaaaacatgggttcgaattttcgagtcagttgaggcncngttttttaaacgcctcacactcagtctcactctcacatgactcgattttttgtttgtgtttgtacagctatttccactgtattgatttctttctgatacgattgatgtgtgtatatatatgggaaagaggttggtaaaaagtaagaagacaattgttccgtggtgaaccaaaaaaaaagctcaacaaatcttcagctttgttttcaccg

SEQ ID NO: 134805 - DNA, 532 bp, Arabidopsis thaliana columbia
  unsure (1)..(532): unsure at all n locations
ggttccccnttccccggaagattttncttacncncaccnttggtttngccttcccacgaccccgatttcttcccccaaggacntgatcccccttgnctcaaacggtagggccaangngctgcgnaaatacaacttatggaagcccgtgatcgcaaccataanaccattacggtcaagcgataccaccggcatacaacatatcggcgatcccacacgngcttccgcttttttgcngctacggtggtttagatagcctggctgatgtgaaagacgttgagtttctccttgaccngtttaagtatcacgacatcgataagatgaatgtgcngnttgtgaaagactatgctcangctgatttcatcatgggtgttactgccaaagacgttgtttataaccaagttgctacctttttcaaacgacaagcttgataatattattaccttgtcattagtttatgtaattgcatgtgcccatattcttcaattgtntccctntaancaaaatgggcaaaaataaaattaaaatttttatg

SEQ ID NO: 134806 - DNA, 536 bp, Arabidopsis thaliana columbia
  unsure (1)..(536): unsure at all n locations
ancangngggacttcaggccctnctttncnggncatcnngcgccggaaaanttccaagggtaaattggaagttgtttatagaaccggtgcagagcantcccttaaggnggacccttatggccgaacgttggntgaactctgtcaaatctatttcgtccaagaccggcttcacctcagaagtccacagatagctatcttgtggangcgattgttcgggaccgttaagagacagctacccatacgttcccactaaagagaaggaattgcccattgaaacagagattttcttcgctcttgttttggctggtctctgtaatttcatagcacctttaatattcaatgacacgagtttctacaagactcctcaatggtttgtaggtgttttgtttttggttctaatccgcaggaagttcgcctgaccgtgtgagtgatcgcgtgctttgacatgatcaggctcgtgtttgtacttgtacatgtgtgtgttttgtgtgtttgttaatatttatatataaagaaaatgtgcataatttaccctt

SEQ ID NO: 134807 - DNA, 510 bp, Arabidopsis thaliana columbia
  unsure (1)..(510): unsure at all n locations
ttcttgcncccctttcacggcccaaaggccntttttgncccccacgttcgaggccccccaaattttatggccnngaagnccngntgacccaggggagtnttcccccnttggaagggngttagggcccgttgcatcaancngctcggaaaccatgcgccctgatcatatgggggggttaaccccnaccccntnataaggnttaggtgtaagcgcaaagctgtacgatttcatcccacttcttatggctaaacgaagcncctgttggtgaattgcagtgacagaacanccaaaaagaagaatctggttttggtttggtgtaatgtatataatttatataccacagcatcacaaatatgcatttttttcacttttagtttctttttcttacaacattttgatgatctctcattgtcgtagtaagtttcattttcttactgaggaaagaaactctctgcgttcactggaactttgttttcaactgattcaataagattttatatttacagctgt

SEQ ID NO: 134808 - DNA, 504 bp, Arabidopsis thaliana columbia
  unsure (1)..(504): unsure at all n locations
aaccccnaagnagtnctngttacccccanaccggtgtntcccccggatnccaaattccnccgnaaaatcgggnatttnccccctagctgcttgatcccccaagcttgcattaacagncccgtgnccccgttaangcngggacccaccggaaccgaaggcgacccttttcgacaagatgtcgccattatccggaggaagagagaggtatcgcagacaggggttattccctgcaccggtctccgatttcaactccgagagattctgagccgcagcttctgcctctgttcccggtgacttctccgagattatcgccggagatgtagactgagagacctgtttataaatttttactgcgactggaactttcatttcttttttaactttgctctgcttttaatatatcgttatccctgtttcggcttattacactatttactttaaaatagtaaaatatgttaattaagtttttaaataaataaataaagaaaaggagaggtgaaagat

SEQ ID NO: 134809 - DNA, 522 bp, Arabidopsis thaliana columbia
  unsure (1)..(522): unsure at all n locations
aaaatcncggccnagacatctncccccccgngcctggggcttncaccgntccatggctttgnggaccccttgtcttgganaaagnatgggnantccaacactggnctatccgacagcgcaatccccagttgcttgttggcacnattgtnttanccatccntatccaaccgggggagcaaaggaaaatgtgcaatcctgcctggaggagtacaaggnaaaaaggaagagttaggggaagttaaggggtgtggtcatgactacccatgggaggtgcatcaagaaatggttgtctatgaagaactcttgccctatttgcaaatcccctgctttaactgatgcttctaagaactcatcataaattataggttatcttttatgtgtgcatgttatattcatttgtctttcgaaaggaagaaaaatatgtgacagaatataacattaagttttcttagtgattaatagttgtaaatagaagaaagtccaggatctttctcaagggttaatatatatgttaattattgg

SEQ ID NO: 134810 - DNA, 518 bp, Arabidopsis thaliana columbia
  unsure (1)..(518): unsure at all n locations
aaggntggcatgggagagagaggacccnaggccatnccagngaannccccttgtaaccctgaatnccaatttgancaccgcgatncaccgggattactgcttgctggaactgcataccaaatttaancaaaactggtgtggactngtgatcgtaccccgaatggccaagtaatccacaagctgaatcaagcaaagttcgtcgacagaatcggtggcaaagtttacttgacgatcggcgaagctcttgatgcttgctttggattaaaagtttaagaaacagttttcaaaggaccagttgtgttacgggttattgcatgtgatgaatttatgtgagttgttgtgatttaaataatgtgatgcatgcatgatcatgtataatatttaagtacgtatgtgtaatagagtgctcggtcgtgactgaataaagtcatgcaaactataatgtgacgatcgatatgggtgtgtttgtaactcgatagatttggaaacaatgtataatatatgtaagtttgagaatt

SEQ ID NO: 134811 - DNA, 523 bp, Arabidopsis thaliana columbia
  unsure (1)..(523): unsure at all n locations
tttccgccngggggctcgagacgcntggncaatncggaattcngtttccaaaantggcaatttgaaagcctnngcaaanccggggaataatgncggaatntggacagattcncntatggaacgccggcttctcccagaagacgcggaatgctgcanctgtctctgtgaatatgaagatggagttgaacttagagaactccctttgtaaccatcacttttcattgcacttgcatcgataaatggcttcatataaactcacgttgcccgctctgcaagtttaacatcttgaagaacgcaaacaacgaagtctngtaaaatctgttctggttctaggatcaatccgaacgaaccatcccagaccagaacgtttcagatatatgtaaactctggttcgtgttttagtgttgtgtagttagaaaatctagtccatatctctttctcctgatcttctattacaatgcgtcaatgcgcctattgatagtatgtaggaataaatcgttggattagtcctnctttatttttt

SEQ ID NO: 134812 - DNA, 497 bp, Arabidopsis thaliana columbia
  unsure (1)..(497): unsure at all n locations
aaagaggcctcantttgcgctcaggcacattccccggcganaagaggggnccatagttaccnnggtcaaacantcttgcccgaancttncggagcaaacagaagtncggtcgancccatgtgggcgtgagctgggtgcttcttctagcggctagctcccggagtagaattcccggcgaaggtggatgtgatatggtgacatgcatatatataaatgaggtaataataaagagttataatccctcagattgtttttctcatggaaagttttttgcttgtgtaaattacaatgtaaaatggctaagctatcacttggtagataggtttgtttaggagtaccaatttgccacatcttttttggcattttgagttttaggtatttctcctaaaattttccccaacttccaaatttagatgaattaaaccatcttctctgtaaccgagtttgttgtatattatgttacgtttgtcgaaatatagaaacgatgctttccacgc

SEQ ID NO: 134813 - DNA, 469 bp, Arabidopsis thaliana columbia
  unsure (1)..(469): unsure at all n locations
atttnacccccttttcgcaagngccctgttctgnnctggntcctncccaacaaatcatggaacttggccggtggtattagcaaggngatcttctcaggatctttcnctttatgaagatatcattcacaggaccccagatcatgagctctttgcttttgactccggtaagtctcctcatacggcggtcctcaacaaacgcagttatctccgtgtcatataaaactctgcgacctatctcacggaatgtatgctcaatcttgcttctcatcctcatccacacaaacccttttgttttgttgtacccaacttccgtcatatccttcaatggcaacaatcccgtgggtagtttgatgagagcaagaagctccttggctttatcaagacaaagagattgatcactgtagctctctatgtcatcactctcatctattatcatctctcttaacgccataataaatcactttgtttt

SEQ ID NO: 134814 - DNA, 361 bp, Arabidopsis thaliana columbia
  unsure (1)..(361): unsure at all n locations
gncttggtccnngtccaaccattngcttncacctccttccncctctttntgnattnggaaaanccncctcaaaggaccaggaangtttgaggttggaagaggaaggtttggtccttgttcttaaagttgaagtctccacttgtggctattcctgttccaaggttgtccgatccaaaactctatacagcttaagtaagtangaaggaaatttggtttgagcttatgagaggaagttgaattgagttttcttgtttaaagtttatttttctttattcgtgtttggagtttgatgctttgtaaaaaaagatgtgtcaagttaaatttaattttcttatatataataaaataaagttttagtcac

SEQ ID NO: 134815 - DNA, 491 bp, Arabidopsis thaliana columbia
  unsure (1)..(491): unsure at all n locations
attgtggatcncacgatgacncattaaggtnttgcgcgacaatcgtgctgatatactaganctgcccttatgcgttctggtcgtttggatcgtaaaatcgagtttccgcaccccactgaagaagctagaggcaggatcttacagatacattcaaggaaaatgaatgtgaatgcagacgtcaattttgaagagcttgctcggtcaacggatgatttcaatggagctcaactcaaagcagtgtgtgttgaagcgggtatgcttgccctgcgccgggatgcaactgaggtgaaccatgaggatttcaatgaaggtataattcaagtacaagccaagaagaaagcaagcttgaattactacgcctaagtcctcttttatgtacactcttctttctcctctttacattatagaaaacttcaagttgtagtctcaacttttgaatctagaaccccttcaaagtgtggttataattataatagatatcagcttgacat

SEQ ID NO: 134816 - DNA, 378 bp, Arabidopsis thaliana columbia
  unsure (1)..(378): unsure at all n locations
ggcccatgggttcccncttnnaaaagccanggnncccttaacccggantgggnaantttggttgcccccaaaagccctccntanaatcagggggctttcccatttaaggaaaccaccaccaggctttctggaatcccttccacgagctttttgtggccgcccttagatcccgaggatatccnccggngaaacaacggccgcttaggcccaatgcttgggnccccagatgaatgaggggaggatgacaaggnccctatatggtggctatagatatagtcatatagagattatgtttgtgtatatgaggttcactttattcttcttggattggaaaaactctagatttcactttggttaaataataataatattttagct

SEQ ID NO: 134817 - DNA, 467 bp, Arabidopsis thaliana columbia
  unsure (1)..(467): unsure at all n locations
acccgccnggnatgtcctccaaggtgtccgaggtgaaatgagggnagaagaagatgatgngtcaacaatgtggcggctctctcgaccgttcgtccacaacatgccgtatcttgcaactgagcaggcatcgccaagtaactctctttcagctgcgatcagtaaccttgggttttactactgcgacgaagacgtctacgattacatctctgcgtgagaaaaggtggtcgtcgtgtggtttgttgttgcattatattatcgtaaaatcgtcattgtacgatttctttaaataaaagttattaaataagaacatgatgagatccatgatccatcgttgtttaaggttttaagtaagaagatccgaattatgaaagccttttgtgaaattcggatctttttatatttatttcccccttcaaatgtagccgttcccgttttatttataataataataataaaaaagtttgacc

SEQ ID NO: 134818 - DNA, 480 bp, Arabidopsis thaliana columbia
  unsure (1)..(480): unsure at all n locations
cnttctgacagtnatgggatcctgangttgggagatgtgngtttcacccatgaaccaggaaatggacgatgagtttattgaagatgggnccaaaattcatgaaggcacgtctttaccaaaattgtcccatagaggattacgagctggcaaaaatgttgcataggcaagggtcatttttcacagaggatctatcaaagaaagaaaagtttagcgaggaaggatatggttcggtgcaacgagtttacgtaatgagtngtgaagacaaagccatcccctgcgatttcattcgttggatgattgataatttcaacgtctcgaaagtctacgagatcgatggcggngatcacatggtgatgctctccaaaccccaaaaactctttgactctctctctgctattgccaccgattatatgtaataatcttaagtccgttttacttttttctcatcgttactaataaaacaaacccctttttccgggc

SEQ ID NO: 134819 - DNA, 478 bp, Arabidopsis thaliana columbia
  unsure (1)..(478): unsure at all n locations
ttgtaaggtttgaacccntggagtttcaatctctgcttgaggcgggcntggaatccctgaggctctccggttccagntgaaagttcaaaaaccaactccacgngcaacttgagatcccaaagatcactgcagttacaaatcgaagaacaaggtcggtatcttcagatgatgattgagaaacaacagaagatgcaagagaacaaaaaagactctacttcctcatcatcaatgccagaagctgacccttcagctccatcaccaaacctttcacaacctttcctccataaagcaaccaattcagaaccatcaataactcagaaactgcagaatggttctagcacaatggatcaaagtgaatctacttctgggactagtaatagaaaacgggttagagaagattagacatctcatgagtatgatccaaagatgttgcaaacatatgtaattgtgtatataaaattgaaaatatcacagcagc

SEQ ID NO: 134820 - DNA, 506 bp, Arabidopsis thaliana columbia
  unsure (1)..(506): unsure at all n locations
tnganccganatnttcctnatnccccacncgtacaggcccgtttgaaatgtccggtggncagtnttncgtggaantncccgcgttnatgggtctccagtnngctttgaaagagaaagtccaaggatcccagnnaacctaacttgggnttcgncacttgtggctattggtcttggattgggaattgtcatcagccctttctttggttttagcctctactgagaaagtaaaagcttcttcaggtaaatgagacaagttgaaatctttgtagttcttatagaagaaagagaggtttttttgggtccatatcactcgtattattgtcacctgtacgaacaaaatctcgtaatcttgcttcagaaactcctctcggagaaaaccatttggtgattctttttattttccttatttttaagagaagtttggttttggttctgaattatcgatcaactgcatgtaaccatactttgtaatattatcaaattttacctaaaaagtcattcttgtt

SEQ ID NO: 134821 - DNA, 385 bp, Arabidopsis thaliana columbia
  unsure (1)..(385): unsure at all n locations
cntttnangttnaaggtacccccttaaaggngggnaagggcccgttcaatgtggcttaccgnatnggnggccaccttgggattgctnngccgaaattggattttggggtatggaggantccagtgantattatncccattggtncccaagtatctgccggatatttgtattttcttgccgaggaagcaaggtggtgttagagtgctagtcacgctgcccaaatctgtaatggtcaatttcaaggaacacatgaatcccctaaatacatgaaattaataagcaggtgaatgtaattcacagtgtttctttaaaatatgaaaaggacctcatgcgattgtatatttaaagcttttgtttgctgcttgtttaagattttcacatttgg

SEQ ID NO: 134822 - DNA, 531 bp, Arabidopsis thaliana columbia
  unsure (1)..(531): unsure at all n locations
gaaaaaacaattccccccggttagccnccgggcttaaanncgggaccttccnggcaanggaaagtttttccggaaatccacggaccaccgnggaaattaccaaaacttgtccgtccacaggtttntcccnnncctatttatactgnccnnccgtnccaaagggtccggtatccgaagctgatcttctagngnttgattagtaaggaggaggattaacccacgggattgccnatctgtcacatggaccacgtcatcatggggtcccgagtcatggagcgttctttagctctcggggtcaaaaccgggtcggatcgaagtttgtcactggatatttgagaacgacatgaactggntatcgctgattagaccggtggttatggacttatcaaatagtatgattattactatcttatcgccgagttttaattacatagaggaatgttaattttctattatcattactataatattttgaagttttttcagtaacatgtaaagaatgcttgttactgatttgtggtggtgcaaaat

SEQ ID NO: 134823 - DNA, 524 bp, Arabidopsis thaliana columbia
  unsure (1)..(524): unsure at all n locations
anggcctagaactccggctggaccncgtnttacccnaagggngggattnttatcccggggaattattccgtgcaaancttntgagccccatgancttaacccatggagatggatgaagaagagcttggagncncaaactcatgctttgtgtttggaggtgggacaaggctttgtcctggtaaggaactagggattgtcgagatctcgagctttctccattactttgttacgagatacagatgggaggaaataggaggggatgaattaatggtgtttccgagagtttttgcaccaaaaggcttccatcttaggatttcaccctactaatttctaactttttaaataaaataatatagattttatgcacgcagaggatacagaagacgtatatgaagaaacaagagaagataattataaattttttttttttttttgacacatatttttgttctcatttaagagtcttctggtcatatgtacataaccataagcagcataatcttattatatatctatttctgtat

SEQ ID NO: 134824 - DNA, 519 bp, Arabidopsis thaliana columbia
  unsure (1)..(519): unsure at all n locations
ttnggccagaacaagntccagcgaggnccccctgttgggatngaacnaaaggtgggaganctggaaggatgatcctctcgggcagctggagctatcaggaagcgtcaaaaaccaaggaagcatggtcgaggaatgaagaaggaactggcgaaaatgangcattctgtggaagatgcacataagaagaagagcttttggncccttgtttcatctgttacttctctcctcatggctgcttctgttgcttatgctgcttctctcaagtgatcacctgaagctgaagatggtactaccctttaactcattcgagttctcaattttcgctgtttaacttataaaccatttatgtagttgcttatgagctttttactcataactcctctatgtagttggttcaataactatcatgtaaaccttttttcctttcgtatctagctcttctatgtctgtgatttctgctacttttctctcagaacatgtagttgattccagaaactctaataaacttgtttgtttcat

SEQ ID NO: 134825 - DNA, 552 bp, Arabidopsis thaliana columbia
  unsure (1)..(552): unsure at all n locations
accncaaaaccggggcccgctgggaagcttgctccccttcggaccnagttatncatagaggagggcaaacagtcattcaaagttccggntnanccttgcttcacaggcaagtacatcatcaccaggcaaaccaaaggtccacgngtntccatctgcggttctgagtccacttccgggcaagctctcggtggtcacatgaggcggcacaggacagccgtaacccacgattagccccgttgcagccaccgcagaagtaagcagaaacagtacagaggaagagattgagatcaatataggccgttcgatggaacagcagaggaaatatctaccgttggatcttaatctaccagcaccagaagatgatctaagagagtcaaagtttcaagggatagtattctcagcaacaccagcgttaatagattgtcattactagttgttttttttactacataatatgatgaaatatttgtgaattcttcttacttactactatattgttgatcattggaattattttttttttaaattgaatcaaatattatcatttttaag

SEQ ID NO: 134826 - DNA, 546 bp, Arabidopsis thaliana columbia
  unsure (1)..(546): unsure at all n locations
ctnattccganccgttggcatacccgggnaacggaaccnnacagtttttcccttnaagnatcccgcccctgaaggggaagcctcaacncaattcttncctgaagnattgaaatnttgcaggagcccccagtangagtgcttcaccaggcgaagccactggnccgtgaaaagattatacattggatgaaagttgaanaagataaaaggacactcttcactactttctattgcatctgtgcacccaggctggaacatacatcaaagagtttgttcatggagatcttggtcgtaccactcccagcatgggatcaattttagggtgcagagcggagataatacaactagatgtgactgatgtgaaaatgggcgacccatgaattgccaagtaaatgcccgatgttcttccttgtttaattttgtagccttcatttccgtttcatttttgtcataactttattagttttgtttctaanaaatatatggattggtaataaatactttattaattatatcaaaagttattaatcaaataacactgaatttgcc

SEQ ID NO: 134827 - DNA, 280 bp, Arabidopsis thaliana columbia
  unsure (1)..(280): unsure at all n locations
aagcttttgaaggaanaaatctttgcccttgatttaaaaaacngcaggaaacctaatgttgtgttcccagagagntacagtgaaaacnccttgatggtgncgacaaaaaaaaancttgngctttccgttttcctttttttggatncggtaaaggtcattcgagtgtagaaaatgtaacttgatctgattgattcttgattcttctttagtagtttggtgngtccataaacactcatttcttangnaaatagtttttatgctaaatcgttcgtttcccttt

SEQ ID NO: 134828 - DNA, 522 bp, Arabidopsis thaliana columbia
  unsure (1)..(522): unsure at all n locations
anncccggggcccaattcccggggngaattctagggccccagccttcngcngttanggaggcnccacnctaaccgttggctagttggatcaatctncataacccnccgngtcatacagtccaggtatactcaaaacctcttcgattcatggnaccagtggaccacttcaatcgcagcccaaaaattcttcttgggtctaccggcagctcctgaagctgccggaagtggctatatccccaccagatgtactgacttcacagattcttccgactttaaagaagtctaggaagtatggaggtgtaatgctttggtctaaattctgggatgataaaaatggatacagttcatctatattggctagtgtgtgaaaagaatcgttatggccattgtatgtgtatcaattctctcgtatgtgtatcaattctctcgtctttggtttctgaagaattgttgtgtgtgtgtggtgttagtagtctaatttaaattgtttgtatcaatatacttaatcaactttgctttttc

SEQ ID NO: 134829 - DNA, 521 bp, Arabidopsis thaliana columbia
  unsure (1)..(521): unsure at all n locations
aaaaaaatngggccntggtccgtncccgcnggncaatnttgcnttcccnggnnccattctnttcaagtttccgccnctggngatcaagnncgttacaggccnggcttcaaacgggatgtctgataaaccccggtggttagttacccggtagcagaagaagcccatcttnttccgcatcaattggctttttttcacttgacctctaaccctcacaaacacagagttggtacagtacatacagcagtcacgcagtttccccttgctacaaattaatgaagaacataaggatctccgttcgatcgccatagcttcatcaagctcgtctctagacttgtgtagagagattcgaatcggcaacatttcaaaagttcttcatcttactgtaaatggtggaaggcatcgtgtagttctataggcattttcgcctttgagacagttaaacatggacaaatgtaactatgggttcctctaataccttgttgtagtctcactttagcttatttatgtaatactttcttctc

SEQ ID NO: 134830 - DNA, 522 bp, Arabidopsis thaliana columbia
  unsure (1)..(522): unsure at all n locations
agagcgtatgggcaccccctngcccatgngttccngtcttcaagggatcccttggtaatttttnctganccantttcgnaaaatcctgctgcnttgaancngctttcaagnacaaggccggccacagctgatgcaacttctaacgtncgaaancggttgaaagaagtagtcaggaagagngttgagatcaaagccagattttttggtcaagacataacggtttnacgacccagaaactgaagctgatccttcctacaaaatacaacctagcttagttgcaaaactctatggagaaaggatcatgcccctcacaaaggaagtccaaattgagtacttgcttagaagactggattaatgttttcaaagaaggaagcataacatttgtattgatcctatttttccgaaaaccataatgttgacataantgcgcaagctagcaagtcaagttgattttattacagaaggacctaaacaaatgaacttgaatttgagttcactacaatgaatttatncnnttgtngc

SEQ ID NO: 134831 - DNA, 528 bp, Arabidopsis thaliana columbia
  unsure (1)..(528): unsure at all n locations
cgngnntttggganaatcancattntncccctggatccnntttganatccgtttcctaaggtcnnacncgntgcggatcctgntaagaaatggannccagagnccatcgagttaancccntngtccaaaactacgggttgcttgttgcataatttccttgtgaattctggtgatgatgatgattcagtggaggaatgtgtgaatggttgtgaagctggtgataatggtgagatgagaaaagatgatgataaggaggaggagactcggagtttcgaaggagaagcatatagagagtcgaagaggatcagagatctatcgctgagaacctaagccgagtgagttcactaagatgaaatcgaaaagttgcaagaagcgtttttgtttgtttgttttagccttatcttgtaaattgtggtttctgctgttttcttttgtgtgtacaatgtacatctgtttcagtatgcagtttacggcttagaatgtgaaccagataatttaatatgaacgtataattttttgtagctgttc

SEQ ID NO: 134832 - DNA, 576 bp, Arabidopsis thaliana columbia
  unsure (1)..(576): unsure at all n locations
aaggtggaacccgantnccggtatnggtcaccatnagcntnaccaacangaggnnatccngctcaatanctggngganactttttaccggtcctccactgnaccnatgccttttatggaacgnnatcnntttgcagacttgttcccctggaatgatttttggtggagctggaaactccagnttggtagtggaaacttccacggngctctcatattccggtnacaatgcgcttcgggattcggccaattccctttgctcattctgaaacagaacctttcctcttccttcgtctccaccaattggctttgtattctccttttggagaagacggacaataaagacatatacttacttgcaagcactggtgtttacagaatcgttggcccgagccgctgtaacttccattgctctcttgaaaacacaacgtcctcacctccttcaaaacagcctgatcgttctccaccgtcttcgtcattttctaaaaaactacacaacattggtactcttgttgtaaattacttagcttggtgtgttcttttggtagttatatagagaaaaaagaacatgttcgtacag

SEQ ID NO: 134833 - DNA, 557 bp, Arabidopsis thaliana columbia
  unsure (1)..(557): unsure at all n locations
ccccanntggntccccccgggaggcctttncccanntcccccccagggntttccnccgaaaaggcctaggngtggggattcngnccnnccttcctcccccctaaccgggtccagngnnattcccntgttgggatccaaaccccnggaattgttcccaaccctgggctttggccccccctgggnaagatctttccccatgggtttttgccncccggtgatccggagttatcccccggtgctgttttcnaccggtgtccccctagtaggacgtcacggaattgggaatccctcggacccacagtgaggatgatgcttccgagatgaaatgatagtatatgatnttatactatttatatgcataaaacattaaaatgtaatggcatgtgtttattcgtggaatggtaaatacgaaagttgtataattgtgatctttttttgtgtgtgatttttatttatgtatttgagtgctgatcatatgttgtgtgtttgttttttggtattttttccatatgtttgttgataaactcaaaaataataacatatctctttttatgctc

SEQ ID NO: 134834 - DNA, 557 bp, Arabidopsis thaliana columbia
  unsure (1)..(557): unsure at all n locations
cgggcccttcaattccccnttaagaccttggttgggaaggagttcccctttaaaagcctagccgggnggaaaangggtttntaaaancccttccaggcttggttgnggaaccgganggtcccccttccncngggtttggngncccnttcttanggtactangcaccncttttatatttcggggaactactcccgcaaggatcctagagaaaggagccggccttgctgcttccgcaatccactgcgatgggattcccccctcttgctactagtgattgttgttttctggtggctctaatgggttctctgacttatacgccataatcttgagatatatatgatggaaagtctcatccttgtcaaaggaaaaaggaggggacttagatatatatataaaccctatatacacagattatagttagacctctctcaagctctgtatcattttcttctcaaaaatctgcagtgtgtacaaagaacagaaaatacaataataaatgagtaaatggttgtttctttcttgagctcgaatgaaatgtttttacattttttctgctt

SEQ ID NO: 134835 - DNA, 531 bp, Arabidopsis thaliana columbia
  unsure (1)..(531): unsure at all n locations
tgnngggcccccaggttttnnaaaaanncctngggaaggggnaagggggggccntggggaccttttgggggggaagggggttttnaacccnggggccaaggcnaaaggtttccccgnnnccggaagggaagaaggaggccccaaagtnttacccttggcngcattaatcccnccaaaangcagtggaagaaaaggaaggaccccgcaaaactgctttggggaaaacgaagctggtggtgttgaagaagccgatgtggtggagatggctaaaggagtagaagcaggtgganccaatggtcaggatccaccgtcctgctgatcttatttttcnccttgaattcattagactctagttatcttcttatcattcaacttttatgtaattagggatttgtttgggacaataagctatgattaatcttttgctataatgcaggtgtttgcaaaatcttttttccatgtttgcttttgatttcaaattaacatgctatgtagaacatttgttttagtggatggtctatgtaatcattt

SEQ ID NO: 134836 - DNA, 550 bp, Arabidopsis thaliana columbia
  unsure (1)..(550): unsure at all n locations
cntcaatccncctgttggagcaacttttanccccatttcncagaaaccngcnttngtaagtncccngaggtntggaacccaagtgaccccacccgtgtggagataagtgccncatggtactgaagaggaaagaggattncgaaggtgcttcagaggataacgcgtggagncnccttgcggaagcttctctgtcggaggaaaggtttaaggaggttactgctctcgcctttgaagccataggttgtagtaacccaagaggaggatcttgaaggaaccatagttcatcagcaaaactctagtggcaatgttaaccagaaaagcaacagaacccatggaggtccgatcacaaatgggacggccgccgagtgccttgtccttcagtgaacaatatggtgacttggtggtttgtatgtataattaaaagcctaaataagcaaactctctttgtagttgcatttgaagcttcttggtttatgtatgatggttgtgggcattttgtgcctagacttctggttctttgttttttgttatgagttggtgtttatgaatt

SEQ ID NO: 134837 - DNA, 457 bp, Arabidopsis thaliana columbia
  unsure (1)..(457): unsure at all n locations
ggggnttttaacattcccccaacccggngngcctttatttttttccngnccatccccngttccattttttggggccaagggaaagncaggggntgtttaagggnaaagganggggccaattaaaccctcggtcttcagggaatgcggtcctcggatttcncgcttaagctaggttactctacagcatggaacttttgacnccaaaggtggagaatttgaatgggttcataagcctgaaatggacncaagcaggagaaggttcttcttataaattctgctgtcttccgngtttcnccaagttttgtgtttattttgcattttcgaattttccctncctccgtccaaaattgtatgtctttaaaacttctcatttcttttttcaatatagccatgagccntcgaaacaatcgtaagngtacttgtttcaacaatataggccctcgttttttactaagct

SEQ ID NO: 134838 - DNA, 575 bp, Arabidopsis thaliana columbia
  unsure (1)..(575): unsure at all n locations
cncnnaggtcctncttccaaccaanacttttcnggcnaccgtactggctgcttggcccttcagttgncctncccggccccccgtgggcccatgnggtaatcagcccggtnccccgatggcnggtaacagctaacccaagcggtcnaaccggtcttggggtaaaatgaggaanctgttgaggccggagttttggtnccggagagtttaggnttatgcatcgaaaaaacctgtgagctgcttaattgatggtgaagttgttgagtttggttatgaagactcaatggtgatggtgcaagtcccttggtctggtccagatggtttgtcttctattcagtatttgttttagagattttgaaggtccttatttgtttccttcttaactccgtaccgttcgttgagtttttgaaagaactccgagccgttttttatatggtttctgagagtaaacaatttatgttggttttttttgtcaaacatttatgttggcttttttatttgaggattttctttttatcattggtagaatctttgtactgccatattttcgtatttattataaatgatctgttcttttc

SEQ ID NO: 134839 - DNA, 565 bp, Arabidopsis thaliana columbia
  unsure (1)..(565): unsure at all n locations
taagccctnagnnnncaaccctggntcccgcatggancttggnncccccttttgggggcttcgggnncnaantttccccgccaaagggagggcnntcccccccatgtttacttccctgcccaaaacttgcggggnnatcaaacagngctgcgacagcgctaaatcccagcacattgccagggnaccgggaagtagctcttaggatcatttatagcgngtccaaaatccagnttttctttctctcccctctatttactgcagtgtgtacatcaattttgaaccacttctgcttccaagcttttgtcnccggaggagagattggaaatctgtacgccgggacctgatgaggtgtgaaataactggggtcatgaagcttcttcttcttcttctgactggcttttctctcaatttgctatccttgttattttcaccttcactttcatttttttgtttttttttccacaaatctgaccccccttatatgtttggtgtatcatttttatgtgtttgtaatccatcaagatcattttcccttgccctaatattgcaagctaagattccgttt

SEQ ID NO: 134840 - DNA, 566 bp, Arabidopsis thaliana columbia
  unsure (1)..(566): unsure at all n locations
ctcttggcgngnccncntaagtcctccccggcccgacccaaggtgntctncangntacccctgaggacaacgttcgcgccccngatagggtggtggacttgtcaaagggttccgctgcgatccaccagngttgcttccggttttngcaaaatgaactcttattggcaaaccccatcaaccanggnccatacttttcangccgatcaagacaaatatagtggaagctcatacgcaagtggagtctttgctcaaagctgagtactcagctgaagaacaagccaatattaatatgatctccattcaggatttgcaaacccaactcgacaatttcctttaaggtcatggctcaatcgatgtttttgtgatgtccgtacttcctctggttatatcttatataatgactttgattcttttgactccttttagctactttacaagagttcgctttagaagaatacatattattttgtatccaagaactcatacatcttggtctctctacattcgatctatctacggtcaaaaagtgtagatcatatgcttatataagactagctatcaagttc

SEQ ID NO: 134841 - DNA, 394 bp, Arabidopsis thaliana columbia
  unsure (1)..(394): unsure at all n locations
ggttccgncnatgaagatgagntggagnagatgagtaattaagtttttnggacttgagattgagaatgatgaatgtgttgttcancgtcggaagaatatgaagnagaagnagaagnagataagtntntgggggcnagtgaagaggaagtttggttgcttgaattcttcttcttcttcttattcagttgatgcttgcccctgtgatgtcaagaagaagaagaagaagattcatcatcactncggataacgaatacattcagttcatgttctgttcttgctctgtttctgacattggngaaacaatttttcaggttctgttttttttgtggttactgattgtcttntaattcttcaaaaatccataagcataaaaaaattaaagctacaacaaaac

SEQ ID NO: 134842 - DNA, 574 bp, Arabidopsis thaliana columbia
  unsure (1)..(574): unsure at all n locations
cctggccccttncgggaattgacctttgntgacccccntcctttgcngaggggtatgngcttcctgggccgntggaatntgtncggttanctcnggncctncggacatncccaagtctccttgccatgagntgggtatgancgcgtctaatggaaaaganccctgaattagtggctgtagaagctcttcccagatgaagagactggccttgaactgaatgaggaaaacattgaaaaggtgctggaagaaatcaggccttacttaatcggaacagcagatggatcgcttgatctagtggagattgaagatccaatcgtgaagataagaatcacaggacctgcagctggagtcatgacagttcgtgtagcagtcactcagaaactaagagagaaaattccatcaatcgcagctgttcaacttatatagaaacaacaactcttcttgtatgctttgtattagctcccttgtatagtattgttgtgcatagattatgtgttttgttgacatttgctatttgtcctcaaataagttttcaacatttttgttttacttagaaaaaaagtccttattattt

SEQ ID NO: 134843 - DNA, 567 bp, Arabidopsis thaliana columbia
  unsure (1)..(567): unsure at all n locations
tcccccccggtgncnncctcacngctttgaanctcngctaagccgggggccncctgggggggccnatntccctttccaagnagntggcaagcttgcaaacgatcncgggngcccncccgggaagtggctccccaagggacgcccattctttgggtttctagctgctgcagganccgctgctgcagccgtctatcttccaccccggaggttacaaccgagctgaagaacctggtggactcattggagctgcatgaataccatcaacaaatacactgaggttatctccacagctttgaagaagtaagagaaaagaaacaatcaaaaacctgaggatgatatagagaggtaactcttaatancaccngtgtagagaattacttaaaagttaaagccttttactctccaagatacaaaattttgaacatcttgaccagaacttaggggttatggaggtgaagagaataatgagagttttcgtttttataatcacagagtctgttcaaagttgttgaaggttttttttagactgtttaatttgtttctgagataatttatatttcttctttt

SEQ ID NO: 134844 - DNA, 559 bp, Arabidopsis thaliana columbia
  unsure (1)..(559): unsure at all n locations
aggttttcggcgacanncccnttttccanganttccncccagatgngcttattccgcaagcctcttcagtgaccctggcggttctcgtgacacaccncgnggnaacaccctaatgngtcatccnggggggttcatgacgggcacaagggagtggcttcaggccnagatttggagctcctacctttcgggtcggnccggagaatgtgcccggccatgcatcttggggattgccaatggtagagatacctttcgctaaccttctctacaaatttgactggagtctacctaaagggattaaaccagaggatataaagatggacgtcatgactggactcgctatgcacaagaaagaacacctcgttcttgcaccaacgaaacacatctgatgctatatatatcattaggacgtttctgctggtagatatggcgtgaccaatggttatttttcattgcaatatccctttttgttttaatgagtactatgttctcattttaacgaataaaaatgtatcagtgctcttgtttttggactagaaaagaaagtagtccgatgtttaat

SEQ ID NO: 134845 - DNA, 561 bp, Arabidopsis thaliana columbia
  unsure (1)..(561): unsure at all n locations
gccctcccanttcttccggnngntaccttgcccnnnntnntcctgcttcanaaggtaacccgtggaccattatcttaanatggggaacancgcanactttcaagggggacaccccnaaggtgggtgngattaaaccnatatcgtggcccgnggcatagcctcagngctcntcacaagagcggntaaaagcgatnatggaattcaggctgtgaagaggtacctctggaggcagaaagtgagtaacaaaggagcattagcactatatgggccgactcgggtttataagagccaaacggctataccactattacttgaatgggatggatgcttttcgcctgaagctcttgttccctaagcctcgtgtacctcaaataccttctcaagttcaaacccaacaagagtatgagacctttcctaggcctcgtgtaccttaaggccatgaacgaagatgtgtgtttcttcaatgtattctaaatcctgaacatgctaagactatgttctctttcgtatgaagaaatattatgtgttggtacaattctagtcccatgtttatgaagtatt

SEQ ID NO: 134846 - DNA, 540 bp, Arabidopsis thaliana columbia
  unsure (1)..(540): unsure at all n locations
gccggtgtgttccccnatcgtgccggacaggtactggaccgggcccagaatcnttgagcagcttcactggttccnctccaccccggccancggtntncgtgtgaccnccattccgngaggagaatcccgaactggtccatnccnggtgaagccctatattggncgcgttaactgcaggnggagataangcagtctcagctacgaattcgccaaggaaancgccaagtagaagccctgaatcaccgataattggaacagttggtggttactggaacagtcactcaatggcaacgaacaagtacagtcgaagttcttagaactccaattccacaacagagaaagaattccacacatgtttggttactacattgcctttgtgaaattatttttatcactctgtttgtttgtgtgtgtgtggttgataacaaaatcgttgtgttttgtgtgtgatttgatttagtaatattcattctatttgtttgtattttacagaaatttgtctactttatttcacaagtgaatcaaagtttgtattttttt

SEQ ID NO: 134847 - DNA, 362 bp, Arabidopsis thaliana columbia
  unsure (1)..(362): unsure at all n locations
aaccccganaccnngantnnaacnnaccgnccgttggaggaagccccgcccgtgttttccggccgtggaattaagcctatttttgaccggncgtattaaattccgttgntcagnccccgtnccagatgtttgaagaggtggtaggttttngatccggacggtgtatacccattcatgtgataaggaatccccaggccaagtgtatcgaaaagaagaaagtgaactagaagagttaagattgtgtaacggtaacgttccggagattggttcatatcgattgaaatgtattatgtgtttgaaattgattgtatggatctaattagtgtgacataatttacggaaaagtaaccacgtttttcaac

SEQ ID NO: 134848 - DNA, 402 bp, Arabidopsis thaliana columbia
  unsure (1)..(402): unsure at all n locations
cngccttgggnaaattccagggnaccttcaaacccaattggaacccnngggaccngaggaaggcctttagggggaaatttggccattatnggttaggagggaagccaatnttagncttggtccntctattncactttggtccggtaattcattgcccaaaaantgccgcatagagantctncgttccatgtgtccggtactccgggtaagcaccagtgactgcagtcttgaggagcatcttcaggagttcccggttctcgataccgcgaaggatgagcatctttcctgaactcggtcagatatgtaatgttcagaaacttaaccttactatgttcatatctcatttcttggattgcttgagaaatataattgttgtggatagggtcaggttccattttcttc

SEQ ID NO: 134849 - DNA, 508 bp, Arabidopsis thaliana columbia
  unsure (1)..(508): unsure at all n locations
gggntaacccnnnanggaccttccaanccaatttcccattngggncttnaaattgccccttacccnattggnccacccgnccctntgggcccaaatgaaggttaaacccnggacttnccccggaaattggaagaggcccgagaaaatagtgaggtgaatatggnagantncttggtgccctggtccttggcttncagtatgtggaccccgtaggggccaatgtccagctatgtatcctttggactatttgcagtgttaggcggtcaatgncccgtggttccagaggaatgtgcagtgagcattgtggtcgttgcagttaaagatggcaagaagtaatgagaagtttgtttggctttggctttggtttaagaaggttgtcttgttgtagtgtaaatgtagtaccttcttccacttcctctggtgttatctttatttagtgttttcttttatttgcttcgttagttgcaggtttcacatgtacaatctctatgaaagaagccgtaagctt

SEQ ID NO: 134850 - DNA, 511 bp, Arabidopsis thaliana columbia
  unsure (1)..(511): unsure at all n locations
gccgggngccncncgnttggaccnactcggcccnttggnnggaatggctncttgacccaagggaagntcccaannggtaaccgggttggcaaancncgtcggaaggggtttaaatgtaatcccncgattgggaaccnttaaggcatgtgaaccctcggacaacagnccttgggaagattgtattgacaagtatccggtaactttaagttattagcnncgtttgaggaactgttattgtgtaacttcgagactaatccatggttgttttttttcttagagaagaaacccttagatttgatctctgacaatgtcaatgtgtttgttgtttatgtgttttggagagtttgtgatatttgagttacagttcttgagctcatgttttcagatcttagatgtgtaatgacgaaatcncagaataaaattagggacattgttaaacaaaaggttgtttgtttactattattgaagtttgctccgattaaattacagaaaccaaaactttcgtttgtcc

SEQ ID NO: 134851 - DNA, 554 bp, Arabidopsis thaliana columbia
  unsure (1)..(554): unsure at all n locations
ccgaaccctnttaccccccccnttcgggnaanaacccccggngaaccgtttccnnntttcccccccaaagaaaaaaaaggnccgnanccnccggacctcntgaaggaagttagggaacccntngcccncgggtctagggntctngaattccttnaattgagccgaanatcccttgaaaggaaccgactaatgggcttggttanaatcgggtcatgtgcaacccttccacaagactcagtccggccaagggatcggctagggcggggacgcggctcggtggaggaccggagggtcttaattgacctaccgagaatcggctggacttatgcgcgatcttcccctctccaaatcctctccgcggatccgagtagtgaaccaatggtgatcgtgggaaggacttggcttaggcgcgagagactcaaggccgggatgatgggtggtgatagtttcggatagtctagggatcaattatattacttgtaatagcttatatgcaaactcataagttgtatcgaatcctttacttaattaataaagtatctgattgtttgttt

SEQ ID NO: 134852 - DNA, 477 bp, Arabidopsis thaliana columbia
  unsure (1)..(477): unsure at all n locations
ttngggntaaccccccccccntcccccaaaggggntcccgggnnttnaaccccttnaggggcgancaagttttgncccnttanntantcggcccccccccgngtttttacccattggccgatncaacccntgggggttgncccaacgggaggttaaaaggaccgttcttccaccagagcggaagtctgataaggacaaattgaggatttcttggcctgtttttgttgcacctagggctgatatgtccgtcggacctttgccggagtttaccggagacgagaatcctcccaaattcgagactttaatatataatgactatattgaccagaagataagaggctgggcgctcgaagatcttcctgtctactgaaaaccctcaatacctacaataaatgatgatgaattgttcaactagacaatgattaattagtgtttgttgatcgttgtattttaccaacttataaatgcgtgttcttt

SEQ ID NO: 134853 - DNA, 556 bp, Arabidopsis thaliana columbia
  unsure (1)..(556): unsure at all n locations
canaanccccccncgtgnaaccccggtccccctgnggaaaaaaccttntccccccccggaagaattggggntcccatggnaattntccccggggaaatgaacttttngccggngnggcccnacccgggaagcntgttggaancttatgngncncaactggancttttttttgcccccggaaagcagcaggnctagtcagtcttcaaggccaggcttgctcggtcccaacaccgtctcaaggaccaagaaatactgagccgtaagagagttccctcggtagttggtagaagaaggaaaaccaaaagtgtggtgttgtttaagtgtgaaaggttggttgggtgatctcttcttatatatgacaaagaatgacagaaatgtccttcatgtttgtgaatttgggcatttctttccttttatttttgaatctttattataaagttataccttttgtgtttcttatttttctcttctcctctatcctcccagaaagctggatactgtcaatgtgaatcaaactcttttatcaatcaactgaaaaagtataaaaccatttatc

SEQ ID NO: 134854 - DNA, 473 bp, Arabidopsis thaliana columbia
  unsure (1)..(473): unsure at all n locations
ctccatctggacactgngngcattcgctgacngcttaacgagactcggctagttttnggccaccaggccggtgttaaccggngcaaccatatggaatttnccagttgcttatgacaagctcggagttcggtatagactatggaggaacgcagtagatcgtggcgatgataaactacctttctccggctaactgttattaaagaaatctaatggaagtttttgcagctccttattcaccagcaacctcagacaagtgtaggttattaatctggtttattctcaccgaagaaagagctttgccgagtaaaagatctggagtttgtggattcatctaaaaaaccgatgaaacaaagaacttttgcgtagataaaaggacaacatccactgtaaatccaaaggagatatattgttattcatttttccctgtgtacagttcactctctatgagaaattgaatatcagttttccccact

SEQ ID NO: 134855 - DNA, 463 bp, Arabidopsis thaliana columbia
  unsure (1)..(463): unsure at all n locations
actcgcgaccactgtgctgaattcncngtgatgcgctttgttgggcaatcaatgaggatggctatggcnctgtagtatcaagggcagactttaatgggagaaatcataaattgcttccccttcgatgcctcaaacaacttctgcgattgctctctggttggtaaaattggataccttgattgctccctatgtcgaaaaagctccacctgaaagggatcaaccgttgtgcaggaccagaaatacaagtagacgagcgtctaagcggtagttgtagctattatctggacatcaaggacggcgatagaataggggaagaagattgtatagaggaagaatgtttagttcctgcattcagtttgagataatttgagattggaaaattctacaatccaagtgactttgagataatatgtacagacaatttagatagtagcatggatcacattcagttttgggtttgatt

SEQ ID NO: 134856 - DNA, 511 bp, Arabidopsis thaliana columbia
  unsure (1)..(511): unsure at all n locations
acaannaagcctgtnctgggggnggnccaatgnccggccctttccccggtggaaggggancccccanttnncccccccttngcctgagaaaggggggggnancngatggancccgaaggcccggccgaggaagatgggaaaatgacttgtccnaaagatgatgttttgtatatcgatagctgaagtgtccaaagagtgtttcttttactcttagagtctctgtttttggtcncccttcgttgtcttacgtttttggccatttgaattgagagattgcattactttagaaaaatctgatccgttcacaagaaagaagatgagaagaagccaaataatattatagtcgttgaacacttgtgttttcaagtgtataggctttgatataccatcaggatgatgaacatggttaccatcatgatcattattcatgatttgtattgtgatgtattcgtagcgtactttgtttaacaaggtccatgcctttttatttgtattactatcttttgggatt

SEQ ID NO: 134857 - DNA, 288 bp, Arabidopsis thaliana columbia
  unsure (1)..(288): unsure at all n locations
cccggccnntnngngnncccttccnccccaanccctttttgnanggtatcagacaatgtggggaaatgatcatttgacatatcgtaaatcgcattaggagacgtttacaaaaaactgtggtaatatggattcatgtggatgaaaccatggaacaatcaacaattaccccatcgatttgcattttgattatgataaaagaaccctttttgcaacattatagaatggaccgtctctttactttgatattgccttgtatttttcatgaatcatgataatatcctttatgat

SEQ ID NO: 134858 - DNA, 454 bp, Arabidopsis thaliana columbia
  unsure (1)..(454): unsure at all n locations
ttagnccngtctctgcagggccgattcaggacccacaaatgctggatggattaaaaaagattgttggcggggtgagcattncngcgtgcaaagcttacattttcacaggaatttcatggtaatatcncaaaggaagcagggccagtcagcatgacgttcacgatacctatgtacaatgtttctaaacttcaggtcaaatacttgcagatagcaaagaaatcaagtagttataatccatatcgttgggtgagatatgtgacacaggcgaattcttatgtggctaggatatgacctgttttcagataatgtttatccttcacttgtatgtctaagtactttctcttttcattttcggatcacacttgcttcacagtactgtgttgaatgttgtctcttctatttggatactttcttgtttcggtatcaacatatatggctatatgcttttattttg

SEQ ID NO: 134859 - DNA, 450 bp, Arabidopsis thaliana columbia
  unsure (1)..(450): unsure at all n locations
tccnagttncccccccncntggnctgaancctnccgatttggttgggggatcccaccgnttccnctgacctggncanaccaatncccctggngatgaggaccccttaggtggggaataaggtggngaaattttangcncttagcaaggaggatcagatcaagctccattaatcatggtggatgattaaantagggggttccttctcttcactgtgattcctaaaatatctttttggtcctttacgtggggaggtcatgagncacatagattccctcaccagaagattttgctgcatagtcggaagatgtgtttccttaggcaaggtccataacatttcatatgtaacgtcaaatttcaaaaagtccaaattttacaacaaaaaatagattgtggaagtttttcttgtatggttgttgtttaataataagtctacaaaatttgtttttggt

SEQ ID NO: 134860 - DNA, 455 bp, Arabidopsis thaliana columbia
  unsure (1)..(455): unsure at all n locations
actttccccccgtcggcactntaagagctnggaacngacctgncatggatagtataaccagggnctgatatgtactccgattgcctgtccagcaacaatgcctattgtgaaggagttttgtggacttgatgttgtcgagaaatacttggaatggaaaatccagcaaaggaaaaatgtttgatagcttgtgtttgtgttttcgatgtgaatgtaaaattgctctgtttttgtttgtggtttgattcgtttgaagcgtttgatagaatgtttgggattgtgatatacttgttgttgtaataagctgcatggcaatggcaatggcaatggcaatggcaatggcggtgttctgcttaggaaggacataattttagaagatttgagcatggcaattgtggtgttctgtttagagtcatcatcactcaacgttgcatattaatacaatattatttcttcat

SEQ ID NO: 134861 - DNA, 447 bp, Arabidopsis thaliana columbia
  unsure (1)..(447): unsure at all n locations
tnntttctnccgcaatgcaccnacgtgcttgngancngccccggaatntcccaggcncggtaccnccttggcccagaatgacgtccggcttgtcaaaatgtactcaaaacattcacacaaatgcactatgtgttggtacataacaaacttaattaaggtccacacagtctcatcttccttcccactcttccataaaattgttagttagatatgtcatatatgtatcggttaaaacactgaatctctggtttttccagctaagagggtgatgaaaaattaggtgggttctttatggagaaagtgtaggttttaggtatgtgacagtcgtgtttgtgttacctccatttatgccttggttttatgacatggggaccgacatagacatcacaaatggacggagatagttggttttgtattttcctcaaaacaatatagaattatgtgaac

SEQ ID NO: 134862 - DNA, 444 bp, Arabidopsis thaliana columbia
  unsure (1)..(444): unsure at all n locations
ancttttnccaccncnggaatttgaattcaaagggtttcaaaacctggnacccatttcgaccctntntncgaatcggagttaatcnccggcgaatnttgagattgatgtttctccaagcaagcttgcgttcagcaaggagaagagcgtgttggagtatgaagtcacatttaagagcgttgtgctcggcggaggagtcggatccgtgccgggtcatgaattcgggtcgatcgaatggacagacggtgaacacgttgttaagagtccggtggccgtccaatggggtcagggatcagttcagtccttctgattgatcattgaaattgggctctggttgtatgttttcattaaaaagaaaaaagtcctgtcgggtttgttaaaagggccatgttgttaatgggccgatctgtatactcattaatgagccctcactcttgggttagacc

SEQ ID NO: 134863 - DNA, 444 bp, Arabidopsis thaliana columbia
  unsure (1)..(444): unsure at all n locations
ttttgatgngtgtgttgantgagtgttggngacctttggntngaggaaagtccagtgcctgatacatgtggtattgagatgctgaggtcagagatttgaccctagtgaagttgatgantcagaagatgagtttcatcatggaagtggaaaaagctgtatgtgcacaatcatgtgacccattggaagttgtttgcagacaaagggcttttcatatagttgatgtagctgctctcttatcatgtgctgcacctttgttattatatatagaaagagagaaggagaaggatttgcaaaagattggataagaagaggaagaacttttggatgtgtacttttgtagccacttgatttgtcaattttgtgctgtattttagattattctttgtattacatctctatgctactctgtcctgtaatgataaaatccaccccacaacttttggt

SEQ ID NO: 134864 - DNA, 446 bp, Arabidopsis thaliana columbia
  unsure (1)..(446): unsure at all n locations
cgtccccccaccactcacaggccactcncatcctagtcccagcnctagctatcctgatgatcctttgttggtggggtgtncattggtgcttgtcatgcgagttatngctgaggangatcaacccatgcagctatatccaaaggctaattttgaggctcaaaggaaaggtatggttataaaactatctttttgatcttttaaaagatcttcaaagtgtgagtatgtttattggttggcttctggtgatatttatgttttattagaatttggtcttatatattggctatatatagaggtgtgggtgatatgtatgaattcaagagttgatgttggaaacttttttgtgtgttcattgaataatcancgaattctcaatttcttggagacccattatgagacattgagacatctatagaacatatatgtaatgtatattaaacgtactt

SEQ ID NO: 134865 - DNA, 442 bp, Arabidopsis thaliana columbia
  unsure (1)..(442): unsure at all n locations
aagnntctnttggctnttcccaaggnngaccgtcaagggatgataaggccaaagatttagtcagatacctgancctgcagagattgagaaaatggttattcaagtggtctctgagaccccaaagcagcttgagcagtnccgcagtgggaaacccaagcttcaaggctattttgctggccaggttatgaaaatgtcgaaaggcaaggcaaacccagggttactgaacaagatcctcctggagaagctcaatgccaaagactgattgaagcttcagcattgacagagttattgctcttgaaatagacattgaaatggtacaaagtgattttttgctcgttggttaatgctcttgaactagaatgttcttttacaaatcttttcctttgcaaatgtgttgttggttaaaacataatctgttctttttcaaatacctatcaattac

SEQ ID NO: 134866 - DNA, 437 bp, Arabidopsis thaliana columbia
  unsure (1)..(437): unsure at all n locations
agngtggattgggggtgatagtcanccactgggtaaggagggaaatcncagtcgatcggatcggatcttctctggactatacccatcaggaaancaggncttnccatacaggcccatacaccttaggcccggtaacaaaacacactttagtatattatacgctactatgatgttcctgatgcaacgaactagttcaacattattgtgttgatttgttgttcactgtactagctaataatacttgtaccattactgtcgttatacattaagatgcttttttctttggttctgtcattgtttatgtggggctttgttgatttgtcgtactcaaaattgtgactggatgttggttagatattggaatctacttgtgcggtatatgagaaaagacaaaattcaaaaggtgaatgactacgattgagcatatgtcatcaacc

SEQ ID NO: 134867 - DNA, 488 bp, Arabidopsis thaliana columbia
  unsure (1)..(488): unsure at all n locations
cgctgngtacgggcactcatgtccgggggcccccgtctgtgtgagngtntgngaggaccggtngaagggccgagcaaaggggaggaaccngagtctgtctacatctgtgaangctatgagaggaaatgaaaaagcgaagctcttcttcttctccaactagatctcgtaactatgctttccgcactggaactgttgctgctgcctaatttaaagttataaaggaaaaaaagggagatagagaatccattaacgctcatattgctgtaaaagctagttaatggatttatgggttttttcttcatctaaagatctttctttagtttgaatttgaatactaaaccaaaaaaaaaatggttagggaaaaagaaaaaaaaaaagcgaagaaacctctcttttttaaagggtttgtcctttctttgttttattttcatgtttattagttttgtttttcttgaagaaaaatatatatatgcaattttgggtacaag

SEQ ID NO: 134868 - DNA, 503 bp, Arabidopsis thaliana columbia
  unsure (1)..(503): unsure at all n locations
aannggnccttgngggaccaaaataggtcaagnnagtggtganctggagaccggaggtcccggatataaagctggcaagtgaagatggnggtcaaagncctaaccccaaggctggcaaaangttcgcaacaagccacgatcnccgagtcgtcgacatagttgtttntcagacatgatggagatttcttctcaaaaactntgaagtctttgaattctttgtttcgagatctatcgatactcgacatcaaagaactccgagcaacgattataactcttgattcattgaaacangagtaggcatgtcaatcgagctatcccggtccgacccgaaacccgtaatacccgtatatgtttgagtttgggtcagaaaagctctgagcctatattttaatttaggtatttcctgtattttttatnttttgtattcaatttctccaaaattagtggnaattatccatattttctttctattttttttaatatttcacattacgttctaagat

SEQ ID NO: 134869 - DNA, 487 bp, Arabidopsis thaliana columbia
  unsure (1)..(487): unsure at all n locations
atcggcgggggttntntaggntctggggtcccggaaccccccacgggttattatgccntgggcnaccagganatctnttcnanagcaaccccatttcttatccgacccggccccaaccaccttcntttcagaatcaggcaaccatcgtatccaagttccgagcaggntgagtngtagtaagggaatctgaggatcacggaaaccacacaacaggttaataatgtccatggagcaaccaagaagatctgttttcacaagcaaacacaattttgagaaattgacagagagacctaacatgtatatatatcgccatctgtttcttgtttttctttggtttgttttgtcctctcttctcaggttgtatacttagagagctgtacatgtaatgatccagagatctaggaatcaatacatagaggttgcagaggcttagtgcaaagaataaatatgagaaagttaggttcatatacatacccgatcattattc

SEQ ID NO: 134870 - DNA, 467 bp, Arabidopsis thaliana columbia
  unsure (1)..(467): unsure at all n locations
ggtacgggccccctgggngttctgtanaccancccnggttttaaggtagcctcaaggtctcccccaatggtgttatgcnctctctacacanccatttttggcagcgcagttagcnacggtgtttacttctatagcgctactaagggagcctaactaaactcagctcactcaccttcttgacnccaatgtttgcatcaatctttgggtatctgtacctcaatgagactttctcctcattgcaactggtcggagcagcagtgactttggtcgctatatacttggtgaactttcccgaaggcaacgactgagacactctttgagttcttacttacactctttgagttcttacgtcatttttaaacttgttatgaaggtggaaatgtatcatagtttcattatcttcaatcttattgtatataataaaatgaagcatcatagttcagtgttaatcaaaagccaagtttcgt

SEQ ID NO: 134871 - DNA, 487 bp, Arabidopsis thaliana columbia
  unsure (1)..(487): unsure at all n locations
acccgttgtcactcaccanggatctggcnatctgacccttggtttatgcccggtcccagttttccagcggggaggttcctccgtcggcgcntcntcagccgtcgacgacgaagangctgaggctgtttgggggttgacgtggaagagtcttcatcttcaggggatacacgtggcgaaatgggagtagcagggtactcttcctcgtctccggttgtgatcagagacgatgatcaatcattttggaggtcgccacgtggcgaaatggcatcgtcttcttcggctatgcagctaagtgatgatgaagaatataagaggaaagggaaatctttagagctttgaagatagaataaaataagaactaaggagtaatttattcaccattttcttttaagagttagttccaactttcaactcattagatcatttggcaattggggaatatgtagtgggaaattaaccgggcttatatctatatattggtttaatt

SEQ ID NO: 134872 - DNA, 490 bp, Arabidopsis thaliana columbia
  unsure (1)..(490): unsure at all n locations
ggcagcccccctcnccntgatggtggcctagtttgatggtccaatatgctgaagttgttatgncaaagctttatgctgtagangcaagctttaaaggggtgaattccactaatgctgttatcgatcgggtgaatttcgggaaatcgaatctgaaaggtgcggtgtttaggaacacggtattatccggttcgacatttgaggaggcaaatttggaggatgtggtctttgaggacactatcattggttacatagaccttcagaaaatatgtaggaatgagtccataaacgaagaaggaagacttgtgttgggatgccgatagagaagagagaaggttttgatttgaatgtattatatatgtaagatttaagatttgttgacacaaagatgtatgaaactaagtaaaggttgaaggataggagtcaagagagttatgagaggttgtataatcgattcttgtaaattctgtaaccaaacaaaaggcgttttctc

SEQ ID NO: 134873 - DNA, 504 bp, Arabidopsis thaliana columbia
  unsure (1)..(504): unsure at all n locations
ggncnccctaaccgcccgangcaatntgggcntaggcgtactggccttaattccccnncgggtaaaccngcccctctgttgggaatggcnccngttcccctggcagcccnacccaacttcatgtttggccccntggatcatacncatcttcttgggatggggtctaccaaggcagtgcaaagggccactagacaggccagggagagcaaatgcttgtgcaagacccatttcgtcccatgctcataatgccattaggtcacactcaggtgtatatatatatactgttacattgaagatacaatacatatatctatgtgtgcaggcatatgcatatgagtagatgtggttgacttagatatcaannagggtncggaaccaanaatactcatgagcttgtacaacttgcctattgaatgtaaacagaattccttacagttgttttgttatgtaaaacacattgatgatttgtctttacgatcaagcgaaattatatcccttgaaacc

SEQ ID NO: 134874 - DNA, 483 bp, Arabidopsis thaliana columbia
  unsure (1)..(483): unsure at all n locations
ccgggnagtttccnaaaaaagggttccggnccccccctttttnaaggnaatngnaccccnccnnngaaaccccngggcctttccngggggcccnagtgcccccatcctggggggtccggaagattgggntccgggttccgatgatatggngatntccagggtggaaaaaggaagtgagaggatgaaggttattataccaaaccacatcgggagaagttatnccacgtaagattgatcatggttggtttaagcttcttcgtcgatgctttctgacttacatgaagctgttgtagtcataggtgtcgatttgtaacattagagtcttccctttagaattatctcttctacaagacgtttcagtattcttattcttcttactctgcattgtcctattaggtttccatagagtttgggttttataatcaggttctgtccagatttttaagttgtttgacaaatatatttaatatggtcatgaaatct

SEQ ID NO: 134875 - DNA, 469 bp, Arabidopsis thaliana columbia
  unsure (1)..(469): unsure at all n locations
gggggtgcatgccngccctatctttcttagcggntcacccngnaaggtnttcatgacatgtcttcagccaagggttttaaaaaaaccgccacatcagnggacccttagggcttttgcactgcacatacatcattaaagtagggaccaagaagattgagagagtaatgatttccccttttttacccgtaacagatcatcgtaatgctcagtttctggtacaacttcaaaaggctacttaatagaccagtaacattttctaaacatgacccctcttagcaagtgctctgttaaatgtagtggtttttttggcatctttcttttgcggtcattcatacgttacgtgttgcgactgtcattgagtcataagtacaaaatcatgatctcgcagattctggaaagttgtactaaaggaaggaccggtcagatatttgatctgatgatcatctctctaaggttaatgacttatgtt

SEQ ID NO: 134876 - DNA, 484 bp, Arabidopsis thaliana columbia
  unsure (1)..(484): unsure at all n locations
acnccngggaaggatcgccgatttaacgttgnncccancccncgnattatgnatggcncnctctttggctgatggagtccaggcttcaggtttgtagngccaatcggaacaaccacacatttgggaagatgtccctggaattaaagggcgtttancgtcaacattggtgatatgatggagagatggaccaatggattgttccggtctacattgcatagagtgatgccggtgggaaaagaacgttactcggtggtgttcttcttagatcccaatccagattgtaatgtgaaatgcttggagagttgttgcagcgaaacttgtccccctagattcccgcctatcctcgccggtgactatattaaggagcgtttcaggctaacatacgccacttcctagtctatgtttgttacgaaatgtaagaaaataataatgttcaaacttctacgtaccataatgtttaattagtggaaacttatggaacttg

SEQ ID NO: 134877 - DNA, 317 bp, Arabidopsis thaliana columbia
  unsure (1)..(317): unsure at all n locations
tgctagngattcnntttcctcggcntgtctcagattgacctngagcncttttgcngtatcctcaactggtatgtggtccnttgccttgtagcganttcatnaaacaagttggtttgttgatgtcttggtgggttctttttgtttggncgggttttacttcagcgagtcttgttttctatcgtcgaggtgtcttgtatgtttcttgagaagnctgtagctttttcccaacgttttttatgtatcagtggaaaatggcataaacacaaaaaaacaaatcagttttgcaaattgtaaactttggtccatttgtttgtttt

SEQ ID NO: 134878 - DNA, 368 bp, Arabidopsis thaliana columbia
  unsure (1)..(368): unsure at all n locations
tggnttaacctngggnccctcncctttgggttcctaantcagggnccatcctttggggcccttggactacttccncagttcgnacttcaccaccaccggngatttnngaccntccccaacttgtccccaagttccccaaagtattccgcaaagcatcagttcctccccaagttccccaaaagtgcagtnaatatgggcaagcgttggaagaataaatggaattgatgaaaacacaaatacataactttgggagatgggaggtttattgatacagtggcagcaaaaagcattgaaatgcgacagtgagtgataaagggtggacacatcaatagcagtcttcattgtatactcccgttgagcttgacagt

SEQ ID NO: 134879 - DNA, 494 bp, Arabidopsis thaliana columbia
  unsure (1)..(494): unsure at all n locations
gctggccttgtaccaccntncatctcgcgacccgaggancnngnccatccgggagcttccgaaagngngntgngatggtgagcatccatgggatatgggaagatgagaaagtgagattggattataggcctgttcacatggacactctcgacgatgagatcgacactttccctcccaaagctcgtgtctattgatcgagcccatgtttttattttatctgttatcggnataataataataatcaggaaccccccaaaaaaagggaattaggagaagaagacggagttatgagctgatggagcacaaaggactgttctgaaactgggtttacgttttacaccagaaacgatgaaaataaattgatagaaagaggaaaaaacactacaattcttattttctttatcagttcctgaaattgttacattctttgttacctgttaattacgccttggtgatattcattttttttttaaatcaaaatgttcgaattccgt

SEQ ID NO: 134880 - DNA, 510 bp, Arabidopsis thaliana columbia
  unsure (1)..(510): unsure at all n locations
aatttccnaccagnattcnngncncgtanntgggacggggctagactcgtaccttatcctaccgggggatcggatatgacagaccttactcattcatgccccacaagctggattgtgccgtctaattgccttgctatcgtccttctgctcttcctgcgccattctcttccagttttactaggtggagtcgatgatttctcggataactttgctcatgttaccattagtgagaacattaggcatcttgttgattgcttatgtatttttcaagtcattcattgttatacaacgttgcaggcaagagagggatactagactctctggtttctcgtctgacgaagaaactgcaccgcctcggatattgatggcattgccggaaagacccgagcttcatgttcctgtaaattaagaatcaacattcaatatctcttctccttatatatgttgtttgatttgtatatcatatacacacataactaacccacataataaacgttggtattccaattt

SEQ ID NO: 134881 - DNA, 480 bp, Arabidopsis thaliana columbia
  unsure (1)..(480): unsure at all n locations
gnntttgaacccataaatccnncgtaggctatgtaacncaggnccgctgtgtaccnggtccctatgancccggaatatccggcatgacattcccaacacatggacccncgaccatggttncatttccaaatgggtncgagtcacatttcagttccnccagaatggaacnccttaccctgatgatatcattggtatgtgttttttgttgttgttgatgaaggtcgtaagtctcacgggaacattttgcatagtcttgttcgtgattatactgtcgtacgctcggtttagaggactcatcggatcttaatgacaagagaggacaatttggtacatattttatagcagagaatgtgagagcagatcttgttttttggggtctcttctcgccagcattttcgttactaagtgatgggattgcataatttgtactgtgtgactacatttttttttctggttaacagtaaattgtaacttcttgat

SEQ ID NO: 134882 - DNA, 215 bp, Arabidopsis thaliana columbia
  unsure (1)..(215): unsure at all n locations
cnanagangggnttctaaaaggcttancaaaatgngtgnttggtttccagttttccggtgatgtaacagcaaactgattcataaataaaaggctaaatcggatcngtctttttcgtcgaaaagacttcttctttaaactcctaagctctaaagacttaactgtaatgtgttatatgggttactcttaccaataagtaatcagatgagatagacag

SEQ ID NO: 134883 - DNA, 485 bp, Arabidopsis thaliana columbia
  unsure (1)..(485): unsure at all n locations
gnccancccnttcngtttncncctcaggaccatccntaaccntttngccnttttagggccatggnaaagaggtccaagaccngtgggaaattggantnctatgccggggntgggagaaagnttntcccgataagctnctgatgaggaagatgaggatgaggattcccgtggaggaccangctgatgattctgatgatgctgaggacaatgaaggttaaggaaacagatgatgacaattgaccacaacaaagtagctcaagtaaaaaagtaaagattttgggtgacgactactaaatatgttagttatgcttgttcagttgttcttggggggtctttaatcttattgaaatggatttaaggtagtatataaaaacagactgatacgaatatgggcttaaaagcccatacgagttgacattagtacgtaggtttggcccatttatgttataactactataagaagaaaacaagtttagtttctttcc

SEQ ID NO: 134884 - DNA, 485 bp, Arabidopsis thaliana columbia
  unsure (1)..(485): unsure at all n locations
accaggagggnaaaaantcttaccccatgnacatcccgnggattnagtgttacccgaaaaggatgaagaatggtattcctccntcgtggaccccatgcacccattgggaaagccgtntgncgttttctttcagggatnatagaaaagtgctcccttgggatgnaaaggaggancctttactggtagtgcccgataggntgaggaatgttgtggaggctgatgacgggtattatctcgtggtggctgagaacggacttaagctagagaaaggatcagatttgaaggcgagagaggtgaaggagagtttagggatggttgttttggtggtgaggccnccaagagaagatgatgatgattggcagacaagtcatcagaactgggactgaattaatagaatcaatactcatatgctgtaactgattacggagtcatcatggtcatgtaaaaattttggataaaggtggtaactttttgttctaagatac

SEQ ID NO: 134885 - DNA, 466 bp, Arabidopsis thaliana columbia
  unsure (1)..(466): unsure at all n locations
cnccgngatcgnngcntcccgtttccggtnggtattancagtctaaaaanaatccctccgatgaagtttgaagagaagttaagaaggttcannttttcancaagngggccaaaatttcatcaccncncattggaattccncnctaantcctcgggcgangaggtggattaggattctggacatttcctgcttggaatggaggattcccggtgtcacctctactttccggtgatcggaaattctctcctcttcaacttcccacgtgtcttccatctcttttcgacttgccacgtgctctttgcgctgttcacgtcacttttccttctggcaaaggaatttatttgggctttgggcttttgttgttttatgggttatgtttgttttttaaattgtaggcttgtttctttggctatgtataattgggtctgttcacttggctttgtaacattaataagacacttgtgac

SEQ ID NO: 134886 - DNA, 493 bp, Arabidopsis thaliana columbia
  unsure (1)..(493): unsure at all n locations
accccaagnggggggggttgtcgggaaggagggtttgtatgtgggntcagcttgctttgttgttgaccagccccatgnttntgggccgccggantnncntgcccgagaancaggancagaagcagaantnngagcaggantntncagattgagcgtgacccgnctcctaaaagngntagtagcaacaaagagaaatcggcggtgacagtgaacagcaatctcgcaaagctaaaagatttgtatggagacgcaagtagtcagaaaagggatgaaggatttggaacaaggaaagattcaagttcagaagaagtgataaagcttggtggttcctcttggaggtgaaaaaacaaacagaacaaaaccaaactgtggatttaaaatgcttcttctatttagcaggatgatgcatgttgtttaactatactgttttgatttccagcaaactatttgtcatatgcttgatattacagtttaagagttgatctttatcttg

SEQ ID NO: 134887 - DNA, 510 bp, Arabidopsis thaliana columbia
  unsure (1)..(510): unsure at all n locations
agcccnccccggtttggttgggacctntggggccccacnnnccaaagctgtngtncacctttgaggaaacataccatgccttcccgtgctaatcaaggcagcccaatcnctncagcggcacagttaaggccagataatcggcctggcggtttggctaacttaaatcaacagcagcagcaacagcccgttgcgcggctaaggcttaaaagaagagcaaacaacttgagagaagaaaactcttgaccgtttttcattacaaaagctttcaaattccactcacacacttgtctgaaaaatctagcagtttgcaggaaagaaacagcttcaagaggttgtagttcttctatgttctggtgtaaaacttaaaagctttttagggttttcagatttctgtttactaatactgtatgtgaattcttttgtacatgaggaagaaaattacagggggatattttgtgttgtatcttttgtgttattgtttcagtaaaagataggtcttacattttgtgt

SEQ ID NO: 134888 - DNA, 482 bp, Arabidopsis thaliana columbia
  unsure (1)..(482): unsure at all n locations
ctttaggnccccatnttcccancccatcccgagcgtcnntcccccnttttgcgcnctcngacnncattatggngccgttaagncattggtgaagntgaaccngagcccagggntggaaaggagaagagattntgagggagccaagantggtggttcagacaacaagtgatatagacattcttgacgatggctacagatggagaaagtatggtcagaaagtcgtcaagggtaatccaaatccaangagctattacaagtgcacatttacangatgttttgtaaggaaacacgttgaaagagcatttcaagatcccaagtcagtgatcacaacttacgaaggaaaacacaaacaccaaatcccgaccccaagaagaggtccagttttaaggttacttggaaaaacagagacataaagagcaaatgagttttggcatttcagcattcctattgtaatctttcattcatatatagtatgtttcctt

SEQ ID NO: 134889 - DNA, 492 bp, Arabidopsis thaliana columbia
  unsure (1)..(492): unsure at all n locations
aancacgatggacctctgggggagatccatccctgcctacngcctgctngatngttgaagttangctcgagttcgctcagatncatttgtggtcagctggctaccggttctgaactaatagagggaatcgtgctgtcccgctctatgatgaaagaggtaaggcgtgcagctcgacaatgctgctcacacgttttaagtggtcttagcctacaagtttctttctcattaccaagtggctcttggtctagtggtgtttcttaaaacctttcaaagttacgctttctaggacccctagttcaagttccatttggaagggggaaagagtttaggcaagcttagattgtgatacggaaataaggtcttggtccagaactagtttgcattgccattttacttttggaacgaaaacaaattattcgccattcaagtttctttcacttttattgttgaatttcttttactatcctttcactttaaaaactgtttttcatt

SEQ ID NO: 134890 - DNA, 489 bp, Arabidopsis thaliana columbia
  unsure (1)..(489): unsure at all n locations
cctttntcaagcaagccttccggccggttgctcagtgttcactntcatctgccccaggtnccatgggtggtgaacattcngcngagtccctgatttccaaggcccagcttggccaaaagtgcgtgagatatcagatttcgnggatagtcgttggcnggtaaagaaagangtattgacaaagcttggattatcaccgtcaccagataaaggcggtaagagattaccgaaaacgatatctacattcttctcaaaacgctgtttgcctccatccacaaaaccacaacctgcngttgaagacgcagcagagatattggaaaacgaaaatgcttaagtctcctcacagtttccatctttctttttttggttacatccatccctcaacttggctaaatcctttttgtttgcttcttgtggatatgtataatgctcaatatctgtaaaaatgtttgagatgagggaaatgataaaatggtctaagaattaagaagc

SEQ ID NO: 134891 - DNA, 507 bp, Arabidopsis thaliana columbia
  unsure (1)..(507): unsure at all n locations
acccaggngtaccgggacnccaaaattttcnctcccggatcatttttgggtttcnctgaccttggcctnaacaccnccgtgactgcttcctcttgccggttnaaggtttttgtccggtaaatcggagattcgttggattggaaangagggttatgtttgattgtcggcttgcttaggtacgggagctaacaacggcgtgccgtgatgtccggaggnttgaccatgccgagagatttgtggtggaaacggttggtcgcgggaaaaggaatagtagcggaagtcggatgcttcctctctgtttactagatacttcgatctgctgcaaagctgtggttctcgcatccgtcggtgctaatggtcggtttctctgcgtcacggtgtcactagggcaagatcctcttttccggtcccgacagattttttcgtttttcctttgtctctggttttctttgtaaaccaaagcccagcccaattttgtgggttctataactaataaaaggccgtttt

SEQ ID NO: 134892 - DNA, 537 bp, Arabidopsis thaliana columbia
  unsure (1)..(537): unsure at all n locations
ttncgtttcctggaagaacacncncntccctggttggncggctatatncaggcnaccgtcccatgtgcatctttggcagcncaaaagctttggctnngaactgatggngnacactttgagaaggggatgatatccccncccttcaggaatatcgggaaaatctcagccccgtattgcagctaaggtggctgcaaggccttacgaactgggactggccacgaggttgcctcagcccaaggagctggagcagtgtgctgagagcagcatgtacagcccttcgtatcgaagtaccgctgaggataagcttaatctaatttgttatgtctcatacgactcttatggccatttctctcctctcctattcgttcaccttccacttcccgtgagatttttgtttgtttgtttgtcagcatctttaaaatcttgtgttgtaatcactgtttcccttgttgtttctttttaagtccgtaataatcctcctatggaaattgtttctctgggccatatactcgtgtatgctagtagtctcttggtagc

SEQ ID NO: 134893 - DNA, 546 bp, Arabidopsis thaliana columbia
  unsure (1)..(546): unsure at all n locations
aattgcccccnaggccccaattcttaagnattgnntggccgncttcccnagnggncagctcanccctccaaagctccgggtgnggaacnggtgacccaggaaagnngttncaaccccaaatcgattcctctgccccattttncggaatcagaccngngatgccgatcttgactcaaangctccccttcagacgttctcgggttcagcagctntttcaagttctgatctttttggcccacggaccagatgattccaacatcgatatcactgcaagcgatctcatcaaccgaatttctttccaggcgcagcaagatatgtcatctattgctaacttagctgaagaaacaaagaataagctgggaacatttgcctctagtatattcagtgatcttcaggatagaatgctgtaagaaacatacaaaggatcttgtcttttgattttacagagaacaaattgttggatataaatgtcatttttatttttggtttgactttgtngttgaaagagtgatttttgaggtaaattgttaaatgtggaatttgatc

SEQ ID NO: 134894 - DNA, 508 bp, Arabidopsis thaliana columbia
  unsure (1)..(508): unsure at all n locations
ggnggntttgttcccgggngggttantttggagnttggggaaccccttnnnggatgggnggggtccctaggtnanggccctggaggccggccnttcgtccngggaaggttctttccnccccgangcagntattgggtanccggcgacgatggaaccaattcnccgtcgtcttctaattagtgaggaggattaaanccaaaaaccaaaaaacnccctcaggttactaagcttgaagtgtagatctattttacaacataaaattcttatcaaaaaaggaaggaatcagaatttccattaaagaaaggtgtcaaaaaaaagttgtaaaactatatagtagtgatcaagacgaatatgtgcatttatgttttatttttgttccctagtttttaattttatttttgaaggaagaaaaaattagttccatgtgtttttgcaagatagttgaaaccttggacgcttgttatgtatgatgcgatcttgacattttttaataacagttattttaaat

SEQ ID NO: 134895 - DNA, 455 bp, Arabidopsis thaliana columbia
  unsure (1)..(455): unsure at all n locations
gccctntntanccccttggttgacccanccttanccgggaaagaggccttaagtccccaaattcttttgagggacctntntccgggggtggggntcctccaaaagccaccccaggaggagtcccggaaaccttgtttgtttgtnngagnaggaggaggaggangaggaggatttccttgaattgtatatggnatgaggntntgccaancccattctggggaattggncagncttggatgatgcaacccctggtttagtgcttgacatggagaggcttctcttcaaagatctggtgaaagagattgtgcacggtgagattgatcggctgcaaggaaactcaaggagacagaaaacggttttggctgacgagtagatattgatttatacaataagtcgtttttggattctctgtattctaaagcggtatatatataatacaagtcaatgttcatgac

SEQ ID NO: 134896 - DNA, 409 bp, Arabidopsis thaliana columbia
  unsure (1)..(409): unsure at all n locations
tcaagncggaaagnnttgnanacnntcggtctcttcntatcccncgctgcaatatatcctttggtctggggaccggntggaaacccgnttccctcttaatggattatgancngaaggaaacgcgnttcgaaaatcgtaccagagggcanttactaatacttcatccagacaaaactacnaacaaaagggtgcttctgcaaaccagaaatacatggccgagaaagttttcgaattattacaggaagcatgggaccacttcaacactctcggaccggtttaaaggaagaaaacgagtctttagtcttttagttctttacacaaaggctatgtacagatacggttctgaatcaaaagatgttgcagaattttagttgtcacaggtatacttacatcaaatttttgttggttt

SEQ ID NO: 134897 - DNA, 548 bp, Arabidopsis thaliana columbia
  unsure (1)..(548): unsure at all n locations
aaaccaacattcccctacttnagggaaccacccgngtccaccccnttgacagggcattcatcccccgattncagganccgncttcacttcccgtgagtcagctgagagcttgtggatncgtattttaggactcanccgttggggaggacccaccaggagcaaaacccatcatgcccctgttgtggttgatgatagagactccattctcaagcattgcagctgttataaactctgagagtcaagtggatactgcagttgagatcgattctatggctctttcgacatcgtcctcgaggagaaggaatgagaatggttcgagggtttctgatgtagacagtgcagattctcgtccgcctaggagaaggagatttacttgagaaacataaataagaaaagctttcaacctggaagctgacgatgatgatgattaagaagaagataagaagaagattgtgtaactttatttttcttgtgttgctttgttgtaatttgtttttgtatttttctcgatagggatggttttttttaatcgaaaattttctttcatc

SEQ ID NO: 134898 - DNA, 205 bp, Arabidopsis thaliana columbia
  unsure (1)..(205): unsure at all n locations
aattcccntaggtttcccttgtttcaaancaaacttttggggccccacccntggtttannggggccccaaaactagcncagatgaagaatgtgtcaatttnaaaatttagtttttttaacccngtaaatattttgaaacttgcttctgaaactaatatgggatactctgctcttagagatctgtaatgaatctattcaagatgac

SEQ ID NO: 134899 - DNA, 412 bp, Arabidopsis thaliana columbia
  unsure (1)..(412): unsure at all n locations
tggaanaaatccncccnaggccccntggggntttcccggttcccccnngggaatttnggaacccgccnggntttccaaanntttgnaccaaaaacccggaggccaggaaccagggnctatccnaattatggccaattttcaaccggagtgttngtttggacctttaaaaggggcctcacccgagaagttcaaggaggaaggatacggcgttatcaggctcagctactttcaattacgagaacttcatgctcactgttttaccattcctcgtcgcttgagtgattgttttttttttttttgttgaccaaagagattgttttctaactctattttctttgtgagcttttggatattttatttgttgtctttttatctttctccggtaagattcagacgtgggtcttcttttcat

SEQ ID NO: 134900 - DNA, 525 bp, Arabidopsis thaliana columbia
  unsure (1)..(525): unsure at all n locations
ttcccgnccttcgggattccgatngtccnatgccggtggggctacccatgnttggttnttccaggaaggtccggatggtcctaagtacccgngantcccgagctaggccattggnatnttgaagcctggngaaaaatggttccaaaggctggttcactaaatgtccattccaacactgnggaaagtgcctctaccaacgacgatgatggaggcatctaagcgttccacccttccgtgagttgcgcggtttgttcatcattgcgggagctgctcatgttctcgtactagccctacatctctttcatacgcgtcaagaggtatcacgactatgcaccaaacttcaaagcttctataagtaaaaagtgatccatcattcataagctctactatagcaattgatggaggactcataagtaacaacaaagtacactttgaaacaaatgtcacatgtaatacttggtttttttttccgtttaaattcacatgtaataatttaactcacgtaaatactaaagtgattcaccc

SEQ ID NO: 134901 - DNA, 546 bp, Arabidopsis thaliana columbia
  unsure (1)..(546): unsure at all n locations
gttttccccccgtggaccttngccgccnnggcccttgccggcagtggnccccacttgggtgctggacccccatggtaccaccaatgcccagatgttgtccggtggccngatncggccagtgccgagtatggtgatgaggaggatgatcttggccattatggccatcatccctgtttatggctttcagtcccatgtcattcccaaaaccggcaagctctagtgagttatttcggggaataaccagcgcaggaatcacagtgtatgggtttacacttgatagaggtactctccatacaatcttcggacttgaattgtctcttgttctctggcttcttggtaaaaccattggaatttcttgaatctgttttgggatctccaagaaacatccgaatgttttgggccttttggcaatgaaccactttcactttctaatttctttctactgtaaatcaaattatttgtgctttgtatacgccactgtattattaatgttgttatagagtcatgtcattgtaaattagattggaaataaaaagcctatacact

SEQ ID NO: 134902 - DNA, 538 bp, Arabidopsis thaliana columbia
  unsure (1)..(538): unsure at all n locations
tctgaaggcantgaacttcagcacttccgccagnatggattgatnnctgcanggcccaatcaaaggggtggtncnttcnccttcaccaggggnggtcncattgaagncatggattacccntagacgtggccnacattgatgctaaaccatgggctcatgcgggtggactcctctccacgctgcagccaaagancggaagagagaagccagtgaagtttctggtggagaaccgncgcattcttggcagatgatataactgataccaggtttaatccgccggtgcattactgtcacggccttgaatgggcgtacgaggaaatgaagaagnttaacagcgagtcttcttcttcatctggtggagacacatcttccagttctgacaactgaacttcttcttggttgtttctcggtgtgttttgttttgttttctagttgagactacttatcagaactattatggttggtgtttgatcttatgggctatgtgaaacattgaaactgcggatacattcatgtaatcttcagtgtgttattttgc

SEQ ID NO: 134903 - DNA, 550 bp, Arabidopsis thaliana columbia
  unsure (1)..(550): unsure at all n locations
ttcttggggttaggggccnccccnnagggaaggncccggttaacncggggaggttgtggaccctttaggaagggcccntctccngaggagnntgtggacccttnagaaggggcccgttaaagtgaacccgnggnattggnggantattccggntaaaaaggaaggttgaggtagagattattattagtaagagctcatcgaaacggaaaccaancgaaaggaaaccagcagaggtggctactggaaaaccgaggtagggaanccgggaaaagacgataaacagccaaggaaaagaagcagaagatgaaactgaactagcctgtggttaagcatttgtacatttgatgtgccagaagtattcatcattcctcttaacatcactgtttcggagggaatcataggtcttgttaggtatttattctcatagttaccagtttagtttttttttttgtttaaactgtgttttccttgttagagggtataactatagtggttataaactgtgtcttcatttatttgtctagtttgatcgattcatgttcacaaaacc

SEQ ID NO: 134904 - DNA, 480 bp, Arabidopsis thaliana columbia
  unsure (1)..(480): unsure at all n locations
gngtnaccccggtaaacccgaaaaaggtaggaacnngggtttaaccttccgnncgggaaccagaatggcnnttgngaaatggngntccnaagccccggnctaccggcttcnnggggaacctggnaaaggggaaagcaatgcctgccccatttgcccgggtagttccncagttganctccccggctcgggctgtcgttgaaagggacgacctactcgcttatcatcaagctcttcgctgccntgttctctctttcactcttgtttctcttcccagctacactttagggattctttagatcttgtttcaattctttcttcttccaaaggcatttgtttgtttacggattgaatcgaagttttgatcaagaatgtgtatgcttccatgttttttaaacttttttggcatgggaccataaatttggttatgttttcttgtgtaaccttaattttcattgtgaaatgaatatttacattcttagc

SEQ ID NO: 134905 - DNA, 521 bp, Arabidopsis thaliana columbia
  unsure (1)..(521): unsure at all n locations
accccgggngtttaccggggncccctnntggatngnttttgcccctcgggatctnccccngtgggggccccccggggtttacccccnttaanaacnnncctnggnccctnncaggggcttggncccgngggagaaggttttgcctggatcaaacagtggtgcatccaaaccgcagccatgtagatttttgttccgggttcttacatggccatggcgaaggaagggtgaccagttggaaggtgcatacaccctaaagacgtcctacgctttgagggaactcagaagacacaatttgaacttttttctttagcactcatagaagaagagcaaagagaccaaacggataatatgaagtctttaccatccttaagtgatgttggtagtgttgtatttgccattattggcacaagagctgatcttgcttggtttgtgggagtgacatgtcgtcccatgatatgttgtctatcagcttcagtatatgttgcttatgtaacagtttttctataataactttgtgtacc

SEQ ID NO: 134906 - DNA, 520 bp, Arabidopsis thaliana columbia
  unsure (1)..(520): unsure at all n locations
gannccccctttaaggcttngngggcccgtggatntgaactgatggttncggtggcttncccctgnaatcatagctggtgcccccggaaattccgncggggcttggatgagcaatgcttatagttttgggatggtactgtgggagatgntgacgggagaggcggcttatgcatcttgctcgcccgtgcaggcggcagttgggatagcggcttgtggcctgagaccggaaattccaaaagaatgccctcaagtcctgagaactctgatgatcaattgctggaacaactccccctccaaacgccccaacttctctcatatccataacacgttacttcgcggcgtttcacggtaagtttggcttgtatttgataagatcatattgtacattcagattgtaacacttaaatcgtaattatatagtatgtactgatcataatagtgatatgaactgttggaaacataaaggggaatggtgcgtgtaggtttgattcaatacttgttgttgtggccttgaggaccc

SEQ ID NO: 134907 - DNA, 446 bp, Arabidopsis thaliana columbia
  unsure (1)..(446): unsure at all n locations
ccagggtntaagtcaggatttgaggnctggnattttcngagcttncttgcngccatgntagtcnctaacnagttgactcgttaaaggagtncattgatgacactgaagatttcattaccattcaactggataatgtgcggaatcagctgatcgagttcgagttgcttctgacgactgcaacgtttgttgtagccatatttggggtcgttgctgggatctttgggatgaactttgagatagncntcttcaatcngccaggtgcattcngatgggtactcntaattactggantatgtggctttgtgatatttncggcattcgtctggttcttcaagtacagaagactcatgcctctataagaagagagacatgaatgtgctccccagaaagtagacatcaacttatattgttatgttgcttacagatattaatgatttgtttccttt

SEQ ID NO: 134908 - DNA, 369 bp, Arabidopsis thaliana columbia
  unsure (1)..(369): unsure at all n locations
ggntccattncccggncagantgatttcatggggggagccnnnggtttggccttncaacccanttggggngggcccccaaaagcattccgnggccntcggggcattaaagggacccgattcanctgggaaagtttgggttgccgagcaaagagaacncattggtgagtgatggcataatcttacttgaagacgggaaagtgaaacaagacatttcacttaggctacaaaatgttgaaagaggtgttcttgagatccagcttgaatgtcttcctctcactcaatgatgatactttcttcttcatccctcttctttttttttttctttaaaagatttatttctaaatttatagtgaagaaaagatgctgct

SEQ ID NO: 134909 - DNA, 515 bp, Arabidopsis thaliana columbia
  unsure (1)..(515): unsure at all n locations
tcccccaanccnccgnaacccgggncccccccncggtaaaacngttcccaagccttttatcccattngatttgaaccaagggntttttggaangggcttttttngcccntgggaaaaatggccccaatttcctaaagcctttagnttgccccaaagggctttcccgtanncccgttcantcgaanccttggctttttggnggcccngggtttatcaaggccaagtggcaatttttaccccccttatgnagccaccccntttccgttggaaccaccgtgggaccaccgtggagggatggacgttatgggaggttccgacgagaggaagcagcagcagcagcggcgatgacagcaatgtcttccagatgatatttggaagcgatgcaccgtctcggccgcgtttaacgttattgttttctttgttaatgatttcggttttgtcgttatcaactctattattgtgacgaatggataacaaataggatttggaccgttcaattgattggtttttggtgt

SEQ ID NO: 134910 - DNA, 280 bp, Arabidopsis thaliana columbia
  unsure (1)..(280): unsure at all n locations
ccctttagaaggcctttnnggagccttngtggngccaggaggatttncncnnttacattgnccntcaagnggcagctcagccccaggaggaggattaggggaagcaaatgttctggttcctagaagatgaggaggaggaatcaaatgtttgtttctagaagaagaagaagaagaagaggcatctctgctttctctctctcccttgtaggtttccattgaaacagaacaactctcatctcattttatgttaaaagctaatcagttctttctcttttatgat

SEQ ID NO: 134911 - DNA, 317 bp, Arabidopsis thaliana columbia
  unsure (1)..(317): unsure at all n locations
taccntgttttaagggnaaaanaggnttgggcccatttttgccaaaantaggccccntnggggcccctgnaaactggantcattncttgngccccatgnacccgggtaaggcccaggagaggctcattagctaatataaatttgcgggaatccagttggaaaaggccgataaatgtagtttacttttatggtccagtttctttccctctttttaagaatatctttgtctatatgtgtacgttcgttttgtcttgtccaaataaaaatccttgttagtgaaataagaaatgaaataaatatgttttcttttttgagat

SEQ ID NO: 134912 - DNA, 407 bp, Arabidopsis thaliana columbia
  unsure (1)..(407): unsure at all n locations
cggnttcccccaaggtggacccttggntccccgggntccctttgggccnncaaatttccgggcgnttaaatgcggggaaaanctttggcngcnaatcnccctcccccttacgattttgggtagaccaaggagntgntaaccgggtccttnggtggttaaggaggaagacttcttcgaanccagaaactggattcccaaatcgctctgnggncacatttttttccctttttgttaaaatgttttgtggcagtttgttttctgtgatatgatttatagacgaaactatgtttgtttaggtgaagtctttctcttctctactactttagagagttatcttctttttttggtaattaattaagataactttgtaaccttttttttattgatctatatatattctaaagacg

SEQ ID NO: 134913 - DNA, 481 bp, Arabidopsis thaliana columbia
  unsure (1)..(481): unsure at all n locations
ggaagaggaattcggcggaccgnctgaaggccggagcttcccctggaagctntggcgatttccnatgtattnccccgtggggattcttcatttggcgagaggccgaggaggaggaaccacaacggnttncgncaaagngaataacaatctgatgtctgatattctgctgcaagtgtcaagtctatgtgatgctaactttttaatcaaaagcggaagctgcccattagaaggttctattnggtaccgttctatggtctctgaagatctggctcagaaggttgcaaaaagtcttagctttccactatccaaatacttgtacagaagatgatgaaaatgtgaaattcaaatgttttgggaggaagaaactaacggtgcactcttaatttagttcttgtattgtactatggatgtatcggaaacttcatagtatttgaagcaatttcccacttaactatgtggtctgtaaaaatttgtttaaaac

SEQ ID NO: 134914 - DNA, 522 bp, Arabidopsis thaliana columbia
  unsure (1)..(522): unsure at all n locations
ttttacgncgttttgctgcnncaacctnggggggccctnaacnccacccttggaccnccacctggntgctcctttcggccaagaggccatgggnnttncccccanngaacccccatcatggatgacctgagaaaggngancttattcnagccaaggacccgacaagttctgtgaaggcccnttgtacttccttctctttggagaccgcttcttctcacttctggnttccagccctcgatgagccccaacnactttccgggagcaggattccacaggatgttgaagcttggattgagcattgatgacgatgatgttgttgaagcccgatgctgacatgcctccacttgaagatgatgccgatgctgaaggtagcaagatggaggaagttgactaaattatcacacagagtcgacttaatcattaggggtgttgagacattggttatctttttatcttttttttttttttatgttttcgtttgaactaatattttggaactattttctggagtttatttcttct

SEQ ID NO: 134915 - DNA, 433 bp, Arabidopsis thaliana columbia
  unsure (1)..(433): unsure at all n locations
anttncntccnaatccaaaaggccccntgtttccaantncccccccccgggaaaaccccctttttaccggcccccnggnaggcggattaccccggantttccncccgaaaaaagacccccgancagaacctttgggntangnatggagtaagggancgaggaagatgtgtcctcccttctcntggaaggtctcactgagaaaagagattcaatactctttaatgattgggagaccaaatttgaagctaagtatcctgtcgttggccgtgttgtctcttaggtctctcttctgagattgcactatgttatgtaactattgtgtgtgaggatctttgtgttgtgtgttttctgatttcgtgtttggatctgatcgttttgatacaattaccataagtaccaaattatctatgaaataaatcggggatttcgtgtt

SEQ ID NO: 134916 - DNA, 476 bp, Arabidopsis thaliana columbia
  unsure (1)..(476): unsure at all n locations
ccantgtacccccncagcaaacncaaaaccnggtggccnatntgcatgctctntgggccaaggaggagggtacctaatctaactgtgaagtccaggttagtgtatttgtcnttgatgattataggttgctaatcncagtatatatgaagcncaagaaagttagtatatatcgcaagttagggtgaaaagtaaaggagatcagattaaagtcctatatcccatggttttggtcactacactncctttttgattcatgttaagcaaaacttcaatccaaaagtaaaggatggatatgcttgttttgaaccggtatgaatgccatccggtacggttgttgttggggacataagtgggatattcacatgcatctttgtaattggtgactttttgtcaggtggtgatatatttttttttttatgtttctgacacagccaccacaatctatagtatgtcttataaaatgttacctttcaagt

SEQ ID NO: 134917 - DNA, 494 bp, Arabidopsis thaliana columbia
  unsure (1)..(494): unsure at all n locations
gccgtcccaatgaaccggtgctatgctcgngntagtcttggattatagggcaagagatanagctnttccaaacagatggtcccatgactggnccncatatgcttgggggctttggagtaacgggcggcccattagaactcgtggatccagctattgtagaaaattgccaanggaatgaagttgttcgatgtgtccatatcggtcttttatgtgttcaagaagatcctgctgagcgtccgacgttgtcaaccattgttctgatgctcactagtaacactgtgactttacccgtgccacggcaacccggtcttttctttcagagtagaattggaaaagacccgcttgatacagatacaacgagcaaatctcttctagggtctgttgacgatgcatccatcacagatatacatcctcgatgatgatgagtttttcccttcatacctgattcctgaatctattggtgttgaaaataagttaaaaacttcttttgttat

SEQ ID NO: 134918 - DNA, 381 bp, Arabidopsis thaliana columbia
  unsure (1)..(381): unsure at all n locations
accgaacccgttcaaatngtanccnttccncggttngaaaatnccccgggganttttccgcccccaagcgggagtncgttgnccnngattcaccctgggnattgcctgcagcgcnagctccccctgaaaggcncccccggnaaaaaaggatgccggaatcttgtaaaccaatggagggtttgtaaaggggttctttttggaacatacatttaatatgttagtcggatcaaaactctcaagcccaaagttttttaactgagcttttctgttatgttgttgtaatctctctacttcatcacaattccttatgtaatcctcttctttcctttttgttttttggttgaaaggaaattatatataaccataacattatcggtgtcc

SEQ ID NO: 134919 - DNA, 460 bp, Arabidopsis thaliana columbia
  unsure (1)..(460): unsure at all n locations
cgatccttgnaagagggnncctttngcccccatgcctngtggaacctgtggnnttccgncncaaagggctgggaccttcngacctaagnntttgaggngttgaaaangctgaccccttttgttngaggaagatttgttggatttttgggggttngaaanttccggccattaaggtccagtccctatgggtccaccgggatccaacctggtgtgctggagcaacttggcttactgggnccaccaggctcaccattactacccacctgatccggcccaacccattagcaagatatttgatgacatttgtgtaattttcatatttattgaggatttttgtcattaataccaggaagacttcaagcaacatgttgcagcggtttgagaagacccacaaacaaaataagttttgtaatatttgaaatcgagataatgtggaagagtttggtattcttctcatttc

SEQ ID NO: 134920 - DNA, 425 bp, Arabidopsis thaliana columbia
  unsure (1)..(425): unsure at all n locations
ttcagatcttcacccaangaaaaaancngnntttcggaaggaaaacttccggaanaangccnggatttccaagggaanccctgctnctctttcttagntcagcaaacttcccatgggngctcatagaaagaagnaagaatctaagcagctgatttgattgtttttgggttcaggtcttgtgtcccangaaagcagaccaaattcaancaagtttaaaggaacgtttatagttatccacatgatgtatgattctcngaatcttgagagtganctaacttattggacttcagtagtagtggcagcaacaagcttgttttcggcatccgcggaggagcgaaccactgtctttaacttcttagatgaccgcgatgtcaagtgtttaccatggtaaatcaagtttgctttagtagatgtgtagtcattct

SEQ ID NO: 134921 - DNA, 441 bp, Arabidopsis thaliana columbia
  unsure (1)..(441): unsure at all n locations
gacttggcnnctttntgaaccntaggaggcgnnccccccccggggncncggnccccntccggttaaaggcgggcctattggccggtancccacttggctcaacaaaggncctccccattggtttttnttttttaangganttnccaaattttccccccatggtaanggttccaaattttggattccaaggttgggggccaaaaaaaaaaaaaaccattggatcattaatctattgatttgttctggctgtgcatagatcagaactgggctctgaaggcagccgattgggtatagtttgttatgtattatatctaccagcttgacctctcaatcaaacttcttttatgtaaattttgatttgtttctccctctattcctggtgattgtaataaatagacagatcgataagcttttaaaatattatacgtgaattattacacc

SEQ ID NO: 134922 - DNA, 340 bp, Arabidopsis thaliana columbia
  unsure (1)..(340): unsure at all n locations
cccngcattnnccggggccaagatatgnattttcnatgnatggccccaggggngaccaaaaatgncnattggntaggccaccgngtcccaattagatccctggtggaacccatgggtgttgtgaatgttgccaatataggttacaagcgtagaaccatatcncccttatttgaaatcctacattctctgtttgctncggtgtattgtttcatcattggttaggtgtagatgatcattgagctttagacagtagcttgtcacctatacttttagttgcacgttgttctttggtagtatttgtacacaacatttaatagattataaataagtaacgttaaag

SEQ ID NO: 134923 - DNA, 263 bp, Arabidopsis thaliana columbia
  unsure (1)..(263): unsure at all n locations
cngggggaaaaanggccaatncttttcccnnaggtccggaaatttagccgttgcngcangncttccttccnaggggaaacanagggccttccttaatccataatcctggttacggattcccccaattaggatttggaattccccgaattctgcttacatgctaaggtttcttttcaagattgtttagtgtattatattaacagattgtaataataattgtgaaagggtgtttgctttaggtttgtaattgaaacatttcttct

SEQ ID NO: 134924 - DNA, 264 bp, Arabidopsis thaliana columbia
  unsure (1)..(264): unsure at all n locations
ttaggtncctgtgaaagagnaaaacgttttcacagtttaagaagacagtncaagagtttagctgtgggaagaagaagaaacaaaaggcttcggttcccctcatgctaatgctccngttanagcttacagagancaatnantntatctngtatcttttctttttttttgctgttaatgttaaaatgttatgactaatttgtcttaagtttctgagaaaattctgtcttttaagcactctctagtctatgtcaagtggtttcttct

SEQ ID NO: 134925 - DNA, 209 bp, Arabidopsis thaliana columbia
  unsure (1)..(209): unsure at all n locations
agttccgntattggggccatttatttaccttaantcccntttcaaacccnnccncngaggaccttccggtttccggtccgcctttttggtttggtttggttaaggtaaccctattttaaagnttcattgttattttggaaagttcttacaccatcattattgatagtctcttaaaacaattattatgttaagagatatatcttataact

SEQ ID NO: 134926 - DNA, 233 bp, Arabidopsis thaliana columbia
  unsure (1)..(233): unsure at all n locations
gggggtcattttccccagnncnggnnggaaaccatcgagtgggtctaagcccccccagtggacattcactttttcgnggnaccccgatcattaaggngganccagagcacgaggaccatgaagccactaaatcgtcaggtcattgtcatatagcgaaggcacaatgaacacggcaaatcccacgtacaacacagcatatcaattgaaaatgtaaagcaatatattatttatcg

SEQ ID NO: 134927 - DNA, 235 bp, Arabidopsis thaliana columbia
  unsure (1)..(235): unsure at all n locations
tccgggggaaaaggccngcnaaccctaaanccagattggcatnaactaaagtctaaagtaaaggaggaggacccccccaaagntgngaaaacaaaacaaaacaaaaagngngtatatatacttatactgcttcttatgaatctttttctttctgtttttgtttgtgtttttttgtttgtgctttaatgttaaaactgtttaaactcagagactatatatatgtttatatttgttt

SEQ ID NO: 134928 - DNA, 505 bp, Arabidopsis thaliana columbia
  unsure (1)..(505): unsure at all n locations
tgcctnttcccagctttatcgcncctttggnacctgtcccctcngtccgcccggatcccggtcncccacgcgtccggnttctctacaatcaatcgtggcccatctgtcnccgcaggagaagacgcatttctccgagacgaactggcntcgttggagcgcgaagaagggaggagaagantggtgaaccccgacagtacaagccacttgtcgaaacggatcactgataagagtgataactctgatgaacaaatgtgtttcacctgaatctttaagccgaccgtccttcgaagatatcttgtggaatttacagtatgcttctcagttgcaagctgcttctgatggtgaccagtgttaatatattcatagcttcttcttctcttagtaaaaaattcaaacgaactttttaatgctttaaagattcgtgtaatgtgtgtgtacgaaaatcccctgttatttatgtaacgattgggaaaaatggaaattaataacattaactcctttactt

SEQ ID NO: 134929 - DNA, 532 bp, Arabidopsis thaliana columbia
  unsure (1)..(532): unsure at all n locations
attntcncaacccaactccnagnnatngggccccccctgtangggtggccccccantccatctgggccctcccttcgctgtagaantncaccggcccagttnctcaggagcaaagtttggctggctgatgccagagtttgncctgtctggtctcacagcatncggttccagtccttcccaagtcagaccacgtcttaagttataagctagtgcctctgacttgcggtgaacagcaactcccaaagataactttgacatcagcgcgatatgctgctgagtttcagccatctgcggttgcttcaagtgtctttgtgtttccctcagccccacaagccgagaaagccatctctaccagcaagtagtgtaacttcgcatgacttgggttttcagatgtctatgcagtttcagccatatgtggttaagacagacatattgaatcagtttggtaaattttgatcctgaagtgtcgcctatgttgtattttcatttttccttctgttgttgataataatggatattttttggagaaccc

SEQ ID NO: 134930 - DNA, 496 bp, Arabidopsis thaliana columbia
  unsure (1)..(496): unsure at all n locations
gtaaacttgggccannccnaaagggggnctaantaccccgatggnagcacccctgttaaccaccnagtccgagtnntccgnanctaaagtggttttggaancgngaacncttgnanccccttntcaattaaattntatttccagtatctttgacttataaagtctctttgttgggagaatgtaggngtgaggactacaattacaacctttaaaagacgtagatgtgtacgacgtgaagtattgtgcttgtgacaaactaagaagacagatcttgagtaaagatgtgtctactaaagctggagactttgagaattttaagaaggctaaagaaaagtttatgttcaacaagaaagtaggagtttctgaaagttttaacggtctctctcatgaacttgttttgatgttatctagtaacttagtataagacttggtatgtaggttttgtacaatttatctaatataattatttttaataaattcaactaaatatttatgt

SEQ ID NO: 134931 - DNA, 551 bp, Arabidopsis thaliana columbia
  unsure (1)..(551): unsure at all n locations
agnggggggggcccgctacttcagnccatccanccatgggcgttacccggncatcccggtcgancggccggtccncctnggnctatgtnagtggaggncaccagttgggntaggtttccnggaaattaccaatttggggcttatttcccgccggaggaggagncngtggtcgggtttggtccncggaatgagtcttgagcaaaagncctcaccatccaagtgagtgatccatgctactagagacccaaaatcctactatagatggttctcccttgaaagacttcatgatttctttggtttttaaaaagtgtgaatgtgtgatttattgcaacttttgttgaggactccaatgttaatatgggttttagggttggcttttcgggattgccaaattgttatttaagaaaatggatttattgttttggttgcataataattaacgagttttgcaactctttttattcgatgcaaaagcatgtcacttaaaggaaatatagttgaatctctatgtgtaacataatggacaaaagaataaattaaatatttatcag

SEQ ID NO: 134932 - DNA, 522 bp, Arabidopsis thaliana columbia
  unsure (1)..(522): unsure at all n locations
caaatnttttttggccccccccaaggggggaccccnggttcccaaaaccctttcctgngccccccntcccccngggcccccagnggacccccttaaatgttcccgccccananncggacccttggggtagggatgccngtaaagcaaattcccntggtttccccngctggngcaactgctttcaaaaccctgctcctcttcccaaggaantggatgtgttagattcaagagntccaaaatcagcaacttctctctcgagtttcagaactttgtattcaactccaggatcggttacaaggtcttgaaggagaaaattagtaagcagtgctgatatgattctacggcttttggatcttgtaaattggtatgttaattgttagatttggaaaaacgacgtttgcttataatgtcttgtttgatttcttgtattggaatgtatcattttgggtgctcgtcttaaatagttcctccattctgtaaaattagtaaattactctcttcagcaataatataaatcacgat

SEQ ID NO: 134933 - DNA, 507 bp, Arabidopsis thaliana columbia
  unsure (1)..(507): unsure at all n locations
anagctggcntccaggncttanccaactncnaaccatttatctgggntcacgagaggggnggtccctccctgtgtaaagcgtnttgntgcaacttgttnccttattggaaggngaaactngcttatcccggaattgaaccaggacatggtgcttttgcatcacgaagtagaagtggaattccttgaaagcaaacgtatagagaagcacactgcgactcttttggaattcggggacatcaagaatggacaaacaacaaccgctatggccaagactgttgggatccctgcagccattggagctctgctgttaattgaagacaagatcaagacaagaggagtcttaaggcctctcgaagcagaggtgtatttgccagctttggatatattgcaagcatatggtataaagctgatggagaaggcagaatgatcaaagaactctgtatattgtttctctctataacttggagttggagacaaagctgaagaagacagagacattagaccagc

SEQ ID NO: 134934 - DNA, 464 bp, Arabidopsis thaliana columbia
  unsure (1)..(464): unsure at all n locations
ccngggntttgggntccnctttcccgggccaagggttttnccntcccaaaagggcnagnggcnctttttnggngggagggttnaccttggccccctttgncccttttggccccctcngttcgccaggttgntttgnccccgtaggcccggggccaacgggccagttccccgtgagngggnatgtcaagtgtggtcaagatggcaaagaaaatggaaggcaagagcgctgcagaagcacttgccaccaccaagttcaaaaaattcaagaggcgtggtcagaagaaatcagctgggaagaagaaaaacaagtaaacaagtggcataagctcctcacctatgttttaagatatcagaggaaaaatagcttatttaaaacacattttttgactgctaaaactttaaacacctttgtccattttgtattgtaatcagattttgaaatatggtttcagagttgatacttc

SEQ ID NO: 134935 - DNA, 350 bp, Arabidopsis thaliana columbia
  unsure (1)..(350): unsure at all n locations
ccccgggncttncanttnnccccgggggnnaanagctttgttcnaacnccctggggnttctaaanattcggattgatttggtcccttgtgatgctccccacgcaacgaaatgcgaccgaacaaagtgatgggcattggtcttattacactgtatctgatattcgtcactttcaggcttantccgccatgggattcatnccttgggcttcttgaaacgccattgttgccagcttattgtatacatcatgttgttagagatatagcccactggttctgaagtaaatgttgtttgtattattatgctgatgtaactgaatgaatctgagccattggatctagatagttgtggt

SEQ ID NO: 134936 - DNA, 468 bp, Arabidopsis thaliana columbia
  unsure (1)..(468): unsure at all n locations
gnggctggcnatttcngntcggaggccccaatttggcaacccggaggttncccngggggttttggnaacccttttgatnnaggggncaactttcgggnccttcccatttgggcccggccgaaggatattccccgggatnccaatggggattgctcccnnccgattgggncnccttgaacttactttacttcctcgattggaagttgcctgatgggatgacncattaaagntattgatactgaagaagctggtactcttacaatcgtcaagaaagtacctctccagctcgttccagttcgagttcagtgatcagaccaaactccaaacggtttggaccaaaccttttgaataaatatatcatgcaaatcatgtaagcttctctgatgatgtatgaagtatatttttcagtaaaatactaaattgaacgttcatttgcgtttgaggaatgtaattaacgtttacgaacct

SEQ ID NO: 134937 - DNA, 471 bp, Arabidopsis thaliana columbia
  unsure (1)..(471): unsure at all n locations
gnncatggtggcgattcaaaccccnggctgtccttttacccccaaaacccnttcttgngaaaccgctgncaaagggaatgacgtttggtatgtgcccaaaccagtgattaagaagtatggcttgaagtttggtccccatttgtcccccatgcattaccttcttcccggagataaaataaatggctccactaagatctatggcggtggcagtgccccttgtttcaatggctgggtggacctatgtcgaaagtacaatctgaaaaccggagactctatggtttgtgaacttgaacgctctggagaactggttactgctgttagagtgcacttcatcaataaaacatgagatgagtcctctctagtctcttttctttaacattcgtgtttaccaaacttactattgtaatgtttatatgtgacccttatgttgctttaacaaaacttaaatgctaaatttcttatgcttctgtt

SEQ ID NO: 134938 - DNA, 387 bp, Arabidopsis thaliana columbia
  unsure (1)..(387): unsure at all n locations
gattcccatccccgtttgctgtcgggtcccntnttttccnggaaatttcccctgatcannatccggctttggggnnccaanttcttccngngaatttgnggttgcccccnggctccacttcttatggntggaatttcccttcaaaaagnttttgtttggaggcccagctttgtggactttgcccggggaatgggagggcccttcttttgggaagactctaaggggaatgcgacttgttgtgaaatccgaagttcacaatcagatgcgtgagtttcttcatacccaaagcaagtaacaagaagaaactcncattttcttctcgtattaaaacaaaacatcatgcttcgattctacaaactatgtctttcgtgaggtttcagcagaaag

SEQ ID NO: 134939 - DNA, 476 bp, Arabidopsis thaliana columbia
  unsure (1)..(476): unsure at all n locations
ttcgggccntttttnggncctcccacccaccccgttngccccnagccgtgaacccccctttccnngatgggtgggnagtcctccaagggggcctnnaaaatttatggnnccnagtctaaatggggattatgatcccncttctgtttggaaagctgttgagctagcgatgtgttgtcttaatccttcatcagctagaagaccgaacatgtctcaagttgttattgaattaaacgngtgtttgacatctgaaaattcaaggggaggagcgattcgagacatggactcagaaggttctatagaagtaagcttgacctttggtaccgaagtgaccccattggctcggtngtttacatgaagaattcagcttctttttgaatttttgaatggtttcttctaaacnccatgtgagaataagtcatccncatataaccatacaatgtttttctaagttttcttactctcaaaattttgtgttc

SEQ ID NO: 134940 - DNA, 493 bp, Arabidopsis thaliana columbia
  unsure (1)..(493): unsure at all n locations
accacctntcttcagagcacagtcataagtntgtcgatctgagacgagtntggagccttgcatggagatgcctaggagnccatatcgngggatcttcgccntctaaaatctacctcccgggatgaattaccgttggaagaatggaagctagtagtgaaactgaagaacatcttcaagatncagtaggagattcaaatgtctactttggagcttgaaacactctcacatgccttgttatgccgtgtctgcgtcgatgcagaacaaatagattcgtcttcctgcttctagcggagaagccttcacagaagatttgaaagagagacaagagagagtttttgtttttggtttattttctttctttttttggtctttctccctgaaaagtgctgaataattggttcatgaaccttcatgctggcaaattgcaggggaaagaagagccttgggtcttgagatataccacatatcatctttatatatgctttttttgact

SEQ ID NO: 134941 - DNA, 497 bp, Arabidopsis thaliana columbia
agtacttgctggagtattccacccgctcagagaccccacgcaggattcaagcacggctcaggtgacctcttctccgacaggtgtgatgttagtgcgaagctaaagggaaaatcgtcaccaacattatccatgcactgtcggattcgtagagatagaatcagaggaaaaagttcagctaaatgtttccacggacggtgaccttgggaccatttactcggtcacggtgcctgttagaagggtgaaaccagagtaccaagacgtggacgaggctggaaccataaccaacgtggaatacaaagatactcgtgatggttctgtcgatgtcaggttcgatttttatgttccagagtgatgaaaaggcacagtcttagatttatttgctggatagtatcttgtctgttatgttgatgttcttcaagtttagtctggagggaacaaagacagtttcttgacactccccatgtatatatatatatatatgcaacttctcttttctt

SEQ ID NO: 134942 - DNA, 476 bp, Arabidopsis thaliana columbia
  unsure (1)..(476): unsure at all n locations
ggaaggcngcccctttgntccccctgggccacgnctanccggngnataagctggctaaggagngagatgnggcgnncgcccgtttgacgagtatggaaacatgtcgagcgcgtgcgtctcttcatactagacgagatgaggaggaagtcagctaaggatggtgtggccacgacaggagaagggttggagtggggtgtcttgtttggtttcggaccnggtctcactgttgagacagtcgtcttgcacagcgttcctctctaaacagaacgcttgccttctatctgcctacctacctacgcaaaactttaatcctgtcttatgttttatataatataatcattatatgtttacgcaataattaaggaagaattcatttgatgtgatatgtgatatgtgctggacaggtctattcgactgtttttgtactctcttttttgtgtctttttacaatattaaatctatgggtcttgaatgac

SEQ ID NO: 134943 - DNA, 487 bp, Arabidopsis thaliana columbia
  unsure (1)..(487): unsure at all n locations
tggaaatgcccatctcaggctcaattatcggatcctatggttagctgacccccattcctggagatgtagtgcgataccgcttctgttccaggtagctnggnaggaatcagtcanccttcttcctggtaaggatattatttcaatctttcataatgattcattcatcttaagagtaatcttttttttctttttttgatatataccttgtgtgtggatggatgtggctgagcagggaccgcggtggggctgaagaactggctgaggataacgtttgcagcagatgcaacttcgattgaagaagcttttaaaaggatcaaatgtttctatcttagacatgccaagactcaatatccaaccatatagttgatttctgattttggtatggtcataaattgttcttaaattacatgtttaaaaacacagatacagtacagtgtctttttgttctccctatataagtgttgatataaaatttctttattgtaat

SEQ ID NO: 134944 - DNA, 488 bp, Arabidopsis thaliana columbia
  unsure (1)..(488): unsure at all n locations
acgattccgatgagtgattcccttaagggnctgaanctggnccttgcgcttcatccgcngcncngtctgcgctcttgaaggtaagggnatttaatgatactgaaccactgcaagaagttgcgaagtagcgattgccaacatccttgtggaggcaccccatttgaagactgcccttggggatctccataccaattagctggtcggcggaatcagacattgaatcagttactgatggcgagtcgagctgtgaaaggaccgattctgtttctgctgcaggatttgagatggtggagcttgttattctagcagccgagataatgaaagaacaacaccattgaaattcattcttcagtttgttaccggcattttaagttggtctgtggctctgtgaatataatttattgagaatttgatttcaaaatctcttgtataacctctcatgggatgattcacaatatgtgatacataatatagtgcagttttcaagc

SEQ ID NO: 134945 - DNA, 480 bp, Arabidopsis thaliana columbia
  unsure (1)..(480): unsure at all n locations
aaaatgtcccncggcttaccctagccttcngntccagcaaccntcangagatccncttttgctgcctagggtcttagatatatgtgcccncagatntntctgacgngggattggncatatngctaaatgcaaccaagttggagctctcaacttgacatggtgtgtgcgtatcacagatgcaggtgtgaatnccattgctaatagttgtacctccctcgaatttctcagcttgtttgggatagttggggtgactgacagatgtctggagaccctttcgcagacatgctcgactacactcaccactcttgatgtcaatggctgcaccggcatcaagagacgaagccgtgaagagttgcttcagatgttccctcgtttgacatgcttcaaagtacacagctgaaatttgctcatataaattagaggactctcaacaaatgtctatccttcagttataaatttgctcatataaattaaagtctc

SEQ ID NO: 134946 - DNA, 498 bp, Arabidopsis thaliana columbia
  unsure (1)..(498): unsure at all n locations
tncatnttccgcaacccntttagggnggctaaccggnancctntggggaagtataaatagcncatgngcncgcttctgctgcnccaccgggcattcattccctcatcgtaccattgtggttgcncggagaaatagatncccggcggttgtggtaccggtcataggaactgttacgatgnccggaattttgagtataatgacatattatgtggtgaaatcgaagaggacgaggatagtaaggaagaaggagaagaagaaatctgctagaaatgggacgagttcgtggcatcatgcgaatccgtcagagactgaatcggaggttaatccgatatacgcaatctgatcgatgatgatgattatccatcgaaattcgttttgttttctttctttttgttgttgttcttgatctatgtaagtgtagtgtgtgttttatgttgtttttggccgaagaaaaagtcgaactatgtcttacttatatacacaaggatatttgaaaac

SEQ ID NO: 134947 - DNA, 486 bp, Arabidopsis thaliana columbia
  unsure (1)..(486): unsure at all n locations
ctggaccgttcaggcctaaatgcagtcatcnctccaccctctctgngncccgcgactttcaaancacccaaggtgaaagtctgctccgccaggccagtaagtgaaaaagtggttgtataataggaacccaaaaacttattggggtggggagaaccatcttgaagaaagaaaatttgtgattgtactttagggagatgcaaagataaagctaaacacgaaccaggaagatcgaaaaggaagaagaagaggaggagatgatgagaaacaaccttccgtaagtaaagacttgaaagatatatctacaaggccttcttctttctttgagaatatttctgttggagtcttgtctctgctttcacttatatttgtttaattgttccatggtttcaattagtggagattgtggttttggttattgtatgtttgtttgatgtgaacgattttggatgattcttctctttttactagtaaaatcacttgtctgtc

SEQ ID NO: 134948 - DNA, 489 bp, Arabidopsis thaliana columbia
  unsure (1)..(489): unsure at all n locations
atattgttggncgnaggtcccccagacctccttaaggcggggnttgccccatncccgaatgngngnacccccccgggnttacccccntacaaaatnccnctggtaaggacccaagcgccttccaaancggactgattttccaggggtatgttttctggccngaanccctaccagtatgngntacctcaaggggattatggttccggtccnctggtttggaataatggcaggtaggagtaccattagggtagaccggatttacagcttttggagaagctctgttcaacattttttcatggtttcttagggagtattattgtctaatcaaacttcgtatgttatcacttcggtcttttgaacgtaagaatcaagttcatgaaacatgagtgaatattagtctgatgcatgtgcgtatgcaaaaatccatgtgcgccgatgttgctaggcaagcatgaagaataaagatccaaactggatatatcatatatt

SEQ ID NO: 134949 - DNA, 476 bp, Arabidopsis thaliana columbia
  unsure (1)..(476): unsure at all n locations
angaccaagagagagggccggaagccnccntgactgagngcaactctnggtcgatgagccagngaagctcttgctctggagagacctgagaaggccctgatgtacacaagtgttaggtcgttcccgaatggagaaaggaaaagggaggatgtttaagagcgaacccaagatccagacattgtatgactacgtggattcacttggactcttagatacagaagagtacagcttaatcacaaacttcccaaggacagtgtatgggagagacaaagagtcaatgtcactgaaagacgcaggtttgcatcctcaggcaagtctcttcatcgagatcaactaaaattgctgattcttctgtttctttctcctttagcccctcgttaattttcagttttttctctatttgaaatatatagtttgttgcttcaatgatacattggacgagatattacatatataatatacgtacacatatattc

SEQ ID NO: 134950 - DNA, 481 bp, Arabidopsis thaliana columbia
  unsure (1)..(481): unsure at all n locations
gccntgnncaaccgngcgctcccaggatcagtcagcncccncgtccatcggacgctctcttctctntgcggcagttcaggtgttgcgatgttctgggccaaacccagngcacaagcataggctctactggacattaccaccacacgatcgntacacgataatcatcctaggggtggtgaacgttttcaaagggctaggcatattgagtcccaagaagcagtggaaaaatgcctacatcggtatcattgttgttctcgccattgtggccaccctactcgaagccttcacctggtatgtagtcattaaaagaaggaaactggaggctaaaacggctcagcatggagcatctaacggcactcggtctcagtatgcttaagattagcaatagacttgcttccttttctctttgtgcatagagacacagttatttatctgcttatctatctgttcccatatgcaatgatgattttttacattcatg

SEQ ID NO: 134951 - DNA, 481 bp, Arabidopsis thaliana columbia
  unsure (1)..(481): unsure at all n locations
aanaattatctncccgggggntcagagccatggnctgtgtcacccaatcatcaacttctcnccagatgatccntcttcttgcaagggttgtncccccgttgatgctcaagccccagggaactcagtctcgctgtcgatgattatgtaattgtgcgacaggtggctggtacaggctggtcagaaggggattncaaaggcaaagctggatggtttccgtctgcgtacgtagagaaacaagagaaagctccggcaagcaagatcgtggaatcaaactccaagcaacagtgatgccctttctttaacatatacataccaaaaagtatgtgtaagatatgattgtgtttctcttccttcttacctatcatcgtaagtaaagatatgttttcgacgagtaaatatgatcttgtaagagtaatgatttgtgtgttttcttccttttttcttatgtatcaacatgagtctaactctagactcttgaatc

SEQ ID NO: 134952 - DNA, 480 bp, Arabidopsis thaliana columbia
  unsure (1)..(480): unsure at all n locations
tccggncctgagtttngattccatcagtcaagggagtttggatccccactggattgttattgtggagacctggtggtntggtgactgatcgggagggagaacttgncttctcgaaaggtgtttacttggaaggtcttgnccgtggaatcatcgcatgttctggtcaagttttacatgagaagattataggtgctgtttatgctagttgggaatcttccagtctctgaaaaagcttatccacaatccgtagtttggtgcagcatcatcgagccaaagcaaaggaggaacaagggccattacggtttaggatgagcaagggccagtttcaatgaatgtgaatggcggagaagtaaatatagtcgaggaagcagcggtaaaagtaagaatctagtttatttacctatctaagagtaataaagctgctgcatttcacgaacccttatgttctatgatctttaatggatgatatcatttttaatc

SEQ ID NO: 134953 - DNA, 466 bp, Arabidopsis thaliana columbia
  unsure (1)..(466): unsure at all n locations
tttttcnccggggnnanccccccncananttccngnttcnaanccngggaaccaaanccngggaatggngnccctccccccttcagggacccccgnggccccgggttccagttgggtaagctgagtggggaagctttngctattccccgtctcaggaagaacccggtcaatgtactttactgtatgaccccggatgcttcaccaggcacacagtggaaaacgtctgagatcaaactctctggttcttgcgtatgcagtgtcacaatcacagcctgattgataccattgtgttgtttacatttctttttatgatccaaatccaaagagagcattgtcgtctcttttaagttgatgataacactgatttaataaagtggagagtgttttgtttgaaactgttgtagtgttgttgtgaatttctcctctgtttgtttcttgtaacatatgattgattacgttttgattt

SEQ ID NO: 134954 - DNA, 538 bp, Arabidopsis thaliana columbia
  unsure (1)..(538): unsure at all n locations
gncgttccatggaatgcctacggntntgatccgggtttcgcctgatggggatggcaagggatnccccagcagtccgnggcattggcccccatnttagccctcctcctcctccaatctgatggacaatgcatcccatggcaacaacgttatgcgcctcatttcgatcaaatgaattaccagaggatgagctctttcccacctcagcctcccattgcaacctagcggacataatctcttaaatcctcatgactttccactgccaccgccaccacctagtgacttcgaaatgagtccaaggggttttgcccctggcccgaacccgaactacccttatatgagtcgatctggcggttggattaatgactagatcagcactcattatccttgtagttgcaacattagtagtttgattgatcttttgtgtctcactctacgaaagtgtaggaagaatagaagaaatctataacttttctctgccactcacatgtgtagctagtgggccttttagctgtttaataatataaaagaaaaagaagcc

SEQ ID NO: 134955 - DNA, 510 bp, Arabidopsis thaliana columbia
  unsure (1)..(510): unsure at all n locations
aatttnccagntttccgggagcccncgnnaaagttcccccngnacccctgggnaaatntttanttttatnaacccnagaagggatcttcnaacccntnntccaacgnatctttnncccggcggtcaatcgattgaccaccattcaccttcagccgccacggtcatcgtgttcataccccagcagctcccaccgataataaccggcagctgcggcggttggggaaccagagggtagcccggagctaataaggtacagccaccagtgctgccacgttgcaaatcggaaccgaggaagtcagcgtcgaantagcgccggaagcttgtttctggaaaaataggaagcttgagccacaccctccggcaaccgtcggtgtcggcggcgccggagtagggttctagaagaaggagacgtgagtgggaataaaggaaactatttgggtgtaatagtaatttcagaatactatttgtccttgtttgtaaatttgttttgttagtcataattcattttct

SEQ ID NO: 134956 - DNA, 525 bp, Arabidopsis thaliana columbia
  unsure (1)..(525): unsure at all n locations
aacccgtttgcgacccnngttttgacccctcgttcagcntcaantattggatgggattgaatgccggccgcggcggttcggcnccgagatntcccccggngttnaccntcngcagttcatcgntcagtncagngccccggtacagtaccncgattncccggttatggatcagtctgcaattcagaacaatcccggtttagtttgcccaaaccccggtaccaaaacccagatcatctccgaccggtttgctagatacatcggtgggttcccacacatgcaggccgcgactcagatgcagccgatggagatgttgagatttagttcaccggcgggacagcaaagtcaacaaccgtcgtctgtgccgacgaagaccaccgacggttctcgtttggaccactaggttggtgagccacttttttacttccttatttttggtatgtttcttttttatatctatctttctgaacatacttaaaacgttcaaggatgtattattatagagtaaacgtgcaacttcattacgtt

SEQ ID NO: 134957 - DNA, 475 bp, Arabidopsis thaliana columbia
  unsure (1)..(475): unsure at all n locations
ccnaaaccnnanaaanttcccggnatttttgggccttttnttccagggggttgagaaaatcttgnccttaccggnatntccgggggnattgggccaanaccccccgnaaagntnccatggccgggaacctgnanttccccaaggcttgataggcttgggggagatcccagggaantgccccagaaactggggcaaagaagcagcggaccagcttctagggtttgattcggacaaggcggcgcctcttgtggctcttgctagctacatttcctgcagacacaactgatattttgcatgaactgaacatatcctcaaagcatctaatgtcctgacaagtccattcttagttttatttttcaaaaataaaaataaggtccattagatcgatccatggtcttctttcatatgaatctttgtcttgtgatcatcactttgtgttctcagcttgcattttagtattacgtttttgaatttt

SEQ ID NO: 134958 - DNA, 523 bp, Arabidopsis thaliana columbia
  unsure (1)..(523): unsure at all n locations
cgggggggggttnttccaacctgggggnnccccagccttggnccgggaacccccattgaccngggcccaggagccncccgaccgctttaggccnttaggaaaagttngggtttaangcaacccccatcccaaattttntcatgagggccctccccccaaggttgaccttaggaagccctcttccaactcgngcaaagtcgcccaaaactagggccggaggacccccgaaagaaggaaccagagcaaaaggagcttcgaggcggcatgaaactcgaaagactctagtgatctctaaagaagaccatgatgatgaaaccacacggaatgctgaccagataaaccataaagaaatgaaccgaaatttggaaccagagactgcttttgcctgctaaagagtctttttggtcagaacaaactgagagttatgtttttgttgtaagaatgtgtgggatgcttgtgtttttaacttatgatttgaagtgtaaatgtgtgtaatttaaatgttgtttatttcgtgtttatg

SEQ ID NO: 134959 - DNA, 377 bp, Arabidopsis thaliana columbia
  unsure (1)..(377): unsure at all n locations
ccgaggatananggtcccncccccngtgacccccnnnttgncccccccccgggnttcncccccccnggggccccccccnatttaagggnttcntncccttttccagtataggatttattattattttgaaaagaaaatttgcttataaatgattcatttgttagatacatatagtgaaatattcctagggtttagctatagaagatgaaaaagaaaaagagtgtgattaattcttgagtgttgagaataagcaataggagtaattttcttcagcacttgtcttgtgtgctgtttaaattgctctgtttctcttctattctgatgtaaaatgcaaattgttacctttatcctatcaaataaagtataattcttttctc

SEQ ID NO: 134960 - DNA, 504 bp, Arabidopsis thaliana columbia
  unsure (1)..(504): unsure at all n locations
cccattcccccgncnttgnngaagggttcccngttcgggccgntttgggggttccccaacccccccgggtcatnaacccccggggntcccctnacccatgggtggcttcggtgacccggggngtntcctgggntttgganccaacccctcnccaggnttntaccattaattctgcctggagagctttggaactggcaatgtcatgcgcgtatcccttcttccctcaaaacgncccatcccatgtctcaggttatacncgagctgaaagagtgtattgcgtgtgaaaacncagggataagtaagaatcgaagcttggaatatcaagaaatgaacgttagcttggacactacggcggttcccatggcaagatagttctgaatgttttctactaataaggaatcaatactcaactagttacncatttagcaagatttgtaaacttgttaaagtaatgattgaagtgtgtaattgtgtatacgtcttgtagataaactcgaagtcgac

SEQ ID NO: 134961 - DNA, 257 bp, Arabidopsis thaliana columbia
  unsure (1)..(257): unsure at all n locations
gatagtgaagangaaggtgaagagggtngtgaagaagatggggaagacatggatgaggattttgaagattgaaaagagttaaaatagngtancnctgttttcncatgagacttgagtgttgttcatcaaattttgtnccttggatctctgagtagcgttgcatctattgtctgattaaactatgngcncaattacaaagccttttgtactattaaactatatgtcttcccggaattcgtatgatgnccgaattattt

SEQ ID NO: 134962 - DNA, 400 bp, Arabidopsis thaliana columbia
  unsure (1)..(400): unsure at all n locations
aacnngcccnnccccngnttttaccgntgggcccnttaaaancttccccncccgggatgcccatttncatggccccccggngaccctntagctacccgnntcatggggtccaatgcnccaaggtagcatcaaacttcagatcaagtgcttcacggcggctttgccttggtgcgccgtaatgtcggtcgtcgccgtgtgggcttaaacactctttcaacataatcaataaattatttgatttattattcaaggcgacaaatactttcgcctttgtatatttgagtttttgtttttaagtttgattcatttattagtttgtatagtgcatgtaagcgtttgaaagaaatttctttttatgacattgtaaatttatttttatgaatgcgatgtttactttctt

SEQ ID NO: 134963 - DNA, 518 bp, Arabidopsis thaliana columbia
  unsure (1)..(518): unsure at all n locations
ccccnttggctgtggagggaggggcctncccctgancttgggagaggttatncaccncaggtagcccgggaggtggaaggggttgccaccaaaggaggtttggaaactgtccccttggccnctctagntcaactacatggntccctaggatcactgttgcgtggtgccaaccgacatgatgtcccccattgagaagatatttaaccaagtctcttctggctaagttcgcttgggcaatggatgttgatccctgagttcagattctgttcaagtaccgatgaataaatacatgttcgttgaggccagtttcacctaactaccattcaccatacatttacagagatatagagagaaagagttaaaaagagaagaagaatgatagcaagaccctgtaaaagaggtttcttctctcttattagtaaaccaaagactaatctatggatgttttatagaaaaacagttacaattttttactccaataaataaataattcaggttaataatattaagaattatac

SEQ ID NO: 134964 - DNA, 509 bp, Arabidopsis thaliana columbia
  unsure (1)..(509): unsure at all n locations
ctttagggncnggcttcgcntttcccgtccctgtttcccggccgggctanacctttggcccccgttttnnccttggnccgctnccttatggcttntccattcaangccctntggttccacngctcagtgcgtcgngcatccatgagngnctggagctattcttgcccagaccggctatatcgatggcttcccaagcaatttcagncccaaaaacccatctgattctacatcagcaacaacaaccagcgaagcgaaatggtatcactcaagaccgaggaccagcaatgacactaactttcaactaatacattggaccgataacaagaaggcgacgatgataatagcgtttggatggagagattgatatggtgaaggggggtgcacaacaggttgtcaatgtatatgaaacattctttgggaacacgaacttaacaatttatttatttttgtatgaatttttttattgtgaggtcttctgatcttgatttgaaattaacgaacttggagtt

SEQ ID NO: 134965 - DNA, 514 bp, Arabidopsis thaliana columbia
  unsure (1)..(514): unsure at all n locations
cctaatcttgtctntntctccgtccncggggggcttntttcaggactgcaaattcnccccnctgggttggccccgtcctgcnntcngaggtctntttttggagatccgttattaatgggngctgattnttncgngactgctncggaaaagngcntcttaagcgcgaaggaagtgtncccataggtattgggaaaaactcgcacatcaaaggggccatcatcgacaaaaacgcacgtatcggtgacaatgtcaagatcataaacagcgacaacgtgcaagaggcagcgagagagactgatggatatttcataaagagcggaattgtaacggttatcaaagacgccttaatcccaaccggcactgtcatctgaagtacacataatgctcctttgtttatttcttcatctttctaatgccctatcaataagttttctttatggctttttaagccccaataaatctactactagttgtaatgctgcttacgaaagagattacgaaatcatgttttcac

SEQ ID NO: 134966 - DNA, 509 bp, Arabidopsis thaliana columbia
  unsure (1)..(509): unsure at all n locations
gnggtanccccccgacnggacccggatntggagatggggtttcctgggaaccccggttgtccaggttctctgagtctncaggggtggaggaggatggagggagggcccttgcggcatcaccagcgagagctagctattgcattggggctgatcagtncaaagcctgggactaaacttacaatcgtgaagaatctaagggtatgcagaaattgtcatgaggctacaaagcttatatcaaagatttacaaaagggagattattgctagagacagaactcggtttcatcattttagagatggtgtttgttcctgcaatgactactggtagccatcatttcagaggatcttgttaccaatgatgttggtcaagaactgtaatatgactttctttgtgtggtagctgtaaattacaagaagattagtcaagcaagtaaattgcatataaggtgtaactgattcattgatgtaagggtatacatgtaaagaaagacttttcacttttcaaataac

SEQ ID NO: 134967 - DNA, 515 bp, Arabidopsis thaliana columbia
  unsure (1)..(515): unsure at all n locations
tgcgaccgtcagggttaggntcccgggaccccccggtcccccggggntncatanggncgcggttctcgncgtctgttntggccgccggnntgatccgcntcttcgtcntcccgccggaaaaccnccgtttcagttggatcttaatttcccccccgttggatggcgttgacttattcgctggcgggatagatgatctccactgtaccgatctacgtctctgatttgctgctttacaaaaaaaatccgttgattacacacaaaaaaaattctcaaattttacaaaatgataactttatgctcttttgtttttccattttcctttgatatcatattgaaagagaaaaaaaggaagaacaaaaaaaaaagattgagcgtgatgattttatcatcaacgaagatgatgacgattaaaaagagagagagattgtgttaagatctgttactgtaagaaccagatctgggtttcatttttatctgtttcttcttataaaagatccaacaaccctttgttacat

SEQ ID NO: 134968 - DNA, 487 bp, Arabidopsis thaliana columbia
  unsure (1)..(487): unsure at all n locations
anancatggaacnggggcttaggagtgccccngagttcccatgttncccccaatggttggccctggtacgcattcgngctggttaattccccaggnttgccggatccacccaatatgtnccctggtatcgaaaatgtggatgtaaccgatatggtggaaggtcactcttcatatctatggaaaactcagcagattttagaaagactcgagatcgacacatattaccctgtttttcgagacactctttaaccaaaatcaaattagataagtatcacncaatatagggaaccaaactttgtcacatgtttgaattgtacncaaataaaagtcgataaacgttagacattaattaaagcaaggcttgtattttgtttgtttgttttagctgtcgtctttggtttttttttgtttaaacgttcgtcgatgccggcgaagacaagggcttctgtattgtaattatttgtatgaaacgtcacattgcaccgcc

SEQ ID NO: 134969 - DNA, 512 bp, Arabidopsis thaliana columbia
  unsure (1)..(512): unsure at all n locations
cnagtccagattcnnggnatcncaaaattcactccccggcagngatgagaccgggngancctgggggnctccctgttccacttgngcgtcagngctcaatatcnccggacccagcaaacaagncgctcaaattaggcctttaatggaaccactaacaaccccacatcatcatcctccatggttgtctcagtgttacttgatccaagagaggtcgttgactctgaaaccgacagagtggttcccccaaacccaaaatcactttcccggatctttgtggtggtgcttcttgacagtgtcaagtacgttacctactcatgcgttcttcctcgatcgggtctccatctcgtagccacctgatttgagctactcagatcttgaccttaagtaggcgaacattgacttgtttatacatacagaccttgttgactttttttccctgtgttgtataactcttatgttctaaggttttggattttaattttgagataagcataaagtggaatccttgtttt

SEQ ID NO: 134970 - DNA, 503 bp, Arabidopsis thaliana columbia
  unsure (1)..(503): unsure at all n locations
caggtgggatgagaattccagncggacctcagcctcnccgtnctgtgcggccgttcgatcccattccggatgatnggagancncncttttcncagaaggngangangaagagagattgggacaagcaagtagaggcaagaattatgttgaagaagagaagagncagttgagagagagtggtgtttactctggttttgactcttaagagactcaactttgaggtaatgtctttgtatttgatggtaattttatatgaatgtgaagaaactagagcttgaattctcttagtgtcacaaatttgtatggagaataatcagttgcttagcattgtttactcgttctgattcctgaagatctcagctttgaaatgtatcttagtgttcctgaagatctcagctttgaaatgtatcttagtgttcctgatctcagctttgaaatgtatcttagtatatgatgataatttgatatgaatacgaagaatcatggtcttgattttcatggag

SEQ ID NO: 134971 - DNA, 522 bp, Arabidopsis thaliana columbia
  unsure (1)..(522): unsure at all n locations
cccttcaagccttttcccctgnttccggccccanngccccnttggggaanaccggttcccggatcccggtttccccnttaaggggccnttaccccnaaggggtggctaancaccccggaggttcccttaaaggggggagggacccttgnggatttggattgccaaaggttcaggcagtttttggggtatgataattggncatccccgatgggattnggcccctattggaccccagatggttncggtgantcnccattntggangaaggttccagcagaaggtgccaatggtgaaggaagcagtgattagggagaggagaaaaccagcaggggcttccgttccacttcgatgtcaatgtatctaaataatgcaaccaatccaaaagatagaaagtgttcctttgattttgttggtcttttcttttgtacttgtttcgtttacgaacattgttatggccactttaaaatccatgttccttagggttcacagaaaatattgaaccatgtaagaggtttcattatc

SEQ ID NO: 134972 - DNA, 504 bp, Arabidopsis thaliana columbia
  unsure (1)..(504): unsure at all n locations
ananccgncnnctccgnnnaanccggggntttcnccgngggattgcatgcgaaatgcggnttgngggnatcagggatctgattcggaggattgcttggtggnctcacaagagcgttgtctaaangggagtgtcgtgcagtgcatgcttgcacgctacccggagctatcctctcaccgacgtgatctcctttgagagcaacaacgtggttcacgcatcaccagattcggatgttcgtgatgccctgaagaaattagagcttctcaaggnctgaaacctaaaataaaacgatcacatctccngtcatcaatgggttggtaccaaatgcgaactatctttttcatattgaccacatggtttggtttgttttattacttcgtcgtacataagctgccggaaatacctaactcttcatatggttgtctctttgacacctaccggattttacttcatttatgcaaagtattgtaataataaaaagaaaaagaggatattcccggtatttt

SEQ ID NO: 134973 - DNA, 488 bp, Arabidopsis thaliana columbia
  unsure (1)..(488): unsure at all n locations
tggtttttccccaaaccncctaaagtttgnccagcgcccagattttngncgccggngggacncacggcatgtgttcaacgtcatggccccatggagaatcagttcccgggccaccctgtctcttacatcgctccaagttcttacggccactcacatgcattgtggatacatttaatgagttncgcggataaaatgataatttcgttggcgtatgatcctaccgtcatatcagnccctcacaagatttgtgatgatatggaagaatcactgaaagcaatgaaagcttctctctgtgaaagaggtttactctaaggcgcatgagccatattaactgtaatccttaagactgtgtatatgtttttgtttggtaaaaaatgttgtgttttagcagttttcaatgcttttgtagtatctataaatattggagtcagaaaaaaatgtaataagagtcggtccactgtgttggaaattagtaggtacgtattgtc

SEQ ID NO: 134974 - DNA, 475 bp, Arabidopsis thaliana columbia
  unsure (1)..(475): unsure at all n locations
atcctntggctcgtcgncctaagtgggggtttcttcctgagggcccaaggttcagtctttcacaatgccacgctcccgtgtncngtagcactggncggtgccctatatggcggactgctgaaccagttctctacttcctgggaaaggaacccaccaagtaaccaggcgatacaatcaagagcttagctgaattaatcaaaagcgagacgaagaaggttgagtcaggcgcagagccattcataaatagtactctacgttacatcgagtttcagagacagcaagaagatggtggcatgaatgagaaatacgagaaaatcaaaatggaatggtttgaatgaatttatttcttgcattctgttaggcaaatcatcaataatcaatggcttctcgtcttgttgcagaagcatgaagagtaatcttgagaaataaaacttgtatcattacttttcatttcctagttacactctctaccaat

SEQ ID NO: 134975 - DNA, 491 bp, Arabidopsis thaliana columbia
  unsure (1)..(491): unsure at all n locations
ccnccgaaatgagttgcgttgccgncgnggattncatcatcccagctntgctggcnttccacatgaggaactgactttgggtctattcagnactgctctctattgaagnacaagagaaaatcataggatgcatgctcgggagaataagtggggaaatattgcaggatatgattccttggttaatggaatctttaacctctgatgaacagcttgccgcgatgtccttgtggcgccaagcaacaaggaaaacaatgtttgtcgaatggctaacagaatggtataacggtcatgttttacaagaggaagcaggagaagcaaacaacgatccatttggggattcagatccactagagattgtctggaagtatctctttgaagcatctgctgatggggaaaaagggagcatgcgcagcagccttctcaaactcccgaagacgaattttacaggtattatgaatcagcctcctcctaattacaaggttgaagttggc

SEQ ID NO: 134976 - DNA, 476 bp, Arabidopsis thaliana columbia
  unsure (1)..(476): unsure at all n locations
ccccancncagaaatcagaagacccccggattcnctggtagtccnctggncgagttgagaagccantgaggaagtncttgatgtgctggtttgctcacgactctaagctacggtgagctttttgaagacatgaaccaaaaggcattaaccaggagcaggaatgggagaagaagaggtcttgcagaggattgaagaaaggaatatggcccggaagagcaaagatttcaggagaagcgatcggattcgagagctgttggcatttaaaggaatcttcctcgaggatgttcctggagacactgtgtggagaccttccaccccattgaccaagcctaaatctggtttaggtttttgctatcgtttttactttcttaggcttcttcttctatagccgttgaactctttatttatttcactatttgtttagattgtgttgtattagtgtgtggtaaacttattaactttaaacattgacctgc

SEQ ID NO: 134977 - DNA, 392 bp, Arabidopsis thaliana columbia
  unsure (1)..(392): unsure at all n locations
tgcaggtaccggtccggaattcccgggtcgaccccacgcgtccgctccactggttccgtaanggaaccaactcaaagggcaggcaaacctttgtgaaaagcttagagccatttgtgaattggcttgaagaagcggaggaggaagagtgagtgagtgatctatgtttctaataaacaagccatgaagacgataataattcagggtttcttctatgtttcactttcacttttgcttatgagctttactctgctttgtattttggcaataagtatttgatattgttgtgtttcttttttttctctttttggttttgatgactgtctctgtttcccagcaacggttttggattctattgcaaacggatttaggctaatgcaaattcggctttattt

SEQ ID NO: 134978 - DNA, 511 bp, Arabidopsis thaliana columbia
  unsure (1)..(511): unsure at all n locations
tngcccgaccggganacccgggggacccccccgaattgcccccngcccaaanacnccggccccntctgaaccccctnaccggcccttccccccngatcaacccccctaagnntcccgtcccctaaatccgnccgtgcaccccccgcgcgaacttatcgaagaagagcctnatggtgttgcctccgaatgctgtgncgagtgatggatgatgggattaagattcttgagctttattctaaagagattagtaagaggatgcttgaatctgttaaggctagatctaatgctagtgttggaaatggaagtgtggaggatgctaatactgatgctagtgaggtttctaaagatgatgctggtcctggttcagaggaggagaagagtgaggcttgagaaatttggttttacttccttattataatctgttgtctcttagggttttgctgttcttgtaatgatgatgatgacttgtggatttggtattatgcatatttgaagatgtttcttcttcctt

SEQ ID NO: 134979 - DNA, 465 bp, Arabidopsis thaliana columbia
  unsure (1)..(465): unsure at all n locations
cnnggggtacctncanaaccttggnancttcttcncaaggnnaaaaccntntggtgcccccgcgtcanatgcttcaggctcagaacatgcagttnccttaccccctgaccgcattcccaaaggtgaggagatcaatgtnccgcattangcatgtgctgnccgagaganccgattgaagacccagattctagaagatcagccgagatgaagagaatggtaaatggtatgtgatcccattggctcttgttttggcaacctagcagtaagcacgagtcaatccgcagaggtgttgagtttttcggagtaagaaataacgcatagctttcaagactttggaactggtccaatgattgtgactgtagtagtgtcggcagtagaaaaacgtttggttggtatctgtacgcacatttctgtaacttatggttgatgtttctttttgagacacatgttggtcagtgttgattc

SEQ ID NO: 134980 - DNA, 425 bp, Arabidopsis thaliana columbia
  unsure (1)..(425): unsure at all n locations
cccngatnattntncgnaccgtgggatcccggacccagttttggggtnccaagngaaccgtcgaacncgtcttttccggaggaaattcgntncccaggttcgcaacnccantgctgatcaaccgncctcgaatgaagggncgattcgtgagaaggccccaatgagagcactccaagtggacaaagataacaaggataaaagagcctagatttatcttatctttttttttttatcttttgtttatnccttgttttatttttgtttctaaaattttggcnccctccttttttgtttcttttaagttatggtcccttttggtttataatttagattttttgatgagggggagatttgattgagaaagtgagggatcaaaactaataaaagtttttgttattaatagaagaaacagagctcttgagatt

SEQ ID NO: 134981 - DNA, 515 bp, Arabidopsis thaliana columbia
  unsure (1)..(515): unsure at all n locations
aaanaanccggcaaccgtaccggtaaanccggtttgcgttcagctttcagacaancgctcaaagctttcancccgtgacccnccgcnacngaaccccccgcatcggganccgactcngcggagctgatgagaacccgttattcgncggcggagacccgntgtncccggtttgggtgggatgacncgtttcgcatctggtagaagacccggatttgttgggtggtggaggatgttgacgcggcggatgacaagtgtaatacatgtggggtccagttatatagtgttttaagtcccagggggaaagtagaagaaatagtactttagttgtcttgtctgatttttttgagtggaactcgttttgaaaagtcgttggtgatgacgtggcagctgatcaacgtttttattcagaaagaaacacggcaacgcgaaagcggtgatttcacacccaccgcactgtttttgtattcttctagtttccgttgtaaatagttcagtttaaatgttattatatctgt

SEQ ID NO: 134982 - DNA, 519 bp, Arabidopsis thaliana columbia
  unsure (1)..(519): unsure at all n locations
atncctgcgcttagcccnaccctanttntctcngagtctggaggtcctcactacgngtccnagggtccttcnggaaccccntgggctcagtatgttaaggtcccatggtgctttaggatatgaggatagctncgacatatttgtgaaagcccatggaggcggtctctcaggtcaagctcaagcaattaccttgggagtcgcacgtgcactcctgaaggtaagtgcagaccacagatcgcctttgaagaaggaaggtttgctcactagagatgcgagagtggttgaaagaaagaaggccgggctcaagaaggcgcgtaaagccccacaattctccaagcgttaagagttttatatatcattgaatcaactcttcaagtagactcctctgcctccatttttttttaaaacttttcttgtctattatcggtcttttgtttcatgttaatgtttatgtgtagacgaactaatacaatctctgttttgtttgaatggaacgcaaagttgatatgcttttgtaac

SEQ ID NO: 134983 - DNA, 516 bp, Arabidopsis thaliana columbia
  unsure (1)..(516): unsure at all n locations
angttttncaagcagccccgtccgntnatcgccggattgcccnatgtcccacggtncncaactggacacatggcttntccaggaattcagaaggtgttagggattgtgggtcaagagcttttgtggaagcagtgcctgaaatgggatccgaggacttctcatactttgcagaaacaatcccgggccatttctccctcttgggaatgcaagatgagacccaaggttatgcgtcgtctcattcaccacactatagaatcaacgaggatgttcttccttacggagctgctatccatgcaacgatggcagtacagtacctcaaagataaggcttctaaaggttctgtctcaggctttcatgacgaactctaatccctgtcaaccttggtacagtttcctcatcggtcattggttcgaattcagaagtaccaaatttacactccattgttgatagaattccatttaaatgatgaaaagccttaattcgtagaacaatttcaattggcaaattctcaacttt

SEQ ID NO: 134984 - DNA, 504 bp, Arabidopsis thaliana columbia
  unsure (1)..(504): unsure at all n locations
atnncngcgttcactgctcctacctgattgcgngtgnaagcctcccnngaaccaatgcatgtgccggtactactatcaccctcatccggngtgtattgcgctccacacttgatcaccaccaagttactgaacagggaccatgaaaaangcagaggactcaaagcctgtggccatacctgccaccagctagatcaggttttctcgtgacttactgtagtcatcattgcccgcgatgaaggcagctattgtgtgttctcttccccaaaacaaaggtcaagtcagggtgggggaacgaacgagtttagtttgatatcgacattgttgatttctctcagttgttctgattcagaatgtatcaaagagtcttttttcattttatctttcaagttcgttaggcttaggcctctttttgagggggttttaagatacaaaagttcacgtcaatgtgtcgaaatctcttcagagatggtcttaacctattgaaattaagatattttttttcac

SEQ ID NO: 134985 - DNA, 511 bp, Arabidopsis thaliana columbia
  unsure (1)..(511): unsure at all n locations
cccttagnaccccntgagacacccaccattcaggggacttgcccttccnagcaatgtnntncccagcttttctttttccaggcncatcacttcatcaggcgatacncgggctagatatgtaancnctgtggagaaaatgggaaggaaccncaggcccaagttgttgacccaggtgagtctacatgtgaatcaaaaatctttacctaggcttctttatttttttgatgtggttagtttatttcgaggttcaggctggtttagagtcatcatcagtcatcagtatagttggtctaagagttgaatttggagaatgcttattgatatcgacaccgtggttagctaacgatgttcctaacgtagatgttcaatcaaaccaatcaagttcttgattcacctgattccctgaagtctttggtcttcctacacttctctatttgttctatatataatatacgaattagtattataacatttggtaatcatatgaccatagtaaaaggttgtttggccg

SEQ ID NO: 134986 - DNA, 491 bp, Arabidopsis thaliana columbia
  unsure (1)..(491): unsure at all n locations
acccagctacctattgccgttccnaagatcgccggncncagnttgtgtgtccaagtcttgtgaagtgaatctgnccggtggacccaacttgccccagacagagactgaggaggctgaaccagatntttgagncgtggaaaaaggattatggagggagattgcgggaaacgaaactgatactgagcaagctcgggagcgaagagagcagtggttcgatggagaaagtgaagaggaagtggtggggaaggagaaatagcnccaggtattgatgaaggagaagactattcttacaggcaaacttaggtcgtttgctaattaaggatttggcgggttttatctggtaaaagtagttaaatgatgttcttgagacaacctcgtatttgcctctcaatgttaaggattctgtgattatacaaacaaaaacaaatcttaatttaagtttgtaaattttgtttttctttaatataacaaaagtcacgatttggcgagtt

SEQ ID NO: 134987 - DNA, 491 bp, Arabidopsis thaliana columbia
  unsure (1)..(491): unsure at all n locations
tttcccagctncacccctcccgtnccactggcttggcgttaccancccggatggtcattcggcncacaacggatcttttcgatagatntcancgacttgccctgaagagaactnttnttggaaggaccagaantgggaatcgtctgagtncggatatgtcgtcgtcaaatggaaactcagggaatgtatcggcttcttggggaatggtgattgtcactgcnggtctcagaggagagatacgaacgtttcagaactttggtttgcccattcggatttgataaaaactgtacagagtggtgaagaaaaatcgagtgaggtttgtattattgttagctgagcttttttttgttcctattcttctttgttacagatttgtttccaggaaaatggagagaaaaaaagagagaaagaaactatacagatcattgtagngttacagacacacgaacagagagatatgtttattgattggaaatagaaagagagaaacc

SEQ ID NO: 134988 - DNA, 502 bp, Arabidopsis thaliana columbia
  unsure (1)..(502): unsure at all n locations
aggggancatgngctacttgattgcgtgtacccaccctntntactgctgattctggggngngatanccggcccgctctgatgatccncatggctcgagatatcatcatggcgatgcgaataggancatgaccctaatgatagtgaaggaagccaacaacgttgatgcttctctgctttctgaagagcttcttgcttttgagaaccagaccgaatatttctcgcagatgccttttacggagggaaactgtgattcctcaacgtctctgagtagtctctttgatggaggcaatgacatgggtctatggtcctgaacggttctattgtacaaatgacatgagtgttttaaatgagttcttcttcgacttgtctgtttgctatttattcttcaaaccttagccngtgtcaaacaaaaacggccactacgactattgttttgaagattgcgatattttaagttgtaagaatgtagagaataatgtttgggaagaacaaagctcgatt

SEQ ID NO: 134989 - DNA, 489 bp, Arabidopsis thaliana columbia
  unsure (1)..(489): unsure at all n locations
anttacngncagcctcngccaagcatccgtntgnctggaccaggttgcgtantgggggncattnggtggccctgataggaagcagctgctggtngcttcaantggtacatnccctatttcgngnctcagcaaaagntgacttcaatgtcgatgaggcattcttacccattgccaaaaaccgcccttgctaacgaacatgaacaggatatatacttccaaggcataccagatgcagtgactgaaaacgagccaaaaggcggtggttgcgcttgctgaaccacagatttgaggattcaatgacattcgtttttttgatgcattcatttgaaggttggtgtactcttgagttgcagaacgataagcttgtagaagcaattttttgtcattccatcatatattaattgattggagaagtctgtgtatgatcaatcgattctgctggatacaaattttatttttgtaagaagaaccattattgctcttaatccc

SEQ ID NO: 134990 - DNA, 495 bp, Arabidopsis thaliana columbia
  unsure (1)..(495): unsure at all n locations
cggggtctngttcaggcccgttnttcacttaggcgaggaattagnacttggganccatgatgaancattncnctgcagtgcctttacgngtcattcccccgagctagaggacttgtccaagttngcagggagaatgngcacttggagcaagactgnccggagctggatggncggttgcgctgtggccttggtcaaggaatttgacgttactcaattcattccagcagtcaaggagaagtactacaaaaagagagtagagaaaggagtggtaaaaaaagaagatatggagctttacctctttgcctccaagccttcaagtggtgctgccatcttcaacctctaaacacatctctctccctccttattaattttactcaaatccgaattgtttgcagcaattgtgcccattgaattcccagcttcatttttaataaatatttttgaataatatgtaggagttgacgacaataataaattgaagtttcattcacaact

SEQ ID NO: 134991 - DNA, 502 bp, Arabidopsis thaliana columbia
  unsure (1)..(502): unsure at all n locations
aattctgggccacnctnccatgatgccnggaaactcgtggccatgtgatggaaggntatgcnccatgggcgatgccctgctcagcnctgacattttggcctgaagagctcggtctctttacaatttccagattacagctttgcctattgggtcatttgtgtcctcaggtgtgatcgctagtaacatctatgactactacgccagaaagcaagccggacccaccacagagactgagtcgctcgtctgcacgggctcggtgtgttattcagtcacgtgcagtctcatgtccatgttgtgtctaatggctatggttttgagtttgagtgtggtttataggacgaggaagttttacttgaggcttcatcaccgagtctcaaagacttgaagatagtgtaattgtgtaagcaattttcatttggtctttggaagatatatgtaagcaattttgaattccatactcaaaatctttaattggtgttcacaagtatttaaatgtaacatt

SEQ ID NO: 134992 - DNA, 523 bp, Arabidopsis thaliana columbia
  unsure (1)..(523): unsure at all n locations
tcgatcccnccggtgcctggattcccatttccccggaggncctccctnctggcncgntncnntntancntttgaccccaactcaagcctcgggnttgctcaagtctcatcattccaggatcagccaccaaccgtctacgaggccagaagaggaaagggaaaagttgaagtgncaatagcaggaggncgaattgtgtgggaaaacgaggaacttaaagttgttccaagaagtggcaagtatatagagatgcctcctttcagttaccttttcgatggtattgagaaatcagatgctaattatctatcttctcttcgagctccagttaagcgtgtcagaactgaagctacgtaaagtgcaggtatctatctgcatatcgtgattctgtaagaacaattgtacataatttgtattaaaagtattgaaagagcgattatgaataatgtgcatgtagtctggttttgagaaaaaataaaagattgtaaaatttatccgtgagttaattagtctatgttctctttatctc

SEQ ID NO: 134993 - DNA, 508 bp, Arabidopsis thaliana columbia
  unsure (1)..(508): unsure at all n locations
aggcgccggncgtcaggcttggatttggccagggcttcngggaggaccccgaaaggagaaattttggggggcccaggcaaagcttagcnccggggctctagggaagaaaggancaaaagnncgtgcccgcccgntgaaaaagtccaatgccggaaggttaagatgagtcgtggtcncctngantcaagcatangggccncactgtcatgtcgtccattggaatagctactccctttttagtcctttcgattagatattttgaactttcatgaatctctctacttgcagttgatttttacttcattacgatttcccctatagtggcnccgaggccttacttccgataatcctccgggacctctttgaatcataagatgagttttgaagttataggccttgacttctttgttcactgaagtaacatcctttattctcagttagttatgcaaaaccaagtgttccaatttcagtattaatagcaaaagtcatatgtagtagngttntaaat

SEQ ID NO: 134994 - DNA, 511 bp, Arabidopsis thaliana columbia
  unsure (1)..(511): unsure at all n locations
tggtggggtnctcccnaaagggggnnaaccgtccncatttcccccgaaggngccggggctaccttgttaccgggaacanctcgggctatctcnggctttcnactgggtgtgccagcctattccctangattctaccacttccggccctcaggnacgtcatttctctcttctgttgacagagttcttgcagaccgtgcactctttggagcattactcttctttatccggaatgaagaactcgacacccgccaagaagaatttgaagaagaggacacctaagccgaaagctgcctagtatcaatattagttttcttctggttttgccatgagcaagcaataccttgcattttccttttttcccgacaaaatctttccttagaacttttgttttctttctgttttaggattcttagattagctcatgatcttatactgtgatttgatattggggatcttgaagttttggtttgttgaaactggaaccatgcagctacagaacaatgatttcatg

SEQ ID NO: 134995 - DNA, 421 bp, Arabidopsis thaliana columbia
  unsure (1)..(421): unsure at all n locations
cncccccnngggntttccaacccnngggaanaagaaaaannncccctttggtggntncnccccaagggaccctggggggggatccnttntaaaaggaccattagtcctggaaaaacttccagctcgtggcagctgctgcagaagcagggaagaacatgaacataccagaagaggaacaagatagagtgatattacagtttgggaagataggcagagacattttcacaatggattatcggtatccgatctctgcattccaagcttttgccatttgtttaagcagcttcgacacgaagccngtctgcgaatgaagcaaaacatatcatatcaaattatattcttctatttgcatgcagtttgtgtggtttaatgtacatacttttccctcttggagcaatcaaacaatcagatcttttttttc

SEQ ID NO: 134996 - DNA, 502 bp, Arabidopsis thaliana columbia
  unsure (1)..(502): unsure at all n locations
cttcganncctggccctgctcggcttctggagttcccccgancattttgngtcccgntcctcccggaggtcccnggtttaaggcngttctggtggatgaagagctttggtccagttggccccccaggatgtgccncaaaattcttaaaggagttaatgtgttgcaccaatttgttgaagaagcagagtcaaaggagaagagtaaggaggatgaagctaagagagctcagagtatgtagccaagctgatgtcatgagaagtgtgagtaatgttagatatatagggcatgaatggtctcagttggcaaacctcagtagtttcagtgttcagattcattaacaaagagataaagagtaaacagtattttaatggagagagcactctcaaacgagcttgttggataagttgtgaataaaaatatgtgagtgtgaggaatgcactctacattgtatgagatagtagtatgaatagtcagatgctattatatctattttgttacttct

SEQ ID NO: 134997 - DNA, 496 bp, Arabidopsis thaliana columbia
  unsure (1)..(496): unsure at all n locations
atccgctgttntgtgnccgggatgntgntagtcctgtgaaccgtgaccctagtcctgatctggtctttcctaggctgctgggactntgggnatgtaaattnccggaccggntancggaaagcttgaggaaagtggangtaagtgatcccagtgctcatactctgcttgcaagtgtatatgcatctgctaatagatgggaagatgtaactaatgtgagaaggaaaatgaaagatttgggaatcagaaagtttcctggttgcagctccatcgagattgatggggttggtcatgagtttattgttggagatgatctattatcacacccaaaaatggatgagatcaactcaatgctgcatcaaacgacaaatttgatgttggatttggaacataaagaaattgatagctgaaactttcttgtacattctctaactacttcccttatcattaacatttgtttccctgctaatgaaccggttttgaatcgatgttggttttg

SEQ ID NO: 134998 - DNA, 493 bp, Arabidopsis thaliana columbia
  unsure (1)..(493): unsure at all n locations
ccccncccngaaagnttcccctgtttccggnttnncccntntgnncccccttgggggggncctttcccaatnggnnttgggngngcccccttgganggggccggggctttaaagggccccncgnagggaaggccagcctttctcccaaatggtcgatgtaccggaggaagtcactgctaccccatggggtgatctggaagtttcccaattcaatggaaagtactcggaacatcgtgcagctgcggataactctgaagataacaccgaccctaagtcgatccaattcaacccatggcaattccaagatctgtctacttaaatgtatcgctccaaaagacagaaaagatcaaatctttttggaaacaaatgtattcttattctctcgtagttacaaaaaactttgttctacatctgctagctttcccattgctttctctagtattagtgtacaacttctactgttttgtcttaaattcattcaaatctttctttg

SEQ ID NO: 134999 - DNA, 498 bp, Arabidopsis thaliana columbia
  unsure (1)..(498): unsure at all n locations
tnccctttggcccccggnttccctttgtcnccgcccnttttttggnatttggcggntnccattnccccgggnacccctttgcccnttttccccaagcntttttcngctccctttgggnaactggttcccctccaggtcccggtccggatttcccgggtcgccccacgcgtccggggaaacccctccttctttggnacaattctgtcaatctccagcggcggcaaaaccaacactgtcaaatgcaccaactgcggaaccncgatggtgtatgactcgggttctaggttgatcncattgccagaaggaagccaagcttaaaccctgtgagctagatgaagatgggaaaagaagaatgggttttgtcagaagcaaaatagattcgaagttaaatgtatatgtaagatcttccatgttagctctctctccttcacatgttttctgatttgtaagtattgtgtgtaagcaataagagatatataatatgagcacttnttcatc

SEQ ID NO: 135000 - DNA, 507 bp, Arabidopsis thaliana columbia
  unsure (1)..(507): unsure at all n locations
aagcggcaccccngggnttcaattggggntttccgcccctaagggatggcccctgggcnatgccccccttttggcttnccttcttgggaccccnctggccnggaggggaccctgggtttnttccaagtttggagctaacttgnccaaaggggcaaagatccttagtagcttgttccatccgcgggtaccaatgaagccgaccaccaaaatcttccccgaaggcccaacaatcgaggtctctcatagctgcttatcttctggtccttaacggctataagaacgtatttcacctagaaggtggaatctacacatggggcaaggaaggtcttcctgttgaaacaattgaagaagactaaccaacttctttactctagagttgtccagttttgtatatctgtccatttcagttagttgcatttagagatttggcttttcagagagtgttttgaggtttgtaaaacttcagactttaccatgaaatccagcaaactcgaccggaatccagag

SEQ ID NO: 135001 - DNA, 498 bp, Arabidopsis thaliana columbia
  unsure (1)..(498): unsure at all n locations
ttntggccttcctgggctactngccgctaccatgggctggaaccccgctgggacgagcttnttgnnccactgaagcccagccaccgggaaaccngngacctgatccncgngtngataggaccactctgtatcaggtagcaaaactgtgcagcatcaactgttaaatgcaagtccgataaccgatcctgtcgcggctagctgnccgtggccgcaacaatgagaacccgatatttcttcctttgggttgtgattgtaacttaaaaggagactttttgtttttattcttagatttgtagctctctgcatagtgagcagaaattgatgtaatatggtttaagagattcggtgttctctggtgtgtgctgcaaccacataattggtgatagataggtttagttatataagcaaatgtattagagataaggggagacatatttgatggtctttcgtttcgtaaacacacttttcttatgtgatatataaaagaagatttatcac

SEQ ID NO: 135002 - DNA, 476 bp, Arabidopsis thaliana columbia
  unsure (1)..(476): unsure at all n locations
cngggctaagnctgaccccttcacttnggncggctttagttnccctggnatggtcagncnaagcttgngaatcttgcncttcttggcncggntcnccattggatcgatgtccnctggaacccgctgctaagggggatgatgattcattccactcagacccttcccctgagttgtttgccncaataaaagcgagttncgaaaaatcaagaaagggttncgaaacagcagatgtatccatttcccttgaaaaaatngctacaaagctagaatttgaagacttggaaacagtaacttttgaagacattgctttggagattctgaaagaaatagagaagttgacaagagtgaagaaaatgatggaagaagcttctcgacctttctaggtcgattttacactctcacnccttgtatatcatctcgacattaatgtagcttttcgcataaaattagtgttttcggctttttttttatttcat

SEQ ID NO: 135003 - DNA, 497 bp, Arabidopsis thaliana columbia
  unsure (1)..(497): unsure at all n locations
antttgggnccccgccagtccgtanctgcaaggcgtgttttctaggacagngtncatcntcncgntccggnacctgannnccccgtgttcatctgntgtgacatcatcnccnccgacacagntccagtagncgcaagcacgaggactcttcagacgttgagcatggtcatcgtcacaagtctagtaaacgtataaaggaaagatgagaanacagtggaagaggagactgtttcaaagtcagatcagtctgatcttaaagcatctcctggagataacatcccgtatctgcaaaatgaaccatctcaagtttcggatgagctaagagccaaaatccgtgccatgttagctgataccttgggagatggtcggtgagcatctgaagcataaaggtcaccgatgttgcctacgagaagaagagttgtaatattaaattttaatgtattttgcaaactatttacgaaattactctgaaaaagaccttttaaagaaaccttttt

SEQ ID NO: 135004 - DNA, 426 bp, Arabidopsis thaliana columbia
  unsure (1)..(426): unsure at all n locations
tccccnnaagggggccntggagncctttgggnggggnggatccccccttaggggnaangaggggnncccncccagggaatttanccccctgaaggaaaaactntccgtgtgtttcagnngatctcaaggaacttggggaaggnatcccaaagngaaagaaccgaagctcgaaacagctgaagcccatgtcacagctctccaaaagcagtcttcagagctattgttggagtatgacagattgctagaagacaaccaaaatctccaaagccagattttggttggaaccaagaaaacctgaagtgatttaagattcttaagagctctttgatagagttttagagtgttttgtgaacgaatgcggaaatggtaagtggcaaccaaggaattcttgtactcgttttttttttgcgctcttggttcctaccc

SEQ ID NO: 135005 - DNA, 520 bp, Arabidopsis thaliana columbia
  unsure (1)..(520): unsure at all n locations
aagaancccgccccccccccctttttcnaagaatgggggcccccnccccattggaaccccttnccttgcccccngngcccntnnaacccggggcnaacccggtgcnccccggnggggtttnccncttttgngaaggatntccctggaagcttaacccccaatgcttggtgaccagaaaggtggagcatttctggggaataaagccggaaatccaggagccccggaaactcggatacaccaccaaagagaccaaagccttgaaggacacttttagataatcaaaaggtcttgcttgcgtctttgtttcacattgatttgtctctggtaaactctttttcaggatttgttagtctttagaagaagacatagctcgctcattatatagattcatgctgctgagactgatgatattttgatgaagttgccaaaaccggtatgggtttggtttcagttctgtaatcaaaccggtttttctttctttctttaaaaaatgttaatgcaatttacctctttccatctt

SEQ ID NO: 135006 - DNA, 502 bp, Arabidopsis thaliana columbia
  unsure (1)..(502): unsure at all n locations
ggnttttcccccgggtnttccnggggantncccccctttnnaaattttggncaacgnccccgnggganccccccagggggancccntttgggccctggnanccgggnaggccaaatncccccngtntanaggttttcccccaggtgtccccatcaacttggcaacaaccccggttatcatggcttaggaccgggatggaccaaggccggaaacatcagtgaccggatcataatcggacacaaatctgttacaggcaactgccggaataggagtcgcagcggcagctgcagcagctgctcctggtggttctgctcaccggaaagttggagctgttcggtacggtatgtcaaagatgtactagttctccacctaagctgggctttcatcacacagaacattgtatgtttccatcttcatgtcataaaagaaaattgtctatgacacaaaaccatatgagcaaaaaatattttttttattaattgtgatccatcatttgtttgtt

SEQ ID NO: 135007 - DNA, 514 bp, Arabidopsis thaliana columbia
  unsure (1)..(514): unsure at all n locations
aggttcccccccgggggncccnttttccgcggattccccgggcctttaaaaccccggttnttccgaacccctggnaaaccctttggattcccggnccnggnggttccnaggggntccaggtccaattgccgggccnttccgccggaaaggaattgccccgtgttgantggctccggggaaggccagagtcccttnccaaaccaattgaagctaaaattggattattgtncctataccagttcgaactatttatggggttttaggaataaaaatttggatattcgtagacgaagaataaaaaaactttctttatctttatattttatccgacgataaaaaaaacgaaaattatataacacgatacagacagtaataaaaaattgcagtcttcttttttatgtttaaaaataaaataagcaattctataagattgaataaaaatttccatcaaaactcctttgatataattgctatgcttagtgtgtgactcgttggtttaggattagataaagat

SEQ ID NO: 135008 - DNA, 503 bp, Arabidopsis thaliana columbia
  unsure (1)..(503): unsure at all n locations
ccccntccccncccagggcccnccantcccggnggtaanccccccagaaaccccccncggatttggngggacccaagancttnnccaaatgcccccggggagncctaatggaatatngnggaggatgggtgtgtgtgttgtggaggaactgtaaattggtgccaaatgaccgngggncaattccgnccttttaagaagcggttttccagaaaagtttcaaagggtgttgtggtaaattgatcctggagctgggaaattnccatagagcgtcttgtcgttagtttttctttttgtttggtggatagtcttgtattgcgttatgtgacttgtgagatttgacgctaaaaagctaaaacgttttttagtttgtctaaaagttctcctgcttactgtctttcttctgttatatattttggatttctgacttataataaatatactttaattttgtgtctgtcacaatctgtttttttttttttaatctaataaagatacagtttgtc

SEQ ID NO: 135009 - DNA, 493 bp, Arabidopsis thaliana columbia
  unsure (1)..(493): unsure at all n locations
accccccgttaacggcgggtaacnccngcgccccctntgccacctttccaccnnccccnggnacttcanccncccaattnttttccccngttgnggaccntctacccgtgggaaatcttgaccggngaangaanntctgtacctttgcccggatncggtggtttagcngatgatttcttccgatgggttagaggaattcgcagccggagatagcttttcccgggaactcggctccggcgagttttgatctctcttgggttgtgaacagtgccgccactaccaccggaggaatatgattagattacgacggcttagaatactcttattaggacagatttataggattaaggaattattctcggagcatatgtaaaaataggataaaagaaaatgttctttgttactttttttcgggttttcttcctattgtttctaaacatcttagaaaaaatttaattgtatattccttaagctcgatacatcttgtttaact

SEQ ID NO: 135010 - DNA, 499 bp, Arabidopsis thaliana columbia
  unsure (1)..(499): unsure at all n locations
ccccgccccttcttaccccagaagagnaagggccccancccttttccggccccnccggacccaccagcnccggtcccaatgccgctcagctttgtcncccgatcncgngccatncgtttggggaagttagtnccnccaaagttcctntaagnaaatcgngtgtgccatcaacttcggaccccnaggaatcttaataagcatatagtcatcnccaagaattgcaccgtcactacantttgaaggaaggancaaaagaaaaagtaacaaactttttagtcggcgcaatacgatgtcgtatagagtaacgtgattttacagctcaacgggcagcattttgggttgttggggcagccacgtggaggtgcccgaagaaaagaagcattgtcggtggctttaatttacttgagtggttcatatttgtctgtggaaaatatataattttataattgtgtgtacgattggactgaaaaacncgnggaatcacattttatttatttgt

SEQ ID NO: 135011 - DNA, 491 bp, Arabidopsis thaliana columbia
  unsure (1)..(491): unsure at all n locations
agnncnatnccccggcccnnctntgccatggngncttcccagnccccncttgggtncccatgccttcanccagnnggttgagaaagaggngaccncagaagctaatcccgttggttaggagaaggcgtncctggttctggactggctcatcggcttataaccctgactcttggaccattgattcagtgtttggaatgggagaagattggagaagaagtggatatgagtgaaggcaaaggtgttacaatgcctaaagccaagcctttggaagccatngcagagcacgtccctctgttgttaaaatcttcaacgagtccgtttgacgtttagacttttggtaatggctatgtatacattagataactagttatgtttgtatgttttctttttttttggtgaaaatattatgtttgtatgttaatgtatatgtgaatatttaacctatattcctagatgatattttgggtatgtgatttaaaatatttaaggtt

SEQ ID NO: 135012 - DNA, 493 bp, Arabidopsis thaliana columbia
  unsure (1)..(493): unsure at all n locations
acgnacttcaggcgtgctcacggactgcacagagcaacccagccggncacntcacacttcacacgngtntggaacnccnttaccaggacttgaaggaagatcggcggcaatggctacatgaactactaggagctgtaatcacatgttggacatnccctgagaagcattttgagaaggttcttcgtctatcaatcaacaaaatgggaacagacgaatggggactaacccgagtcgtgactacacgaactgaagttgacatggaacgcatcaaagaggaatatcagcgaagaaacagcattcctttggaccgtntatcgccaaagacacttctggtgactatgaggacatgcttgttgctcttctcggacatggcgatgcttgaaactgtttcaactttcgagttcctcctttctcttactgcatggtttgttttaaataaaagagttgtgaaactggttctgcaactatttatcaatgatcgtttgagtttgtt

SEQ ID NO: 135013 - DNA, 481 bp, Arabidopsis thaliana columbia
  unsure (1)..(481): unsure at all n locations
caaaagggnntccttcaaatctttgaccntgggattttccngaaanccnggaagccccattggnttngggnaaangtcctcccngttccggcccttcanggtttagcntttgggacaattgccccattnggnggcgaacaaaccncggcgcaacttcccaggagactgggtttccgattgggncacagccagtcaatggctgtggtacnccgtttacgctagttaagcaagtgagctggccgancgagagtcctggtggtcctcagactggatgagacgattccatcttcgggagggattcaagtcgcatttgaaaatctcatgtctctcttactctctcgtttgaattatcatggatagtcttattgctttttgttttttactttcaaataaaagcataacaacgggaagatgttaaacttcatttggttacttctgtttttggaattggtacgtgaaattgatatatttatattgctgg

SEQ ID NO: 135014 - DNA, 501 bp, Arabidopsis thaliana columbia
  unsure (1)..(501): unsure at all n locations
ctttgngctnctttnncccaggncgtacaagtacgctaggctctgggcncgagattcagcgctctacaacagagccagcnccgtctctcagaagcatattgtcaactctctaccctccaggtacaagatgatgggtctagcaacagtgcagtcaaaggaggccatagtgaggatgaaggtgatgagagagatgaacaaaagaggagcgaaaagcagtgtcaggctcggaatgaagagcaacgtcatcaggaatctgcccaacaatgtcacctattagtcttgctcctcgattttcaggtctctcctctttgtttgattttgtgaccagagttttggtgagtaaatctatctaagtttttcactagtactcaagtatcttaggcccatttgggtctctgttttgtctgatttagtcttttgaaaatgttacgttttggctgagtttgtatctcttgcccagtgctttgtacactctacattaatctatatttcatttggtag

SEQ ID NO: 135015 - DNA, 503 bp, Arabidopsis thaliana columbia
  unsure (1)..(503): unsure at all n locations
ccgtntcatcccttgccccttccnaagggttgnccngcaagaagnttncaaaggcaagncagctggattaagtaggntngngacnccaatgancntaagaagctgttattggagcagatgttgtgtactcagacgtatgggccagtatgggtcaaaaggatgaagccgaagctcgccggaaagcattccaaggattccaggtggatgaagctctgatgaagttggcgggtcaaaaagcctatttcatgcattgtttgcctgcagagagaggagttgaggtgaccaatggagtcgtagaggctccttattccattgtctttccacaggcggagaatcgcatgcatgctcaaaatgctataatgcttcacttgctcggcttttaaacctctttgttatcttagctctcgcatgcggttggttcgtgtaccacattgacttaataatgtactattttttaaccttagtttgagaaaccgtatgatgaataagatttgtggctgatt

SEQ ID NO: 135016 - DNA, 509 bp, Arabidopsis thaliana columbia
  unsure (1)..(509): unsure at all n locations
aanattgggctgctgcctcactcntgaggcagctcccgtntgagacctccnaggttaaggccttanacttncacacaactctctgtcaggtcangtcatggaaacatctcagctcntccaggctacccntactgacctatcgcacaactgtttctctggtatcattnccgagaaagaagggctcgggaagtttccagggcgttggccggaaatccggaactgtgtgtggaaactcccggaagcaagtgtgacccggcaaacattgatgcatcacaagaggaaatatatcaaaacgaattggtggaaggaccgatatctatttggatattctgcttaagtgcgtttattagcttcgattttggagtgttaggtatcttttgctcagctcgtgctcgtagttatattcttcagaccaaagcttaactccagagactgattgatgtatattcagttgtaacacatgcatgtatgttgttggtctgagctgtgaagtggaaatgctcgctttt

SEQ ID NO: 135017 - DNA, 503 bp, Arabidopsis thaliana columbia
  unsure (1)..(503): unsure at all n locations
aatgcccgtagtcccccagcgtcccccgccacataccagccgggccacaaaatncncccttncagcacgncntaggacgagactaggatgagncgcagcttgtgtcccacaatgtggcactgtctaaggtccaatgccagggacttaagggctgaaaatcaaaagggacgatcgaaatggaagtgtatataacggctagagtgagctacaagacgtggattttccggtcgagaagacgtacgttgaaggctgtgtgtacgccggtaatgatcaacgttacatcaagctcgttggatggattccagagagtgttatgcaaaactcgtctttagtttgatttatcctcatcttgaattggtttcatttgtgtgcaaaatttgctatatgtgacattgattgattgtgtgtgtgtttttcctttttaaatttcctctttggttttgttcttttctgccagtcattccatttctcttttcttttcatcattaattattatatttttt

SEQ ID NO: 135018 - DNA, 502 bp, Arabidopsis thaliana columbia
  unsure (1)..(502): unsure at all n locations
aggacaaggtgctncccngaccgcatgatggcccgggtcaggaggggctncttcttgnccggttaagcccatccctngtatagcgngctcgncaccntaaggtgctggtgatgtctggttggctcttccattgtnctcaagggcaaggtgactgtggcggcaaaatccggtgtgaagcttgaaattccggacagggccgtggtcgagaacaagaacatcaatggtccagaagacctctgaataaaacaaattcaagtcttcttccctctctcatggaagacacatcttgatactcctttaattggtgtgaaaagatcacaagtggcacagcaaagcaagtttatgaagaaagaataaataatgtttctttttctttttgcagcttagcaaagtcttttcctctttggactttattttaattttgctctttgaattttcccaaaacatcacatttatatgttcgattatatttgggttctatccacaatcatttttctttttg

SEQ ID NO: 135019 - DNA, 507 bp, Arabidopsis thaliana columbia
  unsure (1)..(507): unsure at all n locations
gnttttcttttcccaangcccggttcgttancnccncggggngcntaaagggtttcncccggggacccnttttgtttggccgnttgcccttncaanccttggacccccttggaccccttctggncaaattggagccagggcgacgcgcaatgccccgaaatgtccgacgtggtggaaaaattttgggtacgtatatttcccagacaaacccagttacagtaagacctgcggaaacgcgtatgggttctgggaaaggatcccctgagtattgggtagctgtggttaaaccaggtaaaatcctttatgaaatgggtggtgtacccgaaaatatagcaagaaaagctatttcaatagcggcatcaaaaatgcctataaaaacccaattcattatttctgaatatataatgaaaaaactaaataacatttaagggtaaaaagattataagttttctttttttgacaaacaatatttttttacttcgtcctttgcattaaaagaagagatac

SEQ ID NO: 135020 - DNA, 484 bp, Arabidopsis thaliana columbia
  unsure (1)..(484): unsure at all n locations
cncatgatcagttcttcttgngngtcgggctgttccccggcacacccatctagctggtttggaaccgggcccngncgngttagctnccttaaagtcggatcccccgnggaagatcttcattattancccaaagggagaagtagctgtgaatcgtagaattgatacaagatcatacacaaatcttcatactcttgttaacagaatgttcccagctacatcctcttcagaaccggaggactttaacacatggaatttctggaaactgcctcctccatcgcttatgtgatactgatgatgatgatgataaagatgatgatttgtcttcaagaaaatgcagattagttgatagagataacaaattggtggtctggtgtagtgttttttttcatttcttggacacaaggttctttgtttttttttgtcacactgatttcgtatcacaggttacgatgtatgcgcagttatatacttgtatatatatatt

SEQ ID NO: 135021 - DNA, 495 bp, Arabidopsis thaliana columbia
  unsure (1)..(495): unsure at all n locations
ggcccgaggcatctntaagatncccttggccccatcgcttgattcaggatctccagccgngggaaccntttcacaccgatcccaaccgagcactgcccaactataagccgtggctcgntggcgtgggtcggctcgggtccagaattcttcatcagtttagcaaaccaccacgaatggaaacaatcttacacggtattcggcttagttctaccagaagacatggatgtcgtggagacaattgccggtttaccaacaagagccgatgtctggaacagcgtcaatgtctctgtgctggagaaaccggtttccttaaccgtacggagaatgaagacgggccaagaacaagaagaaaccggttcatgaagaacatagaaatgagttcagaatagttattgtttcttttttggaattttacaatttctctttgttcatagatagaaaactgaaattttcttggtcttctggccatttcaatgaaaaattattggttaccac

SEQ ID NO: 135022 - DNA, 468 bp, Arabidopsis thaliana columbia
  unsure (1)..(468): unsure at all n locations
gggnggcctgcttnggtccncnttggtttggagagggaaccggcctgggnttccgccggnnctttccngggatccnctcatggccattaggagtttgctaaagtccganccccnagggnagccaaacatttcgaaaataggttgaagccaaacaagcagaaggaacncaatgccgatntgaaagaacttgatcagaacattcatatggtccaggctcccggggcacagaagatcaaagttgatgtttccgaaaagaagtctgttcaaaacgaagccntggaagagtgattctgtggtaacaatatgatccgtctaaaagcctctcacttactctgatgctggtgtcatcttaaagaacaagtcttctttagtttctcttaccatttgtttttggaagtctttaaaaaaaaaaaagttttggtttttgtactgataaaacggctttaagttgctatcattttgccatgt

SEQ ID NO: 135023 - DNA, 472 bp, Arabidopsis thaliana columbia
  unsure (1)..(472): unsure at all n locations
gagtcccnctcagagcagcctgtcncntctctcctgtccngnngtcccgatggtccactctgaattgagcgctaccatgtnccagagcacgacagggactgttctccaaacgaccccatcttctgtcgtggaccgcctttcatgtctgtgtagctggaggtgcactgtgattcgttaaccaaatcaggtcttggcattataatttatactctgttttttgctctgttagttgatttctcgagaatcaattataagttccgggtttaagtatgggtctttataaatatctctataattgcttgtgtgtttgtctctgtatttaccttgggttatcttatgaccaccatgcatagactatgcttttttggaattttacggcctcggttctgagactacttttctcaaagtaagtgtttgtactctgctcagtgggatactttcagtgataaaaagaataaaacgattatagcat

SEQ ID NO: 135024 - DNA, 477 bp, Arabidopsis thaliana columbia
  unsure (1)..(477): unsure at all n locations
aattaggaactgtccctcagtcggncggatccgggcgccaagngtccggctctcgcttcacttccactggaccaacagtactctgactaccgtatcggttgctctgtcccggaaagtacaaaatcgttttggactctgataactctttatttggaggcttcaaccggctagatgactccgcggagtttttcacctctgatggaaggcacgacgataggccttgctccttcatggtgtatgcaccgtgcagaaccgctgtagtttacgctgcagtagatgatgatgatgatgatgaacgttcttctcttgtccccataggcctgttacccgaagatgtttaggagcaaagacagttgtccgagtttacctactgtaagcttctttgtactacaaaaatttactcgttgatcttcttctcctttagttttcgttgcagcatcattataacttaaaaatgaaataaaaagcngttgcact

SEQ ID NO: 135025 - DNA, 355 bp, Arabidopsis thaliana columbia
  unsure (1)..(355): unsure at all n locations
ttccccccactcctttccggagttccgattggggntnccatggagggcgcnanttntgaaaacggggcccngacccccattcctaaccctgtcaaaccccnttaaatgttgganccaantcgaagactttacgaaatcgcnctgaatgcgnccaaatctncaaaagtgccgattcatttcctcaacataacgactatgtcagagtntagaaaagatgggcatacctcattttacggttcgataaatgggaaactcatgacnccggagcagaagttagatccgagaacttttgctgattgttatcattggtgtcttccgggattgcctgattcatggaacgagttgctctctctgt

SEQ ID NO: 135026 - DNA, 506 bp, Arabidopsis thaliana columbia
  unsure (1)..(506): unsure at all n locations
accctccctttttcaanctccccgtttccgcnattttttccncctaattccntccccctcttctttttccccctccttaaccccttcttttacccctcttcttcctcntcntcntcntcctcctcntcctnantngacncccntcgtcgtctccgtgcagaaatcgagcatttccatgctaaagccttcttcctgctcccactcagtcctactccacacagtcctattacggcatgcgacgtcatccgtggagggagagggaggagaggaaggagaggatggaggaggaagaggtgaggccagcggtggttgtggcgagttggacagggggcagggatgagggctggaccgagtcagattcagagtcagagcagcgtcaccaccatcgtgtatgagtagcagtgtgaacgtgtgcaacgatgacaatgaggtcattgagtgtgctgcagcgtgtgacgagtaacgagttcaagtcttgtgcaataaaatacacggtcacttgtgtg

SEQ ID NO: 135027 - DNA, 517 bp, Arabidopsis thaliana columbia
  unsure (1)..(517): unsure at all n locations
anggcngctntnctttcaacccncattgccctaggggggnncctattggnctatggnggaaatggcctaggccttccccctagggngagtctgataagagctgnctctncccctttgcctgccatggattgganaccagtttgatncatggaganggaatatgtggaccagttgtcaacattngnggaaagcaagaaaggatatcttatttggactaaaaatgcttcaaancgaagctgctcaggtgagcattggaaaacaatggaaggagtttctcgattacaacaacagcataggtttcatcatccatgaggatgcgaagaagctcgacaggaatgcaaagaacgcttacaccgcttgaaacctctcaaatctttgcattgtttcaattacagttttgtatgtgagagatctctatttatctaaacatgacttgacagtctgtctttgctagtgttgattgttcacgangctctaacatttcatttagtaatatattagtatggttcttcataat

SEQ ID NO: 135028 - DNA, 438 bp, Arabidopsis thaliana columbia
  unsure (1)..(438): unsure at all n locations
tcccccnggggnnccccctnaaggggctcccccngntttttttccccngncccctggggggnccgggaaacccctttnccgggnnattnttttttnccaaaagccccttgtttgccaaaattggcccggcccatctgggaattgtgtgcntcccagatcgcaaaggccngcaacgggattctaaactcgtgggcagggaatttggagaagcttctagatcttgtggaaaagagttgccaccaaattcacaaggaaaccatggttcacaaagccgctctcagaccttgaaaacatgcggtcttcttcatgaaaacttttcaggatcttcttcgttgagttattagcatctttatgtggtaaaaactcgaatcagtgtttccttttaaaaattgtactatggatctgtacactaacgaagtgttttgccacttattggtt

SEQ ID NO: 135029 - DNA, 503 bp, Arabidopsis thaliana columbia
  unsure (1)..(503): unsure at all n locations
aggggggngngnaaaatccccnttnaaaaggcgggnntnttggnagncccaaaacccccccnaaaataaacccccccagncncccnaacccggnaacccccggtttttccccnccccaatggtattggggggaancctagtccctagacccaatgatgtatgccncncntacgtatgatcacaggctgattgatggtagagaggcctgtgtacttcctgcgccgtgtcaaggatgttgtggaggatcccacaaaggcttcttcttgacatataaaagatttggtttcgaggagtcacaaagtgtctggcttttgccagttatagacctgcagtgtctttaaaacgtttgggggtaacaacaattcttatctttcaagtttctttacagtttcccgagtattgcgggattggaagaataggcctcagtgtctacgttcttactttttacacagtttgatacagatatgttcaattttgactgaataagatacccttttgaggtt

SEQ ID NO: 135030 - DNA, 457 bp, Arabidopsis thaliana columbia
  unsure (1)..(457): unsure at all n locations
ggcccnttntgggggnancccccggggntttccnggnaanccccgggtttccccccngcggcccntnccccaaaacttncccccccnctggtggncagagctggaagttctggtccccngcgtgaagngacaactactgaacttccacaaaaaaaatctgtaagtattaatatgaagatttgagtgaggtttttgagtctcttagaagctcttggcttctctttaggctactttcatctatctnnctatatataagtatggaacttagtttatataacggctttaaaattcggtggatctatttggtcgtttatgtcgtaaacagaaaacggtaatacccctttttggtgtgcataatgttggtgggtggttactgtctttgtaaattagtgttactatgttcttgatatgtttaatcatcaggttctgaagtataattcacaaattctgctcgttc

SEQ ID NO: 135031 - DNA, 501 bp, Arabidopsis thaliana columbia
  unsure (1)..(501): unsure at all n locations
gntcttnagcttccangcaccccatgcgctaatagtttntaagtggagtcccccntcttttcttggtggaancggaggaatctgttntatctgagcagatgtactggcacatccaggagagagaggctgttctacagagaaatggttatcaaaaaggagagggaattgctaggatcggcgcagctcgtgtattgaatagtgacatcacagagttctcccattacggcttctgtagttgggatgagaggcgaagttgtgagggttagagtgtcgactgctgtctctcaagaggtgggcgcctgactctggaggactgggaggtttcaaagattggattgtcctgagtaggtgttttctctctccattggagggattgtaccagagtgtttcttgtaggagcttccaaattgttatcatagtttcttggttccctgatagagtcaccattgaaataatcgtcatgtcttgatgattctctggcaaaagagtatgctttggttt

SEQ ID NO: 135032 - DNA, 514 bp, Arabidopsis thaliana columbia
  unsure (1)..(514): unsure at all n locations
aaaggtccagggnctccactcnncaggattncnaccattgaagcatcaaaccancnggcgttctnccancaagctggtgnctagcagnataatggatccatggcttggatggtttggnattttactttgtggtgatgttgatcacatctgtggggctcatggctaaggcaggattcctcagctgactngtacttggattcgtggaatcggggccctttttgacggctttcttggtggccttatgtcgtttgtgctgttctggacatttgcttatgacttgatgcacatattctgagggaacttcagctgcaaaggaggatggtgaaacgacacacaagattgagttcgggttttgcagcctcttcatctaaactgaattagattgacaatgtttctctggttccctttttgaacaacagtttatgagttcgtattacctttttttgttatttgagatcacatcaactgtgaaaacctttagattgaaaagtttcaagtatttacactttcttcc

SEQ ID NO: 135033 - DNA, 510 bp, Arabidopsis thaliana columbia
  unsure (1)..(510): unsure at all n locations
agntcnaattggatccntagncagacggcccctagaatcccggngntntctgcgggaancnccccttggtgaggttatcaancntgctcaacaggactcnggactcgaacgagcgtcacgactngtatcactcccccagngttattattcccagtangcagctctgttaaacaaaggttaggttttaaacccttcttcttcatcttcttcgagtaggggtttcaatccaagtagctggagctgaacggatccgagataatccacttcgactcacctctcctcctcctccaccaccaccaccgctacttccgccgcttatatgagtggattgcatcggggtctccaccggagaatgtctttagtcggtgaattgaattcgcgcttttttatgggtggagacaattagacaaaacaatttattaaattttagcagcagaccagattgttctccgattgttgtcttttcatcaaaaactaccgtgtgattaatttacacggatacaaaaacag

SEQ ID NO: 135034 - DNA, 506 bp, Arabidopsis thaliana columbia
  unsure (1)..(506): unsure at all n locations
ccccggacnccatcntgagttgancttncctgccagggaccggnaaaccatggtactgccatgggtctcacttgngcagctaccntgagttgaancgcgcccagtgcattncagagcttgcaaaaatgngcncggaactgttaactcangctgacatgagcattgaggccgacacaactcacactgtaatgccagagagagggtattcagaaggaagtaatgagtgtcttggtgaggtaaaaacagaagttgtcaggctctggtccttgacagagaaactcctggagaacgcaggaatcgttgctggtacatctacatgcatggaaggtgtaattttataaagctttgattaactttataagcctaatctgtatgattcttttgtggatatgtagaattactggcggttaaatatgtttacttgtcactgtgagcaagtctattggagagtcttaatcaagaactctttgcattttataataataaatattaaataatttaaagtt

SEQ ID NO: 135035 - DNA, 511 bp, Arabidopsis thaliana columbia
  unsure (1)..(511): unsure at all n locations
cgctnagacaggtcaacccccngggattcagcgaattggcaaacccatcaggcnccctacccagngntatncaaatgtagtccngagagttgnccacgggaancatgttgagagatgttgggaagatccggcaatgcttattgttacttatgaagcagagcataaccacccgaaattgccatctcaagctataaccaacttaactctcggtttatctttgcggtccagcataaaccttctcatgtatgttgttctcttttgtgcgcgatgatcggctttggggttgctgcaatgttgtgatatatggatcggggtaagtgcttttgttggggtggatttgcttgtgagagtttgctgcaattgttggattttgagctatatatggggtaaatgtaggattggtcaagactctttttctgtttctcaagtttattggtcttaatgattaaaagtttaatggtttgtttctggctatgtatcttttttttcttctcaagtggctttttctttt

SEQ ID NO: 135036 - DNA, 339 bp, Arabidopsis thaliana columbia
  unsure (1)..(339): unsure at all n locations
tttaaagggncaagntncccnggaancnagntttncccctttnaaaaacntnanccccggntttgcaaatgtggcaattcatgcctcctgctgctgttgatacctcacaggaccatgtccttcgtcctccagttgcttaaagctgctgcttctctctactactattaacggttctgtaagattacttcttacgcgcttttttctgatgtaatgattctcacattctgtgattggtgacatagtccactgcaacttaaaatgtaaaattgaaataagcttgcactaaaaatcaaatctcattgtgcaaaaagttggataatttggaaatcattgttttac

SEQ ID NO: 135037 - DNA, 550 bp, Arabidopsis thaliana columbia
  unsure (1)..(550): unsure at all n locations
aaacnccntgcttggnctccctttnttaaccaagcattttntcccggacccaggaaantcaacggggccttcaaaagttncaggatggttggttgnancnaccggngacagggtcccncctgctgngtttgcaaagattccagcagngtacnctggagtgncccatccgggnaaaaaaggaggagatcttggatggtcccctcgaggaaagatggcaggtccatcccaagatgtcgcctttaatacacctgttggagtcacccagtgcacccttcaaatcaacgcacggatacccacattattttatccagagggaaggaagaactgacagatacatctctgctctgctacttttatggaagttgctactgtaaccttaaaaaaacacagcctttgttgttttggccaaattgttaaaaaaacttgtctcgttttgaataatgaatgcgtaacggccataatatatgccgggtgttgatttctgaagtctgaatattgagacaccatctctattataagctcgtcgcttggtttctttggctttgagaac

SEQ ID NO: 135038 - DNA, 543 bp, Arabidopsis thaliana columbia
  unsure (1)..(543): unsure at all n locations
acccccaggncttcagaacccgggtttccttttgaggctnnccccctcatgaaggnttcccagggtccccccccaagntcccccggtnccgntgacccccagcgcgctattccacctccggtgggttttaagcttatgctggctaagnttagcccccaaggcttttctcagcacctgagcgaggtaggagctgactgcaatggaatcccagcatctgcagcagcaataaccacaatccntaaaaggagctggataccaccgatcgttgcccaatgancccaagtgaaggtttgcggcttctttactattacaagtttcaaattcagatatttctgaaacgtgtgtagtagagtttttttggagttatacaagaattaagcgatactaagttgtaaccccatctggtcgaacaatatcgacaaatgaatttgttttggttggtcatgttttggggcctacttaaaagttttaggggtgcacttcaacacctgtttcttttgtcatgggttgtcaaattacttttctaacaaagattatttaagt

SEQ ID NO: 135039 - DNA, 549 bp, Arabidopsis thaliana columbia
  unsure (1)..(549): unsure at all n locations
gnaaagtnntcccttcngtccggncggatccgggncgnccncggncggcaacaggctnnttncnaggcaagcccaggcttaaacccgccttgaaattctnggccgngcatggccnttgaggccctcncccacgggatcacattgcnttctttgncctccncggtgaagcagccattgtgactgatccagggtaagcaaagccttgttcgagaaggcaagcacacgcgccaaaaccattaaactttaccccaggaatgtggcatggattaacttctggtgagcctgatgctaacgttgacctcgtttttgctgacattgtcaattggcttgatgctcgtaccggcgactccgcttctctgacagtcactcccgtacatgattttacctccaatgttcaaaaggtcgttgacggtgttagtaacggtcaaggaaaatctaaacgaccacaagctagtctcctttgtggtttaaatggtggtggacgtcgtttggtccatagatcttctatgtaatgataaactaaacagagaagaatctgttttattttgt

SEQ ID NO: 135040 - DNA, 513 bp, Arabidopsis thaliana columbia
  unsure (1)..(513): unsure at all n locations
aagccccccctnggggcttgcctggaacnccccnttacnancccngggcccccnggcttatgcggnaccccttttaagnaggcccncntccaaaacccnngccncatcttannggggccggccccctttaccaaaccccctccaaaaccatggggngggctacggatcccattcctttncttttttaaaaaaaaaaaattccnccccaacaggaacccttctcttcccnttattttaggcccattcctaaaccaatatatcatggtggtggattctaggtttacggtttcctggttatatagtattactattaatgtttttgaaattcctttgttttgaagctttatatcttgtatttgtccgaaactaaaaagggaatggtttgtgcaaactataacattggggctttctttatatgttacatatctttggcggattccacacttcacttctatatctgcctggttgtaataaacgagttagtttggcttttgctaattgctgtgttttgtg

SEQ ID NO: 135041 - DNA, 545 bp, Arabidopsis thaliana columbia
  unsure (1)..(545): unsure at all n locations
ggnacctncccccaangggttcccgagggttcccctnttccgaagaagtttggngaattgngcccaaggcngaatggnagtntgtggangaagccctgaaaaggntagtttgggtggccccatgtgtgccncagagggagncngngaggggcccaccaatgtctgaagttgtggagatgctaatgattgactcaaaggngaaaatggctcagcttgangctaanccactcctccaatggaaccaatgatggtgaagttatagatgaaagctcagagatcatttctgaagtgagagatcatcaataacaagaacaagaatgttattcaaattcacgcattcttgttttcttttgctagaatctggtttttggttgtgcttgtttttagaagagtgtttgtgcttgtttttagaatagcgaagttgggttttaaaagtttattgtgtattttttttcagcttaagattggattttgatcattgatatttgagcttgtaagagagtgtagtggtacatatttggtatttatgagaaagtttttctgat

SEQ ID NO: 135042 - DNA, 462 bp, Arabidopsis thaliana columbia
  unsure (1)..(462): unsure at all n locations
cggtngccatttttcccccggngtattccantnttccnggncgggtccccggtttcccccgggttaaaanccgncnggatttgatccaaancccnggttacttgnccncccggttacccngttttccttccatggattagncccaatcccaaaggggaccgccggtgggttntgttcaccgcncccggggaangaaaaaaggagaggcggcgcgtgaaaaggaaatgggtggggacatgattccttgggggcagcaagactggcaagtgggacatgttttaagaatgtgacggagacagaaaatggcgcgagggacaatcattatgaaaaaacagtttagattagtgatcattttttgtttttaaaatttttagattatacagcttaaagtatgaagggcatagaagaaaaacaatattctgtgtttttctataacgtattacgtaaaagtttttgttatat

SEQ ID NO: 135043 - DNA, 541 bp, Arabidopsis thaliana columbia
  unsure (1)..(541): unsure at all n locations
tttgcaangnaacctttgntccccccaggcgggccatgaancttaggggngtttnccaggncccttagctntcaaccngggnncccaaccanggggncccnccttgggaaagntggtccttgcccttctggggngattgtccacttgaaccccttnccncaaggggttnatggggccgacagaacccggactcctacccatggttggtggtctggcctggtnctcttggcttctatcttctccgttgttgtggggttaggattgancccttcactagccgagtcactggcccggacattctggaatgtggaatcaactgttgagaagcgagcaaatatttacctgttttgagggttaaaaaaaacacagaatttaaattatttttcattgttttatttgttcacttttttacttttgttgtgtgtatctgtctgttcgttcttctgtcttggtgtcataaatttatgtgtagaatatatcttactctagttactttggaaagttataattaaagtgaaagcgaatatttttttgtttctgt

SEQ ID NO: 135044 - DNA, 420 bp, Arabidopsis thaliana columbia
  unsure (1)..(420): unsure at all n locations
ttgggtctnatantccggattaggtnccgnaggatgggctagtntaacccaaactttggtncgtnaagtccnccactttttggccnactanggccaagtgttaccnaatgtaanccagctgcagccgccgcacatgccccggtctccgctttacaccaccgtctttgagagatcgagtcagggttctnctaatgcgttngtggagggttcttaaaattanttgttcttcttntgtgttttgtgttcgtatacgtgaagggagtaaaagtcacgaaaatagtgtactttttacacacccctttaaatgcgtgctaagctcttaattatttttttctcttttggggttttgtatttttgttttcactccttagttttttttttaaaattgaatagtcgataatatgtagtgtgtgatttctt

SEQ ID NO: 135045 - DNA, 405 bp, Arabidopsis thaliana columbia
  unsure (1)..(405): unsure at all n locations
ctttgcccttgcnngcagcntccatntttnccgctaaaagcagtntgtcncaaattcgtgcactgccagngaacctgaaagctntgatgcaaccagatgggtttgattatctgaaagagagttgcccatcttttactaacggggctattgcngtatntggcgaggctaagtgaacactctgttatagtatctggacntcgaaaagnaatatttgccgatggttgtgacncgagtggaagacgagtgaagccccggttgcactgaatgggagagaaagaagaaagatttgtgcattgtataatctctgttatggataatggctgatctaatcggatctngcaagtncaatgaatcgttttcaacgcgttttctcataaatcaaagatccaatgaaatttggggttt

SEQ ID NO: 135046 - DNA, 484 bp, Arabidopsis thaliana columbia
  unsure (1)..(484): unsure at all n locations
tggcanccgngntcnccntgcnggttnctcaancccttcgggtgagaaagccccatggtggacccnnntgttccgggcncaacccccgattccccattgngatcaaggctggtttagaaatggggcaaagnttggngngcctgaagcccncatactnttaacccaggccccattgcccatgtataaaccagtgtcttcccccttagttttggccttctcccttctcaacaccccagggaaatatgaagttatgagnccttagttgtgtgtgtgtggagcatctcctagaagtggagatttttggaacaagaaggagaaatttggggggaaaacagaaagatgtaaagagaaacatgaaaatgaatacaaagtttatagagtgtgagaagtatagatagtaagttgtgttgtcacacaaagataatattcaaccatttgttttcaacctacagtgtgaatatacttttcagaaagtaaattagtt

SEQ ID NO: 135047 - DNA, 232 bp, Arabidopsis thaliana columbia
  unsure (1)..(232): unsure at all n locations
gcttttggtgtntatnaaganaccctagtctanccggaataggtaatntggaagttattggcgttttgagagctgagtgaattttgtttttggtccncattcggttctcttgaancaaaagttaaccaggaattgaaagagataatcttggttcgttgtcgtttngtatcggttgatttttgtagaagctagtgcattcgaaatattattanaaaaaatttacaagatgatc

SEQ ID NO: 135048 - DNA, 426 bp, Arabidopsis thaliana columbia
  unsure (1)..(426): unsure at all n locations
ccacccttggttgtttnancnccccccccnccnttaacccccaattatcccctngttggtnggngattttcccccnccnntctggnccctcttcatcttggngaaggctncccnccnaaaccgnggcattacacattcccatcagattcgctgaaatgtaaaggcacgacaactaatgatcagatgaagaagacaagactatggttgtttatgcttttctgtaatcaatagagagaaaagcataagatggaaatgaaatagatctaaagctgataaggccttttggttgatgatgggaatggattctacttgatttttggtaaacggtaaactggggtttgttccctttatataaaggttatgttgtaaaaaatttattataaagtacatgtaagaattgtgtaaatttatgttgaatcatgtggt

SEQ ID NO: 135049 - DNA, 318 bp, Arabidopsis thaliana columbia
  unsure (1)..(318): unsure at all n locations
cccccttaagggttncctncccatttccggncctntncttngtttntccggatttttccgtagttttnccctgacatttttccataagttttgcataccccaagcaaagataatgagaagagtngaagaacaatgtggtttgtgattggngtatgagtcgtcaggaagaaactcagtttgtggttagggtttattgagtctttatcttatgctgctaagcttgatttgtcttatgggtaatgaagaatgttttgctagaaatggaaacaaaaaaatagacaagaagaattcttatggtttaagagtgattttagctgg

SEQ ID NO: 135050 - DNA, 407 bp, Arabidopsis thaliana columbia
  unsure (1)..(407): unsure at all n locations
tnatacnnccccccttttgggnaaaactgttacccccncaaggncccgcccgggattccccgggnggaccccacgngtccncccggantnaagcccccngtngaagngcatacatttggggnntcaattgatgttatggatgaaattcaagaaatcacaaaggccatgggttggcatacttctctgcgtgacacatccgagggtcctcacgcaagttacaggattctaacatgcgagaagcgtctccttcgagcttaataccacacaagttactgcactagtcaacacaatatattttgtttggtagtatatctcttattgttttcttcttttttctcttaatgtaactgtaaatttgattgtggtgttttactgagtaaaagtttacctcgtcctcattttttagt

SEQ ID NO: 135051 - DNA, 459 bp, Arabidopsis thaliana columbia
  unsure (1)..(459): unsure at all n locations
ggnaagntcagggtnttgcccccnggnccagnnctccccgttnggggngnaattccccgggtaacgcatgggcccctntaaaccccccgggtcgntggcttcatggtncggaatcngccnttgaccccctagngtctgtcattggnctctgggngtcccctttccctggatcacgactactacccagtgttggattggcctcaagtctcatttctcgcgcataagcttggacaagacaaatgttgaatcaacagagaaagaaccaggagcttcggagtaaagaacacataattcacctgcaccactttcaatacccaagctgtacagacttttcaccatatacttgtataagaaagaagcatataacaagtacatatgtaataataagtaggtaatgtttcttcatgtcactttaaatacactatttgtactctgaagctaatataacggtgttggttt

SEQ ID NO: 135052 - DNA, 493 bp, Arabidopsis thaliana columbia
  unsure (1)..(493): unsure at all n locations
ccccccccgaatcccggggcccccccngccccnggaaaanaantcccnnggggggcccnaaaaaanctnggaaacccgggtttntcnttnccccaattcnatggcccccncccaattggnccccgnaaaccggccgggctattgggnccccaggcaacttgggtccnccggttcccattgagccaatggaaattncgccacgtggaattcccagcgttagagaaaaatgatataacatcacgagcagtcagtctactgagaaaacaacaaattgagtttccaaggctgattgctcatgatgctatacaaagttcttcgtttaaaactttgctagagaatttgcgtctggcgtctgatgaatatgcgtttggcgtttcatcatttgatgcgttatcagatgatatgaccaagtgatcaatttatgttcttgctttaggaaactgtttgttttcttttaccggttaattgtaatttgtggttaagtacttatttt

SEQ ID NO: 135053 - DNA, 450 bp, Arabidopsis thaliana columbia
  unsure (1)..(450): unsure at all n locations
tgncatgntaatantcgcnacancaanttnatcgccccccaaaagaanaagccnttgcaaaatgttccatgcgaccatccaggctcagaaatgagnancggtaacaatcnaagcaagttacaaaagacgccctaatacggttccgaatatcctcgggttcaggnataatggaattgaaggatgangtggctaaagaggctgaaagttgatgcnggaacgttcgatatcaagtatcttgacgatgataacgaatgggttttaatagcttgtgatgctgatcttcaagaatgtctcgagatccctngatcctcccgcacgaaaatcgtaaggctcttngttcatgatgtaacgacaaatctagggagctcctgcgagagcnctggagaattgtgacctgataattcattcgaactcttttgtaaatatgttttttgaattttattattgttt

SEQ ID NO: 135054 - DNA, 502 bp, Arabidopsis thaliana columbia
  unsure (1)..(502): unsure at all n locations
antggttccacccatacnggcntccaggcctgtaggagctntctcgncggtcagtaacttngattaaaccntacataagnggtcttggtgctgtcccggtctgngagtattggtctgtttagttgcncaatagaaatcttgaattgttgagatatggtttattgtggagcaggcaatatggagaggcggtacaagagctgagcatatgtatggcatttgctcctcctgaagaagaagctgtgttggagccatttgtagaaagacttcatctccttcgtctcatatcttcattgaagcctcttggttctgatcgcttgaccgttccttgacttctctctctctctctctctactccacttgtaaattcactctctttctttctctgttgtgtgtttgaagaacctttgtagtaggagacatggagcttttgttgtttgttgtaactctactagactactactgttgttttctaatcagatctaatggatttgggcctccagct

SEQ ID NO: 135055 - DNA, 497 bp, Arabidopsis thaliana columbia
  unsure (1)..(497): unsure at all n locations
atgantggancatgtctgtgcttgagcgtctctgccccgagtctgtgagttatggttcaccggtgcttggatctngcggcacncttnggggaggttcaagtgcagcncaggtgctgttggtgnctataatggaagtagtggttatggtagcnccaatacttatggtagcagcaatggtggattcgctggagacagccagtttggaggaagccctgttggcaacagctctcagttcggtggtgacaatacccagtttactgctggtggccaatttggcggtgaggatcaatttggaagcatggagaaaagtgaaacgaagatggaagatggaccaataggtggagaattcgaagatgttgccaaaagagcttgaaggaactagcaaaaaatgttgtcaagactgtcttttcatattaaatcctatgattagtagtagctagctattctacattgcttcctgaattaaacactttatcaagaaacaatctgcttttgct

SEQ ID NO: 135056 - DNA, 495 bp, Arabidopsis thaliana columbia
  unsure (1)..(495): unsure at all n locations
ttcccctccccacccagcttntcccctgatggccacgagtgttatncancacccgantgtgacgtggagtacccccctccagaataaagaggaagctgcaattactgagaccggacaccgagctgaggaagatcccagtgagctaagaagaaggcttagtcgtgttggtgctacagagaagagattttgtgtgtgcatgtgtgtttgtggatgcgagtactcattcaggtaatcttatgctatggattgctaatatatgaaggtgcttacagttttgattctggtttgtttctatacaacaagacaatagggttttggtgggtaaatatgcgattctactgtcgtaaacgacgattgttatacgttttgggggtttgaattctaattatcttttaccattacagattgtctctgtttctgttaaatgtattcactcttggatgatggatcattcccttttcgattttagcactacgagcctacacctttcttatt

SEQ ID NO: 135057 - DNA, 506 bp, Arabidopsis thaliana columbia
  unsure (1)..(506): unsure at all n locations
caacaaatgttgccctagatggatctggatgaccncagggttggaaggatccctgagttgctagttatcttatgttagattancggattatggtgggaagatnccggttttgtgggacaagttccctactactggcaatataacatggtgatttggtgtgcggtaatcacacttgaaaagcgccacaatgaaaacatttgggggagggttgagtggtttgatgctgtgcttacagtccctgagccttatgaattcgtgtgtgctcgttccgctaatgtttgatgaattgttgactcggttggggtgttcacattcgtagcaaggacggtaaaaagatgtgtactctggaagagagtttggtcgtgtagttacgagaaattttttgttttatttcgcttcgtttgcaaaggctttgctttgcttgcttgcttattacaatcttataaaccaaatgattatggcttttatgtgtgttttcatttaatattatcacaccaaaagaagat

SEQ ID NO: 135058 - DNA, 491 bp, Arabidopsis thaliana columbia
  unsure (1)..(491): unsure at all n locations
angaaanctcnggcatccccngtttcacaatcgnccagttcccnttcaggccttcccattggattccaatcgncaatctctggatacatancgnngaccagatcacgaagcttnccggcgtgaaggtgaaagtctcttcttgtggctcaacatcgttgaggttattaggaacggagacgaactcgagttctccgttgggatcacatcggcgaacttcgagatcgatgagttttacgagtcgccacagtgtggttgcggatttgattgcaaaacgaagacgaagactttgggaagaaacccttttgtttcttcggtttaaaggttaagacttcttattgcagaatctgaactctttggatgatttatgttctttctccaatcatttaatttttcaatcaatgctttgtttgtatctcttcttaggatcgaaccgataagttgtatttatgaaccgatcaggaataaaacagtggtggaaaaagttaattctt

SEQ ID NO: 135059 - DNA, 466 bp, Arabidopsis thaliana columbia
  unsure (1)..(466): unsure at all n locations
accttcggncnaaagntcgtcgtccccnttgcagcatcgaagggtccngtttctgtgacctggcatnctccaccggtntgcgaagtnggttaattaccggttcagtctgngccttccaagcncatgaagtcttataaagngcaagttcccaactttttggggtcctaatggngtaatccaaaggggaagagtaccatttgacagcaaaggatggaaacctacacagtcagactatgctactcaacggaaatgctcttcaggttaattcgatgggtgatttacctcctatagagccgatacatataaattcaacagagccaataacaatagctccatattccattgtgtttgtgcatatgcggaatgttgttgtacctgcatgtgcttaaggtagctgcatatggaacttaagacagttccttcattcagttatttgattagagaaaaataaagaagcgtacctttc

SEQ ID NO: 135060 - DNA, 507 bp, Arabidopsis thaliana columbia
  unsure (1)..(507): unsure at all n locations
atgngcttgggtcaccgtgctcctnggaccatggcccggttanctagccgcgtactgcttgccgnggagcacgtgnncctggtcgacggcaagctcgtccaggatcttgtctcagattgcgacatgtggaatgcggagaggtcgaagctcagcttcagtggattgacctccctggctccaagggtctatgaatcttttttcttttcttatttaccgttactttgagttgttttctttcaaattgaactaaaccaagtaacagcatggaaaaaaaacaagtaatttcaatcttgaaggatatagtgaactagaaacacgtattaatccatggaaatataaggattaagaacgttgagggaagttttgttcccatatggtgatcgagtccaagtcgagtcgtggtggtggatatgtaaatgtggtgtattgttgatgtgtatgtatatttgggctagctatgccttaaataaggcatttacacgaacaactaatacagatattttattt

SEQ ID NO: 135061 - DNA, 500 bp, Arabidopsis thaliana columbia
  unsure (1)..(500): unsure at all n locations
gcangctggnggtcncncccccacgtgtgattgtnaaggtcnangcgcaaaggggtcaagctctcatgatttcacaacatgcttccactgacccagatcgggcatgctatggcccaaaacacgtggaagttgcaaatgaccgaatggcaattcaaacgcttctcataacggacgagcttttcaggaattctgacgtgaaaacaaggaagaagtatgtgaatttggtggagtcggtaaaagattcgggaggagatgcttttatattttcggcgatgcatgtgtcaggagaacaattggcacagctgactggaatagcagctcttctcaggttccctttaccagaactcgaagacattgagatgtaaaaaaatcttcggcttatagaaaacaatacaacaaatcatacacatctctcataatttatagtttatttgtactcagtgtcataaaaagagatttgtaactcattacaaattataagataaccattcgttgctgtt

SEQ ID NO: 135062 - DNA, 474 bp, Arabidopsis thaliana columbia
  unsure (1)..(474): unsure at all n locations
cggcnccgagggcgccntgctctcccaggggaaaganccaattgaccctccaggccttatgcntcgtccatnttcacctggccagccaatttcttcaaccatcctaatgagggaagtntgaagagaagaaatgcgaagaagcgcatagggcagcgtcgtgcttttatactgtctgagaagaagaagaggcaagcgctggtgcaagaggcgaagaggaagaagagaattaagcaagtggaacgtaagatggctctgtcgctagggaccgagcatgggctgaaagactgattgagcttcaacagctggaagaagagaagaagaaatcaatgtcttcttgagatcaaacatagaaataatcctaaatgacaatctcttttcttgtcttgagttagagaattactcttctttgttgtgtttggcatgttctcttgagagttaactcgctatgttgtctgaagaactgagagttacttg

SEQ ID NO: 135063 - DNA, 560 bp, Arabidopsis thaliana columbia
  unsure (1)..(560): unsure at all n locations
ancccccattttttnngnccccnccccgggttttnccccngttggnggcttcccccccgtcccgggttttccaacccccctctttccgggaaaatttggggnttttngccctgggnaancccggtttccncccccggaanccccttttcccggggaaaggaggnggaatggccttaaatccctngtnccagggntggngccaggtccccaggaaaccggnccccaaggnggngattctatccaaagcttatcaggccgaattggcgtattgtaaggaaccaaaaacagttcaatggagagagagttgaaagaaatggaagagagatattcagagataagcctgagatttgcagaggtagaaggagaaagacaacaacttgtgatggctgtcagaaacctcaagaacggtaagaagttctagtatttgtatgtcgctgcgaatacaggtgttgtcagatcatagtagaaatcactatataacttgtactgttaatagaattcgtttctctcataaaacattattttaaacttatcaagaaatcaatattttccactgaaat

SEQ ID NO: 135064 - DNA, 531 bp, Arabidopsis thaliana columbia
  unsure (1)..(531): unsure at all n locations
atgcntttnccccggganctcnttnctttanagcgctncaagnccgngnttcccccgnttattccntaccctcgtcattacggatccccatcgngncgattcggtgatttaaccttttcactcctcagtcgacctaancttgaagctattgtaaaagcatggcggagactcagaaccaggacaaatcgacgaatcatcgaagaaccgtgagaagaaggtttcgtcgccagatctatcggagaaagtgaaggcggaggagaattcggtttcgatcggtggatctccaccggtgacggagtttgaagagtccaccgctggatcttcgccgttgtcggacttgacgttcgctgacccggaggagccgccgcagtggaacgagacgttctcgttggagaagtatccgtcgtacgagatcgattgggattcgattctagcttaggggcaaaataggaaattcagccgcttgcaatggagtttttgtgaaattgcatgactggcccaagagtaattaattaaatatggattagtgtt

SEQ ID NO: 135065 - DNA, 529 bp, Arabidopsis thaliana columbia
  unsure (1)..(529): unsure at all n locations
gcgttcccccctcccggacccncttngcgnttccnntggccccccttccncnccttttccccgnganaccntcccgngccgtttctccagcgcccttccaagnggaagaancttgtggctttccgngncngtttaggggaggaccgagaagaaaccgttcatcgtcagctataagcactccttatcttatccaggtgctaactcacgcgaattcaatgncaccgccatcgaaaaggaagagaagaagaagtctaattggcagcatcatcgttgtcttcctggattctcttcatgtggtggaagtttcatggagaggaggaagaagatgagttctgaaactccggttgttgctgtgaaatgagatgaagagaatatgaaatttggaaatgttttgtatatgaaagaatgataaagagaaagagagggagagatacagagctctcagagtaaaaagctctgctgaattttacagggcactctattatcttgtgatgataagagattgaatcaataggtgaagagataatgt

SEQ ID NO: 135066 - DNA, 394 bp, Arabidopsis thaliana columbia
  unsure (1)..(394): unsure at all n locations
ggcccaacnaaaggtcntgtaatttnggggcaacacccggngactaagtgaangacaanagtgananccantggcgtaagattactaagcttaaacaaatgantanccntcccaaagcagtcgccaagttggcagccgtgncggcctttgtgtgttcagtatgaggcagatnttccgaccaaacatgaccatcgttgtcaaggcacttcagcctcttctaaactctaaaccggccggtcctgagtctacgncctaaactaaacaatataccatttctcttgtttttgttcatgttgttgttattatggctattttctccctcttttctgttccaagaactatgattattggttgtaagatgttgttatttaagcgaatgtaacttatatttttc

SEQ ID NO: 135067 - DNA, 549 bp, Arabidopsis thaliana columbia
  unsure (1)..(549): unsure at all n locations
tttgggngacccgccccaaatcaccccncgntgggtnggcccccaggngtatccngcgtttgctggatgttttccccnggngcggggatttaccngncaatgagtggctttcttgggggagtanccattgtttgtggagatattggnccattcttcagcaatgtttgtgagctagatttggtgtttaatttcccacaaggtgtacttgatactcgatgagttcattcttgctggggagctccaagaaacaagcaaaagggcaatcatcgaaaggatgtcagaactcgagaagctacagtgatgacggttaagaatcacattctacttggttaactgcgtacctgccagatgtttcttggcatgttcagagatttgctatactttgttgagttgttagacaatggtgtagcgtttacattgtgaatgaagaatttagagtgattctgctaaagatctctcatccaacattttgtttacctgtgagattttcatttcaactagtgatgtactatttgtttcgtagaactatgataccacacatgctttgag

SEQ ID NO: 135068 - DNA, 462 bp, Arabidopsis thaliana columbia
  unsure (1)..(462): unsure at all n locations
cattcataccgncacttcntntnggtcaagancacccctnaaggntngccccntgatttcncaaatcgntttatatgttgngcancgatnacacttctttccgattccggaaacaacccaacttttctccaaacgtgttgaacggggatcaaacngctagactacgtattctccataaacgaagcaacgcaaaacagaactggaagcgcgatgaacattaacaatacttggtaaaaatgttgctatatcccctgaattattattattttttatttttttttaataccnggaggttctgggccgaagcctgtaatcttccaggcccgaaaccacaacatgtaatattagtttcgtttcaagtgtcactcgaaccggcgacctataagcttcgtgtagggtttttaccaattgagctaacgacacttggttatcccctgatttattagataagagtatttactt

SEQ ID NO: 135069 - DNA, 234 bp, Arabidopsis thaliana columbia
  unsure (1)..(234): unsure at all n locations
ttgtttangctgtggtcgaagagncgtttgntgttgatgatggtggagtgaggtnntagattgagactcgngagcttctaattgatcaaagaagcgataagtttngccttcggattttccggtacgaccttctttggttcgtttgtggtatttgtaaacgttctcgaatttctctttgcatttctttgcgtttcttatgtaaccntntccgccattttcctatcagaaccaaag

SEQ ID NO: 135070 - DNA, 592 bp, Arabidopsis thaliana columbia
  unsure (1)..(592): unsure at all n locations
annncaaccggcgnttnnggcccngtnctnanccnagncntttggcccgnntttgccggttcccnaacccggttccgntggggcccattnccccgtttcttccccaaaggtccaaagaatttgggggaagggcccccnccagctggntgggggagtggcccatgggccnctataccccctggggttaacggaggatccgcccccaggaaattccaccgatcagcttaacgggnttgcggggattagcccatctcggaatcctctattccacacccaagcgatttccaacacattgttcataaggtttattaagggtgttggaatagcagctgcattggcgtgcttcattgcgatgaaacataggcatgcggtgctcatcgagaagacgtccaagaagcaaaaaactaactgatccgatttggcttatttacttgtggatctcaatcaacaagtgatctctatgtttttcaataattattagtttcttttaagatttgtgagttttgctttttgctatgaataaatagcaagtatttaattatgatgttgtactgtaatttcatatccgaacaaatttaaatttcttcggatc

SEQ ID NO: 135071 - DNA, 560 bp, Arabidopsis thaliana columbia
  unsure (1)..(560): unsure at all n locations
cttgggtggggtncccgggnatttcccccgattttcccccccccaggnctgggncntaaaggggttaagttccgncgggncttcaaccaggccaaaggggatgcccccccaaaggtccccaaggtctggggncaactgatggaaaactggctaccngngtccncgatngctccatccaggtggnaangatccgcatgccctgtaccacaagcccagtctcaaaccctacgcttgtactcacccagaccaagtattaccagaccccagtgaagacttcatgtccccatgaatttccaccttcttcctctgtgattcagcccaatgacctctatagcagtgagagagtaaatccagtaatggtctggtttggtacttattcttagtgtctataaacatttcttagtttctcttgcctatttgcatttcaatttcacttggtacaagcttgcgactctagtgacatgttatcttttggaaatttgtattgaatgtcgatgatattccttaaagaggcatttcagtgtttacaaaacttcatattgattgatcatatttggacc

SEQ ID NO: 135072 - DNA, 531 bp, Arabidopsis thaliana columbia
  unsure (1)..(531): unsure at all n locations
attggcgangattnccaatcatggttactcatccaagcattttnnggcnccttgcttgctgtttcggcccccccgagatcgatgtngggtattccctngagngcccaaaggggagtagtggcagncncagtgaatgctgcgatttatctacaaacccaaagggcaaaaatcaatcgcattctcatctagagacacttctccgacaactaacagcttgctgtctggaactgcggtcgcttaacgatggtcaaggagaagcgttctcgcttaaccgacttcttagaaccaacaattggaagaggacaaaaaagactacttagctgtgtccatctttggaaacaaacttggctttgattgttgacagtggctgggtttgaactgttacaggcagctacaataagcggtcaaaatagatgattgaaacagacgggttggagttgaacctgaccgttggattcttttcttctctaaagtttgaagaaccaaaattgtaaaatttagttatttaaatttagcttgccaatgttcatc

SEQ ID NO: 135073 - DNA, 561 bp, Arabidopsis thaliana columbia
  unsure (1)..(561): unsure at all n locations
tggnntttcttcaacaagttcatgnnccatccccncaaacncacattgttncaccccttgccngctttaaccggtgccanncaaccaanctcnccaggtntgattcccgcaaggnaaaccanttcnaancccctttggtgaagaaggagnnacttagggtaatttttcnttctctgtggaatcncccccacccaaaagaaagcctgtggtggtaccacaatccagctcaggaaaagaatatgaagatgacgatgaaagtggattactcgatattgtggtattgtggtggagcctcgggacgacctacgtaacggttatgatggggtttttggtgtttctctgctttgattctccatggcgccgagcatggttctgccttgttgatacttttatcgaccgcgtaaaagatgtactgggagttatctagagagggttcgtggacgtggaggatgaaacaataaaatgtaatagttgaatcttgcaaatattttgatcatattgtcaaatttctccatcgtataaaactttcgtgaagattaacatatcaaatattttgatcat

SEQ ID NO: 135074 - DNA, 484 bp, Arabidopsis thaliana columbia
  unsure (1)..(484): unsure at all n locations
agcgggccccccccaaangccnngggggggggccccatgggnaaagnttgnncnaaaacccccccccnagggntnancccgggtggtaaanatgntggannccngtgccaggaccacccccggnaaggccccccatgggnaaggaagcctgggacttcctggacgacgtagcccccaatcttggatcagagaatgtagctaatcttcttctgttgacaatattagtgttttgcttcttgatctttagtagctacttaggagggcttgtgttaatttcgtttggatattttttcaccacaatgtagtgttttctttctagctttctaccacttagttgctatcttgttaaagatgatcttcaagaaatctccattcttttggtatgttttagatgatgatttatttattttatgagagtgtgatccttgtaaccacaaagtgtttgcattttgatgatttgatccatttatatgtgtttgcttgg

SEQ ID NO: 135075 - DNA, 416 bp, Arabidopsis thaliana columbia
  unsure (1)..(416): unsure at all n locations
angncgggnttcccccctggggggggnacttnccngngttattgaagncccctnggngccccccntattgcncntttatgtgttccaagnggaatcccagaancccgtccaaagttgtcaacccattgtcnccaatgcttacccagttacacaatcagtgtgccagcgcctggcataccgggatttttcccccaaagcaggcgtgaactggacccattatctgagggattagagtcgggttaatatatgaacgagcaggtttttcctcatcatgtctgaaaataaaataaaaacaaaaaaaatagccagacatcatttgattctccacaaataaggaacatagtaagtttctctgaaattttaggctgtaaactatacattatattcagttcagtaagaaaataagtttcggtgat

SEQ ID NO: 135076 - DNA, 514 bp, Arabidopsis thaliana columbia
  unsure (1)..(514): unsure at all n locations
tgtcangcctgntactgnnccctcgntcantgcccnggatatggtntccnccaagtgaatgngagacccgtgtcnatagcctccgggtggtttnncccggactgattncgggaaaangncccgancgttcgtcttttggggagantaaggncattgttaagtttgcaatggaagcagctttgtgttnccccttctcccatcagcagaagacggagcccatgaatcaagattcacttggaaactatcgagatcttagcaagcttgttgatccaaagatgaaactttcgacgagagagtatgaagagatagagaaagttcttgacgttgcattgctctgtacgtcgtcttttcctatcaacaggccgaccatgaggaaagtagtagagttgcttaaagagaagaaatcactagagtgatattaatcctaggcttttaattattaggcttctataatgtacaaaatccgactaggattgttactcattattatagccataggttggactttgctttg

SEQ ID NO: 135077 - DNA, 478 bp, Arabidopsis thaliana columbia
  unsure (1)..(478): unsure at all n locations
ggnntatngctncctggnncccgngtttnaggggccttncgaaggccaangaagcttgaatcttntcnggaagtntangcnntaggcctcaattnccggctggaggacaaaccctcctcctanaagcgacgttccccccaacgagagtgtatccagatgtattngtgcgtgtgacgcaacttcatgtctattctcgagactcaatactcagaagacacaatcgtgattgtttcgcctgattcagacaacttatcggtgttacaagctggtatccaaggactcgaccttcgaaggcactcggagttgtattttggaccaggagaagtaagattgttggatgcaaacagcattccagtgtataagcaacctgcttctgccgtatataagtgtaagaaaccaccaaactgtgactaaaaacattttatcctcagtatctatgtattgttattattcaaatacaattttgaagcttagtttt

SEQ ID NO: 135078 - DNA, 546 bp, Arabidopsis thaliana columbia
  unsure (1)..(546): unsure at all n locations
actgtcanagtcnctgtggttcanaaaccgttgactgangtgtcctgcggnttacggtctcaagnttcccaagctcganagctngttatntgttagggaaccaggcngagcaaccaanccatatggnggaatctgcgcatcgcctgcttacgtcttcgagcctaatggtttactcanggntaagaaggctacttactcacccagtgntgagcgaccaaactttcggacaagagtcacattgagcacagagtcgtggtagatggaaatgtcataacaagcagagctccagggactgcaatggngttttcacttgccattgtcgaaaagttttacgggcgagagaaagctcttcagctcggaaaggcaacacttgtgtgatttcaaacaatgaaagtatgagagtggcttgaataaaaagaaggctttgccttttagttatctctctccattagtaattacttactttatgatatatgacatatgagcttggcttagtgattggtgtgtaactttatgcctttataaatgaataaacgagatttttct

SEQ ID NO: 135079 - DNA, 539 bp, Arabidopsis thaliana columbia
  unsure (1)..(539): unsure at all n locations
antcatccccagccggtcttggatnnncggatccccttcnactntncccatntccatgaccgaacccaggggaacccgngaaagcnttancccatttgtgttccggcccctgtatgtcctgcnatgattagtaaactcttcctgctcccttaagttaagggatgttcgtgncctaataggagtgcctttagtcangcaagcagaaggttacagncaagcgggttngtgtacttttanccgcaaagaatgggattgatgctcagctaaggaatcccctactaatcgaaagaggggattcaaaagtgtctattcaatattccaaggtgcgaagggtcgatgtaattgagaaagaagcgctctagctctcacttgaagtacaggaaggataatgactcgagcttttccgaatgaaaggcgataggggacgtaccctaaggaagcaagaagggaggattttctttactttaccgctataacctttctttcacgagtgaacccgggcacgagcctaccttgtaagaacccaagaatgggtacct

SEQ ID NO: 135080 - DNA, 490 bp, Arabidopsis thaliana columbia
  unsure (1)..(490): unsure at all n locations
accagntggtccnnttccggancccnttgaattntgaaaatggcaagggatccccantgggnttggtgaacccccatagatgtggggaacagngggcnctttcatcncngncttatctgngggtcncncaacaggtntgattaaagctggtgccccttgcagaggngaacgtactatgaagtataaccccgttgctncggatagaggaagagcttggggatcaaagcagtgtatgctggagaagattggaagctatctctctaaacaaaatgcacatgtgatattaattgttacacttctcgtcttacttcattgttctcgagtctatttctcacgcagacaaattcttgtgtcttgaaagttcaaattttttgttgtttttgccaaatttaagaacaaacagaagtaaagagtgttaaacatgttttttacaaattgtaaaagcatccaaaaacatcaatcaacactagttcgtgaggttgcagaagcc

SEQ ID NO: 135081 - DNA, 542 bp, Arabidopsis thaliana columbia
  unsure (1)..(542): unsure at all n locations
cacctatcgcccttnggaactgtcccnncaggtccgncggatcccggncgcccacgctncggggaatgggttggnccaccntggaagtcccgtgctncctcataaattccctctgccatattgggnccctcgaacttggaagcccaatgncacttctcgtaatgtttggtggttancggtattttccatttggagagagttggcaccaacaatccatcatgcgttcgagtcatcggctagacaaggacttgaatggtggcaaatagacatttcgtggtacattgttcggtttttcgaaattatcggtttagcgaccgatgtgaaagtgccaacggaggctcaacgacgtcgtatggctatagttcgttgatggaaattgcgggaagagcatagaaaaagggatctattctatgtaattagaataatttctaatcctaaaagagagttattgttttattttctttattactacttttgaagttttgggttaacgcaaaggacgtttccgatgtgttttggtgttggaccaagttgattaagat

SEQ ID NO: 135082 - DNA, 425 bp, Arabidopsis thaliana columbia
  unsure (1)..(425): unsure at all n locations
accaanaaaaggtncggacccaanntganttccactnttancgttggtnnctgccgccttttaaccccggagggaagagnanaccagccattgatgcanatnaagagangttgancctagtnggagangacaaggatgggaggaacctaggagggaagggtagtttggaaattttggttgcggccatggggatgaaacgtaggtttagggcgggaggggaagaagaagggaaagagaagtacatagaatatatggagaggaagaccgcgaaggcggagatgaagtggcggcgagggaaagaaacggctatggagacggcggcgtgctggatcatcgttctcttacttggtttccttttgtgtttttatctgtttatgcataaaaatttagtagctattatgaaaaaactaataaaatagttaaat

SEQ ID NO: 135083 - DNA, 543 bp, Arabidopsis thaliana columbia
  unsure (1)..(543): unsure at all n locations
acccgcttgntggccgggccaggtccnggnntttctcggggttcagtgcgtgggcggaggcacattccntggtgcacagttgcntncaacgggcagtctcaccgcttttngctttctcttcaaattcggttactcaaaggacaggtatatctcttactctcatgctgtccatgcgaagggaagaatatccggtatagtcggattctccaaatgccgttgctaccacttgcaatacccactgccatctttgatcaggatattcgtccaaagacccgaaaagttccaacaggagctcggatagtgaagaagccagacgttatgaagagcacatatgatggaaaacttccaattacaaagaattcaagttcttcctcttagcttctacaaaaacaaaagaagatttagaagctaactaccaagactgtgtaatctagcatatgttccaataagaaagcaataactcggtgtcttgttagttgcagattccatataaaacaactcgagaaacgagaaggcaagcaaaaggcacatactttttctctc

SEQ ID NO: 135084 - DNA, 544 bp, Arabidopsis thaliana columbia
  unsure (1)..(544): unsure at all n locations
anggcngattntccgggatgatgtctgngatgncctttnctgtgaaagtancggaccncttgacccncaagcngcaccaaatctgcgatctgatgatctggatcncggtgattgcagcagaagnccttggtngccngatcttacttncggagagaggaacccagtngnccaattcttgaggncagtagaccaacttcccttaaaggccattgcagatttcactagcaaggttatcacaaaagcctttgacaatggcaactttcggagacgtgttgaatgttccaagctatgactccgtaagcaaaagatttcgctgaagagtgaagaagtaaaaaagatctttttacatcataagatagagttgggacctgtagaataaagatagccttttttttggagatccaaccaaattttttgtttcatctatctctcaagtttctgacctaagataagtccatgaaaatggtgacaaattacgcccatgtctccaatttcgttgttgcgtatttcttctcttcggttagtgaataatgattgatacgtt

SEQ ID NO: 135085 - DNA, 419 bp, Arabidopsis thaliana columbia
  unsure (1)..(419): unsure at all n locations
agcccggggnangggaaagccctttaagggaaanattgggnanaatgggntaatcccgggggaatccncntccnttaagggggggaaaccccgtgnggccaaaaccctccgggatggttgaagtaagttgattttggaagganggtggattnggaaccccaagganttggagtttggggatccttaaccgatgtccactgagnaatcgttccaggagtcgtangatactcggtcctctttngttgccatcctctttggatcccttagacaattttaaatcgtgttcgctatacttggaagataatttttggttccttcatgattgaaaatttcgttgttagttgatgaagtatggtgcttatcacatgtaatggtactaaatggtagaaaaattaccaatacaatatagcttgtagtgt

SEQ ID NO: 135086 - DNA, 561 bp, Arabidopsis thaliana columbia
  unsure (1)..(561): unsure at all n locations
ccccggtaccaagccgctggcanncngtccttctgcagttgtccccagtgtaaatggaagcccttcgaaccgaaggtggtccaccagnggactggtcagtcccnggaggagtnttgncagancagaaggagttcagcttngcaaccacacaagcttacccagtgcacgccagcttactttgcagactcatattncctcaaccagattctcctcagaagttatctcgttaaggagctgaagttcccaccgacagcgaatgtagtatgtgagagacacaccatatctgttgtgcctgtgactcgtgtcaccatggaagatcgtgggaaagcgttcagcttttacataatcggttttggtaaggagatatacttgaaagattattacccagcaagattctgttggggtttgtgtccctgtcttgagtggttaaaggtttgaaaaaccagagttgatctttgttcttctctacttgaatgtaaagagacaagatagagtgtagtcaatgtgtttgaatattagtgtggattgagagctttagagagaaaatcaaactggatttct

SEQ ID NO: 135087 - DNA, 495 bp, Arabidopsis thaliana columbia
  unsure (1)..(495): unsure at all n locations
atccaaagcccagtgtggatcttaagggcaaggattccctgcgctaaggctttgctggagatgcgaatctgtgttgttgtcnccaaaggcnaaagtgtgcagggacatgcaagtacgggacacgcgtggactacatacttgcttcctccgatttcacgtaccggttcgtgccagggtcgtattccgtgttgtcttccaaaggaacctcggaccatcacatagtcaaagtcgatgttgtaaaagctacatcgatcaacgtcaacgagcaggagcagcgaccgataagatcacataagctgcagagaattacagcgactacgtataataataactcgtctctcacaaaggcctcgtggaggacacactactataaagcatgaacaatcaacatatatattacaaaatgttacaggttttttttcgactgttggttgattaacacaatttgagatctgtgtatagttaataatcgtgctagtctctgtgttgaacgtg

SEQ ID NO: 135088 - DNA, 480 bp, Arabidopsis thaliana columbia
  unsure (1)..(480): unsure at all n locations
antcatcnggatgcgactggccgcaatcttgtgacctcagatgggaccagattctaagacatggctgggaggactcatcattcttcgtgatgaagtctccaagtacatgattgagggtgatctgaggaggttcaatgctcttgcaatcaagaggttgaaggagatccagtgttaccgtggggtaaggcacatccaagggctgccatgtcggggacagagaaccaagaacaactgcaggactcttaaaggcaagaaaattgctattgcagggaagaagaaagtttccaagtaatcatcttcatgatctccttcttcttctgtaatactctttttagtttgtctagtcatctctgtttaaatgtgatttgtaattcccaaacctttgttcgaactgagccctttccagtttatcttcggctttttagctattattattccgtatcttcatcattcattataaagttacaaaagaagttgaag

SEQ ID NO: 135089 - DNA, 460 bp, Arabidopsis thaliana columbia
  unsure (1)..(460): unsure at all n locations
anccnncgnnnaagnttccccttgtncttgngtccanaaagggaaggcttgngaacatnttctgnaagaaagacggatgctcgaagtgttctggngattcgaattcgtgtgccncaacaaggaaggatgtgcgatcaagccgcaaaactgcaagaacccagggaggacaagtagattgtagcttggggatccaattggcgttttcgggcncggataagcactacnccgcgttgaattcgtggtatgaggttgcaaatctgaagcagtactcgctctatggcctctactccaatctaaaggactcactaaccaacccattcaagaacatcttctgatgactttctttctcctttgtgtgttgctactcttgtaattttgtattattttttcncctgctttctttgtattatttcttccgtatgatttttgctatatattgtattttattacttgggcgttt

SEQ ID NO: 135090 - DNA, 473 bp, Arabidopsis thaliana columbia
  unsure (1)..(473): unsure at all n locations
anangtcggcgggcccttgcgatnncctgccntgagccgccnaatcanatttcccancaaacctagccgtttttacccatttattgaccctttgngggancaaaggaacttgatgaaaaagcagaggatgaactattgattacctcgtcttggaatgtgtttcccatggcttagaagagatggagctcaaattttgaaaatntcaattatattttttcttctttttttttggggtctaaaccttgcatatatcaaaatagtaatgctaaaaacaaatacaagaggaaaagatcttagatttgtgtggtcgtggtgatgcttcgagtgggctcttctaaatatagtggaggctagttgttgttaaatattagaatatcccagatttttgtgtgtgtatataatagattttgtaattacaaatatatgtggacttcaatgccggtcctgtctgtaaatcttaagaatcatgattc

SEQ ID NO: 135091 - DNA, 473 bp, Arabidopsis thaliana columbia
  unsure (1)..(473): unsure at all n locations
ttttcncncccganttgaagatggctctcagaggctcagttggcnctggncactctgtacgatccagngtcgaaagactgtcttgctgagatggatgcccttggaagagaagctcagttgagagggtttgagtttgcaaaggctgtgactttggtgccagaaccattcnccttggagaatggacttctcacaccaacattcaagataaagagncctcaagcaaangcctactttgcagaagcaattagcaaaatgtatgcggaaatcgcagcctcgaaccccattccttctaaactgtgatgctttttgctttgcttaaaagtgtttctttttttttgtattacaaaggtaattgtagaactgttaaaagatcggattaggatgaggtagatcgatcatttgaaataaaacagattcatggtgtaattttctttgatactgttttccagaataaaggaagcagactatgtcct

SEQ ID NO: 135092 - DNA, 476 bp, Arabidopsis thaliana columbia
  unsure (1)..(476): unsure at all n locations
taggcaaccttcnggttcaagtcaacgggggtccccnaccantggagnttcccgtaggnntagcccgtccaccccttaaagnttgctctgatacccagctatgcccgattgttgngcaacccggaaggcatggcctttggttgtggccatccaggcttgttgcgagtgtggacccagatcttcaaatgtgnccggatttgccgtgcaccaatccagncaaggataaagctctactaaccaaacaagtagaccagacatcgacgacccttctctctctttcatcttctttcaacttcttttgggaatttagtttgaatctaatcactgaaatttctccgagaaagatcggatctttgtataaagaaaaaaacaatgcttgttcgtttactcactttcctaacttcatcttgtcccaaaacctttgacttctttctttctatctttcttctttgcttggagtaaaaaaattgttattc

SEQ ID NO: 135093 - DNA, 469 bp, Arabidopsis thaliana columbia
  unsure (1)..(469): unsure at all n locations
ccnccccccttaaaccccgnaattaaatccgtnttcccnnggagagttccccnaggananantntnttgaannccattccgncattcttnccctggaagtgtatcttncccgtggctaagccaggaggaaccccgtgnccgttctgcaggttccagcttccccaccgacgatgtcttctcagagatcccaaccggttatggggaganccctcgtcaaggagtagcgagttacacgtggcgtaatctcagtttgcggtgatgggtacatgtgtaagaggaactaaagaagcctgtacatcgtaatctaatatactatgtagaataatatatcaagtaattgtcatagataggaatgtttggaccgttttgatatatcgaaatagtttatattttgagaaagacacatttgtgttaatagtacgatgaatttcgtaaatatgttgtaatagaaaccaaattaatagtgacc

SEQ ID NO: 135094 - DNA, 577 bp, Arabidopsis thaliana columbia
  unsure (1)..(577): unsure at all n locations
ccggcctnccccggacncncnnttnaattccgggggntcncgggcttgcggatcccggganaaccatccgcctnggnttntccgcgtgnccnctcgccggtncaattttaagntggggaaaaacccccgggggggatccggaaattgcaaattncccaggctgcgtttcggacatcaacgggatttnccctagcggagcttaggatcatgganccgaattcggnaagttntcncggcgtntaaagacgccttgcgcggcgtttagttcgccggaattttgctgtactgggtgtcacgcgacgccgcaaacttgttctccgacgtattactcgtccatgtttaagaacgcttgtcctagcgcttatagttacgcttacgacgacgcatcgagcactttcacttgtaccggatctaactacttgatcactttctgccctacccagtcttaaaaccggagctccggtttagatttgggttgggtttctctctctcacgtttcttttgcttgttatgtacggaaagagaaataaagaaagatatgataaggaaaagcgactatgatccatttttaaagatt

SEQ ID NO: 135095 - DNA, 574 bp, Arabidopsis thaliana columbia
  unsure (1)..(574): unsure at all n locations
aaagttnttgtcancccgggncctgggccttccccccccatggcacgctctgggtcttagngnacagcctgttttcggcaggacccntggaaaanccnggcatcccccacccattttacnactttnctccccngtgggccaaggnttgggaacctcttaaaacatntcttccctgctccaaaactggtgcaaaccgtatagttacttttctaatcaatccgnttatatatccattcaggaatcatgtctatggntaaaggagagggaggtccaaaatcaatcgagcttaaagaaatcggtcctcgatttgagttgcggctctaccaggtgaaattaggaactgtggaacaaaatgaagcagagatcgaatgggttataagaccgtacatgaacacctctaaaaagcgcaagttcatcggtgaatgatgactaaacggaacagctttgaaccctttatctaaattctgttttacttatcattctgttggaagagctgttcaatttttgtgtccttagagaaaattgcgatgattttgttttaacgtttagcttataaaaacaaaactttcttgtc

SEQ ID NO: 135096 - DNA, 616 bp, Arabidopsis thaliana columbia
  unsure (1)..(616): unsure at all n locations
annttaaaacctggtttgncaccgtgtttttattcagctctgtaggtaaacnctgccantcagacttccccnttgtnacctttnttacnntncaatggaacccntntcnggtgagttntccatggcntccggnagnggctntccagcttagggccccagaaaaagggaggttgagttccttcagggtttcncttaatantggggttagatgagttcaggaagccaaatcgatatgtcctatgattaggcagctttagccgcatcaccgagatgtggagactaagctgagagacactgcttaagagactagagcagcaactaggtgaagagcaagctgcaagacttgaagcggagaagagggcaaacgaagttcagaagcggtcgagcgatgagattaagaagctcagagagaatctggagagggcggaaaaagagacgaaggaacttcagaaaaaactgggaaagtgcatcaatctatgatatgttgagatgttgtagctccagtgaaatctgataagatcattcatgtcaagtttttttatgtagtcttttgttttcttttggttttttaacaatatggttttatcattaatggcagtgtgttataagtttgctt

SEQ ID NO: 135097 - DNA, 419 bp, Arabidopsis thaliana columbia
  unsure (1)..(419): unsure at all n locations
ggagcaacaaagataattgccccaaagaaaatgaacttctacaagtcaaagnatcttaaaaatggtacactcgagtccggtggtttctccgaaaacccgtgaacagccaagtaagagtaaaaaaaaagactggctcttctgcggtataatatcgaacaatgtatgangttgtgtgtaattttgtttaaaaagtgattagatagatataggggaaaagccttttggctttgctctaagcttctttttgctcctttcactatgtaataccttttgccttccacctaaaggcttaaaggttaattacttagtggaagcagcaacgngaagcttggcaaaggaggcttctgttctgtttcctgtttctgtatgtaaaccattgcaaattnccggtttgnctatgtaatatcccggttatgttt

SEQ ID NO: 135098 - DNA, 271 bp, Arabidopsis thaliana columbia
  unsure (1)..(271): unsure at all n locations
tttcagttcccaatcagccaagtggttccaatactaaacataactttgatagactgctacaagaaagggaaagagagagcaagagaggaganggcaaattttgtaaagaagaaccaaaggtatacaaatcatatacttgagaatatatttnctnagttgttgttgtgtgattggctttgttgtttcttctacttgagttagatcatgttagtataatcttggacaaaagggcaaatgagctaaaaaatgcataactaaagaattttcagac

SEQ ID NO: 135099 - DNA, 272 bp, Arabidopsis thaliana columbia
  unsure (1)..(272): unsure at all n locations
ggattccaggctgaacagcagangagattgagaggttttgggtgatgaagaatcatcgaagatctcaattacgttgatggccaactcttatatcatttttataataatgagagaganangaatgaaaaatatacatatatatncgttggtaattctncagttttgttcctgagttttgaagtagttgtgtgnncgggattttatgaatcacgaatggaacctttaataaattgaaggtaaagttttaatcaatcataaaaaataatttgtgg

SEQ ID NO: 135100 - DNA, 332 bp, Arabidopsis thaliana columbia
  unsure (1)..(332): unsure at all n locations
gggatgcaaatcgctcaagaactacgagaagaagtgcaagacgttggtgtttgaatatggacctctgatactcgtaaatgcagaggaattcctagtgaaaaacgacgtctgcacactcttgcgcgcatgccccctgaggaatcggttctaaggcagccggagttggctgattcttgaatgttcaaaacggttgctataacagggttttaaatccctatngggtatacaaagtagggacacgggcntntccntgaggattgtttcaagcttttttgtaggggcnataatgnaatngggtcaaaaannatcctnccnaaatttnccctttnccc

SEQ ID NO: 135101 - DNA, 276 bp, Arabidopsis thaliana columbia
  unsure (1)..(276): unsure at all n locations
ctccggggagagtaagatcttacgtcaaatgggtggtcctcttatcttgcttgatatccagtcgtttacctgggaactgtggaccgcaatgtacacttgacgggatgcattatgantctgcggtctaatgatgnccgctgtccatgtcangctcaatgcgttggttaattgaaatctcatcaatcctttatgaggtcttnacaaggttttttttttttgttttttttcccntttaatttnntttnggggtcncttttannggttttaagggaaatt

SEQ ID NO: 135102 - DNA, 270 bp, Arabidopsis thaliana columbia
  unsure (1)..(270): unsure at all n locations
aacaaaaacagtctttaaaatccatttgctaaacagcaagagtttttnttcagtacagtactaatgtaggccaagagtcaacaatacctttcccggtgccaacattgtagattccaactttgcgtggttttgccttttgaagagctttaacatgagcatcaaccaaatcagtgacatcaatgtaatcccgtacgcaagttccatcagcggttttgtagtctgtncctttgatcnggggaaaaagaaaagttaaatggaggtccaatggtt

SEQ ID NO: 135103 - DNA, 234 bp, Arabidopsis thaliana columbia
  unsure (1)..(234): unsure at all n locations
ccacattctccttctacgaggagaagtatgtncagctgcttcaactgctgcgttaaagcttgaagatttcttcttgagcaaagtagcagntttattattgacttgtgatttgaatgtggaaatgtgttaatgtcatgacactttaatatatgtcccaatccattttcctttttctttgggaaccatataagcnctattacaaggaaaagattatgggggaaattaagtatacac

SEQ ID NO: 135104 - DNA, 306 bp, Arabidopsis thaliana columbia
  unsure (1)..(306): unsure at all n locations
ctccatttctcagcctcgaagaacatcttagaactgatacngagattgaggggagaggtggacaagctactgaataagaagatagaggatccgagtttggacataacagtggaggggaaaggagtggtctcagctgtggtggagttgttacgtagccanaaacattaggtattaagcaaaattccagtgagtcttatcgtagtgtagagggattaagaaacgttagttattggaaaacgaggtgaatagactttacnctctgcttaagttataaaaggtantacaagttgtnattttagagctgtt

SEQ ID NO: 135105 - DNA, 431 bp, Arabidopsis thaliana columbia
  unsure (1)..(431): unsure at all n locations
caagtattcacgatatcaccactgttaacatccctnacgcagacgcatccgcaaccgccacgaccgctgacgtagcactctctcctactccagccaattcttttgacgttttccttcagccaaatcctcattacagtttcgcgtctgcggctgcgtctagctattataatgcgtttccgcagtggagttaaatcacttagaaattatctagagtttgtggtctcctatagatttgttacatacattttctacggacatattacnngcaggaatttgttgtaaaatatttgtaatnnaaaaaggttttgttgtgnattcctnctggcccatanaattaagggccncgggttgggttggaaattttcccaaggggtnccngggggtttnttaaaaacccccctttattgggatttntatnattntgggnnttt

SEQ ID NO: 135106 - DNA, 449 bp, Arabidopsis thaliana columbia
  unsure (1)..(449): unsure at all n locations
gggacggagtatgaagaattggagtcttcgtcttgttctgatgaatatttcgggctaatcggctgaggttacaaattctcgtgatcaagtttaggtccaaccaatctcttctggtgatctatggcaaaaggcgagtaggtacaatcgaaggcagagatagaggtttcttggaggactgagttgatctgccggctggtgaaggaagtttccggtgatgatgagtcggtgacagctgatgaaggaagtttccggtgatgatgagtcggtgacggcgaaacctttttcttctctcaacatcccacattgcataacacgtatctcttttttaattttccttaatccttgtgtttttgcaaattaagtgggggctaacttttttggccatctttcttgtacccgaatatcctgccccattttgggntttttataaaaccatatttnaggccggc

SEQ ID NO: 135107 - DNA, 401 bp, Arabidopsis thaliana columbia
  unsure (1)..(401): unsure at all n locations
gctgagtttaagcatatcaataagcggaggaaaagaaactaacaaggattcccttagtaacggcgagcgaaccgggaagagcccagcttgaaaatcggacgtcttcggcgttcgaattgtagtctggagaagcgtcctcagcgacggaccgggtctaagttccctggaaaggggcgccagagagggtgagagccccgtcgttgcccggaccctgtcgcaccacgangcgctgtctncgagtcgggttgtttggggaatncagncccaattcgggcgggtaaattccntccaagggtanattcggggnaagagaaccattngcgaacaaattccnggaaggtnaagtttgaaaccanantaagtantgaagaaatttaataaantttttntcttttcncaac

SEQ ID NO: 135108 - DNA, 465 bp, Arabidopsis thaliana columbia
  unsure (1)..(465): unsure at all n locations
gaaaaaggagatgctttatatgcaatggagttggctctgtctctagagaaactcactaatgagaagcttctaaacgttcacaaagtggcctcagagaacaatgatccccagttagctgatttcgttgagagtgaatttctgggagagcagattgaagcaatcaagaagatctcagactacatcacccagctaaggatgatcggcaaaggccacggagtttggcatttcgaccagatgcttctgaactagacttggacctctataagttcactttcagatgacccaatgttggggttaaaancaggaaggaccccgaaggattcctgtaaaaagcttttaggattgaaccattattgggcttaataaggatttntaggtaggnaagcttttngtggttccaagatgggtttttnggnaataaccttccggnaaggnttaanccaattgagggtttttgtttttngg

SEQ ID NO: 135109 - DNA, 362 bp, Arabidopsis thaliana columbia
  unsure (1)..(362): unsure at all n locations
gtggtggctggcgaaggagaagaagggaagagctgcgttgatggtttgaaggatctagatgttgaaggtattgagagaagcagtnagaagaaggatcagagtgatgaagatgaagaagaggagatgaaaccgatcttggttgaaggatttgtctganagtcctcacattgtcagaagtgttcttccctcgtgtatataaataaaaagtattagacttttacagcttacaaatccgtttgcnttgcttctgttgattgtncggtgcttaaatgtctganctttgtctccattggcaatggtggcaaagcttatgtatcgcctgtaagncacaaaactggatgaaataggattttgggccantt

SEQ ID NO: 135110 - DNA, 255 bp, Arabidopsis thaliana columbia
  unsure (1)..(255): unsure at all n locations
gaagaacataaagacagtaaaccttccgttgcagaagcagcagctcctttgaagacacctgagaactcaccgagtgctgaagatgcttgaaggttaaaaactttgaaacaactcgtcgtctagtatccttgtgttctatttgtctatgttgtttgaagttcaaatttggcagagagaatagagagactatatagatcacttganctccttatgggtctcttatgaatgaatattcgangttactgtttttaacat

SEQ ID NO: 135111 - DNA, 555 bp, Arabidopsis thaliana columbia
  unsure (1)..(555): unsure at all n locations
cggacgcgtgggctgtttcctaggcaaccaagcttttcttcctcatcttcctctcttccaaaggaagatgttttgaaaatgacacagactaccagatctgtgaaaccagagtctcaaactgcaccattgactatattctacgccgggcaagtgattgtattcaatgacttttctgctgagaaagccaaagaagtgatcaacttggcgagcaaaggcaccgctaatagcttagccaagaatcaaaccgatatcagaagcaacatcgctactatcgcaaaccaagttcctcatccaagaaaaaccacaacacaaagaggcaatccaatcctccccaacaacattggnaagaacttccctnttggtaggaaggggttccacttccaccggttcttggggaaggngaaagggcaagggttncggtcaaagggnaccnntcccaattttggggnnccccggccaaagggggtttccaaanccccccaaaaccnaagggaaaatttnggggggttcngggnntnggaangttttttttttttttttttncccccccccnaa

SEQ ID NO: 135112 - DNA, 332 bp, Arabidopsis thaliana columbia
  unsure (1)..(332): unsure at all n locations
ggcttcctgtttaagcttagcacattatttattttcgcattctagaggtattaagtagtcttgctcactgaagaagtcaaaaaagggggaaaggagaatggaagtttcagggtttgtncttctgttatctttaaccctctcatcctatgtatatagcccacaacaagcttgatggcataaactatatgaatagtttcaccccggaaacaagggttttcgcggtaaactggtaggaataagtttggtgtacaaagaaagttcatatatatataancacatacataaatgcaaaaaaaanncaaaacngaggnnancccnngngttncccntcc

SEQ ID NO: 135113 - DNA, 367 bp, Arabidopsis thaliana columbia
  unsure (1)..(367): unsure at all n locations
taccattcaaattcataagntntcatgctggtccaagaatctgtcttggcaaggatttcgcataccggcagatgaagatagtatcacnggcacttcttcacttctttcgcttcaaaatggctgatgagaacagcaaggtgtattacaagagaatgcttactcttcatgtcgatggaggactccatctctgtgcaatcccgaggacaagcacttgagtacttaaccagaatactttcccatacttttatagtgcctccatgagttttgggtaacaatctcaataaaggtgggaacaagacaacaattancgntcccatgttaataaataatcttgccttttattgggtcttggggattgactcaactt

SEQ ID NO: 135114 - DNA, 236 bp, Arabidopsis thaliana columbia
  unsure (1)..(236): unsure at all n locations
ggaagctggaggagctgtgactcggatggacggagggaagttttctgtgtttgataggnctgttttggtctccaacggcgttcttcaccccaagcttctggaaagaattgcacccgcaactgagaatttgaagtcgaaaggaatcgatttctcgttatggttcaaaccggaagattatcatacagagctttaagacttgttcaagaaaggtatataagattacattgttatgatct

SEQ ID NO: 135115 - DNA, 322 bp, Arabidopsis thaliana columbia
  unsure (1)..(322): unsure at all n locations
cnggaaccgatacgctggaccgttaagctgtccaaaacagccaaaccaatgcgacttcacgccgcttgcacctcctggttggtgggacggtatatggcaatcgnccattccacgggacactcgtaggcttgcagctttcggcattgagctttccgggtttggtacggttaacgaagaccggttccacgnctattgtagcgccaagaaagagtacgtaagcactttaacaatcatataatgacttcttgaaaaanattcttggctcttgggttataaatgggctcacttggttttattcttcaaaaaaaaaanngctntanat

SEQ ID NO: 135116 - DNA, 374 bp, Arabidopsis thaliana columbia
  unsure (1)..(374): unsure at all n locations
aagaccatcaacaatggatgctcctcatcaaaccttcctctntccnctcttatctcttacatatctaaatacatgaaggtactttcgagctcccatcgccggagatgagatgagacgggggccatatttggctggagaaggaagtgtgatccgtaagaccattttctaataaggtgtgatccattttatgggtgaaaactagagttagaaattgggcaactatgttcctttggcatttggttcttgaagagtttttttcttcttcttttgttttccacgtttcttgatgatataacaactatgatttntcagtattttttgcttcttatttctttttacttataaccgcatatttgtattaatccggttgctgg

SEQ ID NO: 135117 - DNA, 436 bp, Arabidopsis thaliana columbia
  unsure (1)..(436): unsure at all n locations
ggagttcgaccgatactttagagtataccctaaggagatggacaagggantttgggacttagcgagaaaggcggcgtacgaggagacagtgaaggggatgaaagagaggacatgtcggttggtgaagaagcagaaagagaagatcatgaagctgataagaggtggttgggagattaagaggcttgacgctacggcggcaattatggctganctgaatcaaagtacggcaaagggagaaggaaagaatgggagagagatttgggaaaaacacattgtggatgaaagtntcgagattgtcaagaagttttttttggaagtttagtctgtttttccccgttatacaacaacaaatgtacgtgtgtgtntttgcctttttaaatcatgttttggtgnctngatttgggntaaaannnttccagngcatatcttccncctg

SEQ ID NO: 135118 - DNA, 296 bp, Arabidopsis thaliana columbia
  unsure (1)..(296): unsure at all n locations
agaccatctcaaagaagagtttgatggaaacatctgcgagaacatcaggagctctctacacaagaatacgattttncgtggttccatccatcagcgtaaatcaggcatcagtgtattcttaaagggattaaaactcccaccagatttgctacaaagaactttgcttcagaatcacatcgacgtcaactaggccaagtgaatattatcagcctaattttcttaaacacaaacctgtgatttttacttatgtatgatgtatatatgaattctatttagagataatacaaatccttccc

SEQ ID NO: 135119 - DNA, 215 bp, Arabidopsis thaliana columbia
  unsure (1)..(215): unsure at all n locations
cggnaactaaaggctaagaaaggctccaagtaaacactaaacagccttcaactgttctgtgttcatctaaacttgcatttagtttttcattttggaaaagtatatgangattgattgatgtaactctatatttagttttctgtgtatattgtgattctatgtaaactatataancagtttctnccaatcttctcccatttatgggtttgatttgt

SEQ ID NO: 135120 - DNA, 263 bp, Arabidopsis thaliana columbia
aaaagaagctgctccgaaagttggagctgcaaaagagacaaagaaagaggaacaagagaagaaagacgagcccaagtttcaagctttctctgggaagaagtattcattgaggggttgatcaactcacacaatgggtctactcagtctatttatgacctctcatgttgtgtactaaaaatacaaggaaaacaaataagtgaataaatctctggctcctcttgacgcggcttgttttctttatcagattcaatgcaactttctac

SEQ ID NO: 135121 - DNA, 244 bp, Arabidopsis thaliana columbia
  unsure (1)..(244): unsure at all n locations
caatcaccaagtgacgacgtccttgaactttattctcaaatcaagtttgatcatgcatatttgttaaggngcctctctcgtattgtctccaccacttttctacgtgttttgttttcnccgatgttttactttgaaaaatctatttcaatcaagcaatatcgtgtaataaaagcaaggttctcgaaccngcgggtaaacttttnattttgaataatttattttcaatcaagcattcttttgactt

SEQ ID NO: 135122 - DNA, 441 bp, Arabidopsis thaliana columbia
  unsure (1)..(441): unsure at all n locations
gacgagtgttccttactacgcaccatctataaagcttggagctggtggtgttccgaccattcttgaggagcttcctcgtcagaaatcaaagaaagtcaaaccaacaggcaaatttagtcacccaatctttagtcttttctacggaaagaagaagaagtcgacgacgacgaagcctgagttttctaggtatcttgagtatttaaaggaaggtggtatgtgggatgccagagctaatgcgcctgtnatctattacaagtagntcggtatatgaatttgttaaaccaattaatccaggaaggggagaagggtattgaaagttttcctttnaattggttaaggtccaaancttctccnaattttgggggggntnttntttggaaananattntccaggggccccnantttngnnaagnttttaaaggggtttcccccatttttgg

SEQ ID NO: 135123 - DNA, 214 bp, Arabidopsis thaliana columbia
  unsure (1)..(214): unsure at all n locations
ggcggagttgctagagagagggtttattttnaatactgtggggaatcggttgtcctacgcggctttnccgtntaatgctttggatatttggaccggtgcttgtnttttnntnctcggtcgtnatggttcctctactttacaacctcgatttcttcttcttcggtaaagaaagaagaaaacttgatcaaaagtctagttttggatctgtgtaaaa

SEQ ID NO: 135124 - DNA, 249 bp, Arabidopsis thaliana columbia
  unsure (1)..(249): unsure at all n locations
gtttcttcgtcatcggagaaaacatacgatcaattgaagaaatcagcaacgcaatggagcaaattgctctgatacctganaggattttatatgaagaaggagaaatgaagaactgatttgcttatttctcacttctcagtaactctcacttatatatatggnggctttgacctcggtttacatcaattcaatcttaattatctggtttaagtaaaccaattactctcatacattaatatactcggttcg

SEQ ID NO: 135125 - DNA, 433 bp, Arabidopsis thaliana columbia
  unsure (1)..(433): unsure at all n locations
cgattngatattactttgataacaattgtaactatggcaataattacttcagtatactatgtgatccattcatggacagtacgtcacaaaggacctctatacttagcgatatttaagnctttntcgattttaatagcggtggttatgagcgcagtttttctcaacgattctctctatctcggatgtttgataggaggactattgataacgttggggttttacgctgtgatgtggggtaaagcaaacgaagagaaagatcaattgttgttagtttcaggaaaagngagaacccctcttctattgaacggctaaaatggccaaattagtatttaaaaatanattnggacctaantttacatattctttggcacactttttgggnaaatgtgtacanggattnttcntncntgnattccaagttncgcttttnttt

SEQ ID NO: 135126 - DNA, 218 bp, Arabidopsis thaliana columbia
  unsure (1)..(218): unsure at all n locations
gggtgttgtcggttacggtgccgaaagttcaggagagtaagccggaggtcaagtccgttgatatctctggttaagaggaactctgaagttggaaagcttaagacagtaatatgtgatagtntgaaataaatggtgcgactttcctttcttctttttcttgtaatcaccaatctcgttgtatcaatataagtaatcgtaataaaagagtgttttgatcc

SEQ ID NO: 135127 - DNA, 410 bp, Arabidopsis thaliana columbia
  unsure (1)..(410): unsure at all n locations
caaaaaaaaaagtaaatnctttaaaatntcgatgattccaagtttcttcaacaacaacagacgaagcaacatctttnatccattctctcttgacgtatgggatccattcaaggaactaacatcatcatcactttctcgtgagaactcagcgatcgtnaacgcacgtntggactggagagagacgcctgaggcccacgtgtttaaagctgacttgcctggattgaagaaggaggaagttaaagttgagattgaggaggatagtgttttnaagatcagtggagagagacacgtggngaaagaggttaggnttncacgtggcaccgttttngagagntcgagttggcagttttccgggggnggtttaggnttnccgganaatttttaaaggtggtnccagtttaaggcttcca

SEQ ID NO: 135128 - DNA, 334 bp, Arabidopsis thaliana columbia
  unsure (1)..(334): unsure at all n locations
aaaaaacaacgttagacgaaacatttccagtctgaagtattagtcccattttttgagttaaagcggantgtnggaatggttcatcattaccgaatgcagctacgttccctggacgtgagaaaactatctgcaatgttgcagaaatgcatatagtgtattcaaatcaagtctaaagcatggttatgtttctggttaatgtgctcgagtgtgtgtgtgttacctggtagtttctaagggtaagagtcttgaacccagctgcacagtagtcgnaataatattcccatgtccttaagaatttttngtcgnatccaagntcaatgnttttttnttccgc

SEQ ID NO: 135129 - DNA, 435 bp, Arabidopsis thaliana columbia
  unsure (1)..(435): unsure at all n locations
attttttccggcgagcggtgctgataacctcgtagctccgaaacgccgccatggccgcagaatttaatggaaaaatcgaaagcaaagggctaaacccgggactgatcgtccttcttgtaataggagggttgctactgacattccttgtaggaaacttcatcctttacacatacgcacagaagaatttacctccgaggaagaagaaacccgtttctaagaagaagatgaagaaagagaagatgaagcaaggcgtccaagttcctggcgagtagcttttgtnatatgttgtcgggattatcctttnatgntaactcactctgctggnctaggaccttgtatgactccgttactcatttaggtttttaatggttttcggatgtagcattncatganantttcntttnnggttgccaanctttaagctttncctggggt

SEQ ID NO: 135130 - DNA, 347 bp, Arabidopsis thaliana columbia
gaaggagttagcggctttgaatggtacactaagggaggagagtccgagtccgagcttgagcccttgtttgagccccagcatgtcccctttcaacagcaagcgtgctaagacagagatatgatcaagagaaaccactagtgcatgggtcttgtgggcaggatcatgagtttgctaagttctaacgtttggactcttgaattaatttattttgtcattaactttattctttatttttgttggttagctgagatgaccattaaccagtgggtaataaactaataatggtgtttatgaaattgtaatctccttctcaatcattgtaacctttatttaaagttttaaacccc

SEQ ID NO: 135131 - DNA, 432 bp, Arabidopsis thaliana columbia
  unsure (1)..(432): unsure at all n locations
tgaagctttatcaagagcttgtaaaggaggaaccaagagattttaggccgtatctttgtcagggaattatatacacattgctgaagaagaaagacaaggcagaagaacagtttgataactttcggaaacttgttccaaagaatcatccttatagagagtattttatggataatatgacagcaacaaagctttttnccgagaaggcgcangtgagatggctgaggagatggctggntcaactagttgatgagaatatgtgtaatgaggtgaaaaatcatgcttagaagactttggaaaatgtggtttttgaggatttncttgttgcaggtttttccttgancgcctcaagatgtatcctttagttggtttaccatnaaagttcataagncggattccttggtttaaatttaataantnggnttnggatcccgg

SEQ ID NO: 135132 - DNA, 232 bp, Arabidopsis thaliana columbia
ggagatatcttgttgcagtctgaccttggctccaatctcgagggagagtaaccactctttgcagctgctcttttggctgctgccacctctcctgtataagaatgtgtaatttacaataaagaaaaaagaagtaaatgaaagagtctactgttattgatccaatagcctgtaatgtagtatcatcaaatgtgtgaactcaatttttttttcttctgaagaattatcttcctac

SEQ ID NO: 135133 - DNA, 417 bp, Arabidopsis thaliana columbia
  unsure (1)..(417): unsure at all n locations
ggttgaggttgaagacaagaacgttctgcagattagcggagagaggagcaaggagaacgaagagaagaacgataagtggcaccgtgtggagagagctagtgggaagtttatgagaaggtttaggttaccggagaatgcaaagatggaagaagtgaaggcaacaatggagaatggtgtgcttacggttgtggttccgaaagcncctgagaagaagcctcaagtcaagtccatcgatatctccggggctaattgaatatgaagatgaagatgaaatatttggtgtgtcaaataaaaagcttgtgtgcttaagtttgtnttttttncttngcttgttgtgttatgaatttntgggcttttnctnatatttaaattgaatgtaagntccncnttntaaatggtttaccaaatttttccttt

SEQ ID NO: 135134 - DNA, 425 bp, Arabidopsis thaliana columbia
  unsure (1)..(425): unsure at all n locations
gcacagaggcttcaagttaaggccctcaagatggacaaggctttgaccggtatctccgcggctgctcttactgcttcgatggtgattccggagatagctgaagctgctggttctggaatntctccttccctcaagaatttcttgctcagcattgcttctggtggcctcgtcctcactgtcatcattggtgtcgtcgtcggcgtctccaactttgaccctgtcaagagaacctaagacctatatatctttcttacatcattattgtaatctgttctccttctgtgtattcgtttcaatgttgcagcaatgaacttttggntaaaagtcaaatttgttgtttccctgaattcggaagacggttganacttgaaatcataacactaagnttcattgaatcaagggtccaatgggttcaccaattccnt

SEQ ID NO: 135135 - DNA, 368 bp, Arabidopsis thaliana columbia
  unsure (1)..(368): unsure at all n locations
atgcatctgcattgaagaaatacacatatgggaaacatattgttagtcgtttggaacagccctctattgaagaaaaccaagaattgaggagatgagtggctcttctgatttcaagacagtgggctgactcagattcactcaatacaattcgctttttcatgaaagctggatattcattgggaaggtcttagatgattgtnaaggacatcgatattgttgtttacttggaattttatcatagccgttgtgatgattgtntggcatgttcctgtaaatattcataacctgtatcagtagttacttcagatctgtaacctnggtttttggatttcacantggnattcggaacctttcttggntnctagggg

SEQ ID NO: 135136 - DNA, 291 bp, Arabidopsis thaliana columbia
  unsure (1)..(291): unsure at all n locations
ggtgacttttgccaaggaacgagcggtgccgtggtggcatcctttattgctgcgactcttctcatgttcctcgtcatcctatctgcatttgctctcaagagaacaacctgaaaacttggattgatccncttgattaaattttnatgtgctttgatattcatttgtgtgaatttttattaaaaggttcctatgtataattnggttttgttgtgtttggtaactcgggttttagtgtggaaaaatgttgtaaatcaatcttctatattcacatattgttttcctttttnccct

SEQ ID NO: 135137 - DNA, 309 bp, Arabidopsis thaliana columbia
  unsure (1)..(309): unsure at all n locations
gttctttgacccgttaggattagcgtctgatccggagaagaaggctcagcttcagctagctgagatcaaacatgctcgtttagccatggttgggttcttgggttttncggttcaggcggctgcaaccggtaaaggaccactcaacaactgggcgactcaccttagtgacccacttcacaccaccattatcgataccttctcttcctcttgatgtggtggctcttagcttctataggtgtcatgtaatgatgtactgtcggtaantttaaaggaaatttgggancctttgnattaaacangatttctttt

SEQ ID NO: 135138 - DNA, 341 bp, Arabidopsis thaliana columbia
  unsure (1)..(341): unsure at all n locations
aagataggatggaaaagggtgctgcagctttcaattctncttggttaccgggaagtgactccaaagaaaaagagccggaagaagagaaaacgaaaaagaagaaaaggaagagaggtggaaagagtaaaacagagaagaagcaggatgagcaaggcttaggagaagatgacgttgtggaggattttttgttgagttctgatgaagaggaagaggatctgtttgatataggaggagacaaagatgaagatgatncagtagncgaaattncagntcctgngnccaagacatctaagaagnctaagggccttntaancctggcataagncttacaaaancccccg

SEQ ID NO: 135139 - DNA, 335 bp, Arabidopsis thaliana columbia
  unsure (1)..(335): unsure at all n locations
tctcagagtcttgacacctgcactgaggaaactatttgtataccctgtcaaatatgatgaggaaaacatctatatcagcattagagacagcgggaaaacagaggcagctgctgagatcgtcttcagtggaaaagctcagcctgggctcacagcaacaaacgtcaaatgtagncgaggtgagaatgattntggacgnggggttctnaaaggatttngggttcacggaggaggaccgagtggtaaaccgggaaggccggcaattaatagggtttctttcctgcttntnagnatttcgngctntttnaccnaggtaaaaggccttttttnaaaaggga

SEQ ID NO: 135140 - DNA, 471 bp, Arabidopsis thaliana columbia
  unsure (1)..(471): unsure at all n locations
gntcattccgttcttccagaacgcaaagctatcgaaagaagcagtaactgttcagcaatgctacattgagctctcaaagatggtcaaggagaagttgagctccttagacccgtactttgacaagcttgcagatgccatggttacatggattgangcttgggatgagcttaacccaccagcagccagtggcaaagcttgagagcagtatgagccaaaanggaaaagccaccaaagttttgggtatttttagctcaaattatcggtacttttaaaatttctggattttacggacccttccttgcttttttttacacaattgangtaggttttcaatcatcagnaccttttttcaattgtccnggttantgggtttngccaattngggtttaaaaatcacccggggttttttttaaaaananngggggggttttgnagngccntttcccnggggtttttccnntggttcccttt

SEQ ID NO: 135141 - DNA, 428 bp, Arabidopsis thaliana columbia
  unsure (1)..(428): unsure at all n locations
caagcaatctatctatctcgaaaaagcagcgatgcaagacgccgagacatcacgacagccggcgaagtctttgtccgatcgagtgaagactaactgtttatccatggcagtaacatgccaggaagggtttagctatgtnaaagccttttttgttggccagacaaagagattgacggcaaagaacgagaaggaagctacggaggctcatctaacggagacaaaaatgcaagttgacgcaaccgatgaagcagagaatgccaagaagagncttcatcaatcttcttaatgtttctttattaacatataataatggngtgtgtactttattangcanaccaccaaattatctgggggttttcaacctgtttctactactaatggtnnatgtnnttttcagtattggtttttnaattcagnnttctnttncc

SEQ ID NO: 135142 - DNA, 223 bp, Arabidopsis thaliana columbia
  unsure (1)..(223): unsure at all n locations
caaagtttaatgaagaacagaaggagaagatgatggagtttnctgagaagattggttggagaatgacaaaactagaagatgatgaagtgaatcggttttntcgtgagattaaagttaaaagacaagtgtttaaagtttggatgcacaacaataaacaagcagcaaagaagaaggatttgtaaganatttctatatatatatatatncnattttancttctctt

SEQ ID NO: 135143 - DNA, 401 bp, Arabidopsis thaliana columbia
  unsure (1)..(401): unsure at all n locations
gtgcgagtcaacgggtgagtaaacccgtaaggcgcaaggaagctgattggcgggatccctcgcgggtgcaccgccgaccgaccttgatcttctgagaagggttcgagtgtnagcatgcctgtcgggacccgaaagatggtgaactatgcctgagcggggtaaagccagaggaaactctggtggaagcccgcagcgatactgacgtgcaaatcgttcgtctgacttgggtataggggcgaaagactaaaagaaggaaaaagaaaaatactatagtagcatcttaattaattaatgcataaataaggaccaaaggaataagtagttgggctttaattaccgctgtactttgtaatataactaaacctataaatatattgtgttcttgcgccaaaaaaaaaatt

SEQ ID NO: 135144 - DNA, 333 bp, Arabidopsis thaliana columbia
  unsure (1)..(333): unsure at all n locations
aagaagaacaacaacactaagcaaaaaagaaaagctcaagccgagagagacaatggcatcaacattnacgagctcaagcagtgttcttaccccaacaacattccttggccagactaaagcctcaagctttaacccccttcgtnatgttgtntctttnggntctcccaagtacactatgggnaatgntctttggtatggacctgacagagtgangtacttaggncccttttccgttcaaactccgtnttaccttaccggagaattccttggcgattatggttggggcaccgncggtttatccggaggcccctgaangcctttgcaaaaacagng

SEQ ID NO: 135145 - DNA, 359 bp, Arabidopsis thaliana columbia
  unsure (1)..(359): unsure at all n locations
cagcttttntctcagatctgtttgtncggatttngtatcacacatgggatctaaacctagctcgctggctgatgaagtagccattattgttgagcaagtagacaaggttatggggatggttttttggtgccccctctactgggaatctatagaactccttgcaaaanatgaggtttcacgagccatatttnatggactaacagaaggatgtaagcttgattatcttaaatacaagncaaaagcttccatggtcccagaaatgncacggttttatagttaaaagcttaaaacatctatgntttnatgnttttggntttggnttttgtgaaagatgtngtgcttgagnttgatattgtcgg

SEQ ID NO: 135146 - DNA, 373 bp, Arabidopsis thaliana columbia
  unsure (1)..(373): unsure at all n locations
gattttattactttcaagttctgccctgtttatttacagccacttgtgagcaactcgttttcgtatctatggacaatctacataacttatatggcaagccgtgcgacgccaaccgccattgaaatttgaaaaagctctctgggaaactctctcagtttagaaatgaagaaatgaagccaaaaaacacttttactaaaagaaacagggcattcttcaacattctttgtttcctctctccagattttaggaggntataatgtaaggngttttggggaaaactgtgcatttggacatgtcttacactctnagntttaattcaattctatgtttagtattccatgtaatatttgngtaaaatggtggtctntagctt

SEQ ID NO: 135147 - DNA, 442 bp, Arabidopsis thaliana columbia
  unsure (1)..(442): unsure at all n locations
agaaacgagacattacagaggcgtgagaaggaggccatgggggaaatttgcagcagagattcgagatccggcaaagaaaggntccaggatttggttaggcacttttgagagtgatattgatgctgcaagggcttatgactatgcagcttttaagctcaggggaagaaaagctgttctcaactttcctttggatgcaggaaagtatgatgctccggtcaattcatgccgaaaaaggaggagaaccgatttaccacagcctcaaggnacaacaacaagtacttcatcatcgtcatcaaactaattgggatagtgatgtttaattagnatatatagggtaatatctttaagtatgtgnaagnctcannttttgggccaggaccctttnnggntgggttcctaaaaggnccttttncaaaattngccttaanggtcccnnaaaatg

SEQ ID NO: 135148 - DNA, 525 bp, Arabidopsis thaliana columbia
  unsure (1)..(525): unsure at all n locations
gccttaaaaaaaagaaaaaagagacagaagaagaaaaagataaagaagaatcaaactttgtaaccctttagcagcaatggcgatggctttcaagatggcgacgacggggatgcgtgtgacggatgagtgtacgagttcattcatggacatgaaatggaagaaagttcatagatacatcgttttcaagatcgaagagaagtcacgtaaagtcaccgtcgataaagtcggcggcgcggttgaaagctaccacgatctcgaagattctttaccggtggatgattgtcgctacgctgtctttgatttcgactttgtcaccgtcgntaactnccgcaagagcaagatcttcttcatttgcatggtcanccggaggcatcaaaggtnaagggcaaangtatttttccgcaacgtcgaaagatgggnttnnggagagttttggnagggnttccctntgnctccaagtncttttcccncgggnatgggttcgatttttccagcccgnccaatnngttnccctatggntttntt

SEQ ID NO: 135149 - DNA, 230 bp, Arabidopsis thaliana columbia
  unsure (1)..(230): unsure at all n locations
acaaaagccagagaaagcatcacaagcttcaggccaccaaaagtgatctgcaacaacaaacaaagaaagcaaagaaggccaaaaccacacccacaagctgcaaaacaggaaacgaatgcgaagaaacctcacataagctaaatagcagcacctaagataagcattacctgtaaatctttgcatttaaatcacaaaagtttgttctttcgaatcagataacaactttntgt

SEQ ID NO: 135150 - DNA, 282 bp, Arabidopsis thaliana columbia
aaccaggttggtcaggtgaattgcaacaattgcaaactgctactgatgtatccttatggagctccagctgttagatgttcctcctgcaattctgtcacagatatcagtgaaaacaacaaacgacctccatggtctgagcagcaaggaccactcaaaagtttaagcagtctcaggagagcagagaattaaacttgaaccgatttttgtcaattttgaaccggtttgacgactaaaaaccttgtaataatgtcgaaggatagatgaaataaaatcaccattaat

SEQ ID NO: 135151 - DNA, 352 bp, Arabidopsis thaliana columbia
  unsure (1)..(352): unsure at all n locations
gatgagtatgctcctgtggttgaaatgttggatgaaagtnatggagaatatatggataaaaccacttagacatcgatcgatgcagtctttgtnttcatagcttcttcagcttttaacctctcaagccattccaaaaagcagctgcgttgatggctttnttaccaggaagctggacttccagtacctgaatcagcaacaccaaatatgagctttataaatagtagattaatgtctgattaccacatcacaacatctgcttttggtatcaatactgtgagngggcctgnaactgggttggtttagnggttaagngncanttttcgcctaanctttcccntnaaaggtnccccnc

SEQ ID NO: 135152 - DNA, 318 bp, Arabidopsis thaliana columbia
  unsure (1)..(318): unsure at all n locations
gaacngcgatgaggtcatggtcattgacaatnaggctctgtacgacatttgcttcaggaccctcaagctcaccacncctacctacggtgacctcaaccacctcgtgtcggcatccatgtccggtgtgaccngctgtctccgcttccntggtcagctcaactctgacttgaggaagttggctgtcaacctcatccccttccctcgtcttcacttcttcatgatcggcttcgttcccgtcacttctcgtggctcttaacaaatacggggccttaaccgngcccgnggttaattaaaaaattttngggngnaaaanaaaat

SEQ ID NO: 135153 - DNA, 420 bp, Arabidopsis thaliana columbia
  unsure (1)..(420): unsure at all n locations
aatcgttttactactcgcagatagcgagtactgtnagatggctaggaaccgcaagcagagatganctaannacccgacttagctcagtggtcagtttggctagagagcaagagccattagaagagccgttgctggctactgaaccggtggagaacatagaggaagaagatgatggtaagactaacacggtcgagtcaagggttgatgaacggacacaagagctagtggtgagtccgatcctttcgcctataaggcttccacaagttccatcattctcagagtttgttaaccggagaaaaataaaccaaaccacattggtaggtaaatcttctgaagggttttnttgncaagaaccggcaaagttaattnaggntcattaataaaaatttgctaaaccctcanggtttttttccnnnggcc

SEQ ID NO: 135154 - DNA, 378 bp, Arabidopsis thaliana columbia
  unsure (1)..(378): unsure at all n locations
agaagagcagcttcgttttcagaaccttcccaggtatgttgttgcttttcagaaattatctagatatgggttcttctttcgattcttttttaatcatgagataatttttgatatatggtagttgttgaatcataagagaacttttgactagattcgttttttncttcaaaatttgagtgttgttgattgcttttgtatgaaacttgtcaaaaaaaaaaaaaaaaaaaaaaaaaaaancttgtcaaaangattttgngtataggcagtaaaagattttngattcanggttttcaactttgngatgattagttttcgccggntagangngantcccgntgaaaggatgaatctncctttaggnaacatatggttcancct

SEQ ID NO: 135155 - DNA, 566 bp, Arabidopsis thaliana columbia
  unsure (1)..(566): unsure at all n locations
ctcaaatcgttttctccagttttnttgggataaatcttcctcctttctgcagacgccatgtcggacaaaggtcgtcccttgccaaaatttggtgaatgggatgtgaatgatccagcatcagcagaaggttttacagtgatattcaacaaagctagggatgagaaaaagaccggtggcaaaccgggatcacccggtaaatccagtgagggtcatgttaaatctggaggaggagatcctagtaaacctcagcctaaaaaatggctctgctgcatgcaagctccagctgtggactcttgacagncacaaagatggatttgcttgctgctaaaaaaaaaagtcacagtgcttanacatctaaaagcaatggtncttttaatgttttattgtcggctttcttgaaatncccncacacncaaaaaaaaagggtcctaggttgttttggggctncccccnttttggttccggtttgntccctcctccttnangtgttntnctttaaaagnntaaaaccgggcnccctttttttggaaaanaaggggggaccggaaaaccngntttttnttagc

SEQ ID NO: 135156 - DNA, 358 bp, Arabidopsis thaliana columbia
  unsure (1)..(358): unsure at all n locations
catctctctgaaaaaatgccgagcaactgtnagattctgtgcgagatcattatcgcgatccttcttcctcctctcggagtttgcttcaggaaaggatgctgcactgtggagtttttgatatgcctggtgttgacgatcttaggctatgtcccggggataatatatgcnatttacgtgattgtntttcagcaccgtgaagagtactttgatgaatacagacgccccatctactctgcttgatttctgtttctttggaactgtgttgctttgacttgtaccaataaagttgctttgcagttgttttcagagatttgaaaacgtttgtgtgtcatttatatgcaatattgaaagtttcttc

SEQ ID NO: 135157 - DNA, 434 bp, Arabidopsis thaliana columbia
  unsure (1)..(434): unsure at all n locations
gacggngaatggaacggtttaagcttggagacaagacagatatgtgtagttgatgtaatggagcttagtgagtcatatgatgggagcaaaaagatgatcccttatggatcagatgatgttgggaggactttcacagaggcgaattcaaggtttggagttatgagagtggcttgggatgtgaataagcttcagtattagactcagttgcattgaatttgaccagtaggtttttnattttggtttatttttaacngtttagagattcnccnctgttttgtgagctttgtctcnctctctctgtggttatttacaggcaaaggttgagactttgaggaggaaggtaattaccagagggnataagtttgnctttttnaancncagttaagtngnctttanagctantttaaggnaccaaattttaaattntttccggg

SEQ ID NO: 135158 - DNA, 270 bp, Arabidopsis thaliana columbia
  unsure (1)..(270): unsure at all n locations
ccggncccggtaattncccgggtgcgtacccacgtcgtccgatcaaatgcaaaatttgcttccagagggtagattcctcctcactctcggtccttgggtctctcattttgcatgacgaagactttgttaataggctcttctctcatctgtgtacaatatttgaatatttcatagcatcagatcagtccagagctgctacactgttttcntttnctatcttttttnggaaattnactttnatgtnctatacttgaatgctatctctttgcc

SEQ ID NO: 135159 - DNA, 487 bp, Arabidopsis thaliana columbia
  unsure (1)..(487): unsure at all n locations
accggncccggcaattncccgggtgcgacccacgccgtccgacggaattaagttcttcgaaacaagtgccaagacaaacctaaacgtggaagaagttttntnctcaatagggagggacattaagcagaggctttcagacaccgactngagggcagagcctgcaacgntcaagataagccaaacggaccaagcagctggagcagggcaggccacacagaaatctgcatgctgtggaacttaaaaaagttttaaaagtgaagtttaagtcgaaaaaagtttgggggtgaagtgaaaaactaagatatcgttgggtgcttatntaatttttggttttatgccaacaattctgattcgttcttcttaaattgtcccttcctatttgtncggnggtttaatcgaaacttgtattttcttttncctattnacctggttttttnatggcgggtggctnnattggtttattgttgggcaacanttccnncnnaaa

SEQ ID NO: 135160 - DNA, 321 bp, Arabidopsis thaliana columbia
  unsure (1)..(321): unsure at all n locations
caaaacacttgatgacaacgagaagaacattttnttggacattgcttgtttcttcagtggagaaaatgttgactatgtnatgcgactacttgaggggtgtggttttttnccacatgttgggattgatgtncttgtggagaactgtctggtgactatttcagaaaacagagtgaaaatncatagaataatccaagactttggccgagaaataatcgatggagaaacagtacagatcganaggcgtcgcagctgtcagatccttggngcatcaaattccttcttgaagatgacggactcgaatgcaaattaaggttcccccgt

SEQ ID NO: 135161 - DNA, 230 bp, Arabidopsis thaliana columbia
  unsure (1)..(230): unsure at all n locations
gccaatnacgcacttggttcgcttggaactgatccgttggaaacaacgnggattgtngaactaggcggtgcttctncncaggtttagtcttgtntctctcgttggatgctagagtactagaccatgcatacatttacgctatatataagctggcttncncttttcctttgnataaatgtagggtatttcccgtccaatttttggcaggaaaaaatgatttgacttttttt

SEQ ID NO: 135162 - DNA, 339 bp, Arabidopsis thaliana columbia
  unsure (1)..(339): unsure at all n locations
tccaaacacaaaataaaaaaaanttnattcaaaagcttaattagcagttttaaaacatggcttcaaagaacactacagctttntncctcaccatcaacctcatctnatttggcttcaccgtggcccaacctccganatgtccaagggacatcgaagcttgtngcaacgtgtttggcctgggcaggattctcaactatcaaacagtgaggccatgtngcactctcgtggatgggcttgaggcctatntggcatctgtntgcatctgcnattccattaaaatatatggcatcagttatccattcactgtggggcttgttcaaagtncttagccttttnggg

SEQ ID NO: 135163 - DNA, 406 bp, Arabidopsis thaliana columbia
  unsure (1)..(406): unsure at all n locations
tgttggtgttgttgcttcagccaggaagctaatagggaaaacagatccgcttcaagctgaaccnggtactataagaggagatcttgctgtgcaaaccggaaggaacattgtgcatggtagtgacagccctgaaaacggcaagcgtgagattggtctgtggttcaaagagggcgagctatgcaagtgggattcggctctagctacatggctaagggagtnatccttgagaagacagagtcaattataatggtgtccttacttgttttcttgttaccgatgatgagctttggtgttttgttcctgattttgggcggcaatataatataacngccaatctatggcttgatttctnctcaatatctgtaatcacttgtcatgtaatcaaaacttggtaccagattcatct

SEQ ID NO: 135164 - DNA, 228 bp, Arabidopsis thaliana columbia
  unsure (1)..(228): unsure at all n locations
gtcgtctttcttgaaattacccacacacacaaaaaaaaaaggttcctaagatgatttggagctcacccacctttagtatcacgattatgattccttcttctttgaagttgtttcttcttcttaaaatnctgtaaaatcgtgtctccattttattggaaaaaaaaaaggaagaaaaacgaaaaaaaacacagttactgtgtctatatgtaatgattctcttggggtctt

SEQ ID NO: 135165 - DNA, 422 bp, Arabidopsis thaliana columbia
  unsure (1)..(422): unsure at all n locations
aaaancctnaattccgctctacgtaagatagccaaagtacggttgagcaatcgacatgatatatttccttacatcccgggcgaaggtcataatttncaggagtgttaacaatttcactggtctgcaaataaaattatcttatggaagcttgagaggcaagagatggtcaactagtcaaaccaccaccactctctcatctctgtnttcttaaagttcgataataattttnggagaggagactctggttgtccatcaacagagtggtcatgagccacatgtattgcttgtgtatagagagatttagaaattaggacctttttcgtataaatatactcattgtactcagttacttcactngnctcatctctgtttnnggnatattnggaatncngtatcncaaataaattnaatcttatcaaatt

SEQ ID NO: 135166 - DNA, 334 bp, Arabidopsis thaliana columbia
  unsure (1)..(334): unsure at all n locations
ggggcagtcaattggagcttggagcattaacacattgcttgaggaaacacataaaggtgtattcgggatcgtttccggatgttgagatgggcaaagagtatagatccggcgatgactcgagcctcatgttatcgtatcacaggcatgctttttggggtcggggagcattataantcagtggngntncgtcaacaaccatcaaccgggattgatggnatgatggnccttaatcctaaagcttttagggaaaaggcctttttgtnttcaaaaggttncctggaaaatcctttcctcccttaaaaggttttttttggnttttnggngganccnattg

SEQ ID NO: 135167 - DNA, 358 bp, Arabidopsis thaliana columbia
  unsure (1)..(358): unsure at all n locations
gctgcggctgcggtggcaaaagaagagaagtctagccggagattatgtcgaaggtggaaaccgtcgttggagagtgtcattgaatggcctgaagaaattgtagtgaatgaaattgacgaaaatgaagaagacaatggtgcttacaacaatgatgagctcaatcttggtctcaactctcaagtactaaagatgatttatctatcatttattttctgtggtcaaaaataaaagctgaactatctctttcttaatttcctttctatgtattatagcttttcctaaacatacattgggacaagaaactttatgttgaacantattgttttaagnntcatatgtttttgcncttaatcttncc

SEQ ID NO: 135168 - DNA, 382 bp, Arabidopsis thaliana columbia
  unsure (1)..(382): unsure at all n locations
cttcaccacctgcangacaacagcaacancanctttcaccaaccagcttcaatcgancagaatcanccattcttgtctagatctccttctgtccttcacagaatcaaatctttcaatctttataactacattnctcaagancccaccaatataatcgaagcttcaccaccgtcggtgaccgtagagacaaaacaagancaagtacaagaccaagangtaaaatccatgtttttatcccaaaactctggtgattcatttcccttcaataaaaccgttcctttggnggncaatatctgcttgtttactatcatgggactgcaaatcaaaaggtaaactcatgtgttgtttcgnttnttactcgagtcgttgtgcacattnnaaa

SEQ ID NO: 135169 - DNA, 241 bp, Arabidopsis thaliana columbia
  unsure (1)..(241): unsure at all n locations
aaaggtggtaaacttgatgctgttaccgtcatcatttcattcgtgaaaattgtctctacataaatatgcatctncctattaattgtaaataatggagagagccgcacacattcacaacaccattctagttttnccaaaaatttcattgaaacgatgtacactggagtaagtttgcattcctgagctatatatgtgagccggatcagtcctgggtctgaccccgatatccagttttccgccc

SEQ ID NO: 135170 - DNA, 259 bp, Arabidopsis thaliana columbia
  unsure (1)..(259): unsure at all n locations
ggccattcgtnctggagccaggtgcacgcatagacgaaccagacaaggaaggaatcatagattcacatggagaagttttggcaagaggaagaaaatcgtacaaatntnatcaaaaggctttnatgtcttacgacaagcttcaaataagtnttgancaaggtttagccactctctcctctcctgantaattctnactgatacatganatgtgatgagatgctcttttgtntctcatatcctttttaatccgtttacttgg

SEQ ID NO: 135171 - DNA, 227 bp, Arabidopsis thaliana columbia
  unsure (1)..(227): unsure at all n locations
aagtcgctgaggaatatccttacaaggatgatgaataaatatcaatctcttatcttccctcttcctcaaagagaaactaattactgttttgtagtctctttctctgcattcttagctttgttttttttcnccgcaaacacaaaactataagctatgaaactaaatactgtttaaatccatttcttagtgttctgatgtgncanaaaataagnntaatngntnnaata

SEQ ID NO: 135172 - DNA, 294 bp, Arabidopsis thaliana columbia
  unsure (1)..(294): unsure at all n locations
gttagttttgttgatcattttcttgtgcacattcagcttcaaaggacgttcaccaaaggcagaaccaagaaccgcatagaccaacatcgctcaactacttttctctattgccatacaaaagcgaagtaattgtctccgatttaaagttttcaattttttgtgctatatncnttagattttgttttgtaaggattaagcaaacaatatgtagttcgtccaaaaatgtatagtgatgttaaagaattatatgaaattgcaaagttttaaagaagaaaaaaaaannagngangngng

SEQ ID NO: 135173 - DNA, 327 bp, Arabidopsis thaliana columbia
  unsure (1)..(327): unsure at all n locations
atggnaactcgacgttgcaacactatacgcaatataaagcgatggagttgagaggatgtgtgaaggatcttcaacgattgtgtagtactgctcacggctctacactacctgctgttagagagaagtatagtcaacacaaatacaagtttgtggcgaagaagttttgtccatccgtaatcccacaagagttcttcaacaacagctaaaaatcctttaatttaacttttgttccaatgttgtgttggatttaattgtttgattgtacatgattttcnctgttgttgggnctattttataaaattaggctatctacggtnctcacttttg

SEQ ID NO: 135174 - DNA, 484 bp, Arabidopsis thaliana columbia
  unsure (1)..(484): unsure at all n locations
accggncccggcaattncccgggntcgnacccacgcgtccggctccacaagcggatgaattgaagcaaatcatcgaggataacgggtgtttcacgattgaggtattcgaaaatattatacacgccaagggagagtatccgttagaccccgagtttttaacagtctcctttaaggtcacggttggaggatcagtagcttcactatttgggcaagatggtatggagaaaacctttgagcttgtgaaagagaagacacaagaaatgcttcctcagatagccaaagccaaacccggaatgcaatacctcattgtgcttcgaagnaactgttttcatgatctatttagatctttgaaacgngncttaaataatgtaattgcaatgatgtgtgttttgtgtgtgtatgtgttgtatttgtttgtnatttttaaataggcccctttcggtttaatgnntntcncaattccatttcncaacngttcatnttt

SEQ ID NO: 135175 - DNA, 427 bp, Arabidopsis thaliana columbia
  unsure (1)..(427): unsure at all n locations
cacncctctcaccaaaactaatcagattaataaaagttttcctctgtnttatcagatctcaatggagaaatcagatagacgaagcgaagaaagtcacctatggattcctcttcagtgcctcgaccaaaccctcagagctatcttgaaatnccttggtctttttnatcaagattctccgacaacgtcctctcccggaacttcgaaacagccgaagaggaaaaagaagacgttaccatggaaaaggaggaggtcgttgtgacgagtagagccacaaaggtcaaggcaaagcaaagggggaaggaggaagttagctcagggccgtccttggccaacatatttnggcncttttaaggttacattgnttaggcctaattntttttcagtggaaattggtttanttaaaanncccngtttnaccttttttttt

SEQ ID NO: 135176 - DNA, 205 bp, Arabidopsis thaliana columbia
  unsure (1)..(205): unsure at all n locations
gttaataatagtatatatatatatgtataagtagggtacctaatctntgtngttaatctaattnagtgagtcaggaaccgactcgttggctaaggtctctccttttnaaacgcaacgttctactttnatgtatataaatacagtctgatcacacaacacaaattgatgattgaaaatacnactgatttanctttatagaaaaccc

SEQ ID NO: 135177 - DNA, 442 bp, Arabidopsis thaliana columbia
  unsure (1)..(442): unsure at all n locations
gaagtaaatgtggaagacgactcatgtatgtccttcgagttacaagactccaacttgatcttcagtcacaacccaatcaaaaacagagagtgccacagatctggtgaagattcatattcatttgatgatcagagattcacatcagattgttggaacaagaacaacgatcnacnaccaacttcaaacattattgaggagatatttggtcaagacgattggggagataaagatgataataacttgaaggagaagtaaataaaaagttttcntcncctctttcatggattcngcagatttttttttttcttaagtgaatnagataaagatgcagaagtttgaaagtntcanctttaggagttttgtgttggtaaaggttgaagagaaagggcctncccgattggtttgccccggaaaaatgncatccaanccangacccttttcc

SEQ ID NO: 135178 - DNA, 398 bp, Arabidopsis thaliana columbia
  unsure (1)..(398): unsure at all n locations
cggacnggtcngagaacgcgtgggncggacgcgtgggcggacgngtgggcgggccatgggcggacggncggggtcgtacgaggagnatttctgccttgatagatgatagtttttggtcggacgtcatatcggtagataattcgaataagaatgagaagaagatagaggattgggaaggattgatcgatagaaatagtaaaaaatgtagctatagtaattctaagttgtataatgatgacatggagttttggtttgatgttttcacnagtaatcgtagaattgaggaattttccgacatacccgagttttaattttgattttgattttgtgttgtttttgtcgttaagactttgaaagnccttttgtaancccaatgaataaatncccttccttttcct

SEQ ID NO: 135179 - DNA, 351 bp, Arabidopsis thaliana columbia
  unsure (1)..(351): unsure at all n locations
ggagaattggatgatcgctggtaggaagagaggccatgtctctctctcagaggagcaaggttcaagagtagtaatctcgatactatgtgtcccgttagttgcgggttatgtccgtcctcctcaactcgggttgccaaacgtagaagaagcaaatgtaagcagcaatccatcgggtcctcacttagtatgtgtcttgcctccacttctcagttcttcctacngcttacctgtcaagtaatagaatctcacnctatattttttccaagaaaacattttttctgtatttttattttgtttgcgatcaaagaaatatcagagtatgggntcatcaatgatgagagtgatttttcc

SEQ ID NO: 135180 - DNA, 323 bp, Arabidopsis thaliana columbia
gaatatttgatgattcaaacacagaaaaattgcgaaaaatggtatcgaagacgggagtcgaaaacgagatgttttatttcgatccaaaggttctcgattgggacgactattttttgaacacacatgttattgggctgcttaagtatgtcttctaataattttagttgtataatctttatcttattttactacaacgagtataaattatgtggacactatcgttctccttaatccgttttcatacggctatgtttcgaaatttggttatagacttgggctgtttatctctataatgaaactatatattggatgtaattttcttc

SEQ ID NO: 135181 - DNA, 314 bp, Arabidopsis thaliana columbia
cagtaatgtagctgagatggctaagaagaacagaaactcagagaaagtggtggctcttgtttgtcaacacttcacttgcagtcctcctgtctttgactcttcttctctcactcgcttgctttccaagtaaacaaagatcattccatgtttaatagttgcttgtactgtaaggaacagatcaacgttgttctctctgttacagtcttacagagtagataaataaagaagagaactaaaccgagtatgaggttttttggttgaactaaaccggaaataaccgggtttggtttggttaaaaaaacagagctttgacg

SEQ ID NO: 135182 - DNA, 279 bp, Arabidopsis thaliana columbia
gtgattggaagagttatatgactcctgaaatggaaaacaaaatcgacatgattgttgaggagaaacttcaaggctctggtttgaaattgtagagttcatatctctatgtatatgtgtgggaacaggtttaatctcaaacctaataatgctggtttgttcttttcttgtatgcaatgtaataaaagttactttgatgtaaggttaagagtttaagattcttagtgatgtgttgttgtttttgtttcgtttgataatgaataaagctagcggcttttcttc

SEQ ID NO: 135183 - DNA, 249 bp, Arabidopsis thaliana columbia
  unsure (1)..(249): unsure at all n locations
cgaccagattttatgataccgattgctactgtgttagtgggctttactctcttttttgcgtttatgtttgcttttggcataagaacgctcaacttccaacaacgatagggtgtagttgcctgccggatatgtttggcgtgaagnagaaaaaaatgaaaaatgagggtttatnccatanagtttgtgattgatgctttattgattgtaagtaaagtgtacaatatatacaacacaatagattgtggggag

SEQ ID NO: 135184 - DNA, 218 bp, Arabidopsis thaliana columbia
cacggaagcactgaagaggcgtgtaattttactggtactggtcaagtcgttactgctgatccaagttatggtagttgtgtgtatacatagattacatagtttaatgaatggttttgctattacaaagtttgtttacgaataatacaattatgtggaatcaaaaatatttataaaaattatgtaaggtttataaaaagtaatgttatcattcattcatc

SEQ ID NO: 135185 - DNA, 328 bp, Arabidopsis thaliana columbia
  unsure (1)..(328): unsure at all n locations
gtaccgtcttattgcggacnactactctgctgatgatttggtgatgtagcgataaaggactagttttcggtcacttggtgggaacnatacaacattcagtcggatagtcggtcattcacaattgaagaatatatgtacatngcacaaaaacagttgctcaaggattgtgaatgaaaaagagaaacatcttagtntctgaaattgtcaggccaagtttatttttgccgtgtcttgggtaattcccttagctcagtccncaatggnggccattggtacctgnnaggaanncgccccttcaaacacaacggtttccctnggnnggcctttg

SEQ ID NO: 135186 - DNA, 439 bp, Arabidopsis thaliana columbia
  unsure (1)..(439): unsure at all n locations
anggaccnggccngnactncctgggtcaacccacngcagccnggttttcaaacccaagantgggtttccngtcggaaacgatgacattctggttagtcatattctcgttgagacagagagaagacagagaaagagagagatgttgagagagagaaggtgaggaggaggaaatggtgaaggaggagtagaggaatttataagaagaaggaagagaagacaaaagaaataggaaaaaacttcatctatcattggtggctccctctgtacctttttggccacattatgcctctctttctctctttttattttcacgctccattggatccttgggaaatnagttatttaagggtttttaagcatgttttttccaacgtggtctgnaggncncaatggnaatgaaatgtatagggtccaataatggnaaatttaggaccancgg

SEQ ID NO: 135187 - DNA, 460 bp, Arabidopsis thaliana columbia
  unsure (1)..(460): unsure at all n locations
ctccgagattacaaccccagagatcaacttgagatggtacctggacacggctggtatgaaaaaatcattggcatacgttgttaatggcgttttcatcttcttggcttggctggttgctagaattctactgttcatatacatgttttatcatgtttatctccactacaaccaggtcatgaggatgcacatctttggttacgttctggtattcggcgtaccagctgcgctcggtgtcatgaacttganatggttcgggaagattgtgagaggggtaaagaaaacattagcaaagagatgtgaatgttgagattggtgagtcttcctcacaccgtttccttcacttcatcatcgccttacttcttcgtcccnctganatatgcctggcccccaagnggaagnagtttttgccngntgaanaaagaaaacgnnaaaccaaaanggnaanggnccgncccncggc

SEQ ID NO: 135188 - DNA, 448 bp, Arabidopsis thaliana columbia
  unsure (1)..(448): unsure at all n locations
tctataatgatcgtagcttttagtgtttctctaatgatatactttttaaatgcaagagttttatgatgttttggcattgtttcatcgattggattggaaagatataatcagttatagttgttgtcattctaatccaataacttttgtatagttgcttgccatgttccttgtttgtgtatgttgacaaacattacattatggttgaagaggtcgcctttagtttcgatggaggaaaagattcnagttatncnccaaaccttaggaagattaaggcggtgaacaagaagaaagtaagaagagccaaactttatnaccncaggggcaagggccatggtcccaggaagcctcacgctttgcccncaangcccncaatgaatgaanaccgccttgggttaaccctgggccttnaatttgggancgggaacccganccgnaanggnctncggtt

SEQ ID NO: 135189 - DNA, 359 bp, Arabidopsis thaliana columbia
  unsure (1)..(359): unsure at all n locations
tagagagtcaagctcaagcacctgcaatccataagaatggaggagaaggctcacttaaaccagaagaatgtccaaaggcatgtgaatatcgatgttcggcgacatctcacaggaaaccatgtttgtttttttgcaacaaatgttgtaacaaatgtttgtgtgtaccatcgggaacatatggacacaaagaagaatgtccttgctacaataattggacgaccaaagaaggtggaccaaaatgtccatgaaaacaaaaaattgtaaaagcaaaataaaatctatcgttgttatcgctcaataaaatctatggtttgtaanccctggttttccaatatngatttaatttgggngttttcctt

SEQ ID NO: 135190 - DNA, 310 bp, Arabidopsis thaliana columbia
  unsure (1)..(310): unsure at all n locations
atcggatcaacaaggatggtgaacttgtgatatcttctaccaaaaccagaacgcagaagtcagtaacctaatagtcctctctttcatattccattctcaataacttctctatttatgacagtatgtncccttgcagaggtaacatcgacgatgcacttgaaaaacnacaggcgataattgatgcggcttcatatgtnccacnnccaccatcagaagaacaaaagaagnaaanagtaaagctcgctgcgaaagctgnccaattaacgncttnaaagccaaanaagtctgtcagnccaggaaatcgggcgag

SEQ ID NO: 135191 - DNA, 310 bp, Arabidopsis thaliana columbia
  unsure (1)..(310): unsure at all n locations
ccaaactcgggaaacctgtcaaaatcatgacaatgcctactatgtcatctgttgaggctgatacaggagaagccagtgcagagcaaaaactagtcaacgcataagagaagccagtgctctcacaaactctgtaggtccgaggctttagctgagaggctttaagcttcagcatttgatgaaatgctgtatcataaggtgtagtgttatacagacagaggctacgcattgtcttaattctttttgtaactgaatggntcaaccatatgtatacaaaaacgtgccttggtaaagtgtagcacnggttccaagt

SEQ ID NO: 135192 - DNA, 400 bp, Arabidopsis thaliana columbia
  unsure (1)..(400): unsure at all n locations
caaagctcttctgcgaggactcacgactcagcttcttaagcatgggagaatcaagacgactcgagctagagctagtgcgatgaggaagttcgttgacaagatgattacattggctaaagacggttcgttgcacaagcgaagagaagccttgggatatatctacgagaaacagattgttcacgctctgtttgctgaggttcctgatagatacggtgagagaaacggtggatacacgaggatcatcagaactcttccaaggagaggtgataatggcnccaatngggttacatttgngcttgtcctaanggcaanaacccccntttaattttggcccaattggttccncttttggncccgnaaaatttggnaaancaattttntttngccccaaaaangngnc

SEQ ID NO: 135193 - DNA, 366 bp, Arabidopsis thaliana columbia
  unsure (1)..(366): unsure at all n locations
ccatgatcaatgacgaattcnccctccgtgttgtggaggctgtcccggacaaagagagtaaagngctcgtcgtgtgcggtgaaggactcaggtcgttggcggctgtatcaaagctccacggagaagggtacaaaagcttagggtggttaaccggagggtttaaccgagtatccgagggagattttccagagatcgaagggaccgaagagcttcggttcgccacgataggaggtgtatcattttatttactcaaacnacttgtactgttaaccgtcttttggccagaagagtcgttaaattgggtttttttgganccaattgtgaaacatttttttggttttaaaaattgggccccgggttnacccc

SEQ ID NO: 135194 - DNA, 552 bp, Arabidopsis thaliana columbia
  unsure (1)..(552): unsure at all n locations
gaagaaaggaaaaaaaaaatgcagatcttcgtcaaaaccctcaccggaaaaaccataaccctagaggtcgaaagcagcgacaccatcgacaatntcaaagccaaaattcaggacaaagagggaataccacctgatcaacagaggttgatatttgctggtaagcagcttgaagatggtagaacattagcggattacaacattcagaaagaatcgactcttcacttggtattgaggcttaggggtgggactatgattaaggtgaagacnctcacagggaaggaaattgagattgatatcgaaccaaccgatacnattgatcggattaaggaccgtgttgaggagaaagaaggtatcccgcctgttcaacaaaggctaatcnacgccggaaaacagctagctgntgacaaaacggcaagggcttcaccntngaggggggcctgtcttcatcnggtcttgccttagggtggtttggctccctgaagaaccctnaaaaanctttcccttgatngttttggtnctggnaanggttcaattggatgaccttnattttct

SEQ ID NO: 135195 - DNA, 393 bp, Arabidopsis thaliana columbia
  unsure (1)..(393): unsure at all n locations
cgattattctgactgcggtgatgtaagttctcctgttgaagtcactagtgtggaggagatacttaaggataaggacaaggcaagctttaaaatatccggttcaacaagtaaaaatatcactggaggagatatttacgtggatgttaaagaggcctgattcgttactctactagcaactacgacttatgtgcatgtatggcatgccctgttgcaccnggngccttcgtgcttcccctagacaatctttttcgttcatatccaatggttaattttcttacatttattttcncgtaattggttaatattgcgtgataaaagattagggactgcatatgnatttttggtggcncgnattaanaaatataaatnaggttaaattatttttaaagggga

SEQ ID NO: 135196 - DNA, 301 bp, Arabidopsis thaliana columbia
  unsure (1)..(301): unsure at all n locations
atggatgttacgttcatagaagtccaagtcataaccaattatacttcatcaacaattgaaacaatctctctaaacattgtaacaatatagaagtcttgaattctcggaattatatttaataacgtgaggatcagtttcatatatatnagcccaaaaaagtgagtccaatagatgtaaaagatcatcatgatgttgatgatgatgctagatttttttattttttttttccttttgtgattggtgaaagagtgtccttgggaatttttagtgttaccagtacacaatttctntccttttaang

SEQ ID NO: 135197 - DNA, 231 bp, Arabidopsis thaliana columbia
  unsure (1)..(231): unsure at all n locations
caaatgtgcagagantagcatgtacagccccacataccgtctctaccgttgaaagttganactcaanngtctatactttgtgtgcttctcatcctttgttcagttattcccatgtctttctgtaatttccagtattaaattagtctttcaagttgagatttcaaacacatgccangatcnctcatttaactttgcaacnctgaaagttaaagactatatgangtgaatttg

SEQ ID NO: 135198 - DNA, 440 bp, Arabidopsis thaliana columbia
  unsure (1)..(440): unsure at all n locations
ctcagtttggagcnggctgggcctggcttgcttattcaaatgaaaaactcaaagtagtgaaaacncccaatgctgtgaatccccttgtgctcggctctttcccattgcttaccattgatgtctgggagcatgcttacnaccttgacttccagaaccgaagaccagattacataaagacattcatgaccaatcttgtgtcttgggaagctgtaagtgccagacttgaggccgccaaggctgcttctgcttaagcaaatttctgaacaatttgacttcagtgacagtgagtcctgcatcaccggagtccccttataaaatattgggncgctgtaataagggcccaagcncncttggtggggaagggggcaaaaagtcctccattttgcctngggaaaggannattaaaaaggcctttccgnagggggggcngttngggggnc

SEQ ID NO: 135199 - DNA, 207 bp, Arabidopsis thaliana columbia
  unsure (1)..(207): unsure at all n locations
ggagatgagaggaaaggtccaatgtcacttcctcagccttacactttcaanccttctccttccacttagaagattccttcctttctggtgttgaggaagattacaatggccaaatactgttcctgaatcattttctttgcctagttttttagatctttatttgtgttgtaagcctttgaacatgggaataaagtgccacatttcaag

SEQ ID NO: 135200 - DNA, 411 bp, Arabidopsis thaliana columbia
  unsure (1)..(411): unsure at all n locations
cgctttattcgctttcgttttcgccgtcatctctccattcgccggcgctcaatccttagctcctgctccttcccccactagcgacggaacatcgattgatcaaggaatcgcgtatttgctaatggtggtggcgttggtgctgacgtatctcattcatcctcttgatgcatcttcttcctcctacaccttcttctaatcttttggatttctaaatttgagagagtttatgagttctttagtgtttcaactttcctattttcagtgaacacaaacctctttcgcnaatattcagaaattagagatatcttttttgtnatttttagatttgtntattgatttaatgtctccnatataatttgnntattgtaaacgtacccntttaataatggntaatggcaatggtccaatacc

SEQ ID NO: 135201 - DNA, 321 bp, Arabidopsis thaliana columbia
  unsure (1)..(321): unsure at all n locations
aaatcaagaaaacaaaagcagaaaaaggttattgattattattcttacatgtagtgcacatgaattttgggattaagggagattaggaatttacattgccgctaggtgttttgcaaatatcatgtagatgagttttttttctttctttaccataacaatatcaccacgagcgaacaaaatcttgtttaaaaatgatcagtataaagtttggtagtgaattataccttttttntntttttggaatttgtgatggcattatgggttttgtaatgtttacattgattagtgttaccaatgtgngatggagaatccgagtggtgc

SEQ ID NO: 135202 - DNA, 287 bp, Arabidopsis thaliana columbia
  unsure (1)..(287): unsure at all n locations
ggacctggcctgnantncctgggcnncccacngagtccgagactgcgtantgagaccggtgaactcgccaagcttcttggtgtttccgggaacaaagaagctgaacnctaggttatatatagttggaagaattgataacactctctgtgatgcttaggtgtaagcaattcaatttccatttgtattgtgttcngcagcttgatcatgaccttgtgacagcttgatcttgccttttaaacgtatcttatcaaagaccacattctgagttatacaaattggggtgaggg

SEQ ID NO: 135203 - DNA, 310 bp, Arabidopsis thaliana columbia
  unsure (1)..(310): unsure at all n locations
acagcctnccacagcgtccngggcntganggaagaaaagattgaagaaagcagcgagggatgcaaggaggatcaagaagaaagcagaggaagaacacaaaaagaagaataaagtagaggaaaacggcgacgtatctcacgataatggtaaccatatttgagggaagatatcacaaaaagaggaaggaaaatagattggagcgttgatgtgatgaattagtatttgagtctactctttctttaggttgtgttttggtatggtgttgtcaagtaagaatttgaaatgaaataaataagtttatttggttccc

SEQ ID NO: 135204 - DNA, 385 bp, Arabidopsis thaliana columbia
  unsure (1)..(385): unsure at all n locations
ctacttttaacgttattttacttactccgtgaatcggaggcggggtacaacccctgtttttggtcccaaggctcgcttcggcgggtcgatccgggcggaggacattgtcaggtggggagtttggctggggcggcacatctgttaaaagataacgcaggtgtcctaagacgaactcaacaagaaatgtactgttctttgatcatatcttaaaatgttctatgtatgtatgatatggaacaataaacccaagtcttgaaggnttattatacnaataccttcattggaccaatgngnnaattaatncatcaaaaacnttttgtnatgtcccccngtggtaaanaaaatggaaagnccnaggttttttggggccnaaaaaaaaaaanna

SEQ ID NO: 135205 - DNA, 205 bp, Arabidopsis thaliana columbia
  unsure (1)..(205): unsure at all n locations
gggttctggtttgtgccccaccacagggtgtgtcacggacttaaaccagaatnncccaacggagctcaaagccaagaggagtttggcttgtagaagtncgtgtnangcgtttggaagaccggaatatnngcngcagtaggcgcatacggttcaccagatagctggcaacccgtcgatgtactcacaagtttttaagtcaagcttg

SEQ ID NO: 135206 - DNA, 200 bp, Arabidopsis thaliana columbia
  unsure (1)..(200): unsure at all n locations
gttttcaaatttcaatacacnagtctgtcatccaccaatcaccgtacccactgtggaagaggatggcatttcttattaaaagctattttgtattatttcggttttagtttccagcttaagtacnaacaaagttgtggtgatctttttcaaattcaagagcaanagtnaacaaaaagaaaaggaaacatgttggcaaacgt

SEQ ID NO: 135207 - DNA, 552 bp, Arabidopsis thaliana columbia
  unsure (1)..(552): unsure at all n locations
caaacttgttagtcaaacaaaaaaaaaaaatatccaagaagctttgaagaaccatggcgatgtctcatgtccagcctgtgcttttcttcctcgcatcactcttcttcttactggctttgtgcagcgccaacgattttgaatattgcaccaaaaatggacatgattatggtgtcgtctcttggatcgaggtctttcgggttgggcctcaggaaaacccaaccctcactataaatgtatttggtacngcgacgaaagaaatatccgcgggaacccttgtatatgtagcctatagatctggggattttacaggccttttaaaaacttacgacctatgtgatgtgagtttggcatgtaacattgnattctgagattgaagctggcgacgtggtttgacttcagccttaaagacgtcnttatgntgggtttgatgaggnatcaaggatncgganctttgnggcnaaancgcaaggnggggggccatannaaanggggancgcttcaagaccgccccagttcggattggcccattagcccggggggnnaaaggtcngc

SEQ ID NO: 135208 - DNA, 216 bp, Arabidopsis thaliana columbia
  unsure (1)..(216): unsure at all n locations
atccaaggtaatgcatgattgcttcagctgataagaagattcaagatagtggcatgatgaactctcatgaaattccggcaagtgtcttcagccccatgttggccaaaaaagttgattggtttcgtgctgtgaaggattttttcttgtgaacnattgatggtgagcactttgccatgtccattagccaattgaaatgaatgaaaacgcagaatttac

SEQ ID NO: 135209 - DNA, 565 bp, Arabidopsis thaliana columbia
  unsure (1)..(565): unsure at all n locations
gntgnggccaccgttttttcccccanntcccnaggcccccaatttaacgggggnantcttncanccaagttcccccgagttctaggccatcccnggccggttccccaaccgntaaggaactncccgngctggncagncttggccccggnggccttcatggggaaaatggggtaccgttcaaacctgggtccagtnccnctttgaccggacgaggccaccgtgtcntagatggattcctcaggaacgagccntgggaggcaaagtcaaaagactgattcggtataaggtggttcacgtggctcaagtcactagcnatgctcttgctttggttaatcngtttgcagagaagcgaagtgtgaagtttccttaaatggacttaaatgtgaaaattttggcttgtaagtgagagtttgaatctaaacttcaattagttgtgtaaattgttatctttttttttcgtcggtcggaaagtaaactcaagattgtgtaacaatctttgttgtgtcctgtataatattgtattttaagataatgatatatagtcaccttttttgggtgtaaaatt

SEQ ID NO: 135210 - DNA, 512 bp, Arabidopsis thaliana columbia
  unsure (1)..(512): unsure at all n locations
tcgttgtcgacggtatcgataagcttgatatcgaattcgcggccgcttttttttttttttttaaggacctattttatatacacaacaataaagaattgcatgtattgttaggatgaaacataaccaaagaaaaaaaaaaaaaagaggagagacttgttattattcccacatttttttttccaaatacagagaacactttctacaaaagcatctcttttatcttccttcttcatccaccataaaaaagactgaacaaagaaacaactttgaatcaaaaaaattcattgttgtcaccgtaatgtggtgcttgatgtngaagtttcttgaggtcttgaactatntacatcgtcgaaatggagntcaatcccagnntcgntatcgttancgnccatganngnagttctcgaccaaatttcttcntgcattcncttcccaaatccaantnctncngcctcttcatcctgcgncntccnagggttcttcaggcccaagaggtggctaataagttcccg

SEQ ID NO: 135211 - DNA, 553 bp, Arabidopsis thaliana columbia
  unsure (1)..(553): unsure at all n locations
acnttngggttaccggnggcatnccgggccggttgggcngccggcnaagggttgggccttaaggtnccggggggttggccgatttggccaaaggggnncntccccccttggggcntnggttggtggggtgggcnttggattccangggtggtggggtttagttggccntggaatgggnccnttggattggcnaccagttgtggcctttaggatcttacttctacactctggcataggngaaccaggaagaagatggtggagctttacccaaacagagaacaatattgacgnttagtctctcatgtccaaatgtttgtttctgtttcaaaatatgttgttgttcttctgaatgttgtaagtcaatgtctaaaacatgttgtatagatctgaaaactatggaacatatttgttaattattttgatttgattttttttttgtatttatctcttacaatattttgttaatgaggatttgtcactacaatttatctcttactttcatcaacaaagtattgtaataactaataaatagatacaaaaaaatctttctcac

SEQ ID NO: 135212 - DNA, 505 bp, Arabidopsis thaliana columbia
  unsure (1)..(505): unsure at all n locations
aaatntttngggaaattggggcgggnnaaaaatttccccccggggaaaccgntnggccccgggtntcccccnaaggctnaantcggnccccccttntggggnaaacttgntaccccccngaaagntacccggcccgggaattccccgggntggaccccaaggggtcccggatggggtnccccaatgggaaccggcttccccnggttggccccagttccccaaggggacccttcaaggctcccntaactcccatctactatgtcgcctgattaaatcttatttacttaacaaaaccaataagatcagagtttcattctgattcttgagtcttttttttctctctccctcttttcatttctggtttatataaccaattcaaatgcttatgatccatgcatgaaccatgatcatctttgtgtttttttttccttctgtattaccattttgggcctttgtgaaattgattttgggcttttgttatataatctcctctttctctttctct

SEQ ID NO: 135213 - DNA, 567 bp, Arabidopsis thaliana columbia
  unsure (1)..(567): unsure at all n locations
aaatccgtacattccgtgaattcccnggttcatccgtcggaanccttttccgggagggttacagcccgaacggnttcnntcgccgngtcgncatntcncccccagacagatgattggnactgnggattttggaataccctttgactcacatccgggactcagaatcccgntgcgttttccgcttcagaagcntactcttcttcgtcccatgtcaaggacacaacacgacagttgcagccaccgagcatggccgaaaccaccagcagccaccatcgggaatggtacagcaccatcaggtttatgcagacggaaacggtggttcagtgagggtgaaatcagagagagtggctacggatacagcaacaatggcgtttcacgagcagtatagtaatcaagaagatcttatgagcgcacttcttaagcnggtttgatttgattttttttttttttgtcaaacttatatagaagcataatctgatccgtcaacgtacatgtttgcgttcaaaatcaaatatataacaactctcagacgctttctcaccattggtcgcatgtctttttcatnat

SEQ ID NO: 135214 - DNA, 559 bp, Arabidopsis thaliana columbia
  unsure (1)..(559): unsure at all n locations
ancccggggntaaactttgcctcagggcttnctccgcggaggattcngggattactgttcttaggaacccccgngatcccctaatgncaggtgatncgttgccgcggtgaccactggccaataatgatggaagcccttaacccgtcgatgatgntggcgaaatcggacggttcagatggaaccggaaacgattttcatgcaagtggagtacaggaaacggtccaaggatcgggtgtgtgcgggacttacccaatggatctgcagacgcgggcgcttgaacaagtcaacctttctcctcgtgtagtcaacggaacaatgggattatttggcccaataccatcgccaagacccagcccaaagattcgtgtctctcctagactatcttgcatgggtcttccaagcccaaggcactaattttaccaattttcctaatctgatcaattaanttatttcaaaatttttgaatattccttttttttttcactcccctaatagtattgggcgattctttatttagngtataacttgtactcatttttatttaaaataatttaatttt

SEQ ID NO: 135215 - DNA, 571 bp, Arabidopsis thaliana columbia
  unsure (1)..(571): unsure at all n locations
actgggtttacctaccgcatncccnctgtggnccctgcctnccctgctactacctggggncttacttaccacacccaacccagcttcccagcncatttatagctgggaactgggaactgactngaccagacccncttgaaccccatctcaagaatggctacccaaggagctgaagttgttagagagtttatggagaaagagatggggtgatatcatggcagggcaaccaaccagaggattggccgttgaggctgagcngaccatggagatgaaaacgggtgggtctattggggaacctccatggttactaatcttgtttctggagtgacccataccatgggatttggaggagcaactagcgatggtggggataagaaaccgggagactcgtacttttatcaccaaatctgacttctgctagattatcttgtaatctacacttttgtatacaaaaatttggagtgactttcttgtgaacttatcactccttgtttaccattgcgttgcgtagattttgtaacataaaaatatgttttttttttcctctatacgttttctcacgaattaggac

SEQ ID NO: 135216 - DNA, 316 bp, Arabidopsis thaliana columbia
  unsure (1)..(316): unsure at all n locations
aanntacgcacattccctcnggaacnccgntgnngatgaaccgtgtttccctctcgacgctccatcgcaccngaccaccnccncaggattaaggggtcncaccaattngggtatgtacagtgtgtttttggcctatacaaaactcatgtccatgtggcaaactttttttttgtttttgtgaaccaaagactttagtttatatatgcacatatttcgagttttgattaatttttttttttaacatactcggacttgttctttcgtgaacaaaaccatttgtcaattagtttttttaaaagaactaaaccttatcttt

SEQ ID NO: 135217 - DNA, 285 bp, Arabidopsis thaliana columbia
  unsure (1)..(285): unsure at all n locations
gagaaacagacaggcttgaagaatccactactgaatatcttgtttactttttctaaaaagcttgttgtnagccattaagagtttctgacagcagcttgtaggttaagatttttcctgaacagctcaaggattgtaccaccatccttttttcacnaaatgatattaaaacnaccatcaaaaaaaaaaaaaaaaaaaaaaaaaaaaaccaaaaaaaaaaaaaaaaaaaaaaaaaaaaaaaaaaaaaaanaaaaaaaaaaaaaaaaaaaaannnggggggggccnccc

SEQ ID NO: 135218 - DNA, 222 bp, Arabidopsis thaliana columbia
  unsure (1)..(222): unsure at all n locations
cacacnctcatcaaaaaccttctcttcggttcagaagcattcaagaatccattatgagctcatctgattccgttaataacggcgttaactcacggatgtacttccgtaacccgagtttcagcaacgttatcttaaacgataacnggagcgacttgccgttaagtgtcgacccacgcgtccggttgattttttgtgaagagaagaattaaaattttcctatac

SEQ ID NO: 135219 - DNA, 235 bp, Arabidopsis thaliana columbia
  unsure (1)..(235): unsure at all n locations
tccagggtcancancaggttatnggantggtcaccnntacacnnttgaagacagcgttggaaggtgtgancnacttggtggtggttggcatcgtgggctggtctttgtacacnaaaacaaaaacngggtcaggtctgccaaatnggccatttggtttgttgggtgcggtcgagggtttatcgtatctntcggttcnagccattcttgtggtgtttggtattcagttcttggataa

SEQ ID NO: 135220 - DNA, 330 bp, Arabidopsis thaliana columbia
  unsure (1)..(330): unsure at all n locations
cggtntgtagccaacctttgccttactagaaacgcaaaggcaaagatnagcgaggtgttagagatggtgacaaagattgtggaagcntcatcncctgggaatngtggcaagaagccgcagctggttccactaaagagtcaagaaacntctagagtcgaggaagggaagaataagaaggttcttgatggtgctgaaggaggttggttagaaaagttgtggaaccccaagaatgtaagaacttgttgggtccngggtcnacggccgaaaccaatttnggggattccaaaaacccttggttnaaaanccgggntttttnaaanacctttgggg

SEQ ID NO: 135221 - DNA, 529 bp, Arabidopsis thaliana columbia
  unsure (1)..(529): unsure at all n locations
gtacatcataaaaaaaaaaaaaagggaacaaaagaggacaagatccaatccacaattacacaaaggagaaaaataaaccaaaagagacaataggagtaaaacagcaaattaataagcaggataatattgctcaaaagttgtagacacaggttccatcgtcacttctagccgttggatcaaagttttcagccacaggatcagtacacccttcaggaactggcaggtttacttgctgggctccttttcctctgttttaccgtagaaagttccgcggccgatggcgtcangtttgcgtctcccaaagcagcctggctgaggtaggtctcggcaagttggactctctttgacattccncttgttcccatcacaaagcatgtttccggattccataagcttctcataagccanccngggttncncgaacacgggnggccttnccttgggttaaccagnctctttccgnttttnnnaaccccaagggctttaanganttcccaatttancancggaaacttnggggnnggattct

SEQ ID NO: 135222 - DNA, 328 bp, Arabidopsis thaliana columbia
  unsure (1)..(328): unsure at all n locations
aaaaaaaaaaaaaaaaaaaaaaaaaaaaaaaaacacagangacgataaaaaaaatatacattcgttgttttgccttggctacacaaattataataggacaaaatttaaggatcatgaacctgaatctgtagaagagtttctagtttcacantcaagtcatgataccaaatgacanaagaagataacaaactttatgnaaaaaataaggcagnactgcanaagcatncgcctttctaagcaagtatgacgcttttnangcggagaactcntgttccntttcaacnagtaatggcttccaganccatcgctgccaattagttgcatctct

SEQ ID NO: 135223 - DNA, 608 bp, Arabidopsis thaliana columbia
  unsure (1)..(608): unsure at all n locations
gggcccccgctnnggctnctgganctnnaancnttgacancngaattctgcnggccgcctttgttcaaaagcctggaagangggagaatatatttgctaataggatatttgatatgtttgatgttaaacgaaaaggagtcatcgatttcggggactttgtaagatcactcaatgttttccaccccaatgcttctctagaagacaaaatagattttacgtttaggctttacgacatggactgcacgggttacattgaacgacaagaggtcaagcaaatgttgatcgcgcttctctgcgaatctgaaatgaaactggctgatgaaaccatagagataatactccgataagacatttgaagatgccagacgtgaatcaagatgggaaaattggtaaattagagtggagtgatttcggaaacaaaaatccatcattggcttaagancatgnccccttcccnaaccccaggggtattccgncaacggttccgagttttgcctccatccgggggccgatgaaattncncctgnnggaccaaccgggttaagcccggnagttnccccngttggaaaccaagctgggcaaccggggacccaccggtgaaangagag

SEQ ID NO: 135224 - DNA, 629 bp, Arabidopsis thaliana columbia
  unsure (1)..(629): unsure at all n locations
tggacaaggcaattttaaattaccaatgtgttgtacatcataaaaaaaaaaaaagggaacaaaagaggacaagatccaatccacaattacacaaaggagaaaaataaaccaaaagagacaataggagtaaaacagcaaattaataagcaggataatattgctcaaaagttgtagacacaggttccatcgtcacttctagccgttggatcaaagttttcagccacaggatcagtacacccttcaggaactggcaggtttacttgctgggctccttttccgtagaaagttccgcggccgatggcgtcangtttgcgtctcccaaagcagcctggctgaggtaggtctcggcaagttggactctcttgacattctcttgttccatcacaaggcatggtttccggaattccataaggttctccataagtcatctcggggtgctcgaacacgggngggccttccccttgaggtaaccagcctcnttccggttttttaantncaaggggntnaaagaanttccncacttnannatggaaaatntggccccaaggccgnggaatcgntanttgcccgggntggtaanaggggaangnttggcctnantgaannccaaaaacccttgaaacgggagc

SEQ ID NO: 135225 - DNA, 200 bp, Arabidopsis thaliana columbia
  unsure (1)..(200): unsure at all n locations
ctataancgctacataaatcacccctcccgttaccatacataaaacacaacaaaaatctagantgtggagtaaaacaaaaagaagtacagnactataaacacctttanttttactatttttacccctaactgtttccctttccccccgccanaaccagntgagncatatttncatctctacccttttccacagtccactg

SEQ ID NO: 135226 - DNA, 451 bp, Arabidopsis thaliana columbia
  unsure (1)..(451): unsure at all n locations
ttataacataagcaaacgttacatcaaacgcaacgggacaacaagtcgatttgggtttccccatacttgctcccactaaaaaacacaaacccacacgaattttcagacaaacaacttaaaaaaaaaaaaaaaactagcgacancaaacgcgaccgtagccccagaagcccacaccgcgtttaaaacagcaacaaaatcctttttaacccatacaacnaacaaaccaaccacacacagncacgtaagcagcctttatttagttattctcctgacngtggctgttacttactttaccaaactctttcaaatctgncagaacccaaacccggggtacggggtttanccagcccgacccggngaattgggcttttccanaccggngggancnattgcgnttggngggggaantntttagcgggngncctgtccagctaacaaacggttccgngtc

SEQ ID NO: 135227 - DNA, 607 bp, Arabidopsis thaliana columbia
  unsure (1)..(607): unsure at all n locations
aaaatcttcacaatagtgtcaaggatcatccattacccataaaaaaaaaaactgaaaagttacgaaactcaacatgaatcacacacagagatttgattatttatcatacaagaggaagccaaactgaaaatgtgcttggttactagcagccactcattcatgaagatgctgcaactataggcatctgagttacccaatcaaatttgtctcgactgtgtttgcgagaagcttgcttcttgtctttgctgctgccaccacgtgaggaagagttgtctttagacttctgtcctttctttccagtcttcctgtggttgtctttgctcttggatttctgctgctggtttccttgcttccttgtgaactgtgtgggaggctatcgaggggaggaggntncatacacatcagcccccccatgaaacaactcggacttcccncagggncaagccaaaacttctccccnactgccttttnatnggctgggggtaaggacaaattnggggcctnnggccaaaangggcccaacccttggcctcaancaccagaangggtaggggctaaaaaaanattcccgaaacctganaagngggtcacatnnggggggattntt

SEQ ID NO: 135228 - DNA, 626 bp, Arabidopsis thaliana columbia
  unsure (1)..(626): unsure at all n locations
gatttataccatgaaaaataaaagccgttcattttataactcttctttacaatagattggaattacaaaaattactctactcgatagtaattttttatcctaatcttttctactaatagcaaaaaaaaaaaaacgaaactagcttccgtttacctcatctctcgtcgtttttttttactattcaaagcagccgttacattgccgttaactcattggaagcaaaacattagtcaccgttaccatttccgtcaatctgaacgttaccttcaccaccgtcaccttcctctagccaccgttgcaccggagcacaatccattttatgccgggagtttccaatcctaaagcttgacaagcggcgtggacaattaatttaacaacggcacaaaccggacatctcccttaaactccatggttccncggctccggggngggccaacaaaccaggnggggtggacacaaattttaacccatctccggggggaatctncggcggggaanagggggccaatcnggtaaaaaccttttcnggggntgggttccgggggcngggnantttnanccaaaatccttnnnaangggaagnttttngnccngggtnggnnaccgggggggggggggggaaaaaa

SEQ ID NO: 135229 - DNA, 608 bp, Arabidopsis thaliana columbia
  unsure (1)..(608): unsure at all n locations
ataccttggtttggatgttgaggaaaaatcagtcggttttgaggatttgaaggttaatttaattatgactgattactcaatgcccggtatgactggatatgaactcttgaagaagatcaaagaatcctcagcttttagagaagtaccggtggtaattatgtcctccgagaacattttgcctcgtattgatagatgtcttgaagaaggggctgaagatttcttactgaagccggtaaaactctcggatgtaaaaagattaagagattctctaatgaaggttgaagatttgtctttcacaaaggagtattcagnagagagagctagaaaccagaggatgtctaccccggttcactccgcagctcaaacgcgcaaagatctgagctctccggatgcnaattccgggacctggatctttgaaaaagccttttcaaaatacagaagctccaagacnccatggncttgngcccacaccggntgggtccccccagcttaatggcccanncaaatttccanccccannggccttttccncggntgnatcnggggggtttcccaaaagggggatggaaaggggttnggngggaanccnttttnttnatccttggggc

SEQ ID NO: 135230 - DNA, 565 bp, Arabidopsis thaliana columbia
  unsure (1)..(565): unsure at all n locations
ttaaattgaaggattaactagaaacaacaattgctgtctgaaaattacagaaaacttgtaaaatcttcaaatctctccctcttggacaagacttcactcaacgagggccaacaagtcactctctttacagaagcaatgcctagcatcggttcccaaatcgacctcataagcgctcacatcagagaacaaaaccctctttccaggtccaacttgttgtccaacctcagaaccaacagatataatctctcctgttaggtatctctcaaacttcacagctgctttaggcaacaatactccacctgagggtttaatagggagatcttcaagacggacaaggactctggtctgcctgaggnacaacctttggtcgggttcccattttaagtggggaatcggctttgnattctaagncaanctctttcgnattccgggaagcggatgggtagccggccgaagggggnagtggctttgaccgggaagncaagaangggtttgggaaaaaccngggncngggattccttganccnggggggccncnagntttanngggngncncngggggggg

SEQ ID NO: 135231 - DNA, 506 bp, Arabidopsis thaliana columbia
  unsure (1)..(506): unsure at all n locations
tctcacaaaaccttcagagagggaaagctttttgtctccacctacaagaattttccgatgatagccgttccaaataatttgggcttttgcccggtatcttctagctcttttagtggagatgaccggttcccgtacggcaaatcctgctttcataagaggttttggccgcttgtatccttgctcgtagtcaatcagttttatgctgattgctttgatattttagttttgtttttcaataaatctcaacagatttgagatggtaattagttttaggtgcnagttacttaagattaatttctgtcttgtgtctntagaaacttcgatttgcagaaatctatcaagcggantaatgncttccngggtgaaaagattgaagaaaattccgggggctnatnaaggatccccttttgcnggggcctttnaaaagggggncccgcccagnttattccgggggggaanaagggtccattggggggaangttccgngnggnnnccccccncggggt

SEQ ID NO: 135232 - DNA, 553 bp, Arabidopsis thaliana columbia
  unsure (1)..(553): unsure at all n locations
tttgacccttggtaacgaaaatttatattttgaccctttcgagccacatttgacatttccacgaagnantnttagtaaaacattaaatggaagaaaaaaaaaggttacaacaggcaaaattggatttaaattaaccatctttaaaagttacatcctcagaacaaagcatggccatgttgtccttcctctaatttcttctgcttcttctttctctttttctccatctttgtatctcctcgtgatgccatacgttttgcttgctgtgaccttatctccaatagcttggcctttgcatctttgaagggagcatcagatcttgcatcccatcatttgcttgacatgatccatggngggcaaattgaaaccgnttggaanctttgcatgccttgaattctgngtaaagaatggccccggagaacgnttaagaatgggcctgnaaaanggnggtggtancaactgggtngngatgngccggaaaaaaaangggggggatcgggaaccaaancaaccctttcngggnatnaacccaggcttcatgnggaaagaactnaag

SEQ ID NO: 135233 - DNA, 551 bp, Arabidopsis thaliana columbia
  unsure (1)..(551): unsure at all n locations
ctgttcaaggcatcgggtttttcatgatggaagagtacactactgatgagaaggggcttgtggtgcaacaaggcacttgggactacaaaataccgactgtggacacaatcccaaaacacttcaacgttgagattgtcaacactggtcatcataaaaaccgcgttctctcctccaaagcgtcgggtgagccgccattgcttttagcagcttctgttcattgtgcaacaagatcagccattagggaagctcggaaacattccctttcatcgaacttcattgatgggtctgattcggaatttgagttacctgttccagcgactatgcctgtggtgaaagtctctttgcggattgtatagtgtagagaaatacttacaaggnaagatcaaagggcaataaaggnaaagcaagtaaagnaactctcggtgctgntnaagtannagtgtacatataccaaaggttantcagnntttnttttcnagccaaaatnaattgctttgtgaaaaccaatgggtnaaaannggcnngaatcctgagnccggggggncnctttc

SEQ ID NO: 135234 - DNA, 533 bp, Arabidopsis thaliana columbia
  unsure (1)..(533): unsure at all n locations
attcaaactttattaaacaggaagctaattccggtcattgaccggtccgttaaacttcgcattagaatcaattgttacaagaagccaccacagagttgggattaagcagtaaaaaataacagaaacagccatcaccgacttcaaggtctctccatcaatacatgatcagaccaaagctttggctaattttcattagtcttgagacagagaatttagcagcagctcattgaaagggcgaattagaagacgagagattaaaagcatgagaagatgttggagtcttcacaggagcccaaatatcagcaccattggtttgagcaacttctgatgtatactccaatggnacaagacatagccctttacttcttaagctgtactcttccacttcctcctctgtagtagaagggggtgcttgcaggtaaggngcncttagaccctgncttggtcctggagaacngnatggattgatncccccagaagacngntgcaggcnggcttccgaaggggancngtgttaaagcggaacggnccnt

SEQ ID NO: 135235 - DNA, 598 bp, Arabidopsis thaliana columbia
  unsure (1)..(598): unsure at all n locations
cgtttcggacaaaaagattcagggtgatattgatgagagtaaggtcaaagcaccaaacatgttcgaacgagctaaagaagagcttgatgctgttatcggagctattcatcaacgcaagagttcaaaggataaaatggaattcaaatcagataaaccagaagatggaaagaaaaaaccgaatatgttgaaaaaggcgagggaagacctcaaatctttattcctgaaggaaaaacctcctcgccatcttcatcatcatcacaaagaaactcatggaaggagtgatgatatcagtgagaacacaccggtggatgaagtgaaggctcctaatgttttggagagagccaaggaagaaatcgaagccgtcatcgncaccatccattccaagaagaaggagaaagacggtctggtcaccttcgcgtctcggctctctcaccgggaaaggngaaacctgnntcgcatgncccatttgaaaggggttggaaagaatgtcnccttggggtggtggttaaagggttaatttttcctatggttntggcctaaaccttggggccggatcctgancccgggggccctagtnnaanggccccccgggnnnntc

SEQ ID NO: 135236 - DNA, 600 bp, Arabidopsis thaliana columbia
  unsure (1)..(600): unsure at all n locations
agagtcaacggaaccagctatctgtcttactgaagatttggaaactaatgaatgtttggaaaacaacggtggatgctggcaagacaaagctgccaacattactgcatgcagggatacttttaggggaagattgtgtgagtgccctactgttcaaggtgttaaattcgttggtgacggttacactcactgcaaagcctctggagctttgcattgtggtatcaacaatggaggatgctggagagaatcccgaggtggcttcacttactctgcttgcgtagatgatcattcaaaggattgcaaatgcccacttgggttcaagggcgatggagtgaagaactgtgaagaatgtggancgagtgcaaagaaaaaaccggtgtgccagtgcccagaagtgtaaatgtaaaaacnctttggggaagttatgaatgcanctgcagcaacgggttgcnttacatgccgtgcancgacaccttgcataggtcnggccaagntggaccccaaaacncagctggngcctttttgngngccctanaaccngggngggtttcaggccttccgggaatccgccaccaaacngnnccgggtcctggtcgnattngc

SEQ ID NO: 135237 - DNA, 605 bp, Arabidopsis thaliana columbia
  unsure (1)..(605): unsure at all n locations
cagattgatgtacatcgatctacgtaaaagcggtacattcaaatcttacaaagaaacaaatttttacaagatagattatacattcagatcttcataggaaaaaaaaaggatcacattcttatttttaaaatcatacaaaacacttcacccattgggaagatataacacatatttcatccatttctccttcgaagttatgactgaatcacaactccttgacccatcatcatcggcatgttgtcaattgccttaagtggtggtatggtcaatgccacgttcttgccatcgtaggccgaaaggtgaactccgatagcggctcttcctgatggatcccataattggttggaccagccttgcaatcccactccactggccttttgcagtcgaacaaggcacgggtgggacctccaggaaccggtagtctcggagagtttctgcggggaagancctttcaaagatcattctggagnaggaagcttctttaggggttggaagtgttttnangggggccgggattcctgaancccgggggtcnccaagttctanacgggngcaccgggngngnnccancttttgtcccctangggggggaatccggnctgggc

SEQ ID NO: 135238 - DNA, 567 bp, Arabidopsis thaliana columbia
  unsure (1)..(567): unsure at all n locations
tctgaatttctcgttgttggaacaatggcgtcgaatctcctgaaagccctaatccgatctcagattcttccatcttccaggaggaatttcagtgtggcgaccacacagcttggcattccaacagacgatctagtcggcaatcacaccgccaaatggatgcaggatagaagcaagaaatcacctatggaactgattagtgaggttccacctatcaaagttgatggaaggattgttgcttgtgaaggagacaccaatccggccctaggtcatccaatcgagttcatatgcctcgacctaaatgagcctgcgatctgcaagtactgcggccttccgttatgttcaagatcatcanccattgaggcaaattctgaaagtgaactgctgggctctctncccctttttaattgcatttttaagtttgnggaatggttttttctggngngctacnananctcagcaaaattancaannaangntcgntcaaagccggggaagtttnatttngntgacccacntcagaactggcatggtgaaatcaanccnggacacggcttanangcatggggc

SEQ ID NO: 135239 - DNA, 578 bp, Arabidopsis thaliana columbia
  unsure (1)..(578): unsure at all n locations
cttgaaacaaaagggacaaaaacaaaagcaccaaccaacttcataagaaaagattacatccctaatgtgacatgtctaggcaaggtcaagacaaaggagacggccatcaaagcgacggctagagcaacgactgcgtgaccatcctttgctgaagctgatcctcccttatccgtggacgtagctggagttgccggagactttcctgctggtgccaccggtgttgttgtggcattgtttgtgaatacggctgcgtctggcgagctaggtgaaatccctagaagctttggacagttggtaatgctagcgttgtggagctgacaagaagttgggagttgaatgagtttgtcttcttgnacaccaagatccttcaaggcttgtcctcctgtcttcgcttgtggataacgaaccncaacactttggatcncttcctttgnaaanctcaacagngcacaaacttctnaacggattgtgccttccggcgaaagncaaacaaaagcncctttgaaanccggtgnatcattagcaaggncncngngaaccggtaacgngngntgnggacngtgcatggnctgncaggc

SEQ ID NO: 135240 - DNA, 577 bp, Arabidopsis thaliana columbia
  unsure (1)..(577): unsure at all n locations
ctttgagttaattagttcaatcaatataaacataactctaatgtataaaactctaaatgattacacaatgttgttgtatgatatcaaaatttcttcccttgagcaaggtttactcgaatcgcccgaccctccagctcaaatccgtcaagcgattcaagagcggtttccatttctgctttggaagagtaacatacaaagccataaccccgtgatcttcctgtatctccatcaaacacaactctagccccaaccacatctccacattctcgaaacgctccagctaatgactcggaagtaacagtccatgataagttaccaacaaagagcttgtgctctgtttctggatacagagggtctttggtaaggctttngggttggctgcaaaggtcactttcaaaggacgnccaagatactcagttccatcgngggtatcgatggatgatggtgnaancttcgncattggccatgggaacgaggnggatccacggtntggccgggatcccggtgnaagacccaacgggccagggttcgaaacctgatgattggccangtggctgnaanatgaaggagnccgngg

SEQ ID NO: 135241 - DNA, 572 bp, Arabidopsis thaliana columbia
  unsure (1)..(572): unsure at all n locations
tctcattttttttaggatttagaacaaaatccgaaaaggagtgacataacattacaacattaggaataaagtagataaaacattgatcaaaggaaatttagttatagttgaaaatttttattataaaaagggaacgaagggagattttttcaagggcattttggtccaccctcttgagttttccagttgttgtagcaggagcaaacttgtttgttcccatagtaacccggaggcacacagagacacttcctgcagcatttgttgcagaacgtaatgcaagccttgtggtactgtgtctttttacacctcctaacacattccgatgggcattggggacgttcangnttccctggtccaaaacgttctgggtcccacttcacattagatccacttggggccataaccatgggttgaagcatgaagagggcatgaggggccanagganaaaccccaaangccttnncatttccagttggggatttgttcccaaaaaccaangggggggattctgacccngggggccncaagtttaaggggnccnccggggggncccactttgcccttaangggat

SEQ ID NO: 135242 - DNA, 579 bp, Arabidopsis thaliana columbia
  unsure (1)..(579): unsure at all n locations
aaagtctgatccatcagttatcaaaaagcacacaaaacaagtctttctttttttttaattttaaatagacatttcaagatcggagatttagtaactatgaccattctgtctctgcagcactttgtttccttattcctcatcgtcgtcatcatcatcttccttcttcagacgggtctctccaccttccttgataataggaagcttcatagctccaaatggtgtatcaacatcaatattacctttgattgtgtaccctgttcctttaccacgaatcatatcccaaagcgcagaaccaaagtcctttggtcggaatggcatcggcacattaatcaatccggttccggttttgtcaagcttgatcgagtcgnggatctctggtttcccaatggttanacanacagccaaacttaaaggccaaggcattgggnccaaggtggatcatcaggtntgnagccnccatggggaangccangggttccccaaaaggaactttggnaataaacncccggaanaaaaaangggtctttggnatgggggnccccaaatttcccgggggangggggtnccaangggnaacaa

SEQ ID NO: 135243 - DNA, 606 bp, Arabidopsis thaliana columbia
  unsure (1)..(606): unsure at all n locations
tcccttcaaaaaccctaactctctgagctcgatcgacaagtgataatggccaacagtaatttgccgcgaagaatcatcaaggaaactcaacgtctgctcagtgaaccggctcccggtataagtgcctctccatctgaggataatatgcggtatttcaacgttatgattcttggtcctacacaatcaccttatgaaggaggagttttcaagttggagctctttttgcctgaagaataccctatggcagctcccaaggttaggtttctcacaaagatataccatcctaacattgacaagcttgggagaatctggccttgatattccccaagggcaaatgggagncctgcactacaaattncggaccagtgnncttnaaggattcaagcccttcctggggtgggaccaaacccagatgatccgggtttcttgggaanattggtaaagccctgggaagggtattggggncaaaactgtggggnnagccnagggatnggnccgccttttttnaaacnggggnttgaaaattgggggggaaactgaaaagtccttntacccaaaaaaattnatttgggggaantntccaancccaggttaanggnttntttt

SEQ ID NO: 135244 - DNA, 599 bp, Arabidopsis thaliana columbia
  unsure (1)..(599): unsure at all n locations
aaattattgtttagcatacaagtgatgtcatagaatacacaataagaactagtgttttccgaatattattttgtggtgtacaagcattcaaaccaaagtacaaacttgtggtgacttaaaagcggccgcggttggcgtctctgcaagctgtatgagacgggtcagatgactccaggtcaagccagtttaggaaaggcatggatttcatcaaaagcgagagaaactgcttcgctaggtcgggaattacttggtgggaatggaattctagcagattttctggtagcaaaggctttctgtgaccttgaacccatttatacatacgaagggncttatgatattaacacctttagtaaccaggggaggggnagtaacggggtatttncgagtttccaaanccggntacacggtagccggcccccaaaagttaaaagggtggcccattggtttgttggtgcccggtngggaagaattgnaattgnaatnngggggtaccccnccnaatggcccaaaaanctgncccnaaaatttngggcccatggggggaaanccgggttnnaaacttaccccgtattcccntcnaangggcccctggggtgang

SEQ ID NO: 135245 - DNA, 606 bp, Arabidopsis thaliana columbia
  unsure (1)..(606): unsure at all n locations
cagaaacattacccggaggacacaaaggggaaaaagaaggtcataaagttccaaaagggactgatatcttcatttctgtgtataatctccatagatctccatacttttgggataatccccacgattttgagcctgagaggtttttaagaacaaaggagagcaatggaattgaaggatgggctggctttgatccatctcgtagccccggggcactatatccgaatgagataatagcagactttgcattcttaccatttggtggaggaccaagaaaatgcattggagaccagtttgcactaatggaatcgaccgtcgcactaacctatgttggttcagaaattccgatgtggnagctgcgtgggaccccaagaatctgttgaactccgtgancggcggaacgnttccatgcccaaaaattgggntgtgggtgcaaccttaagnggagntccaaagtggaatttttnggttggcgaaaagncccatttttaccttnnagggacctngggggnaattggggntgnntcctttggtccccnaacggcatncttggnatttgnaatccaaaangggccgggatcctgaccccgggggccccngtttaagggc

SEQ ID NO: 135246 - DNA, 501 bp, Arabidopsis thaliana columbia
  unsure (1)..(501): unsure at all n locations
tgcatatataaactaaagtctttggttcacaaaaacaaaaaaaagtttgccacatgacatgagttttgtataggcaaaaaacacactgtacatacacaaattgttgtgactctttattcatgtggtgttgttctgttgcgatggagcgtcgagaggaaaacacgtttcatcaccaccggtgttccagaggaaatgtgcgtagtttgcggagtagactgagtttgttggatcagcggagatcgcttctaagtaggtttcctccgctctccaaatatccgtttctcgctctccacagaaacgtcgcatatttgttcaatgcctctgcgtccgntggctctgcttttngctgntccctttgaaattaccttttcccgntcctggtcggaagncatgnatgataagggagnagnaacctngtgcgnaattaggcaagncaggggnaccgttccagggntcctgnagnaaancccggtttggnaaagaagcnctngccttnaggaa

SEQ ID NO: 135247 - DNA, 526 bp, Arabidopsis thaliana columbia
  unsure (1)..(526): unsure at all n locations
tagaaactacctataattcataattcttcggcaatagtaagtagtaacccatatgtttatcaaaggaaataattattcattaaaatgttcttgacctactaatcctataacatggggaccaatactttgacaatcatcgtcatcttatcatattcatcatcatcatcatcgatcaagatggatgaaccttatttccagctgcagtcttccaagctgatctcatagacgcggcggctgatcccatcgccgccgcaatatgtcgtttcgcggcaactgtcgccgctttctccattaaattccccggtctccgagcagtctccggtttctcctcaagntctttcagntccggcggctccancctctccanctcctccaaaggtcggcnanaatccctccaacccccaatccanaatccggtcaagtcaagtcaggttcangggngatcttcaggtttttgngttctggtggtggtngntcgagagtgncaagttgatgatggtcnaagnggngtggggcnggtttngga

SEQ ID NO: 135248 - DNA, 525 bp, Arabidopsis thaliana columbia
  unsure (1)..(525): unsure at all n locations
ataatgtagaagatcatatagatacatacatgctcaaatgaagaaacaaaaactcagagttgcgttcattggtttaggggaaaaccataactttatgtttctcacataagcttttcttctccaatttcttcatggtacaaatctacatactcctaaaacaacccaaggagagaaatatcctataaagaagtaagtacctgaagatgattaatatgtaaaggctagtgattgcaggtaagctcgagcttgagcagccatgaccagagattcttcatcttctcgttcctttgcgggtattcactgctgctacataagctaaccttgcttcttccattttcccccagggccagtttccacctacacggcctaatatggggaggtgntncaattcatatggggcngnatcataaccctacggggttcttgggancagttttgccnagttcgacaccggngtgaatggngagtgcccctcaacagatcagnggtctgaagctgntgnctgnccggtgcttggtccatggc

SEQ ID NO: 135249 - DNA, 519 bp, Arabidopsis thaliana columbia
  unsure (1)..(519): unsure at all n locations
ttttagctcagtgaaaaaggttcgagcttcggaaactatggcagcattccctaaccttaactctgatgctggattgaagaagctcgacgagcatcttctcactcgcagttacattactggataccaggcttcaaaggatgatatcaccgtctttgcagctcttgcaaagcccccaacttcacagtatgtgaacgcttctcgttggtacaatcacattgatgccctcttgaggatctctggtgtctctgctgaaggaagcggtgtcattgttgagggatcagctcctatcactgaggaggctgttgctaatccccctggagctgattctaagggtgctgcggctgatgaagaagatgatgatgatgttgaccttttcgggaaaggagaccgnagaggnaaaaaagctgctgaaaaaaagcanttctgtnagggattncaagaagaggnacntggaagccccagtttgatgaaccaacnggggtntgnnncgctnaaaacttngaanttgagncctccaag

SEQ ID NO: 135250 - DNA, 504 bp, Arabidopsis thaliana columbia
  unsure (1)..(504): unsure at all n locations
tgggtcagggatatgttcaaagcgtgtcgttgttgacgcacgtcaccatatgtgtggtcgtcttgcttcgatcatagctaaagagttgctcaatggacagagtgttgttgttgtccgatgtgaggagatttgtttgtctggtggtttggttcgtcagaagatgaagtacatgaggtttcttaggaaacgcatgaacactaaaccttctcatggtcctattcatttccgtgctccgtctaagatcttctggcgtaccgttcgtgggatgattccacacaagaccaagcgtggtgctgctgctcttgcacgtttgaaggtgtttganggagtancaactcccttatgaccaagggccaagagaaatgggcatnccngangnccnccaaggngttaagncttcaagnctggncacaagaacgncttgtttgggacgtttgnccctaaagttggntggaacattccnacccacaagnncttaagtaaaaaaagngaggcnaaacntta

SEQ ID NO: 135251 - DNA, 507 bp, Arabidopsis thaliana columbia
  unsure (1)..(507): unsure at all n locations
tctcattttttttaggatttagaacaaaatccgaaaaggagtgacataacattacaacattaggaataaagtagataaaacattgatcaaaggaaatttagttatagttgaaaatttttattataaaaagggaacgaagggagattttttcaagggcattttggtccaccctcttgagttttccagttgttgtagcaggagcaaacttgtttgttcccatagtaacccggaggcacacagagacacttcctgcagcatttgttgcagaacgtaatgcaagccttgtggtactgtgtctttttacacctcctatcacattccgatggggcattggggacggttcangnttccctgggnccataacggttctggntccactcacattagaccactgaggccanaccanggttgaanctgaagaggcatgggggccaanggagaagcccaatgcntgccattccagttggggatgtaccaagaccaaacccccaacccccaacagttggc

SEQ ID NO: 135252 - DNA, 536 bp, Arabidopsis thaliana columbia
  unsure (1)..(536): unsure at all n locations
tgcagtaccaaccaaaacagcgactgccttttacgagaaagaactgggtgtgcttctaacacctccatcagggaaaaatcagatgcaggagtggaaagggttacaatctcaccggttacttcaaatcgaaatcaacgatgcaaaaagaccggctagtgatgtggcaatatcagggttaggatggatttcaattgaaccaatccgcaaaacacgaggaactgaaccgagagatctcaatgaagcagagcatgagatacatatttgtgtcagtgtgccaaaaccagttgaagtttttcttcgaccaacattgccaattggtacttcaggtactgaatggtatcagtatcgtgagttaaccggtaagggagaagaagtaagacccaaatggtacttttgaatttttttttgtttagatgccaaaatatccggcttagtatcccaaccagagttttatgtaccaaataggaaattggttggaatgaatctgcggccngattcctnagcccgggggccccagttctaacggcccncccggg

SEQ ID NO: 135253 - DNA, 540 bp, Arabidopsis thaliana columbia
  unsure (1)..(540): unsure at all n locations
ttttatagtaactttgataactttttaaaaatataaaattctgataaatctctcatgcagatgatcaacgagtcagagccagtttctgtttctggatttccgagggcaatttcacgtcagggcctaacccgagaacctcaaatagtcgaataagataccaagttatgtctatctgccaccactccaatccttgcctcgccgatgactcaaaggcgtggtgattattgtgccaactctctcccattgtaaataagcttagccaccaaacgttacgagatgtgtctttagtcttccatgatctcgaaccccaaatatggcatgccgagttcacgagccatgtcacgtggtanccaatcacacctccaacgnccccgccgnatgtaaggtaaggtaaaccaccatagagntagagggcagtccaaaacattaagacgtggnacccaattgncattcggagaaccaatagaccatgntggttcaagncatcacggtggtanggccccacacttatattgnaatacgngggccattcncccccta

SEQ ID NO: 135254 - DNA, 538 bp, Arabidopsis thaliana columbia
  unsure (1)..(538): unsure at all n locations
ctttaaacacatatgacatatattaatattaatacaatcaaacatagattaatgtataatttgaacacccaaactcagagttctaactcggtttcaaagcctcgaatacacattataaactaagcacacaacttaacacatatatatatacaagtgtttttataactttaggaatttcaagacctagcttagttagttaggctccattgttggcgtaggtattaacgagagcgagcgcattactcgtgaacctcttgacgtcggcgactctatcgcaaatagccgtcttcgtctctccgtcttccatctcctccgtgaccccatccgtacacgtctcctcgtccgtcaacgccgngntcatccacgtctgnacgttactcatctgaaanctaaacgccggattccgggnacgacggngggtcatctctcggagctgccttagggngccacgnatctgatccacgggatctccaaggtcgaaannagcgtggaagaagtgnggaacggacgtgaaatttggaaggaaccncgggatttc

SEQ ID NO: 135255 - DNA, 587 bp, Arabidopsis thaliana columbia
  unsure (1)..(587): unsure at all n locations
ctttggttttattctcttgctaagtaagcgcaagaagagaagcagcacaaggccttagttttgacaagttaaacaacgaaacaacacaaaacatcaaacacaacaacaacaacaataacaacgaggactgcatatttacactgatctggaagcttttcagattcagcagcacaagaccagacgacacaacagggaactcttttctttccattattcaagatctagtaacctccctgaatatacgcatttaggcgttgaagctcctctctatgctcatgaaccactgcacggacaacatctcccatggncaccatttncaatcatggcccttgggcctttgatttanccggggattatggcctgnaattcggggtaacccgggcaancaggttgggattagcaccgggcaagnanccttggggctcccggggggggcccagggnggataacgcttaattccccttttaagggcccaaaaanggggnccccaaaaactttttgggngggaatttttgggaannnannccccccttggggnaaaaagnggngtncccgggngnggaaaaaccnccccccccccggggaaa

SEQ ID NO: 135256 - DNA, 637 bp, Arabidopsis thaliana columbia
  unsure (1)..(637): unsure at all n locations
agaacaaggatggtatcgatatcccggccttgctcaagcatactaaagaacacagaggtgtcaaagggtttgatggtgcagatccgatcgatccaaactccatactggttgaggattgtgatatcctcgtccctgcagcacttggtggtgtcatcaacagggagaatgcgaatgagattaaagcaaagttcatcatagaagcagctaatcatccaactgatccggacgcggatgagatcctaagtaagaaaggtgtggttattctcccggacatatatgcaaactctggaggagtcactgtaagttacttcgaatgggttcagaacattcaaggctttaatgtggggaggaagagaaggtgaaccgatgagctaaagacttaccatgactccgctctttcaaaggnccttgaaaagagatgtgcaaaactcactcctttgcngatctcccggaatgggaagcttttacaccccgggggttaaaccgtgtgggccaaacctnccattccccaaaaggccttgggngnccttaaaaggtttncccaaaacccccttantggaaacccccntttntnnangnccccngnaaaaaanaaatttgncccaaaccntttaancccnccccnttttttngggtt

SEQ ID NO: 135257 - DNA, 631 bp, Arabidopsis thaliana columbia
  unsure (1)..(631): unsure at all n locations
tcttgtattgtcattgttaggttttctggtgatcgctgtcgtgactccatcggcggcgaacccattcaggaagagcgtagttctcggagggaagtcaggcgttccaaacattcggaccaacagggaaattcaacaacttggaaggtactgcgtggagcaattcaatcaacaagcacagaacgagcaaggaaacataggatccattgcgaaaacagacacggcaatttcgaatccattgcaatttagccgagtagtgtctgctcagaaacaggtcgtcgctggactcaaatactatctaaggattgaagtcactcaacccaatgggctctaccaggatgtttgactctgttgtggttattcaaccatggntccattctaagcagttgctcgggttcaactcctggttgtcagtcctggnctactnactttatttcctcctnattcgaccttaaaattnccanaaataatgggccaangaaaaagncctaaaaagggggantggnnccaaagccttttaagaaatggggtaaaaaccgggccgngnaatccgngaaancccgaaatngggaaaccccccggccaaaaccaccncttttnncngncnccaaaagnnancccggggggcccttgg

SEQ ID NO: 135258 - DNA, 668 bp, Arabidopsis thaliana columbia
  unsure (1)..(668): unsure at all n locations
ggtcccattggcccaaaaacaactcatttctgggggcctatcgctaattggggttttgttgctgctggtttggtggatatgcaaaagccccctgaaatgatttctggaaacatgtcgtcagctatgtgcgtttactctgcattgttcatgaggtttgcctggatggtgcaaccacgtaactatttgctacttgcgtgccatgcatcaaacgagactgtacaactctatcagctctcacgttgggctagagcccaggggtatttatcctccaagaaagaagaggagaaaccatctcagtaaaccaaaatgaggaaaggtttcttcaacgctgcttcagaatttgttcgtggggaattaactgaatccatccatttgattttctttcgaaacgtgttttgnaattgtgtcccaagctatgggtgcttaccttgttggacattcaccnacaataaacccttggttccaaaaagaaccgcttgaaaanaaagcggccggnaatcctgaancccggggggncccnagtncnaaacnggcnncaccccgggtgggccccaacgttttggccccttagngggggaaattccnccttgnggaaacanggncaaaccngnncccnggggaaaatgaaccccgcaaaacccnnaaaaaaatnggccggggnnaaaggg

SEQ ID NO: 135259 - DNA, 560 bp, Arabidopsis thaliana columbia
  unsure (1)..(560): unsure at all n locations
cgttgagactgagctttcttcgatctgttctgggattctcaggttacttgattcgcatctaattccttcagctactgccagtgagtctaaggtttttttacctgaagatgaaaggagattatcatcgttatttggctgagtttaaatctggtgatgagaggaaaactgctgctgaagatactatgatcgcttacaaagctgctcaggacgttgcagttgctgatctagcacctacacatccgatcaggcttggtttggctcttaacttctcagtgttttactacgagattctcaactcttcagagaaagcttgtagcatggcgaaacaggctttttgaagaagccattgctgaactggacacattgggnagagnngtcatacaagggcagtaccncaancatgcagttgnaaggggcaatctaacccttngngccccggaatccaggggccaatggttaggcccaaggccaatggnaaaaaacgggtttaaatnnccnnaaccgaaccgaaaccgggccanccccttgggaaacttccaaaaaantnttttntgaaantc

SEQ ID NO: 135260 - DNA, 514 bp, Arabidopsis thaliana columbia
  unsure (1)..(514): unsure at all n locations
aaatccaacaaaaggttcataaaactactaactttaaagagatctcgctctttccaaaatccaaaagacaacaaaagatgataaaactccatagaagattcaaaaacagagttaagcaaataaattcacctaacttaagcagtaagcacaacagcaccaccagcttccttaatcttcttctcagcagtcttcgaaataagcttcgccttcacaacgaacggcttgttctcaggcaaatgacctttacccaaaaccttgaagaaaccatgttgagtcacatcgatcaacgggacattgtccttgggttgnatttcggcttcacatcttcagggggcgnagtgaccaaagcttgtcgggggttacggttnggggagaagacttggtccccagcttgnggggataccccaaccaactttnccgggganccggngggacttttcgaangggcncgggggggggaacccccngggttncngncncngggnggtnnggggtnncgaaggccattccgggg

SEQ ID NO: 135261 - DNA, 526 bp, Arabidopsis thaliana columbia
  unsure (1)..(526): unsure at all n locations
gacaatgctcatacacagatatactacactcaacctatgggacatgcacagtaccagacaatgactgggcctccacctgccatggtgatgcctgatggttctgctgctgctaagcttccagctgagaacatgactcaacagatccggagttcacagccattgtgacacacacaaggaacacatgaagatgaaccacaaaattttggaggaagaaaaccccgggttggtttttaaacgtataaatatataacttttacttcttttttcttctcttcttttacaagttgctgcatcaaaaaaagagtctggtgtcatgttaagtttggtattatgggttgtgtttaaaagtgttgtgtgagtaaattnnaaaaaccaattaatagtgctccttgggngggnttttacattanaaagtnnaattgntacagggagnggttaccatttcccggnnctanaccnaatnatanccatccatccatttgnaacggccnggatcccgancccggggggccccagtnntaanggg

SEQ ID NO: 135262 - DNA, 679 bp, Arabidopsis thaliana columbia
  unsure (1)..(679): unsure at all n locations
taatttataacaaaaaatcattttaatgaaacagaaaactttgtagagtttacacctcaaagtgaatgtccctaaatgtctcagctatttgagtaaaccgaccaaacagtatcacaaaaaaagccatattgcatcttcctctggcttcacactcgtttcttcagacagtgaaccggcttcttctggaatcatcatggttattgaaagttatcttgtcggtgacatcaagtatctccttccacttcttcccaatacccatcagaacagcttcattagacttcgtcctagtccacaaggagagcttgtcttgcttcgactgtggacggacactagcaaccacaccacaaatctcatctgcttcatcaaattgctctccaatcaaagccatcaaaggtttcaagccagcctttggctaaagcttccttcctattagcaggaacaancccaaggccaactttcccccaattagnacaactctgggtcttnccacctttggggcaacanccagggtttgnacaagnggatttcaggaatccgggggcaatttgggaggcctggaaanaaaggnccgggggaanccccaaaaaacttttgncgggggtgnaaagnanngggggtttcgnnngnaaggnccccagggggggggnttcttttngttggngtnnggccnngaaaccna

SEQ ID NO: 135263 - DNA, 630 bp, Arabidopsis thaliana columbia
  unsure (1)..(630): unsure at all n locations
gtaaacgataaagtcttaaanatacgaattcgcggaccggtgcaagcaagnacacctgaattacacttgcttagagatctctgttttgatgaaaatgagctatgtggactagtcatgaaagagatctctttagaggaacaaagcattatttatattttctaatcaagatggagtgtgatgtgatcggtaagaattttagttctctctcctcttggcttggtggtgcatgtcctttgaaaaaatcgaaaccttgctatgtaaattgaatgttgggactagacggctttgtcaaatcatccaaaaaaaacataggaagacaaagataactcaaaggagatggagagagcaatcaagaattccaatagcaattcaaggatcaaaactccaacagagaaaatttcattaaattatctcctttgctgaattttgcgnatataaatatttgtttcttggaaaagccanaanattataaagncnaactggcaatggatttttccctttaattggaaccctaaatttgaaccttggtggngtaaaaaaattcnaaggnaatgggaaataaaangcccccaaaaaaaatanttnnnttgnnantgaaatgangnttannccgggncccngantttgggg

SEQ ID NO: 135264 - DNA, 665 bp, Arabidopsis thaliana columbia
  unsure (1)..(665): unsure at all n locations
aaaacacattcattaaattagacacatgaaattaaaaagagggtttgaaagtgaaatgaccccaaaaatagcaaatgagaaacttattatgtaactggataaatgatgatactttttttgccttgtccatcctcaaagaaactcacccactctctctttttccctttgagagcttcatccatggcaaccaaaatctctctgattcaatagtttcttactcctttgatctttagactctcgattctgtcgtgtcttgaaccgcaagacgttcagagatatcagctaaagatttaagattgcatttgattaaagcttcaacaaagtaacaagtctcatcctttgtgtttccttctggtacatcaaccaacaaatgactcaatcacaagtgtcctattcttccttccaaaggctcggggtgaagagagatgattgaagaatagtcttaaggctatgacaccaccaacggtntggacctggggatatgccattggcancaggaacccaacccncagggggtccaagtnctggaagccagnttcccancaactccccaacnggacaaccccaagggccctttaccaacannnnnggaaacggggnaacccctggggggggaaacccccnnaaaggggcccccanatngaaggggggngnatgtncaggtc

SEQ ID NO: 135265 - DNA, 462 bp, Arabidopsis thaliana columbia
  unsure (1)..(462): unsure at all n locations
gttatcaccatgtctcctctcattctcgatcaagaagttgatctcgatctctgggaagttgttaatccttctgatggcgagttctccgacgattctttctccgtcgatagtctttccgacgatgacgtcatatctcttgacgacgcttcctttgtcgcaccctctgtcatttctccgccgcatgagataattcctattgctgacggtngtgatctcgccgtggatctggatggtgatgatgatgttggcgatgatgtcgttcgcgatgaagttgatgagaatgatcttggatggtctcagcagcggntgatgtttctcggtggaggttctggttaantctggttggaatttacggaacggggagaatngaggttaaatggacggacggggcgnaagaaagnatcggccgaagtaaccgnagganttccggaatgnagnngtttgnacngannangttngggt

SEQ ID NO: 135266 - DNA, 638 bp, Arabidopsis thaliana columbia
  unsure (1)..(638): unsure at all n locations
atcataaagtgtaaggaatacagaccaaggaactaaaaccaaaacaagaaacctaccgttatggtattaatgtacaaaacaagacattaaattaagccataacaaattgaaacagtagtagtccatatgacatcacatgaccacacaagccgccgggttctcgtcgctaaatgcagtggtgtagcggacctcggtggagctagcacgagccagctgcgacactccggggtcgtcgactcttcggacataaccggagggtgccttcttgtcgtagacaccggcagcgtaaggatgagcgaccacgtcgtagggcacatatggccagagctcgactttcttgccggtcctgtgagacattcgagccaccaccttgtttgggatcgacgtagcccgactacagtgacttttattggggctttgggggtccaaccggcaccagnangacacancccttcatgccctncgaccagaacgccggaacttttccggtngggaaacctttggaggnccattttcacctttaaantccaccggnttggaacntggtttggggttttaaaccctnggggcccttggngngngnaaaaanttttnnnggcgttgtttangnannccccatttttcnnccttttnttccc

SEQ ID NO: 135267 - DNA, 556 bp, Arabidopsis thaliana columbia
  unsure (1)..(556): unsure at all n locations
tataacattatgaacacaacaagctcaagatcaacttggaatatggctttttaaaacaccccaatagcaaaaagtttcagtctttaaattctttctctaaacactgaactgaaactattccaaactaggagccacttctgttgggttggactcaaacacatcttcagagtttgaactctctgcttcatcaagaaggtcacgagattgaatcgcctctttatatactggcgtctccttgaaatccgtcgcaccttcgttatacgtccccggcggaagtccaccagagattagcgcgaaaagggttccggaagcccacaagtactggacggaggaacctnagaccatcccacttttcancttccaaaggntctgggttcaagtccaggaggtccttnatggnaatttggggggatcttcggggtacccctgaatggggattcacacgggtcnacnccaactcggcggtgnnaagntttnacgggggggttcccggggaaaactcggtccccctcccgggggcccagcggtnangnanangccgangtttgtgcnaagc

SEQ ID NO: 135268 - DNA, 513 bp, Arabidopsis thaliana columbia
  unsure (1)..(513): unsure at all n locations
catagagcaatacttctttgtttatctccactatttgaatatggaacatcataaaaacgaaaagaaaatgaaacgccttccgttgaggtgaatcaagagatccaaaatcaaatatgagtttaagattcgagctcaaggatttagaagagttgacgtcaaatgtgaagcaagtacaagacgatttgttggaggagatacttcaaattaatgcgaacacagaatatctctgtcaatttctccatagaagttctagtaaagagcttttcaagaaaaatgtaccagtggtgagctacgatgatgtgngaccttatatcggacgtgttgcgaatggggagccttcaaatatcctttacggggggnaccnttactaatttccttcctaagcnctggnactcctngggggggaccaaagtctttcccggggaccacaagncctccgggganngnnatnccccccntttttggccgccccantncccagnacnccggggncttggggggggaagngggngg

SEQ ID NO: 135269 - DNA, 526 bp, Arabidopsis thaliana columbia
  unsure (1)..(526): unsure at all n locations
taatccctaaccacaatgactctctctcatctgttatctccacctttaactccattggcatcgatgtcgaagccaccgtcgctctcttaggtgctcactcagtgggtagggtccactgcgttaacctagtgcaccggctatacccaacgattgacccnactctcgacccaagttacgccctttacttaaaaaaacgttgcccaagtccaacaccgggacccgaacgccgtctttgtactcccgtaaacgatcgtgagactccggatggtttgtgggacaacatgtattattaaggacatcatgggccataaggggggttcttggcaattggtgatgangcaagccaccgggttcccaggaccggaccggtttttgggcaaaatgggttnggggnaaaatttnttcccnnggggggttttnaaggggggnaagggnttttttnngaaaaaaccnnccngggggccaaagggggttttggggggggggaattttttnncccngggggggcnaanttttttanggggcc

SEQ ID NO: 135270 - DNA, 414 bp, Arabidopsis thaliana columbia
  unsure (1)..(414): unsure at all n locations
aaaggtggtaaactattgtttgtttttttttgtttaagaagagactctcttgaaacccaaacatacaacgaaagaggtacctcaagtttcaaaaattctttaaaagaaacaaagacaaatcttcctactcattcttgagcattactacttgcgtccattggctcagcctctgttgaagcctctcctttctctcccgccttttgggctttcttcttctttccaccacctttcttcttcttgatgcccaaaggtaaccaccctttgatctcaggggcttcgatgggccttttaggggagttcctgaagtggatgggnagngntccaancggntccattngggatccggaaaacgggggantaaccgggggnaaaaanccccgggttcccgaaaaaaanggatngggnnnaaanncc

SEQ ID NO: 135271 - DNA, 396 bp, Arabidopsis thaliana columbia
  unsure (1)..(396): unsure at all n locations
ggaggcacgacccggccaattaagaccaggagcgtatcgccgaccgaaggancaagccgaccgtccgatcatgccgatcagaaacatcgccattggccgtccagatgaagccacccgtcccgatgccttaaaggcggcgttggctgagttcatttcaactttgatctttgtcgtcgccggttcaggctctggcatggctttcaacaagctcactgaaaacggagccaccactcctttctggtctcgtagctgctgcagtgggtcatgncttttggaancctttcgtcggtggtctcnagttnggtgccaaaatcttctnggtggganacgttaaacctggcggnaantttngggggtttnaattggggggaaaaaaaannncccccgggggaancc

SEQ ID NO: 135272 - DNA, 553 bp, Arabidopsis thaliana columbia
  unsure (1)..(553): unsure at all n locations
aagacattaaaagagagatcacagtgaataaaactaaaaagattcacaccatacgatatcaacgcttgaactgcctaatggcacaacaaaaaccattacaaacatgtgacagtaaaaaaaaacactcatgggcgacaaaactcagaagatcgttttaaggatgtctatagcaagaagaagagaagatgtgtatggctatggcctaatggttaggcaaagattctatttacaagtttctattcctttgctatggctctacggcaacaagggcaactcccacaagctcctaagccaaggggttttnagccaaggaggatggggaactatggggtacaggggttagggttttagcctgtcaccttttagtggacnccccttaaacatttgggaaaatnccncatcccggggttttaccccgggntgggccnaaagtttcccggggggaaccgtttaaagccccttnggnnaacccttgggggtncttnnggnctncangggcccttnacccngggggggggattttnncccggggggccccttttttagggggctc

SEQ ID NO: 135273 - DNA, 550 bp, Arabidopsis thaliana columbia
  unsure (1)..(550): unsure at all n locations
ttaaacnttcaangtctgaaattcaaagaacgttgtttgcgaacatagtacagacgatcacataatagaaacgccacgataaaaaaagacaggaaattgaaaagagtacagccattcgaacatctttatttaatattatctcatcgattatataatattcgaaacatccgctagtagcttcatttgaccgtcgctcatcacctcacggtgttgcagttggtgctggcgctgattttgtaaggaatattgactttgcatgcgctaggaagtccagctgcacgggcagtgttgagaccgggaccaacggctttagcgggcagattgaaggcaacggcaagcttgctgacgggctgggggtgtactggccatgtttttaaaggttagtaaccgccggtgcagacccttggggaagtgganaccccggggcaagtnngngatgaccctggccaggttcccgttacgggggcacaacncntaagcnggccctgtnattggccggcaaaanttgaaccanggcgggatcctganccnggggcccagtttaaggggc

SEQ ID NO: 135274 - DNA, 555 bp, Arabidopsis thaliana columbia
  unsure (1)..(555): unsure at all n locations
tcagaaacttgttctcaacatttccgttggtgagagtggtgatcgtctcactcgtgcctccaaggtgttggagcagctcagtggacaaacccctgtcttctctaaggcgaggtacactgtgaggtcttttggtatcaggcgtaatgagaagattgcgtgttatgtgactgtgagaggtgagaaggcaatgcagcttcttgagagtggtttgaaagttaaggagtatgagcttcttaggaggaacttcagtgacacnggttgctttggatttggtatccaagagcacattgatcttggaatcaagtacgatccttccacnggtatctacggaatggacttttaacgttgtccttgaacgnccaggatatcgtgtggcccgccgccggaaaatgcaagacncgtggtgggatcaacacagngtanccaggntgatnaatgaaatggtccaggccaagattgaaggggtancccaaaaagcccagaaancccnggtaaaaaggnttnnccttaaaaantttgggggccacccattaaagggancctggggnaaaantc

SEQ ID NO: 135275 - DNA, 687 bp, Arabidopsis thaliana columbia
  unsure (1)..(687): unsure at all n locations
agagactaaaactagtttgaggagatttagaggagtgtttggttctttggataacaatatcccaaactgaaaatggctaagtcatatggagctatcttcctcttgaccctcattgtcctcttcatgcttcaaaccatggttatggcctcaagtggatctaatgtgaagtggagccagaaacgttatggaccaggaagcctgaaacgtacccaatgcccatcggaatgtgataggaggtgtaaaaagacacagtaccacaaggcttgcattacgttctgcaacaaatgctgcaggaagtgtctctgtgtgcctccgggttactatgggaacaaacaagtttgctcctgctacaacaactggaaaactcaagagggtggaccaaaatgcccttgaaaaaatctcccttcgttccctttttataataaaaattttcaactataacctaaatttcctttgatcaatggttaancaactttaantcccnaatggtgnaatgtaatggcacncccttttccgggttttggnccaaaccccaaaaaaaatggnngtgggcccaatgaatgnaattttncanggaaacctggggtnncaaaanaatttttnggncggnantcctnancccggggggcccccangcttnnngggggggccccggggggggnccacggtttgnccccnttggggggg

SEQ ID NO: 135276 - DNA, 505 bp, Arabidopsis thaliana columbia
  unsure (1)..(505): unsure at all n locations
ctgggttttgaaacaaaagtcaaataaatttcacccattgttgcttgttttcatgagaaactcaaaaacataccacaaaagaaaacagagtaaaatataccaaaacattacaaggactgtagccgataagagagagagatactctggatttcactcggctctagactgaccagctcgagaagagaggatgataccaacaatgagaccgtacagggcaagtgcttcagcaaagatgagaatcagaatcattcccacaaacaacttaggttgttgtgcattcgctctaacacnggcatcgcgacaattccaatagccataccggcggagagaccagcgggaccacaagcaagaccggnagngagntgagcattagccatcgnatnggtngtaagacttggcctttaggggtggttcccgggacctgntggttacaggcnatggnntaacccttaaatnccttaaacnccagcccttnnnaccnggggcaaccggntttttnccnaag

SEQ ID NO: 135277 - DNA, 530 bp, Arabidopsis thaliana columbia
  unsure (1)..(530): unsure at all n locations
ggagttgtatcatgcgcagatatagttgccatggctgctagagatgctgtcttttgggctggtggtccatattatgacataccgaaaggaaggtttgatggtaaaagatcaaagatagaagatacaagaaatctaccttcaccttttcttaatgcctctcaactcattcaaacttttggccaacgtggtttcactccacaagatgttgttgctctctctggagcacataccctaggagttgcacgatgctcctccttcaaggctagacttaccgtcccagactcttcattagactcgacttttgcaaacactctctctaaaacatgcagcgcggggtgacaatgcagagcaaccctttgatgctacgcgcaacgatttcgacaatgcttacttcaatgcgnttcagatgaaacagggggccncttttcagaccaaacttattcaacacncangggcaggatcttgtaaaggnntgcacttaccagcaagtctccttgattccaaagnctgggantggaactgtgtaangc

SEQ ID NO: 135278 - DNA, 620 bp, Arabidopsis thaliana columbia
  unsure (1)..(620): unsure at all n locations
agaagatggtacagagactgtctcacaactttgaagaatgattacaaatctcataactttttccaagacgtgaaaattaaaaagaagaaaaaaaaagaaacacatttgtagaaaacactaaacagaatttgcaaagaaacaataatgagaatcatcaactgtggaaacagtttcttcagaagaaatcaaactcaagataattactctgatcagatcttacactcgaagatgcggctgctggcacagtaggagtaggattcaaagcttcaagatcaaccggtttaggaatctccggtggactggcacatcgaaccagagcccaattcactccttcaaagaaaggatgttgctttatctctggttgctccacgcttataagctaatcctatgttgtggntccttcaccaagcaaactccttatnaaatccctagctgnggacgtancaanccggagattcaggganctaagagggtggccaaccacgttnaagacngttnccggatttcctggccctttaaccgggggtttttgnggccnggaattccctgganncccggggggggncncnnggtctntnngngggnggaccgngggtggggncccacgttttggccccttt

SEQ ID NO: 135279 - DNA, 547 bp, Arabidopsis thaliana columbia
  unsure (1)..(547): unsure at all n locations
agtagctgtgatgaaacaagaagatggaggactagatacaaatcagctcttgctctatttctaagctacactcaaatatgtaaaatatcaacgatcattcagaatggtgaatagacgaactagtaaaggactaaaaccgaacccaacaccgagtgcattgagcaacacaatctcctttacaatccacattatatcccaacactttcggattccgaagcaacagatttcgtagttgcttacccgtaatcccccattggttttccaaaatcccaatgtttggtttcatctcctcttcaagactgcaaccaagtacttccgggaatttcttcatcaccttatgaagatcttcgtctggataaaccaagacttctaaggnactctaggtatttgattcaaagtttccancctttggaattccctttcaantcgntcttcgggcccaggtnacggagagtgggtatgnccaaacgggnttccccaagaaccttgccnttcnnccncaannactgnganccaaaancangnncaaagggtccncttggaatnc

SEQ ID NO: 135280 - DNA, 707 bp, Arabidopsis thaliana columbia
  unsure (1)..(707): unsure at all n locations
ttcaaaagctcgttatctaaagattctgcgaagatgagtactatgaaattttgtcgcgaatgtaataacattctatatcccaaggaagacaaggagcaatcaatcctcctctatgcgtgccgtaattgtgatcaccaggaagcagcagataacaattgtgtttacagaaacgaggttcatcactctgtaagtgaacaaactcagatcctatctgacgttgcttccgacccaactcttccacgtaccaaggctgtgcgatgcgccaagtgtcaacacggtgaagctgtcttcttccaggccacggctagaggcgaagaaggaatgactctgtttttcgtttgctgcaacccggaactggtagtcaccgttggagagaatagattgatagaaagactacatttttcaaatgtaaccggggatttgtggttccggctttaatgnagtttaaacaantccaatttggaggtttctggggnaaaaaatatggatcctatgggnccnggtccccgggggttcgggcccggaattcctggaaccccggggggngncnccaaggtcctaaaccgggccgncacccggggtggaggnccaacgttttggccccctttgggngggggnaanttcgnncnttggggaaccnagggggaaannnggggtccccggggaaaattggaacccnggcaaaannnccnnaaanaaanggccgg

SEQ ID NO: 135281 - DNA, 727 bp, Arabidopsis thaliana columbia
  unsure (1)..(727): unsure at all n locations
tcaattaatcatgctacatacatagtcaaagttcgtagtaagtagacttagaaatagttaccgttagagttattacgattaggacaagcgttacaaaatgtgaaggatcgccacatgagaagcaccttataccactcactggctctccagttgcagagacaaagcttgttccagagccgcgtcgtcctccactgctttggccgcctctacctccacggccacgaccacggctgccacgtctaccgctcccgccgctattagaccctgttgttgcattcccactactgttgtttatgctatcttcccatgcaaagaaactgcagccttgtgttggacatgagaagaattgtcttcccctgttagcttctgtgttgggctgtacgaagaacaccattgtgatccacaagtgttacatgatactggaactttcatcggtttcncgggatttggttgcagtaggnccgagnatttcgnagatgctgggaaccccgtgaccggccgcgnaattccttgaagcccgggggggtncaccaaggtcaannagngggcgncaccgggggtgggcgcccanctttttggnccccttagngngggggaaatttcggccttgggggaaccatgggnaaangnggtnccnggggggaaattgaannccggccaaaatccccaaaanaattggggcggggnngaaaagggaaacccctgggggncaantggggggganccc

SEQ ID NO: 135282 - DNA, 644 bp, Arabidopsis thaliana columbia
  unsure (1)..(644): unsure at all n locations
cttttcatacctcaagagactaaaactagtttgaggagatttagaggagtgtttggttctttggataacaatatcccaaactgaaaatggctaagtcatatggagctatcttcctcttgaccctcattgtcctcttcatgcttcaaaccatggttatggcctcaagtggatctaatgtgaagtggagccagaaacgttatggaccaggaagcctgaaacgtacccaatgcccatcggaatgtgataggaggtgtaaaaagacacagtaccacaaggcttgcattacgttctgcaacaaatgctgcaggaagtgtctctgtgtgcctccgggttactatggggacaaacaagtttgctcctgctacaacaactggaaaactcaagagggtggggccaaaatgnccttgaaaaaaatctcccttcggttccctttttanaattanaattttcaactataacnaaatttccctttgnncaanggtttaccnaccnttatcccaaatggtggaaatgtatggcaccccntttcggggttttggnncaaaaccctaaaaaaaatggnaggngggcggnantnntggaccccnggggggccnccangtctnaaggggcccaccgngggggggncccncgttttgcccctt

SEQ ID NO: 135283 - DNA, 596 bp, Arabidopsis thaliana columbia
  unsure (1)..(596): unsure at all n locations
taagctcataattatttcaaaccccagaaaacacaaaagggttttgttacaaactctgaaacgaaaactcaaaccctaaacagaataatccattaaggtaagaggaagaacaaccgaaagcaaaagacaccattattactcataaagatcaaagtctctcactttctcactcagatctaagaaagctgaccacaatcagtgatggtaacgactttggaagtctttccagaatcagatccaactttctcaatcgccttcacgacgtccaagcctttaacaacttgtccaaacacaacgtgcttaccatctaaccacgacgtctttatcgggtacagatggaggactggggtncggttagtggttaggggccagnngttagccattgggggggatccccagtccnggnatggttccttgnanaagtccngggcccttgaacttggcccggggntcggtttncacggggtccggtnttnggggggggatccccccggggggnaatgaccnggggtcnncggggggaaanggccctttnnggaggggggtccaggttcccancttttcnngggnaggaccgggatccccgggttgggggt

SEQ ID NO: 135284 - DNA, 605 bp, Arabidopsis thaliana columbia
  unsure (1)..(605): unsure at all n locations
tttcatacctcaagagactaaaactagtttgaggagatttagaggagtgtttggttctttggataacaatatcccaaactgaaaatggctaagtcatatggagctatcttcctcttgaccctcattgtcctcttcatgcttcaaaccatggttatggcctcaagtggatctaatgtgaagtggagccagaaacgttatggaccaggaagcctgaaacgtacccaatgcccatcggaatgtgataggaggtgtaaaaagacacagtaccacaaggcttgcattacgttctgcaacaaatgctgcaggaagtgtctctgtgtgcctccgggttactatgggaacaaacaagtttgctcctgctacaacaactggnaaactcaagagggtgggccaaaatgcccttgnaaaaaatctccccttcgntcccttttttantaattaaaaattttcaaccaataanctaaanttnccttttgaaccaatggnnttacccnccttaatcccaaatngnnggaatgtaatggcacccccttttccgggnttttggcccaaaaccctggggggcngggaatnnctnaanncccgggggggcccccaangncntt

SEQ ID NO: 135285 - DNA, 482 bp, Arabidopsis thaliana columbia
  unsure (1)..(482): unsure at all n locations
tgagattctgaagaaagaaaaggaggagggaacatccaagatggttgctagttgtggtagagctcttttttggctcactaggacaatggattttactgcgggtttactacgattgttgtcgaaagagatgtcgtcgaaaatggaagaacttgtagaagaatgctacatgacgactttaaaaccgcatcatggatngatcgcgtctgctgctttcaaagtgtgtttgaagctggtgcctgacaacaagacgttcatggaagcgatcggtgcaagagacgagagctatgataccttaagagaagacattgataccttgagctcattggttgacaccnattctcaaagaaatctactttggtncctggancaatacgggttgagcagnttaaganccnatgtaggtaatggaatttagtggntaattcncccaaaatgngaaattttacccnttaagggaaaaatggngnntaccnanggnagna

SEQ ID NO: 135286 - DNA, 632 bp, Arabidopsis thaliana columbia
  unsure (1)..(632): unsure at all n locations
caggagtttggctctaaactgaaagagcatatgcagtattgcatggatcatcctgatgagattagcaagcttgctaaggtgaaggcgcaagtgtcagaagttaagggtgtaatgatggaaaacattgagaaggttcttgaccgtggtgagaaaattgagcttttggtggacaaaaccgaaaatcttcgctcacaggcacaagatttcagaacaacaggaacgcagatgagaagaaagatgtggcttcagaacatgaagataaaactcatagtgctcgccatcattatcgcactgattctcatcatcgtgctctcagtttgccatgggtttaagtgttaagcccagaaaattcaaaacttctgagatctttctcactccgggtacatccggaagtgccttcccctttnatngtncgatcnttcaatccnaatggttctgccttgaattgggttngaannggtagnccatatatggatgggaccccaatttgccaaaattgcnttcaacctgntgncaattggncccttgggaaccagccangaccttgccaagnannncggnggcccggaatccctggaaccccgggggggccccaaggcctnnaangggggnccaccccggggngggncccc

SEQ ID NO: 135287 - DNA, 625 bp, Arabidopsis thaliana columbia
  unsure (1)..(625): unsure at all n locations
cttggttttcattaattgttttcccgagtacacaaacattggcattggcacatatcaaagtattacaccacaatgaaaacagaaaaacaagaagaaatatagtgcatagttttacaagcaaagttgccaatttttgtacatacataataacacaaccattttgtaattgttgttattatgataggtttttttttgtgtggcaaaaactcaaacgttggctgcacttctgaaggatccaagtgacttggaacctgaagcccttaggacaaattggtgataaaatgcagctatcgcagctccaatgaatggtcccacccagaatatccagtggtccatcccatggcttgctccttgttataagattacggnagctccgnaactcctagccggggntgatgccggttccgggtgatcngggatagtggccaaatggnccataaacaccgggaacccaatcgggagtggggccaaaccggnacgtgggnggcnntagcgttccgtttggggccgnaccgggnaaactttntnccggaacgatttccggngcggnattccttancccgggggccccattttaagggccccccgggggggncccncttttcccttggnggggattccgggc

SEQ ID NO: 135288 - DNA, 572 bp, Arabidopsis thaliana columbia
  unsure (1)..(572): unsure at all n locations
tcaattccaatgctactaccataatacaacagaagctcagtggttctttaagcttcatgaaaaattgttgttgtggaaccattgttcttactgcccctgtcatctccacattgatcatctctgggctctctagttttttcagtccgaagtaatgttgttacttttttcatcttcgttcttgaatcagagttcgcaaagctctttcaacgtcttcaaatggttgtccagcatacaacgtaagctgcctcttcctcacaactatcacattcttgccaccagaactaacttcatcataaagatccttgggtgttacgggagctatatcggnactggaatcatccaagtcttcaaaaactggnttcaaggcagntaagnagaaggttcnnagcatcaactttgnancttcaaatgnaatccaaatggggaacttgnncccccattttggtccaaagatcngggccccaggggaaaaancccccaggatggcctgnccggaatancccgggtngggatcccaggncannggggggcttggccccccaattttnccttcccaantggtnccccttggc

SEQ ID NO: 135289 - DNA, 602 bp, Arabidopsis thaliana columbia
  unsure (1)..(602): unsure at all n locations
cttgggggacaaagtgagaatcaaacaaaggattgttttagcgtacaagaaaaaaaactctgctcacatataacaaagattgtacctttttgctatcatagtagagtttctaaatagctgagaagtactctttgctgagttttgggtcgggtttcattgacttctcacccggcttccatcctgctgggcagacttcatccgggttttcctggatgtactgtaatgcctggagggttctcattgtctcatcaacgcttcggccaataccaagattgttgatggtggaatgttggatcactccttccttgtcgattatgaaaaagtcctctcaagtgctaatccctgatcatgggatgaagcactccgaaacgactttgagattgatttagtgnccatctggaataanggggntagttcagatnaccaaggcccccagaattccnggctgtttgnnccatgcaagggngagacncnctatnggcagaaaccccaanactcggggtcaacttcccnaaatctgnatncnggcctgaaggagaaaccctntngggaccnaagaanccatgggggaaaagggcccaactnttccangncccaggggc

SEQ ID NO: 135290 - DNA, 544 bp, Arabidopsis thaliana columbia
  unsure (1)..(544): unsure at all n locations
gaactcaaactcacgaaaaagaactgaaaggagaagctacacatcacatgaaacttctcatatgagacatgatgataataacaataagtctccacttctttcactcagctctagactgaccagctcgagatgagaggatgataccaacaatgagaccatacagtgcaagcgcttccgcaaagatgagaatcagaatcattcccacaaacagcttcggttgttgcgcattcgctctaacaccagcatcaccgacgattccaatagccataccagcagagagaccagcaagaccacaagctagcccagaagagagatgagcatagccatcgaataggtaataagacttggccttggggttaatcccagtactgatgataacagcgatgatcanaccataaattcctaacacaccagccatgncaacagggacaatcgatttcataacaaggtcagggntcntcactcccatcgngggaactccaattcaantnttggcgncccgtagntggtccctncaggggaaanganggggtggggcgannnc

SEQ ID NO: 135291 - DNA, 589 bp, Arabidopsis thaliana columbia
  unsure (1)..(589): unsure at all n locations
ttcatcatctccctcatttcaaccatctcttttgcctctgttcaagacttttgtgtagctgacccaaagggtcctcaaagcccatcaggttactcttgcaagaaccctgaccaagtcaccgaaaatgactttgcatttaccggcctcggcacagctggaaacacttccaacatcattaaagccgcagtgactccagcctttgctcctgcttacgcaggcatcaatggccttggcgtatctctggctcgtcttgacttagccggtggtggtgtcatccctctccacactcatcctggtgcttctgaggtccttgtagtcattcaaggnancatttgcgccggatttatctcctccggcaacaaaggttacttgaagactctcaacagaggagattctatgggggttcctcaagggcttcctcaattttcagncaaaactctgggaaanggcctggctttggcttttggnggaattcggaagncctccccangggnccaaattcaacaattggnctgggttgnaaananttgcttcanaattggtgagcanaanggcctnaggnnggnnagtaaaagtnagggnnttgggg

SEQ ID NO: 135292 - DNA, 578 bp, Arabidopsis thaliana columbia
  unsure (1)..(578): unsure at all n locations
tgcattagtaaacttataaaagtgtagaaaccaaaaacaaaaagtaagtctttcgctattgaagcttttaaattaactaacactgtttaggattgtgttttgatcaccgattcaaacataaactggacacaagacctcgctctgaggttttgctatgttcaaactctgttgtatgctaccgacttgctgaagagcttgcggatgtagagaacttgaagtccactagctgcggcaaggaaaatgtactctcctactgtgtagaatatcactcgctttctcgtgctctcattcgtatgacggtgacgagtgtcacgagctttcaaatacttctgctcagcaacaacagattccaaaagcctctctcaactcagctatcttaacatttaccggggccaaaatgtccacctttggntaaggcatgcccattaggnatatggccaccatggntattaaaggggcaggttcagggggagnanaagggtgtgnaccaaaattggnatccnccttttngggcctaaacccaactntnnccngnggcccttaaggcggaaaggnccnccggggngnccgggaactgc

SEQ ID NO: 135293 - DNA, 600 bp, Arabidopsis thaliana columbia
  unsure (1)..(600): unsure at all n locations
catggaacacctcctgctaaaaaagaagctgtcgaggctttggctactgtgaaaatcgaagagactctgcaatgttcggtttgtttagatgattttgagattggaactgaggcaaagctgatgccctgtacgcacaagtttcatagtgactgcttgttaccatggcttgagcttcacagttcatgcccggtttgcagatatcagttacctgcagatgaagccaagactgattcagtaacaacaacgagcgataacaatggaagcagtagtgcttctgctacaaccagccatggagctgagaacagcgatggaaaccggcgccaagaagaagaagaagaagaagangaggaggaggaggagggagacgnagaacaatgaccggaagcggattctcgatcccgtggccgnttagaccttgtctcctcggngcaagatagcaatgaccaacggnttcnagttaanccatgttccctgagcaacataagctttttggngnnccatgaanctcggtcacccaaacctgnccntttggctgacaaaagtnccantttggttaaccggccgnattccnggccnaangnttttnttttnggggagngc

SEQ ID NO: 135294 - DNA, 597 bp, Arabidopsis thaliana columbia
  unsure (1)..(597): unsure at all n locations
gctcgagattcaaagaaacctgcaactccgaatagaagaacaaggcaagtacctgcaaatgatgttcgagaagcaaaactctggtcttaccaaagggacagcctcaacatcagattccgcagccaaatctgaacaagaagacaagaagactgctgattcgaaggaggttccagaagaagaaaccaggaaatgtgaggaactagaatctccacagccaaagcgtcccaaaatcgataattgaaagtattggtcttttgctggataatctcggagtttcagagttaacagtgatagagaggacgagctcttatcttgaggttcttccaggncttctcncctttactggtttaactatttttcctggttgggagactcctcaactccagctgnggtngnccaaccaacaggtcccccaggggggnaccaaccaaaattaaaggtnggtttgggggaacctncaccatccggggaacccaaaagggtanccccccntnggtttccgggcnnaggttccttatgggaacctttttnggnatcccaaccngnaagtttttgggggggnatcctganccngggggcccntntttaggggggccc

SEQ ID NO: 135295 - DNA, 593 bp, Arabidopsis thaliana columbia
  unsure (1)..(593): unsure at all n locations
cgtttcaaaatatctaatcgaaaggactaaaaagggagtagctattccaatggacgacatgacagtgtgtcccttatgcttgattctagtgaccacgactcatcttaactttcggcattgactttttcatctggcgtgcacgttcttttgcttctttcttccttagagcctcggagctaagctttgcctgtgcctcctccaatattttcttcttttcggctttctttctctgcaatgcctcttgtctcacattctcaagttccttgtacgcttcctgagccgccttttgcctagcaccgtcagttttgttccttgcctgagagctgagcttgtagcgcccaattaagtcaatgtaatacggnaattaagcggcatcaaccggancatatcaatccatgtgttaataacanggaaggnaaacttgaaaagcagcatcttcctggggttgccaggatgtgnaccgggaatgnattgggtgaaaaactnccaaactttcaaaancttgcaccaaaaaccggnaagacaanacgggggaaaacccaggacccctangcngngcaagaaaccccggaccattcccggagggtgggggc

SEQ ID NO: 135296 - DNA, 499 bp, Arabidopsis thaliana columbia
  unsure (1)..(499): unsure at all n locations
tgaatctgagggagactgagctgtgtcttggtcttcccggtggagatacagtggctccggtaaccggaaacaagagagggttctcagagacggttgatctgaagctaaatctgaataatgagcctgcaaacaaggaaggatctacgactcatgacgtcgtgacttttgattccaaggagaagagtgcttgtcctaaagatccagccaaacctccggccaaggcacaagttgtgggatggccaccggtgagatcataccggaagaacgtgatggtttcctgccaaaaatcaagcggtggnccggaggcggcggcgttccgtgaaaggtatcaatgggacggnagcaccgtaactttggagggaaaatccnattttganggatgtttaaaaagctaccgatgngnctttccnaatgnctttnnccaaaaatgtttaagncctttttaccatgggggaaacattggggggnaaaaagggantgntnannctcncntgaattg

SEQ ID NO: 135297 - DNA, 567 bp, Arabidopsis thaliana columbia
  unsure (1)..(567): unsure at all n locations
taagatcagagaaagacaaggagaaagccgggattccacggctcccttcgaatgctaagaaccgcgtgatctccattccgtatgtgtctatctaactttgataattcttttcattattattatactcaaaacattgaacctgttcttgtgattatcagattagaagaactaccaaacaaagtaaaaggaatcgtgaggaactctaaacgagttgaagcagagatagcagcattaaagatttcttacctcaagaaaatcaacaaaggctccaatatcatcatcttggactcgtacacggattcggctaagatagtggcgnaaacgttaaaggtctcgggtacaagnattgctatattgtgacagatgggttcccctggtgggcagagggtgggttccagagccgtttaggncctggttccttacaacttccncggtttgcancaagncttggcnccatgnnggntttcccggggagttccngaaccttggnncnaggccggnncaagtccctcccaaggccggctgnaangngggtttatggtttnaagggnggtaagacccttttcc

SEQ ID NO: 135298 - DNA, 603 bp, Arabidopsis thaliana columbia
  unsure (1)..(603): unsure at all n locations
atttttttntncncaagngnccccgcnacggcnncnggaactaaaaacttganacccaattcgcggccggtttgctctgtgatctgctttggtctgatccaagcaaagatgtcaaaggttgggggatgaatgaccgtggagtctcttacacgtttggccctgacaaagtcgcggagtttctaataaagaatgatatggatctcatctgccgtgcccaccaggttgtagaggatggatatgagtttttcgccgatagacagcttgttacgatattttctgctcccaactactgtggtgaatttgacaatgctggtgctatgatgagtgttgatgaaagtttaatgtgctctttccaaattcttaagcctgctgatcgaaagccccggttcttatgaagtaaagagttgaaacctcgcgggaaagaagaggnaaaaggcgatacgaaagcgggagagacatttgaagctccctgagactttgnccggaggcntgcaaagnnaaaaaaacataattacatggtaaatnacctaanttgaaccctgccaatcctttcccaaaaacttaaggcccnagncntccccccggccanangnnggaaaaagg

SEQ ID NO: 135299 - DNA, 540 bp, Arabidopsis thaliana columbia
  unsure (1)..(540): unsure at all n locations
ttaatactctcatcaaccaaaacttttacatacacccctgaacccaccatccatctaaacaacgcaggttagtttgtcattacttgcgacggaagctacccgaatatagaatcgtatgttatcgatcaccggtttccgccaatgtcttctgataattcttcaaccaaatcctcaaaaatctcaaactcgatatccaaaaccgtctctgagacatctgcgtcgttctttgatctccataatcccaatctctctgttctgaaatcatgttcgaccatcatatcgattgtgtttgactccacatctctccaagatctcaatctctcgcataacccttttggntacaatcgcgggttcagcttcaacggcggatggcgncttggnaattcctctgntgnaaggnctgaggtcaatgnttctanggcttccggacttttaccatctctcaaaggatggtttaagaacncctggggggcgggattcctggagccggggggcacnagttnaanggcgcacngggggggncagtttgtcctagnnggt

SEQ ID NO: 135300 - DNA, 537 bp, Arabidopsis thaliana columbia
  unsure (1)..(537): unsure at all n locations
cagaagcctctcctacaaacttttttatagcaatcacctcaacaacagaaaaaaatgatgtgtttctttttttctaggggaaattcgaactccacttagaaaaaagaagagaaaagggcacatctacaatgatacataggcaataaaactggaacttcaaaaaattatatatggtcgggaccacaaaaaaaaacagagaaatcacaaaaaataatcaggggtcttccgagtagtatcaggttcaacttgtcgaggagctggatcgaactggaggaagttttgctccatgttctctcctatctctagaatggcagccatgtttccacaccggtagcaatagtttggtgcactaaacacagtcaccacattcttatcctggcaccagttaaaccttccatgncaagttgatgcgctcctgnaatgnggctngnccattggtggggttaaattggctggntanctggccaaatgnttaccaggncccgnggggattcccntcncatggtattgggttgcctataaccccnggcctggggt

SEQ ID NO: 135301 - DNA, 605 bp, Arabidopsis thaliana columbia
  unsure (1)..(605): unsure at all n locations
tataaatccaacaaataatttaagccaccttcgaaagaacaacttccattctttttctttcttttttggttcacacaacaatacaataccagatattaatatatgtgatcacacaatattacaattataagaaagataccaaatggaaacattacaaagtattgaaaaacaaaaccttttctttttaatctcaaatcatagaggaccggacgctcaactgcttcaatatagtttccagtgtggacccgtcacaagacctccaattattcatgtatgtttgataatgcaaaataaaattattataacctttcttttgtttgtntgttttaacattctggtgtttggggtatggncctcttttcgggatcatggcaataggtnatagaccaaggangttcccccggtgcccatggcaatgccggcatctgntgccgggtcaaccgcgggtgcgcatgggtnaggcgatngcgggctgnatgagncagaggaatccggcggggatcccggcagcttaaaggtttggactagncncaaagggtgggancngagccggntttggcccccatttctggggncagccggtgacccaatngncggancccanc

SEQ ID NO: 135302 - DNA, 580 bp, Arabidopsis thaliana columbia
  unsure (1)..(580): unsure at all n locations
catgaaatcgaatgaatttaattgtgatacacaattcaagccaaattgaattcagaatttaacaacaacatgtaaattaagatttaaagaacctgtgtatgaatagatattaatgtgaaagcctcgagtgggtcatgaaaatgaaatgtcacggtggatggtgccctagccgaagttcaagatcaagctcatccactgatgttcctgtcgcttctttcatcgagccaatgctctcatcatctcctgtcgaatattcaataagccgaggaggaacttctactggaggattccaacattgaaaacgggaggttgctccggngggaacggagtccggtacccattaaagattcaccatgtcanccaggaattacccaaaaaatgccactaaggggttttncaggttgggtaggaaatgggggaaaaccttccaatggtactcccccgggggnntgggatttannaggggccgntgntaggnaaacggnggggcgccaagaatttgnggaanaaccccccgngggggggttnttaccggnanccgaacgggggggcccttttttgncccntnannaggnggggg

SEQ ID NO: 135303 - DNA, 608 bp, Arabidopsis thaliana columbia
  unsure (1)..(608): unsure at all n locations
taaaacacaacatatatattttactttctcattccaacattagttgtacaaaaaaaatcacatcaaatcaaatttggacgaagaagatgaactgaaaacatatttttgtatactaaaagactacataatagtacaagcatggggattatcatcgctaaacatcgaagccgcgatctcatctccagccacagcaaccgagtaatccgcgggagtgtggaagaaagtgtggacaccaccggtgggatccgtacggtgtgcatcagagtaatagtggttggtcacgtaagaaggatatttatagaaagaggcaaaatggctattacctaaccggtatggccacagttccagctgccttaccggcacgtcggtaccgcttttccaataaccttccttttncctnctaaaccgggtatcctccgagccgncaacttttttggggttccancctccaacttccaattntttcccaacncccttnaaagtttgangaaaggncttccctaagntttagnagggcatccttnaanaanccaaagtttggnaccnttatnnccantgggganctttaaaanccctttncngggattggctttaaaaccaaccccttc

SEQ ID NO: 135304 - DNA, 470 bp, Arabidopsis thaliana columbia
  unsure (1)..(470): unsure at all n locations
tgaaacaagaagataaaacattttcgaaagatcagttcaagaactctcgctccggtttggtttagacgaagattccgaatcaaaatcttcctccgtcgcaggaatccattcgttcgtcgccggattgcttctgtaaaccgctttttctcctccgtctccgattgcggcggcggttacggcctcggattcttcaccgttgtcttccttcaccacatttataaacccacttccggtcgtgtgatgttgcttatcaatggcggtgaganttgagtaatactctgtttccaggaactcatccttgaactgcagatgaaatctccctcacctagaaactttacccatggagtttggtgactggnagaanantgggaatttggccagctttcaaggaatggncgggggaatttttgtcnggaagcagnngaaaanttnnaaggaaanncccgggttcngnnttcnnaagggggggt

SEQ ID NO: 135305 - DNA, 553 bp, Arabidopsis thaliana columbia
  unsure (1)..(553): unsure at all n locations
gggacagtacgttgatgtcactgggatcactcgaggaaaaggttttcagggatgcatgaaaagacatggtttcagtggaatgccggcatcacatggtgcttcattgtcccatcgaagcgggggttccacagggcaaagagatgctcctggaaaggtgttcaagggcagaaagatggctgggagaatgggtgcagatcagaggacagtaaagaacgtttgggtctacaagatcgatcctgcgaggaacctcatgtgggtgagaggacaagttcctggtgcagaaggaaactttgtgttcataaaagatgcatggtgcaagaaaccagacatctcaaagcttccgtttccaacttaactttagctcccagaagatgaagatccatcagaattagaaccgttggntgcagatcttggagaagttgacccatttatgttggcanantgttgaaacagctgntcttgaccttatttnggcttttcatggtntgggccngaanaccttngaantnngggnccnnggtnaacttttncnnagaattgcctttcttttttc

SEQ ID NO: 135306 - DNA, 610 bp, Arabidopsis thaliana columbia
  unsure (1)..(610): unsure at all n locations
tcactggtaaatacaacaagggagctattccctcagacagccgatttgcattggagaactacaaaaaccttgccaatagatcacttgtggatgacgtgctgaggaaagttagcggtctcaaacccattgcagatgagctaggtgtaaccttggctcagcttgcaatcgcatggtgtgcttcaaatcctaatgtgtcatctgttatcactggtgccacaagggagtcacagattcaagaaaatatgaaagctgttgatgtgatcccattgttgacccctattgttctggacaagattgagcaagtgatacagagcaaaccaaaacgtcctgaatcatataggtaaaaccaaccatccaagatctctcttcccctaattcaatcggttacaaaaagagtgntgcagggaaaaaggaaaccattaggaggagctcctgtgatggaatggtggttggatggtggcccggttttcgnctttggttggnccccttngnagcttatgnanttttaangcncnggcngngggaaggggggcaaanggtttttttaaggnttccctggtccccntttaaaacgggcttattggacctggtagggnnctaaaggtnggnc

SEQ ID NO: 135307 - DNA, 634 bp, Arabidopsis thaliana columbia
  unsure (1)..(634): unsure at all n locations
aacccgagttcaaattatctctcaaagtacaacatgtgagttataataaaccacacaccaaaaaaaaaacaatatattttgttgttgttgctaggagatttatgtacttgagagaaaacccacttgggaataaaactaaagctttcactaaaacaagataccaaaacatctaaaacctgaaacaaacttgatgaactatatactacactggtctactacgttcatgccttttgtctctcttacgaacttcttccaatgtctttgcctgaaaactcccctgatccaaacagatcgattccacctccaccacctatagaagttaacagagcagacaaatccacctccgggtatttaccaccatttaccaacaggctcttcctaaatccaaggaaagtctaggtggccgtctggttttcggggccaaaacaccgggtgnaatttcccccatcatgngntcctttttaggcccggatccggtaccaaccggntggtnacaagggaggcccaaggccanggccaggggggttaatgggcaatngnatcatgnttggcngnggtccntnggtgnagntggtggttgaactttggctaacccgggnaggttgggccnctgntncgggggccnnttgggggc

SEQ ID NO: 135308 - DNA, 535 bp, Arabidopsis thaliana columbia
  unsure (1)..(535): unsure at all n locations
cttttgtgcccgttaaacaaaatcatttattcaaacaaaagtccaacacgattaaacaagaagaatcaatattccatcctttgcagtagtaaaaagggacttcactaatcacttgaaaagccaaatgatttagttttttttttgtttcttcgaagaaataaagaaagaaaccttcttttagcccgagagagctgcgttgatggcactgtgaacttcaacaccaatctgtgcctctgctttctcaagatctgttgtggcagaagcaagtttctgttggaactcagctaaacccttttggacttggctagggtcaatgtggtcaagcggcacagcttccaccgcgattatgtcagcgacggaatttgcgtggaggatgcaaancactgctcaagaagtattcttcacggcaggcccttcatggncggcatggtgccaggtttagcncacnattgttgnacgtgccnggnaancaccattgcccggtgntnnggatntgccatgngccctttccggaancnntggaaggggnnaannc

SEQ ID NO: 135309 - DNA, 533 bp, Arabidopsis thaliana columbia
  unsure (1)..(533): unsure at all n locations
cttttaagcaaagttagtgctagtcgcgctacacttcgagtctggtctaaaagtggagcgtgattagcactactctaaagacaaaacaactaaagagataaataaaaggagaaaccagaaaaatacggttggattagtttagatttcggtttgacttttgagatccctcgattacatacaacaacaaaaaaaacgcggttggatcattaataaattcagttccaccaggtcttcttcttgcgtctggtantggcagcggtacggttgtagcggcaaaagcgttttcttggagggaatcaagaagaacggtgcttttgcattcagggncattttaggggcatcatcaggaaagcattaccgtacataagggcaccgagggggacccnccaagaacccattgngggtaatggccccggtccccccccngggtaggttcccgattgaacccnttnanctttggggaaancgngttgnaccggttggggntcnnanaaacnccnnnggggggccttnaaaagngggggggaaaattc

SEQ ID NO: 135310 - DNA, 571 bp, Arabidopsis thaliana columbia
  unsure (1)..(571): unsure at all n locations
ctttgcaaccatcgccgccgtacaaccttctgccgccgtgaaaggacttggaggtagctctcttgccggagctaagctcttcatcaaaccttctcgccaaagcttcaaaaccaaatccaccagagctggtgctgtggtggctaagtatggagacaaaagtgtatactttgatttagaagatttgggtaacacaacaggacaatgggatgtgtatggatctgatgctccttctccttataacccacttcagagcaagttctttgagacatttgctgctcctttcacaaagagaggtttgcttctcaaatttttgattcttggaggaggctctttgcttacatatggtaagtgcgaactctaccgggcgatggtccttccgnattaagagagggcctcaagagccanccaagntcnggcctcggnggnaagcnttaaattagncttccaaaaaaccttccaaaaagcngnaacttttnccccatccntngancccattaagggaaatggancgggnggggaaanncttgnaacaaggggccgnaaaccgngtgggggcaagaatggggnggga

SEQ ID NO: 135311 - DNA, 577 bp, Arabidopsis thaliana columbia
  unsure (1)..(577): unsure at all n locations
aactggatctgtccagaaaaaagatcaagactggcgtgcgattttgtctcccgagcaatttagagttctcagggaaaagggcacagagaaccgaggtaaaggagagtataccaaactgttcgacgacggaatctatagttgtgctggttgtgcaactcctctttataagtccaccactaagttcgactctggttgtggctggccttccttcttcgatgctatccctggtgccattaaacaaacgcccgaggcaggagggagaagaatggagatcacgtgcgcggcatgtgacggacatttaggtcatgttgtcaaaggagaaggttttcccacagcgaccgatgagcgccactgcgtcaaacagtggttctctcaagttctctgaaaatttcctcccaaataagtcnatataggccaccattgatgnccactattggtngnccaagnccccccttcaagaaaatttgaaatcaagccgnattgtttaaattgcatggaagtccatcccaagcctgggnaaatgccccccagngatgtgnttngncggatnctaaccgggggnccagtttaaaggggc

SEQ ID NO: 135312 - DNA, 487 bp, Arabidopsis thaliana columbia
  unsure (1)..(487): unsure at all n locations
attgattgcataaaacttatacttgtctttgaatttaacatattcaaaaatatagccaagaaaaattaaacaatcgaactactgcatcgagtcttacaacgctatgatctctttgtatgcattgttgcgttctatataccatataccttaaagtcctcttcttctatctgtctccattactgaatccagaatgtgcatatgtatagttaattcatcatatgttgaggggatcttcttctgtgtttctttcttcaaggggtgtccagtcatttgtttttggttttgtcaacaatcatcatgagccgcctttgtaggagacttgcaacaaagagggnagntcgaggcacattccnaaacatganccggtgattaggggaatgnattntacattngnccantacaaacgcnggtcaaaggttatncngagggnttgcggggaaaaagntcnnttatttggcgggccgggantccctgganncccgggggg

SEQ ID NO: 135313 - DNA, 503 bp, Arabidopsis thaliana columbia
  unsure (1)..(503): unsure at all n locations
ggctttcccaacttgctaaaagtttccctggaaaggccgttngagtacaattcggtggctctgctgctgctgctccagctgttgaagctgaggcacctgcagctgcagctgatgatgatgatgacatggatctctttggtgacgagaccgaagaagaaaagaaagctgcagangagagggaggctgctaagaaggacaccaagaagcctaaagagagtggaaagtcttctgtgctcatggatgttaagccatgggatgatgaaaccgacatgaagaaactggaagaggctgttccgtggtgttgagatgcctggtcttttcctggggagcctcaaaactttgtaccagtttggttatggggatcaagnaactcacaatttattgtcacgattggttggatgncctcgtgtccccgganaacctcatttgaaanntccncancncanagcctaacaaccggttaaancnnngtnnggncattgcccttcaanaaagtttngggc

SEQ ID NO: 135314 - DNA, 578 bp, Arabidopsis thaliana columbia
  unsure (1)..(578): unsure at all n locations
attcatcgactcagtcattatattctacaagagtacaaggtaaacataaaaaggatcctttgggctcttatagctcattcttgacctttgcatccccatttggtaacacactttgcgattgcgccaaccgtttcgcttcagcagcagaactagcacggatttctctatacatatcgacttcatcagggaaattctgttcaagctcctccagaatatgttttctcaaatccttaaaagcatcagtcttgcccttagtaacttgatttctagctatgcagctattaagaacatctttcgtaaactcatccgggttcttcccatcatcaatcaagttaagaacctccatggggatttgaatggtggatttctcagacaacttagtcatgtaaccagntccatcacaaagagagttaaggngctggnaggagtggagtgagacgccgggtgtgaaagaagtgccgggaaggggacctggtgaagggccccaaaggttcncaaaangggttatggcctngggaaagtcccctttgaanncaggaanggccaggtgagccnccatgggtggaccngggtgacct

SEQ ID NO: 135315 - DNA, 555 bp, Arabidopsis thaliana columbia
  unsure (1)..(555): unsure at all n locations
gattgtagccgcccgaagaaatatcttctcctctctcgtttaaccacgaatttgctctgatattagtgtttctctagccatggcgaacgcggcatctggaatggctgtgcatgatgattgcaagctgagatttctggaactgaaggctaaaaggacacaccgtttcatagtttacaagattgaggagaagcagaagcaagttgttgttgagaaagttggtcaaccgatccaaacttacgaggagtttgcagcatgtcttccagctgatgaatgccgttacgccatttacgattttgactttgtaactgctgagaattgccagaagagcaagatcttcttccatcgcgtggtgtccggatattgctaaaggtgagaaccaagatgatctacgcgagctccaagggcaggtccaanagggactagatggggtccaagtagacnacagggaacgntccaacagagatgntcncatgttccagngccgtnccacctnaaagtnaaccaagtntntcacacccctgaagccatcccnaccggaatttnggnggcnggntc

SEQ ID NO: 135316 - DNA, 550 bp, Arabidopsis thaliana columbia
  unsure (1)..(550): unsure at all n locations
cgtttaggccttctggtttaactaatggtcacgctacattctatggaggaagtgacgcttctggaacaatgggtggagcttgtggttacggagatctttactcggcggggtacgggacaatgacggcggcgttaagcacggctctgttcaacgacggagcttcttgcggagaatgctataggataacgtgtgatcacgcggcggactcacggtggtgcttgaaaggagcttctgtggttattacagccactaacttttgcccaccaaactttgctttgcctaacaacaacggtggttggtgcaatccgccgcttaaacatttcgacatggcacaanccgcttgggaaaagatcggaatttacagaggaggaatcgttcccgtcgttttccaaagagtaagctgtanaagaaaggngggagttagattcagnataaacggagagnctacttcnactagtggtatccaaatgttgagnccaggtcattaaactgatccaccaagggcaaacggtggaccagcncgaactggngcattgaancatccttcnaa

SEQ ID NO: 135317 - DNA, 558 bp, Arabidopsis thaliana columbia
  unsure (1)..(558): unsure at all n locations
aaaggcccgttacaagcccaaacgaaggtacataaaagaaaagcagaaaatgaaaacgaaatcgatagggataagtttttccaactgacggaaacacaaactacaccaggtgaaatagatcacctcccaagtgcatgagacacgaaccaaccacttatcatcagatcacaaaaagcttagaagcttccaccacgaagacgaagaaccaagtgaagagtcgactccttctggatgttgtaatctgcaagtgtgcgaccatcctcaagctgttttccagcgaagatgagtctctgttggtctggtgggatcccttccttgtcctgaatcttagccttgacattatcgatggtgtctgagctttcaacctccagagtaatgggctttccggtaaggggcttcacaaagatctggataccancacggggnacgaagcacaagatgaagtggcggtcccttttgntgtgaatctgcaagggggggncatcttcgactgntnggccggattcctgagccgggggtncngtnnnanggccccngngngccacttntcctnagnng

SEQ ID NO: 135318 - DNA, 554 bp, Arabidopsis thaliana columbia
  unsure (1)..(554): unsure at all n locations
tttccctctctctctcgcctgatcgatcttcaaagagtaagaaaaatgcaggaacaagcgactagctctttagctgcaactctttaccatcaagcagcgagaggtcatcaagctctgctccacatttggagatcaaagaaggaattgaaagcgatgaggagatacggcgagtgccggagtttggaggagaagctgtcggaaaagaaacttccggnagagaatctggatcggcgaccggtcaggagcggacacaggcgactgtcggagaaagtcaaaggaagcganggaggacaccggcggagaaagagaacaagcggctgaaaaagggttgttgaggaccagagtttcagctcagcaagcaagagagaggaaaaaggctttacttgagcgattttggaaacccgagtgaaaactttggggaccaaaaactctgnacctttagancgactctctactcttnanaacggacccantncttngncttttctnntnacccacngggacagaaaggtgtggtggtggntatgcngtcaanccttgncctttntcntgng

SEQ ID NO: 135319 - DNA, 570 bp, Arabidopsis thaliana columbia
  unsure (1)..(570): unsure at all n locations
tcaaaccacataaaacattacataatcaaactttattcccatagttctcttcttaatctatagtgcctcaaaaacttgaggnagttcattacaaacgcaccatggtttacttaaaatcanacatacataatgcaatacatgcatggtggtgattggttaatatattgttttagtgaccgggctgagtctgaacagcttctccggcatacgagcagcatcttgagcagccgttgtaacctctgtagcagcagccgtggcggcagtaacttcccccacttccccctcctccttgtcgcccaccgnctccttggtatcgtcctcctcctccttgggtaacgtcctcctcctccttgggaatcttcctcctccctccttggnaaattaactcctcctccttgggaaattaacctcctcctnccttgggaaattaaccccntncntccctngggaacctcccccggtaattggaaatttccncaattgncaacggnagcaaaggttgnataangggttcaaaggttccntnaaccnccnggaattaatgggggnanaaaatncnggggggatttt

SEQ ID NO: 135320 - DNA, 586 bp, Arabidopsis thaliana columbia
  unsure (1)..(586): unsure at all n locations
ttttgttacaattagaggaaaccaaacgcttctctattttattcattacagaaccgcacttaacatatgaaaatagggttcactgcaccagatcattacccactaatctcctcttaaagaccttgacaaaattacatgtaataataatcaatcactgcttgttgttcaagagagctgctcgtagctcagccgcgtcaatctcgttggaaccggtttcgggtctgtaataaccggttttgggatctggaacccaagaaatcttctgggttgattcttccactcccttcttcttcatcacaagccgnagcaacagctccacttcttccancggtcgaaacggtcccttgcggcggcgtgggcggataancacggcgggagatagcattgngnagtcacgngngacggaagccggttcgnttgaacggttgnggtttgacgngccattttcgaagnaaggggttccttgaaaagggggaaacagcttttatcctggagggtcttttcncgccgaaaaggggggatntccggggngtggggnattnnctnggggaagggggggaaatccttncccgggggcaatttttag

SEQ ID NO: 135321 - DNA, 588 bp, Arabidopsis thaliana columbia
  unsure (1)..(588): unsure at all n locations
cagaaggctctcttattccttttcaaaaacaataatattcaactcttgcaagttgcgaaacatgggagcctaagcgtgtaagaataacccactgaaactcatatattgcatgagatcactcaccttttaacctaatcctagacagacttatctgccttttaaaaaagacattttaaaacagaaacaaacactcttttattttgctccataacttgtgtattgcttccttcactattgcttgctcaagtttctgataacatatggaagtatgcctccatggttaaagtatgccaattccacctctgtgtcgaagcggactgtgcaagtgaaagattttccgttgtcggtaagtgaccggtaacatcttggccagggcctaanctctgagatatcggttggggagatggancgtgaanggtccgtgaccagtcaatcccaagaggacctgnggcttcaccgggcttaaagcncaatggggtggtncccattnccaccaaggttggtcnggggaccccccnaaaacccttggaannccggtttaancccgggaacatgggcccttggngccatcncgggggaccactccnt

SEQ ID NO: 135322 - DNA, 577 bp, Arabidopsis thaliana columbia
  unsure (1)..(577): unsure at all n locations
aaacgaaaatcaaatgcaggtttcattgtccaagtaaatataataaaataatgataccattaaaataataaactaagctagtcttcgtcatcagaattatcgaatgtgatcttcgtagctttaggagcatcagcagctatttctttgaaatgagctccatacaattttgattcctttttctttacatgagtgccaaacttcaaaagatcagctggcactacttgtcctgcttccctaagaacattcacaagttctcctgcaagacccttgttcagtggcgtgaagaaggtgtgtgcaacgccctttttacccgctcttcctgtcctcccgattctgtggtacataatccccctgttggttaaaggggaagtggaagtttaatcacaacttccacggccgggnaaaccaagnccccttgntggaacaccagtngccaccagtaacggggagggncctccttggacaatggaagngggcggggattcctgagcccgggggccacaagtctaganggncgcaccnggngggggccaanttttgcccctagnnggggaattcgggttgggaacangnnanc

SEQ ID NO: 135323 - DNA, 604 bp, Arabidopsis thaliana columbia
  unsure (1)..(604): unsure at all n locations
cttgtttgcgaacatagtacagacgatcacataatagaaacgccacgataaaaaaagacaggaaattgaaaagagtacagccattcgaacatctttatttaatattatctcatcgattatataatattcgaaacatccgctagtagcttcatttgaccgtcgctcatcacctcacggtgttgcagttggtgctggcgctgattttgtaaggaatattgactttgcatgcgctaggaagtccagctgcacgggcagtgttgagaccgggaccaacggctttagcggcagattgaaggcaacggcaaagcttgctgacggtctgggggttgtactggccatgtttttaaggttagtaacgccggttgcaanacccttggggaaagtggagcacctccgggncaagtaaggcaatgcaccctgccaaggntgccggttaccggtgccacaactcataagcgcggtccctgtgattgagccgggcancaatcattnaagccaaanccatnaattccaactttannnnncccgccaaattngnccctnggaaagggnttnnggccngaattcctgaaccccggggggccnnaaggttaanggccccctt

SEQ ID NO: 135324 - DNA, 585 bp, Arabidopsis thaliana columbia
  unsure (1)..(585): unsure at all n locations
tcgcccaatgaagggtatgcttactggtcccgtcaccattctcaactggtcctttgtcaggaacgaccagcccaggcacgaaacctgttaccagatcgctttggccatcaaggacgaagcgagngatcttgagaaaggtggaatcggtgtcattcagattgatgaggctgcacttagagaaggactaccactcaggaaatccgagcatgctttctacttggactgggccgtccactccttcagaatcaccaactgtggagtccaagacagcacccagatccacactcacatgtgctactcccacttcaatgacatcatacactccatcatcgacatggatgctgatgtcatcancattgagaactccaggtctgatgagaagcttctttccggtggttcccgtgaaggagtgnagtacggtgctggaatcgggccaaggaggntacgggatccaanctccaagaataccatcttctgngggaatcggaagcangggtacaaaatgnttgtggccttangnaaanancctttggggaaccngactgggggnaaanccgaaagtaccggggnaanctggcnaaaaat

SEQ ID NO: 135325 - DNA, 540 bp, Arabidopsis thaliana columbia
  unsure (1)..(540): unsure at all n locations
aancnttgatatcngattcgcggccgcttgaaatctccgattaagccatgaatgctcccgaacgatatgagcgattcgtcgtccctgaaggcaccaagaaggtttcttatgatagggatacgaagatcatcaatgctgcttccttcacggttgagagagaagaccatacgattggaaacattgtccgcatgcaacttcatcgcgacgagaatgtcttgtttgctggataccaacttcctcatcctcttaagtacaaaatcatagtggaggatttcacacaacaagccaagtctttcccaatggaaggcattacaacccagggcatcaaatgganttgggacaaagggggctcgacttaccttggaaggaaccanttttgaggcaanaaggtggggccnagtttttcggaancagtttttaanggactttgggngttccccaatcaggacaatcggggggnaaaggttttncanatggccttttggggaaagggcccaattnanngncnaaaaatggggcttggggaanttncccggggna

SEQ ID NO: 135326 - DNA, 525 bp, Arabidopsis thaliana columbia
  unsure (1)..(525): unsure at all n locations
tagctttttcatttcgaaatggccaccgttgaggttgaacaagtcactccagtagcagtagagaacgttgaggtaccaacaaagacagtggaggagacagtggtggagacagaggtgacccaacagccggaagaatccgtccccgccgtgacagaacaaaaatccgaagcaccaattgtagaaacaaacgaagaagtggttgtggaagaggcagagaagaaagatgaagaaaccgagaagaaaacagaggagaaagacgagaagacagaagtgatcacggaaactccggtagttgaggaggaggagnagaaagctgaggaagtgaccgnaactcccggcggtttgtgggaggaggagnaagaagaccagaggtggnttnaaggnngaaaccagnnttgaggtttncggcttcttnaaggaattcnccgtttnaaaaaagcccgaggggtttaantgggagggagagnctttttttgncnttttttgggccccaaaaccgnttccggttntttanttttttnccaa

SEQ ID NO: 135327 - DNA, 655 bp, Arabidopsis thaliana columbia
  unsure (1)..(655): unsure at all n locations
ggaaatatacataaaaaattctaagtattagaaaaattaaatagtgattacataatgaaaaaaaaaattactttcttagcacagtatcataaattgattttaattatttatctattaaaataaaacttaaacgtttcaatctaactttgatttattctatcgggctcacgaataagcgaanttgtatttcttcaagtgataatcctttcgtttccggaacgagcaaccaaataaaaagcaatgcnagtcctccgactgctccaaatacgtaaaatgttccttgagtgctccactcgagcaggaagttgnaagcataagtgncggtcggactacttgaccatggtactaacggnactatacttcctgggggtacttttanattcattgggnatatccccaggccataattaccccanggagggctccccaagccatnagnctaaggtcccatattcagngnaccggttttacgggnaaccgggggtagcccgggagcattggatttcnggaatggnaggggggcccggnttcgggggggggggaattggtgttngggccaaagncccagggggtanaacccagcttctgtcgggnctttggnaccagccggagggccaaanggggggggaancttttggggggttcgggggcccnc

SEQ ID NO: 135328 - DNA, 204 bp, Arabidopsis thaliana columbia
  unsure (1)..(204): unsure at all n locations
gaaaataagtctctggagtttagattgngaaactaaatgtcaacaaaccggnaacaaaaaaaaactgtgtcaagtaacaanaacaaaagaaaagactcaaagagagtagcagcaacgtaaggtttgattccaaagtgtctcacaagggaggnntgngtaatgctactccctgttttattcactcatcacnagtccatcaatcna

SEQ ID NO: 135329 - DNA, 454 bp, Arabidopsis thaliana columbia
  unsure (1)..(454): unsure at all n locations
aaacgaaggagaattacattgacctattgaacaaactgaaatgtacaagagaagaaagataagcgttcattgacgtatacaagcacacaagtcctacagaaacatgagtagtactcaaatcagaaaccaagaactaaccattcaacacaaaatcttcttcttatcatttaaaacggccagatgtcagatccaccgggtttctccacaagaatccgattatactccggcctcgacgtcagatctttgaaaataacgtaggtaataagcatgaagagcacaaacaggntctcaaactcagctaatcgggaaggaattagnacccctngngtncaacaaacccggagtccngaangagagttcggtctcnncctccaataccggncctcggatttaggttccaggcacggtcggcccggnttntncggcggggaaaattncncccnncnggggtttt

SEQ ID NO: 135330 - DNA, 609 bp, Arabidopsis thaliana columbia
  unsure (1)..(609): unsure at all n locations
acactaagcatagcaattatatcaaaggagttttgatggaaatttttattcaatcttatagaattgcttattttatttttaaacataaaaaagaagactgcaattttttattactgtctgtatcgtgttatataattttcgtttttttatcgtcggataaaatataaagataaagaaagtttttttattcttcgtctacgaatatccaaatttttattcctaaaaccccataaatagttcgaactgtataggaacaataatcaattttagcttcaattgtttgtaaaggnactctgccttctctggtcccattcaacacgtggaatttccttttccggtcggatacgtcctggcaatttggaccttggaattcccttttggaatncggcctggtccaggtaattccaaaagnctttttncaatggggttccgnaaaggaacgggggttttnaaatggcccagcgggaaaanccggcaggaaattnggggcccccaacnggggtgggaaanccggggaaagccaagggggggtncccattggcccaattaggccctttgnnaacccccggggggnngggganncngnccngggggggcccannttangtc

SEQ ID NO: 135331 - DNA, 593 bp, Arabidopsis thaliana columbia
  unsure (1)..(593): unsure at all n locations
caatatgtttttggacataaaattaacttattgaattgagagggtacatcaaatcaaatatatgactcacattggctgtaccttattaccaccgaaataaaaacatgaaaacaacgaatcaaacatattacacagcacagcacagccggagaatcatgacgctcacagagctaaaactcaatcgatcgaccaaaccgntaaataaaataccgaccactatgatagttgttggttcaaaaacacaagaaagagaccatgaatgaaaccctctttctccaaaaacaacccaattctgtggattttttttacttgcggtggagactccggcagcttaccgggtttcanccttcccaaagcacgggatcccaagcattggagatcggcggtacaatttccttggattttttcccaccaggtggnntcctccccttctggtgggggccttcggacttcttgggggccctaaacggggtggaaagntctccctaaggggntgggttgnnnagngnggnggggaacctttttggccggccnattccaggggggncttnaaccgcctgggtngngaagggtntnnnaangggaanggtccg

SEQ ID NO: 135332 - DNA, 564 bp, Arabidopsis thaliana columbia
  unsure (1)..(564): unsure at all n locations
tgatctcgttgcactctctggtggtcacacatttggtaaaaaccagtgccaatttattatggatagactatacaactttagcaacactggtttacccgaccctactcttaatactacatacctccagacacttcgtggacaatgtccccgcaatggtaaccagaccgtcttagttgatttcgatctacgcacaccgacggtttttgacaataaatactatgtgaatctgaaagagctaaagggacttatccagacggatcaagagttgttttccagccctaatgccactgacacaatccccttggtgagagaatacgctgatggcactcaaaaattcttcaatgccttttggtggaagcaatggatagaatggggaacattacancctctcaactggggaccncaagggcnaatcngnccggattgtagggggggaaaccccaactcggnggnnacangnatgggggcgaaaccggtggctttgcnagcccnttgaannaaaaggtggcngngggcggggnattnttgaaccccgggggggccccntaggnttnaaggggnccc

SEQ ID NO: 135333 - DNA, 575 bp, Arabidopsis thaliana columbia
  unsure (1)..(575): unsure at all n locations
tgaaattcaaagaacgttgtttgcgaacatagtacagacgatcacataatagaaacgccacgataaaaaaagacaggaaattgaaaagagtacagccattcgaacatctttatttaatattatctcatcgattatataatattcgaaacatccgctagtagcttcatttgaccgtcgctcatcacctcacggtgttgcagttggtgctggcgctgattttgtaaggaatattgactttgcatgcgctaggaagtccagctgcacgggcagtgttgagaccgggaccaacggctttagcggcagatttgaaggcaacgggcaagcttgcttgacggtctgggggttgtacctgggccatgttttttaaggttagtaacgcccgttgncagcancccttnggggaaagtnggagcaccnccggggnnaagtnggcaatgcacccctgccaggttcccgttangggggcccaaacccanaagcgggtcccctgnnattgggccggccaaatntttgganccaaaccanganncnantttttgggggggnatttcgnggaangggtttttttccnaaaa

SEQ ID NO: 135334 - DNA, 615 bp, Arabidopsis thaliana columbia
  unsure (1)..(615): unsure at all n locations
aacactcacgatggcgagaattaaggttcatgagcttagagataaatcaaagaccgatcttcagaatcagttgaaggaattcaaggctgaactcgctctcctccgtgtcgctaaagtcaccggaggcgctcccaacaagctctccaaaatcaaggttgtgaggaaatccattgctcaggtgttgacagtgatctcccagaagcagaaatctgctttaagagaggcatacaagaacaagaagctcttgcctcttgatctccgtcccaagaaaacacgagctatccgtagacgtcttcaccaagcatcanggttcgtttgaagacagagcgtgagaaggagnagggggtgtatttccccagttgagggagtacgctatccaaaagtggaagtttccattttccccagtcttaggttcttagnaattgatggttccagcctttggattatcggnttatggaanccccccccttttttggccaaccttatnaattttanggtgnncngaagttttggtnttcaaaaaccntttggggnngggattcttggacccnggggggcccaagttttaagggggcncnccngggggggnccantttntcccctagnnggggaatt

SEQ ID NO: 135335 - DNA, 557 bp, Arabidopsis thaliana columbia
  unsure (1)..(557): unsure at all n locations
aacaaagttgcttactacaaaatatcaaaaagcagattgattcatagctaaaacggtgcgacttcagatttactcttcgtcatcaccgtctgcatcaccgccacctgaggctttcttggaggcagacttctcgttccttctcttcactcttcctggacggccaccaccgaagggactggtgagggcaaagtcaatgtgcttctgtgaatcaagtctcaccatgaatgatggaatgttcaccaattgctttccaaccctgatatgcctctgcctgatgaggacacgagagtgatggatagacttagccataccagacttgaacacaatagtctgaagacgacgctcaagaaagttctcaaacagtcaaagcccaaganngtaatcgagctttgttctgggtctcaatcaaagaagncccgtaacgggtcatcctangggggnaaacccncaccttnaaaaganccttcttngngncctttnnaccaaaggggcnaaaagtttcttgggnggntttggggtcggggnaanngggntgggacccnccaagggcncgggtt

SEQ ID NO: 135336 - DNA, 629 bp, Arabidopsis thaliana columbia
  unsure (1)..(629): unsure at all n locations
tgcatgtatacggaagggttgggtggctcgtcaatttgcaaaactggtcatattcaccggattcatgggatttataatagaacaatatataaatcctattgtcaggaactcaaagcatcctttgaaaggcgatcttctatatgctattgaaagagtgttgaagctttcagttccaaatttatatgtgtggctctgcatgttctactgcttcttccacctttggttaaacatattggcagagcttctctgcttcggggatcgtgaattctacaaagattggtggaatgcaaaaagtgtgggagattactgggagaatgtggaatatgcctgtccataaatgggatgggtccgacatatataccttccccgtgcttgcgcacaaggattacccaaagacaccccggccattaaccattggctttcccaagccccctggaggcctttccatgggccanggacccggngtnccctggcnggcccttcaaagcaaagggggnttncctggggntaaagntccangggcccttggggcccanccaaaannttcccccgggaaagggttgcccaccggggggngaaaaanncccgggggcaccncggaattttgggaacccggggggggccttttt

SEQ ID NO: 135337 - DNA, 610 bp, Arabidopsis thaliana columbia
  unsure (1)..(610): unsure at all n locations
tatttcagatcctttgaaagagatgatgataggcgaaagtggattcagaaacgcattgtacatgatcgatatcggacagaatgatattgcggattcattctccaaaggcctttcttactcccgggtcgtcaagcttattccaaacgttatttccgagatcaaaagtgccataaagatattgtatgatgaaggagggaggaaattttgggttcacaacacaggaccattaggttgtctgcctcagaaactttcaatggttcatagcaaaggttttgataagcatggttgtctagcaacttataacgcagctgcaaaactgtttaacgaagggcctgggtcatatgtgtccggggacctgangaccgggactggaaagaggccaacattggccnatgccgncatttatgccancaaggaccgtctccatcgggaaccccccacnattttggnctttggggaacccttaatnggcatgttccgggaaccgnggggccccctttaaacnacaatgggancaancgggngggatggggggcccaaaantttcnncaagggcccnggtttaaccggggggggnncccccccccggggntgnaaccnnnttntccgt

SEQ ID NO: 135338 - DNA, 504 bp, Arabidopsis thaliana columbia
  unsure (1)..(504): unsure at all n locations
gtacaattcccttttaggagaacagaacaaagagcataaagatgtggtagttaaggaagatgacgaaaacaaactttcaaaagaagaggataaagaggttggaagtaacgaaactaaaacctatgtcaaccatgaaaataccgtggaggaccacaaagaagatgatgttacccttaatgatgagaaggcccgcaaatcagaatcagtcttcaccctatcaaaaactactaccacgctggtgacaacgtaaagatgcttgcttgaagtcatacataattgatggtaattctggtacgtgccacatctctggaaacgttgatgtttctttttatggtatatatatnaattggncatagttttgcaggaaaagtggttctnggggtttgaccttggttggggncttnagganagaggngtnnggtaaaggttggttttgaaatttgaanngnctgattttnggggggtncatttggttnaacccaccanntagcnngggtccttnga

SEQ ID NO: 135339 - DNA, 555 bp, Arabidopsis thaliana columbia
  unsure (1)..(555): unsure at all n locations
ttagctcttcccaagaggttcagaaggcgatcaattccttgaatggagcagatttggatggaagacaaataagagtctcagaggctgaggctaggccaccaagaggccaattttgagcggtcacacctctttcatattctcaaaaaatgcaaattctggagggttctttgaagcatatagggttagtggaaaatggcggtttcagacagtaactaaaactcactgctggtgcacgctaggctttatccgccttttgatgcatgaaggtcgttaaggaatggtcttttttttgagaaagattacaatttagatttaaagccagngnacccatggttccttggcctggttccgaaccctgccgaaaattnggttgnaagtttgaagttgcatttnccnccctgggccttttttgggtgggaatttttgacaccaattgggnctttttgggaaaatnnaangggggccgggaatcccngaancccgggggggcccanannttcnaaggggggcccccccggggggggncccccnntttncccccctaaggggggggna

SEQ ID NO: 135340 - DNA, 539 bp, Arabidopsis thaliana columbia
  unsure (1)..(539): unsure at all n locations
cagaccaaggctattgccgatcgggtgacaaactggtcaaatgttgtcatagcctatgaaccagtgtgggccattggaaccggaaaggtcgctagcccagcccaagctcaagaagtacacgatgagctgaggaaatggctggccaagaacgtgagtgctgatgtcgctgctacaacccgcatcatttatggaggatccgtcaatggtggtaactgcaaggagctaggtggacaggccgatgttgatggtttcttggtcggtggtgcttctctaaagcctgagtttatccgacatcattaaggccgcagaggtgaagaaaagtgcctaattgagctcatttaagcaattttnaaagncctttggcttttnccaagtccgcaactcctggaaaaaattgaataaagttggggntnatgnaantgaaaaattttgccccagttggaattttgggaaannttccccccnaacaaaantgnttttngaacncaaaanantttttngggngggaatttcttaaacccgggggggcccnaattnnt

SEQ ID NO: 135341 - DNA, 526 bp, Arabidopsis thaliana columbia
  unsure (1)..(526): unsure at all n locations
tctctaaacccattaaagtaatttagctcctcatagattctcgagaagaacacttccatggcgactaaagtatatatcgtgtactactctatgtatggtcatgttgagaaattggctgaagaaataaggaaaggagctgcttctgttgaaggtgttgaagctaaactatggcaggtaccagagacgcttcacgaagaggcactctctaagatgagcgcaccaccaaagagtgaatccccaatcataacccccgaatgagctagctgaagctgatgggtttgtctttgggttcccaacaagatttggtatgatggctgctccagttcaaagccttttttggnatggcaaccgggtggactcctgggagggntcaggnaactccgccgggtaaancagctgggatctttttaaagnaatngggcccccaagggggggggcnaaaaaaccccnnatttttgggggaaaaaccccgggggnncccnggggggtttttttccccanngggggnnaatttggngggnngttt

SEQ ID NO: 135342 - DNA, 596 bp, Arabidopsis thaliana columbia
  unsure (1)..(596): unsure at all n locations
agaagaaatcacatctttatacacgtgatacagagatgtacatatatctagctctaactttagaaagagaaatcattttggttttcggatgattaaataaataaatcttacaacaatgatatacatatatacatagatatatacatttttcttaaaagtaaaattatcatttgggagaatatccactaaattccattacctacatcgatcttaatctgctcaacccgtattgttccagaacaaagtagatttctttgagaataggtgtcaacaatgagctcaaggtatcaatgtcttctccttaaggtatcatagctctcgtctcttgcaccgatcgcttccatggaacgtcttgttgtcaggcaccagcttcaaacaccacttttgaaagcagncagnngcggtcccatccatgntgcggggttttaaaggcggccatggagnatcctnctacaaagtnctccaattttcggnngnnaccnctttcgggnaacaaccggnggnaaccccggggggaaacccatngcccngggggncnaaaaaaagggcccnccccaacttggaccaccttgggggccccccccccttncttntca

SEQ ID NO: 135343 - DNA, 537 bp, Arabidopsis thaliana columbia
  unsure (1)..(537): unsure at all n locations
tataagtgcgacaatggtcggagctttgctgggtctcggtacccagatgtactccaacgccctccgcaagctcccttatatgcgtcatccgtgggagcatgtggtgggtatgggacttggtgctgtgtttgcgaaccagctcgtgaaatgggatgtgaagcttaaggaagatcttgatgtgatgctcgctaaggcnagagctgctaatgagcgccgttactttgatgaagatcgggattaattttgcgtgatctttgaagtcttcagaaaagaaatatcttccccgtgaactcatctcaaagtgcttgttttgnctgaactttcccggaanaagcggttcttccccctccccttttgnnntcaagccctgggagttcctttcaatncaccggtttccgaaaatggancccaaanatttggggtttcaaaacccgaaaccggttnnanccgggnaaaagggggccggaaatccgggggggggancncgggggnnaaggggccangggggaaaagggggnttgggggnttggggaaatg

SEQ ID NO: 135344 - DNA, 571 bp, Arabidopsis thaliana columbia
  unsure (1)..(571): unsure at all n locations
aaaacctttatttattataaatctgattataacgtatacataaaaacatattatgaaatataacaacataatcacttctcttagtacgaaaacaacatttgccttatcaagttggtgaactcgccggnaaaaaatccaaaacaacttatagaaatacacataaaattgatttcntattgtgctggaggaggaggagtaaaaggnggaggaggaggaggagtctcaactaaaacatctagcttcatgccttgaacgcaaccacctcttccatcaagtagataataacgtctagtctcatagagagggacaatatctctcccagctccacgtgtataattacgtattgggcgggttggagatacatttttcnataatcagccttggttacccncaagatggtgtggtgggccccataggacnccaaatnaagccaggcncggcggagaaaatggttgccctgggnccntnggggntaggtnantggnggggggccagacnttttgggncgggcaaaantttctngggggaccnctgggatcgggcgccccttgaaanccgtcancggggggga

SEQ ID NO: 135345 - DNA, 551 bp, Arabidopsis thaliana columbia
  unsure (1)..(551): unsure at all n locations
caggaatgaaaaaaaggaattcgaaaaaaagaagcgttcgatgggtttggcaccaaagtaagattttgcaaaatacaaagaatcacaacaaagagaaatctctcccaaaataggtaaataaccaaacgcaaaccggtttgaataatctcttttctcttttcctttctttcatcaggcagtaacttggccgaacaacgacttacggatcactgggagtttcatacggaatgccacatcaagacgcgcatcaagtgtgttctcgcacacgattttcccatcacgggaagctaacacaacacctccagagcagtggagaccatgagggtcatttagattttagggagggaggggggnagggatatttttttggggtcaacaggnaacctcttgggggnatgnacctttggctttanccagnatattcccccctttggggcaancaagganagttccacctaancccagccctttttaagggaanngnanaanccgagggtttttaacgggggaancctggnnatttggcccttnggnnggtttttnggaanccc

SEQ ID NO: 135346 - DNA, 580 bp, Arabidopsis thaliana columbia
  unsure (1)..(580): unsure at all n locations
tgtggatattgatgtgtcctgactctaagactagattatggtttgttaggaaccaaaatatttgtttaaagaaaagtatagttagttgatattgaaaaagaagagcataggcttttaattctataagagagtgtactttataatgaagggaggcactaaccttccttcccttgatatatatctgcaatgagctttgtctggtagtgcttcaattgagtgaaaacaatggtgctagggttgccatgtggtgaaacttactccttctcttccaattatatgaggcttcccaataaggctcccgggcttttnccnaaatccaggagagtaaattgggtgaagtgggattgggancaccattaagggacggaacctaggaagaagtnagtgaaccnttttggggcccggggcaaataagccaatttttganaccctggggtttggttnccccccttccnggttncgngaacccatggnggcccccgngnaaccctggnggcccncnaaagggggggaaaaggnggcccggaatccnggaaccccgggggggcccccaggnctaancgggccccncccnggggng

SEQ ID NO: 135347 - DNA, 533 bp, Arabidopsis thaliana columbia
  unsure (1)..(533): unsure at all n locations
cagtgaatgagaaggagagagggcatcgagaacatgagagagatagaggcaaagataggaaaagggatagagagagggaagagaggaaggataaagaaagagaaagggagaaggatagagagaggagagaacgggaacgggaagagcgggagaaggagagagttaaagaaagagaaaggcgggaacgggaagatngagagagggataggagagagcgtgagaaagaaaggggtagtaggaagaaacgagttaagagtagtgattcttgaagatgattacgattagagattgattgattgaagagagggagaagcgttaagggngaaggagaggggaccggagacngagggattagganngggttnagaagnaccgagggagaagaagnagaggaccattgggtncntgttttnnagttccatttgctccttcctttccccggacttccacntcnccctttttntcccgacccccccttccnctttccaggtttccnaanccccccccgancgttttnnttacaggcgaccttt

SEQ ID NO: 135348 - DNA, 518 bp, Arabidopsis thaliana columbia
  unsure (1)..(518): unsure at all n locations
cgcttgagaaatgatcatgacattttccaaacatttgaaggagacaacactgtacttctgcaacaggtggctgctgatttattgaagcgttataaagaaaagttccaaggcgggacattgacagttacatggagctacttgagagaatcaatgaacacttatttgtctcagccaaatcccgttacagcgcgttgggaaggtgaagatcatctaagagatcctaaattccaactagatgctttccggtatcgaacatcgcgattgctaacaaatgtgggcagcgagattgcagaagcattcaaagacncttgggggtttcggggcatggaacagatgcttgaaaccaccttttaacgcttgcagaatcccncatggnacaggcattctggcaagttcaccggagccggttnaaaactgnccgggncccaggngaaagtgncctgaaacagcngngnncttnnncatgggccgactcggaaaaattgncgnccncaacgggggtnttggggccccanaaa

SEQ ID NO: 135349 - DNA, 523 bp, Arabidopsis thaliana columbia
  unsure (1)..(523): unsure at all n locations
aggcaagtacagccgaacacggataaataaactacgaacaaacgcatgcccaagaagagcccaataatgcatcgtttatagaagaagattggatcaagaaagatcaccaaaagacacgtgtaaggtgagcaaaagaaagattcccatcgtcatctttcgccatcggagatacggtttttcagtgagaaaccacgtcgtaacgaaatcgttggtagatcatctgtttttcaccagtaatagcaaaacaacaccatgaagatacacaaaaataattagactcaataagagaataaaatccaatgcacggcttgtcacttttaatagtagcttatggacttagatgtaatggttaacgttaaatggttattccagtcctaaaaaagggtaaaactctggcctggggcattcacgggctccaaaggttcacggcttctgggccgggggnntatggnncccnggggcggatttggctccccttgtggccggccctnccgggnatccaacgggtcggccccggnnaggc

SEQ ID NO: 135350 - DNA, 376 bp, Arabidopsis thaliana columbia
  unsure (1)..(376): unsure at all n locations
gcaaaattagacatgtaaaacagagcaaaggtgaggtttaccaaaaaaacaaaaaacagagcaaagtctctgtcatgtcccaaaaaagaaagaaaggctttgatgtcgttaagcggctgaagagccatgagattgagattgatcttttttcaaacgagcaactcttaccaagttgctcaagaaccatggagagggttcctgtaattatnccatccgacaaaaaggnatcttgggnaaagaaaatgccctttactggttgacccaaaatccggccgnatagggccatggncnccgnatatctccccaangttaatgncggttattgggccaacngntcccaattttttgggaagggntcccagggcgggaaccggnt

SEQ ID NO: 135351 - DNA, 544 bp, Arabidopsis thaliana columbia
  unsure (1)..(544): unsure at all n locations
catttcattccataaacagagcagaggatctgcaacgactaagttctgaggattcatcaatgtcatccacacatacacacatcaactaacattatgacgtttaaggatcttctgtatcctccatcttgagatcttctagtttctacaatgctgcaacacataggaaaatgccctaatcgagatcaaggaactccattcttttccgcattgtgccctttaaaagcatttcttccttctctgctttctgagccctttttatctctgcttctggaacctgaaccatatgagctggaagtcttctttttccacgtccaattcancaatcaagacaacattttctccacggntaatgtatagacctaagggnatatcacagtagggatcacccacaatgnctcctttcataagnttcttctaaaacagnattagcaaatgntcaaagggncgnaggagnccatcagttcctaccatacgnggaancaagaggtcttggccngggagcgcagggagngggagagnntctcgggngccaggatggntctgc

SEQ ID NO: 135352 - DNA, 579 bp, Arabidopsis thaliana columbia
  unsure (1)..(579): unsure at all n locations
cgtttaaagtggttttgatcggagactccggtgtcggcaagtctaatctcctctctagattcactcgcaacgagttctgcttagaatccaaatccaccattggtgtcgaattcgctactcgtactctccaagtggaaggaaggactgtgaaagctcagatatgggacacggctgggcaagaacgatacagagccataactagcgcctattacagaggtgcacttggagctcttttggtctatgatgtcaccaagccaacaacgtttgagaatgtaagcaggtggttaaaagaactaagagaccatgcagattccaataatagtggtcatggttgatttggggacaagaccagatcttgaagcatctcagagcagtttgccacaganggtgccccgagctttgccgngnaagaaggctttcctttcaaccggaaatcgggncnccngggtttaacggngnaaanggtttnaaaggtntccccgggggtttttngggcccccncaaagccgattttntggccannaanggaatcccannccgggngggcacattttngggggaccnttgaacaacccaatc

SEQ ID NO: 135353 - DNA, 341 bp, Arabidopsis thaliana columbia
  unsure (1)..(341): unsure at all n locations
cgcggtttctttgctttctgcaactctttcttttcattggttctgtagatttaaactcacacattccgtgttttaggacaacaaacttctcagacaaaaggggcacacatgttctagtgttctgtttatggtttagtagtttattgaagattggatctaattaccaaaagggttttaanctttctccctccttttgncttcagtggaatcggggaacctnaggtttgtaaaaaggtttaaacttnattncccttttaagatccgnaggtttgattgcngtaagtggaaggnnccagattaatttagggggttnccttgnanccttaaattaaaccgggnga

SEQ ID NO: 135354 - DNA, 529 bp, Arabidopsis thaliana columbia
  unsure (1)..(529): unsure at all n locations
aaaaagagtcatggactcattaagcttttataaacccagtatacatagaccaaaaaaaaaaacaatcgtacattactacattatctcgcaatctcattcagaccggaaccataactcttggtccaggacaattgacatagcatagactcagtttctccttctattagtgctgtatcgatgcttacgagactccccttcttcttcttcggaagacaactcatgcttcttctttctacttctacggtttgattccgaatcagattcagttttctttgtgcttctgtatctgtcagaaaactcttcaggatcatcagatgcttcatacacatgcttttctttggccttcacactcctgtgatgcttctcagaatcacgntcatcatatctcgggttccttcccggntcaattacggtttcaggcnccaaangngcggancggggctcnccaacaaaccaaggccttccgancctgnaccttccagancgaaaggggtnggcttcccgaaaggngacaagatggtccccgggt

SEQ ID NO: 135355 - DNA, 520 bp, Arabidopsis thaliana columbia
  unsure (1)..(520): unsure at all n locations
accttcgcgtttntntttttagcncnctnatggaccnggcctgnactncctgggctncccacacagtccgctcgangtcacganccttcaaatgacagcaacagaatgcntgcaagcanacgatctttaccaagaatttcttcacaagagtgagaagaagaaacccgtagtttacgctacgaaaacagaacaactaaagaagccgagtggagggaagagggttagtttcgggagaagccaatcgcacaaagcgtttgaggcggttaagccgctggagagtaccaatggtgagaaaaacatgaagaggtatgtgtcggagaagcatatgagggtttgtgactccgacaagaaagtagtggtggagagttaagaaacccagaaagatggaatgagcaacgagcaatttagggccaaaagattgaagctttcatccgctagacaaaagngnatttcaaaaggatgaaggaacactttgataatccnagctagatccccctttgcctagtgaatggtttttttt

SEQ ID NO: 135356 - DNA, 487 bp, Arabidopsis thaliana columbia
  unsure (1)..(487): unsure at all n locations
ctgaaccccaagggacggatttggacaatggtagctggtggaggagcaagtgtcatctatgcggatacggttggagatctcgggtatgcatctgaacttggcaactatgctgaatacagtggagcacccaaagaagatgaggttttgcagtacgccagagtcgttattgattgtgctacagcaaacccggatggaaaaagcagagncccttgtcatcggagggcggnatttgccaacntcactgacggttgctggctaatttccattggcataatcccgcggtncttaaagaaaaggaaccaaanctngaaaccagccaaggatgcatatattttttgaaggaaaagggggncccaanctacccaaaangggantttccaaaaattggganccccttggaaattnaatcccggggtnccccatccagggcttttgggccccaaaggaaccctttnnngggttntcccaaggggggatcccggtnant

SEQ ID NO: 135357 - DNA, 659 bp, Arabidopsis thaliana columbia
  unsure (1)..(659): unsure at all n locations
ggaccgggcctgnaatncctgggctncccacngngncngtgantctttatagatctttgttggtgatgagangggaacangtgcagacatggcaagacatgtaatgtgtccatcacaaaacaaaagagtaagcatcacattctttcgtattcgacctgacacatatcataaccattcacaacccaacagtcctcgcaacgacggtgtcatgacaatgtggcaaccctaccaaatgacaccaactccattcctcaatggttatgatcattcaattgacatgatgccaaaacttggagtcctacgtcctccaatggtcatgatggcaccaccaccggttcaaccaatgatatnaccaagtcccaatgtgatgggaaccggtggtggtaccggtgttttcttaccatgggnctctgttaataagctcaagaaaacatgtgaagcatttgcctccaacgcgcggcgaagaaggcggttaccntccgggttcctccctgntggttcttccttctccaagctgggagggtccacntctgagcctgtgatccctggagggtaacccaatcgnnttttttagnaaaagnaaaaaacttggattggcttttcaaganggcngttcncccggccggnccttttnggcctnaaancggttgggaaccagg

SEQ ID NO: 135358 - DNA, 444 bp, Arabidopsis thaliana columbia
  unsure (1)..(444): unsure at all n locations
atgaaccaaaggcgtgtgctgctgtcaaaggaacacagataatggtggagaatttgttctacaatatgattgctagaaggaagacacttcaaaattctgctgatgattacgggaaaatcgtggatttgctgagccggatggctattcattacaataatgtcagcttttcttgtcgaaaggttggtatacttattaactaaactagtcgtatttagcaatcttttgtgttttggaattgtgaagtgaattttggatgatactgtctcgccagcatggagctgttaaggctgatgttcactcagtccgtgtcaccntcaaggcttgattcaattaggncnggaaaanggngtaccagttgccaagaacttggnngaaagnannagttnccccccgggaanccccccggggggaccttttnaaaaggggggggtncaanccccntnc

SEQ ID NO: 135359 - DNA, 534 bp, Arabidopsis thaliana columbia
  unsure (1)..(534): unsure at all n locations
gtcctcggtaacccaagannctctttangganggttgagaacttcctgtgagagagcgaagaggactctttcttccacngctcagaccaccatcgagattgactctctatacgagggtatcgacttctacnccaccatcacccgtgctagatttgaggagctcaacatggatctcttcaggaagtgtatggagccagttgagaagtgtcttcgtgatgctaagatggacaagagcactgttcatgatgttgtccttgttggtggttctacccgtatccctaaggttcagcaatttgctccaggacttctttcaacggcaaagaagctttgcaaagtctattaaccctgatgaggctgttgctacggtgctgctgtccagggagctattctcagcggtgaaaggnaacgagaanggtcaagatcttcnattggcccgatggnaaaccnctntcccttggnttgnaanagccggtggngcatgacactttgatccaaggnaanaancatcccaccaagaagnnaagctttcccacc

SEQ ID NO: 135360 - DNA, 601 bp, Arabidopsis thaliana columbia
  unsure (1)..(601): unsure at all n locations
gctgatccacgtcacggacgttacctcacagcctctgctattttcagaggacagatgagcacaaaagaagtcgacccacgcgtccgatcggatctgtaaccgagagtatcgaggcagttaagatgtcgaagaaagcaggttggggagtgatgaccagccacagaagtggtgtaaccgaggacacattcattgctgacttagccgttggcttgtccacnnggacaaatcaaaaccggtgctccttgcagatccgagcgtcttgccaagtacaaccagcttttgcgtatttgaggaggagttgggatcagaggcaatttacgctggagtcaacttccggaaacctgtgggacccctactaaatggggctttttagaagccaagtgggcctcctttgtgaccgaggagaanatgacctgagtttgacatttgnctttaattaaanaaaacgtccggttttggtccccccntggttgggtnctaacgccttttnggaaccccttttgggaaaagntccccttttttaangggaaccntnaaanccccccccttttnnnggggngncccctttttaaancaattngggttnccnaaaaaaaaaaaa

SEQ ID NO: 135361 - DNA, 375 bp, Arabidopsis thaliana columbia
  unsure (1)..(375): unsure at all n locations
ccctnttggggggcccccngaaattccccncccccgattttggaaaccctntcggggcccgatttnntatgaaaccngcttacattggnggctaaaaggtgggatgaangaaagggaaacccgggtttggcaagattgcttttgggaaagtgggtttaaagtgtaacngtgcagtttgggtggcnctaaacaatgtcaaagcntcggttagtagtccgtgggaacnctgcatcgaccnatatccggttaagctcgacttctgatttaatgaaaaaccatttgtttggttagtcctagtcttactagactctgccttgtttatttttcttcttttctggttaagctcttgtactcttaatgtgacgcttnttgatt

SEQ ID NO: 135362 - DNA, 502 bp, Arabidopsis thaliana columbia
  unsure (1)..(502): unsure at all n locations
ccattttaggggnnaatttgggncccggggtcncccatggcccngctttggaggaacccccgngaacttgggaaacntggtcctggggggttnctaggcccnnccgctttagacccntggggngcccattgctcaaggggccccttncgaaatccgcagctacttgnganggaactatcaaagttcttgcccttggaatagagatgtgngggtncagattcaaaatgaatggctgatggagagagatacaagcaatgattcagaagtattgtcaagcttcttctcaacattgcatggatgatactgacaagctaaagcacactctcgcattttagctgatagctcgtttttgtgagcttgaaagtaattttagacattgtngttcatatctgattttgttatatacttccatagatatgaatcaaaatgtgcagtttgttactaaatttgtttatcactatggacatggctggttaaatcaaaatgaaccataataagtaag

SEQ ID NO: 135363 - DNA, 512 bp, Arabidopsis thaliana columbia
  unsure (1)..(512): unsure at all n locations
ttaaaaaaagacccccccttgctttacccagttgntccgggnaacncctttttccaacctttgaaantgccnnggggggnangttggccttanaaccnttntgcctgtaacttccaattcatgcctcatngcctgggaantaaccccaatccagtgctgcttctgctgagaactgtgggnccangtnatgaaggaaaagacncccgactgctgaatctgttccngttcagggtttggagactgagcagacggaacaagtagctgcnataacagagcaagtggaagatccagttttgaggcaacagcttgagcntcagaagcttcagcttgagctagatatgagttctctctcgcaaacatgattggttccttcaatctcagttctttcgtttgaagtgtctttgtgtttcagtttgtttgattttatgcatttacatgtgttgaattgtctctgttcttgtgttccctaatgtgcttctgatttgaataaatatatcctatctatttggttt

SEQ ID NO: 135364 - DNA, 439 bp, Arabidopsis thaliana columbia
  unsure (1)..(439): unsure at all n locations
tnccnattggggnatggctccatgcccctggcctggaaccccntncagatcttggngggggaanctaagtgaatggtccncagcngtatgccacttgggncnctggagcttgggangcaaatngnagaagggaaaagctgatttggagtatcttgagaagaaagctaaagagtttggaganccaaaggtttcttctgctaaacaggnactcgctgagatgatctnccaatctgcaatgtaagaagaagaacaagaaggctttttatgtttattaaaagtatcgtcttctttagtttccctcgcatctttgagaagtttgaaaaccaaaacattggaaaataagatgattagagaggttggtttcattatttcagttgatgtactatggtttcacactctaattactttaaattgaataacaaaagactgtttaggcctt

SEQ ID NO: 135365 - DNA, 409 bp, Arabidopsis thaliana columbia
  unsure (1)..(409): unsure at all n locations
atngttccaaanatccccgggncgggtttncncatacttggggaacccnattggcccagaaggtngagcggnngggctnnaccattaaaggggaaagctcatgngggtttacttgccggtcaagtctgangtcgaaagatgtatgaactatttgaaaatcaaaagagaaactgatccttacagaaacattttgccgaggtccctctattacctcactcatggtttctcttcccaaatcccaaccttcgatctccgaaatcattaaatttagttactgtgttgtagctctatctacaagatatcttatttaactgtggtgnttaaacacgtagatttgggtgtgttattgtnaaaaatggttggtatatataanttaagctttctccttccagcagaaagtgcgaaaccc

SEQ ID NO: 135366 - DNA, 499 bp, Arabidopsis thaliana columbia
  unsure (1)..(499): unsure at all n locations
taaatccntcccnggttcggggccttaaatgcnggattcanngnggaaccttgtccaggtnccgngncttggnctgccccatggtgcccttccccttnggntgcgacaaaattcggtccatgngttattncactcactaggtcctaaactcctggagtgcatacacactgtgaagatagcacagtttcatgtggctgcttcccaatgcctgcttgagctcatcgaactgtatagcacaatctcgtctttgcatcccgtggaagtagattttaaggctgaggttgtttctttacttgaactcgaaaagagtgaagaagccaagtcgttgttgagaaaatccagggatgctcttgcaaatctcccttcgttaaactaagcaagcacagagaagattttagttttatgcctgaagttgatataaatgggaattgaatctcctactttgtatttgtttacttatatacaagttcacattgatatatatatcttctaagttttt

SEQ ID NO: 135367 - DNA, 485 bp, Arabidopsis thaliana columbia
  unsure (1)..(485): unsure at all n locations
aaccncctcncntcttggnggttgcccanccctcaccccatggatggctttggcctgggnactaactntgnggatcacctgggngatttttccccccgatatgtgaagggccatgctcgttngcttttaatagttattnccagaagganggaagagcttctggttcatgtgacttcaaaggtgtggctatgatcactactactgacccaagtcatggaagctgcattttcccgggaagcaagaaggtcggaaataggacacagacagtggtgaattcgactgaagttgccgcgggtgaagctncttcaaggagtctctcaagaggcttctgtgtcactattatgattcttgtaacattttccatattgtaacccttttcgtgatttttatttttggcgagttaccaattttaggtcttgaaacattttattttgttataattttgtaatttgttgttgtggcnataaaattaaaagaaatgacgt

SEQ ID NO: 135368 - DNA, 497 bp, Arabidopsis thaliana columbia
  unsure (1)..(497): unsure at all n locations
tnccatccccccncccggaacgtactttcccaccgtncacgatgaactcggggaggggncttcttccaccggngtagccgtnccactcgttgttggcgtgtcaaacgagtagaaccgttgtattggcgtgaaaagtctcggcctccaaaggtatagagggtcgatcctactgacaccatacggacacctaagcaagagaggtgtggaacgtctccggtggctggagcaatggaccaagtccgggtctcgaggtcaaagacgtaaaggtgtttatcgatgggctgatttggtatgagctcaccaccaaaagagtaaatcttgttgcctacttgagctatgccatgtgagcatcttagccctgggccttctccattttgctccaccttataattaattagtaatatttgttagctatttttaaaaggatttatattctgattagtaaatttccataattgtaaaataaaattaatcaaattataaattgcaaaactgtc

SEQ ID NO: 135369 - DNA, 502 bp, Arabidopsis thaliana columbia
  unsure (1)..(502): unsure at all n locations
cttgnctgcagcctgctgcctacccgntccggtacccaccacttggttatttngggccccctttggtgngctttngactttattggttgattggggtttggtntngagagaggagnggncccgangtgaatggtgaccatatggtcncggaagcnatgangaatgcaatgcttgataacaggatcagtgatctacatgttgaaagaaagttaccccatttgcggagatgtggngaaagagttaaatagagccgtgaagagganggttacatggcaagatccagtggctttaagtgtttagggtgtttagtatgaaataggatttgagataatgatttgtcgtcccaatatgcacatatgcttatacaagtatatagatataagatttgatttgatgacttagaaagtcattacttccatatgtccaacataggaaaacctttgaataataactcttgtcataagtgactacattatccttttaatccaatttggtnattagg

SEQ ID NO: 135370 - DNA, 549 bp, Arabidopsis thaliana columbia
  unsure (1)..(549): unsure at all n locations
tggggaggcccncnancccttttnccccncggaacctgggnagcnancccntgtcccgggtttgncaattccttngttctcccccgnttccatggngtccaggttgaaagtgaaaggattnccggcnattaggcccttccaccagcttngaggatattgtcgccgactacgggnccggcgagctacatccccgaggatctgaagaaagctctnnatgaaagcattgaatataactctgcaacctgttcgcgatcactttaaaaccaacgagcgtgccaaaaatctactggaacaggtcaaggcttttagagtcacccggtgaagttgcagaagcaaagagngtatttgtggacatcagttaaagagctttcctaaggattttggtggttactaagaaagctaacaaatctcttaaagttcatttttgttttttgatagatatgagcctcgaagattagaatccagttggacaaattttgtgatttattgtcaactaaaaataaacctccacagctacaagagcattaaactaaaattttccngtaaaag

SEQ ID NO: 135371 - DNA, 455 bp, Arabidopsis thaliana columbia
  unsure (1)..(455): unsure at all n locations
gggagancccttatgggaggaagggttnnggtancatgttgtngactcctgtgcccaaccaancgntgaagatgggttanggaagannggaatgggttgtcccttgattggaatgttaatgctanccaagttttatggagcagatggggtgctcagattctgcaggantggagagttngtagactnactggtgatgcncttgaagctnttgatcaggtcaacatctagagattgatgctgtgttgctgagagttatcgaatcagatcactncctcttgcttttaaagtttgtgtttttttnccttcttcttgttgttactttatgcaagtgttggcattgatgatgatgatgatgatgaattctctatgcttacttgttggatactgaatgagaaaaaaagaacccttttgttgaatgtatgaaatgtttcgagtttttaaagtaagagttatgt

SEQ ID NO: 135372 - DNA, 582 bp, Arabidopsis thaliana columbia
  unsure (1)..(582): unsure at all n locations
cggtttttgnncagcnaaattaagttttttggacccgnggggaacctttaanngccgggtnaaatccttgtttacttnnntgganccttaanccaaattcccttccattggcaaacattcccattgaagaattcgangcattttaaaggtgaacacaaggnggntcattcttatgctgtaaaggagcngcaaaaaaggctaaaacgtggaggcggtggtaggattatactgctaacgtcgtcgttaaccgaggcgttaatcccggggcaaggagcttatacagcatcaaaggcngctgttgaagcaatggtgaagattcttgctaaggaacttaaaggtttaggcatcactgcaaactgtgtatctccagggcctgttgcgacggagatgttttttgacgggaagagtgaagagacggtgatgaatatcattgagaggagtccttttggtaggcttggtgagactaaagatattgcttctgttgttggtttcttagctngtgatggtggtgagtggatcnatggacaagttattgttgctnatggtgcattcctcaaatgnatntgggttatgtttgtttng

SEQ ID NO: 135373 - DNA, 458 bp, Arabidopsis thaliana columbia
  unsure (1)..(458): unsure at all n locations
tanttannaaacggganttttgccaaaggaaggtgcctntgtggaggtacataatgggaaantgatggttaatggtgtcgcttaggaatggaaaaattcatcttagagccttccnggttatgaaatgacaccaattagggtaccggaaaattcagtctttgtgatgggtgataaccggnataacagttatgattcgcacgtatggggtcctctgcctttgaagaatattattggacggtcggtttttcggnattggccnccaaacagngtaagcgggacagtgctagaaggtggcngtgctgtgganaagcnatagaacatattgtaacgttttgattcggcatgtcttcatttgaaacacttgtgcnganaaaaacgaaaacaatgtacctttttatgaaggagagngttgcacatttgaattagattgcngattaatgaggaaacaagaaattctt

SEQ ID NO: 135374 - DNA, 530 bp, Arabidopsis thaliana columbia
  unsure (1)..(530): unsure at all n locations
agggcctccgggntcttnncccccatttccccnaggtttcngnttcggncaggggtgatggctatngcttggggttgtcncggtggaaatcatctcnggcttnaaggtcatggcttcantcgtccctactctgaagtgaccttngcntctcttgccgtcgacaggatcggaagagggcgtgtggtcgatatcatcgatccctgcttaaacaaggaaatcaatccgaaaatgtttgcatctatccacaacttagcngaattggcgtttcgctgcttatcctttcacagaaacatgaggcctacgatggtngaaattacggaagatctccaccggattaagcttatgcactntggtacagagtcnggtnagttcaaaaaccgatccgaaatagatatgaagagacnacaatcatttccgagagaatgaaaagtaaacacttggcagaaattatgtatagtttagtattcaagtttttttattcgaattttaagctctatatacatagnggtaaaactctgtcttttggtttt

SEQ ID NO: 135375 - DNA, 573 bp, Arabidopsis thaliana columbia
  unsure (1)..(573): unsure at all n locations
gncccttgccctgnaanggggnncnnnataaggggnaaccatgtagnggcaaccccgtgggttttggctggcagggccnttggggggttggcctttggnanattcctctggttggctcagggtcccggttgcgntantcatggcacatttggcaacaattcttcatgcaagcttggngaacaccggaacttggaaggcacggttttaacacatttagggaggaatccgagcngtatggcgtaactacagcgagatttagngtaatcttgtnccaccatgatcgtgttctgctgaggacataacgctgtaaagaccaaacttactgcctttctccaagataaacccggtttcgttaacactgtactatggatgttcaatctggatttgttgctcaatgactgggatcatctgttttttctttgatttgagatttgagctctgagctctttttgctagcaaaatcctctcttttttttgctaaagacttgtaaagctagctttgttgttcttcgttctaacacaaaccctttgtgtaaagtcctagaatcgtttaatngcttgcatttttttctt

SEQ ID NO: 135376 - DNA, 511 bp, Arabidopsis thaliana columbia
  unsure (1)..(511): unsure at all n locations
ggcttnttgnggcngttttcaagcggcctntggggtttgttcccnccctcccnccgatnntgcaccggggtctctgctacgggatttcttggngctgaccccagcatctcggntgtgtgttntactgtccaagggcctgattcngcatcacttggggctgcnctaagagctgctcatggctggctctgcaccaaaaaaggaagctttgtaccaatctcaaatctctacgaagggaaattggaaacaacatctctgaactgcaagctccaaggtaaaagcnggagacgcgaacattgcttccncctatggtttgttgatgaagaagaggatggaaatagagaacaagcttgtggagaagttaggccncttctgagaagaaaaaaactcactactcaataattcaaataacttaaagagttgaaagaataacaagttctatctnctaaaactaaaagacaagtttgcttgttgctcaaaataaaagcngaatacgatcttacgatctctgngt

SEQ ID NO: 135377 - DNA, 519 bp, Arabidopsis thaliana columbia
  unsure (1)..(519): unsure at all n locations
aaggcccccttttagccggtggaanccggacnttccaatcgggtcccanaccaggggaccctttcggggggcccncaatgntcngctggccncgatggnaaagattgttgcaacaaaacccctgtttaccncatgggacctcaggtttancctgaaatcatggngaaaggctcacacataattccngattgatgttgatacagaaaaaggtggtctcaccataacccctgatttctttgtggactttggtgatgaaccagacggtccttcactagcccacgagatgagatatccaggtggagactgcacttccgatatctggatttgaatttggctttgtttagtgtgtgttttgtgttaagtttaaattgagttttattatttgttgtgtgtttagtagagttgaataaaaagggagtaagatgacccagacaattaacacttgtttgtacattttgactcctatgtgtcttatgtaataaaactttctacaattccacttaacacttggtttttctc

SEQ ID NO: 135378 - DNA, 536 bp, Arabidopsis thaliana columbia
  unsure (1)..(536): unsure at all n locations
gnccttcggccntcgggttcggncaaccccccttnccccatntgggaccaccccttnagccttccngttccggagggggtcttcttcccncctggnnaccggttncggattgtgttaaccnncgttaaaaggggnganctgggaatcccctncgattgggaccccaaantncngngttncccagaggagtgtaccagctcgatatacccggagaaggagatggattgtagctctgtatcagaccacgaagaagatgataacgacaatgaagaagaacataacggctcgagtctggttactgtttcttcagaagattccggtttacaagaaccggtgtctggtagtgttatagatgcttagagtgtgattgattcaagtgagtatagattcttaattaaatttgcagagtttccaaagggtttagtgcaccacttgtgtatgtttgtattgcttattgtttgaaattcatttgtgaaatcgaaatatatctgtaaattcagaaaatattctctcatccattacaaaatatttgagtc

SEQ ID NO: 135379 - DNA, 594 bp, Arabidopsis thaliana columbia
  unsure (1)..(594): unsure at all n locations
attntttnaanggggcccccccccnaacttaaaattggggggcaattttnccncccgggcctttttaccagttgattcccccncccggnaaccaanaccccgtccgnccttnttcccnggcggcgntncgtcgnggtcttcatggncgttccncttcatgtgtncgngtcgagagatccnaaggggttntacaagcttgcacgtgcaggncaaantccaaaggcttccactggaatcggacgccccttacgaggcccccagtgaattgccgaggtagtgctgaaaccacacaggagacgacgagtcgtgttcgccacgtcagatggctgagaacatcatctcttacctgcaaaacaaaggttatcttgagggctaagtcaaagtcggaaaaatcaacccaatttgtcgattctatatatggctaaaggattgttctccctgattcggtcagaagcttgagacctggaaacgatgtcgtctcgcttcgtcacactatcatttgttcttgaattgtgttgaagtcaaaagccaaagggaatatatctatatttgttctaatcatcatttagttagtttataaagagtttttgctcc

SEQ ID NO: 135380 - DNA, 593 bp, Arabidopsis thaliana columbia
  unsure (1)..(593): unsure at all n locations
ccccccccccccaaaatttcccccgggttaaccccnnnggttccctttnggggcccccnaattaaatccccccaaaaaatgggggcnntcccccccccggnggaccccaattgggaattncctttcggggnccccaattcccccggcccaatttcccggnanaanaantacccngtccccgattnaaaggaccttggtttgcccttggaaatccngttggattncgttccggaattatggagaaatcgtgaaagctgatggaaatcncaggagccgtacgatctttgatggaccggtgaggatgtgcccgaggaggaaactgaaggagattgcggaggcgggaaaagaggctgtgatggacggtggatcttcgtttgttgcggttaaaagattcatagatgggctttgatcggtgatgggttttaaagtttttacaccatgcaaacgttgtcgttttatgtaatttaagcttgctttgagtgagtctctaatggctttgagctttatccaactctataaaagtcctccttttgatagtatgcatgatcttttgtgtttactcatttgttatatatctaaatagctcattttgc

SEQ ID NO: 135381 - DNA, 502 bp, Arabidopsis thaliana columbia
  unsure (1)..(502): unsure at all n locations
ggccctntttnncccnaaatttccccttgttccccaaatngntttttccaaaggggnttcnccaaaaaatgtantttccccnattnagggcccgnttattttggggggccngtttggaagnggggatnctagggaagttttatgcnacccccgtccggaaccttaggggtggatatggttngtaatggccnctcatgactatggcctcttcaaaaggtaaggtttcaatctcttataagaaacaaaaatattttggtttaatggttatttgataatcatttgatatatttgatagggctttgctagggngtgtgagcgagtattgcgccaaacgagtcaagtgtcctgtggttatcgtcaagaagcaagctcaagataattaagctcatatgattgcattgtgtatatgtttcgaaagaactggtgtaacacttgaatcaatcttcgtatgcgataataaaatacataacggtttaaacaaatttagcngatatttttgctt

SEQ ID NO: 135382 - DNA, 527 bp, Arabidopsis thaliana columbia
  unsure (1)..(527): unsure at all n locations
ggtttttngtccccnacccatttctgacgcccccnncntttttggcnatgggntcccgggncccgttccatgntttagggggggggttgccaccccaaacttgnctgtgacaggttgncncncatctttctntcaaaaagttgatgcaggccccaaagcttcganccttggatatccttaggcaagnaattnctaccaggcccattcaaaggtttcctggccactcccccagcaatgtgaaccaaggataatgtttccgctgaatttatggatgggattctgagaatagtaattccaaagctttgagggttcatcgttctgaaaccatatatagatacggtaaacattgtgtgtgatatagcngtttgtgtggaaaagaaaaatatcaaatcatgaagaaagtttggtcttttatgtaaaatagtttggtcttttatatatcacagattgtagacaggcattactcaaagtgaagccatgtaaacaatccataaatatataaaaataaaatcttcattactactacc

SEQ ID NO: 135383 - DNA, 520 bp, Arabidopsis thaliana columbia
  unsure (1)..(520): unsure at all n locations
agccttggncttttaaccccccaagnnntgggcccntgtagccngggaaagccggtnggnctnaaataggggccgtttaacgggtttgcattttaccnggntacccnnctggcctttcaganccnctggggctccccntattgggatttgcaacgacagcatgctccnctttatntttcccccnggaccaatactgcggactcaactggggttatccggaaaaggaagccaaaaaactctgctcagtgtactataaaactttgatctttcttgatcaattgctagatttcaggcaaatacctagagaacaattttacattgcctgtttgttgaatccttnccttacttatttaatatgctcagctcgagcagttacgcataaactctttctctatttattcctgaaatcagattttatttcccatttggaatgtattttatttaggtttgttccaaaaaggaatttgcatatgtatttatgtgattgtagtttttacatataatttgattcatgattcat

SEQ ID NO: 135384 - DNA, 513 bp, Arabidopsis thaliana columbia
  unsure (1)..(513): unsure at all n locations
ccccatngaagtgttgaanctntgaggaagattccanggngctcctgngaattagtccagggctttcctttggtcaaaaaatgcttgctgcttgaagttcaggacgtcaccgttatacttcattccncagaaatgctgaaagtggagggtcttgccaaagttcttcctggagttgaaagtatagaagaaggtgttccaagtttaccgaaacttttattctgaagagaaggaaagaatgaacggtgttgtagctattcgtgttgcaaaaccagctaatcagccttctgcagctttggcaggagtattgtctgaactgaagtccagtgggatcaaaagcctgttggatgaatacacagctggggttacctcgtagctgcatctgaaaacctttgtgcgcagagaaactactcaatttgaagggttttgatttctctacactcggatgatgttaaatttgtgtttatttgtgtgtacgagtagctaaatcacagaagatcacatcttttcttactt

SEQ ID NO: 135385 - DNA, 457 bp, Arabidopsis thaliana columbia
  unsure (1)..(457): unsure at all n locations
aangggtttttgncctncccccangnntnctgcttagtgcntaaaagggtccaaggaagttttccnncttaaagaccagggtcttcctcnttgncccnactgttaccttcaccccgctgctgaaggaacttggtgttgggaagagaagatggacgagctgaattagggcccagggcgatccaagggtggtttgtcgacacagggaaagccgaagaaagggngaggacaatcaataatagcaagagaggcaaagagaagcagaccatctacagaaccagattatgaagatgaagatgatcctgatatgaatatgtatggccatggttcactcatctaaggcattttctgttttggtgcccgaaacngtnagaaaacaaatcattttgtaaacttttttgtgcatcctagaacagaactgaatctatcgangtaatcttggaattaatttgccngcttt

SEQ ID NO: 135386 - DNA, 586 bp, Arabidopsis thaliana columbia
  unsure (1)..(586): unsure at all n locations
aacnngggnttggnnttccaacccgggttcnaggggnnttccnggaccttttccggggnccccaaaaggggggccttngttgaanatttnggccnanctggttnatttccccaagngggttnccaangggcccttttnagaganggaagggtttgtaaattcgagtgntgaaggaacctcgcttaaagaccccgattgtgatcttggagctgtgaaaggatttccgttccaagatcaagagcttgttctcctcctagtaaccagaaatcggacggttcagatcaacctgaggacaagaatgttgctacttgtgttgcacttgatctaaacctatctattgatagtgcgtacgtttgtgaagaagaatcatgtgatgagattggcttactcgaagcggtagatgcacggtttcatttcaagtgttcatcaacataacactaacagcatgcacgtatgcatgtaacatggcccagtttatgaacatgatcattcgcattacatggtttatggtcaaccgttatttaatttgtttcccttacggacttatctttcattgggttggggcaatactttgggttaaacgtgt

SEQ ID NO: 135387 - DNA, 415 bp, Arabidopsis thaliana columbia
  unsure (1)..(415): unsure at all n locations
ccccncggnataaggttttnaaggcctntntncgggggttttcaagaaagcggcatcgttgaggggatnattttagatcncctgcggtataaggaagggntctgcgaacnccatggaagaagaagtgttagcagcggagacngagaaaagaatggaggtgttgaaagagggttgcgaagggaactccaccctcctcttggaactggagaagctgaaatcagccgctctctgtggaagaaggtgaacgagagaatgagaggaaagaaagtcngtgtgtttcnttctcngttttgaggttctcttacagatgaaaagctgtgtaattaaaaatcgatgttcntcntctgttcttgtaagattttggatttttccaatttctgacaaagttcaattaaaaaacttgactgacattttg

SEQ ID NO: 135388 - DNA, 557 bp, Arabidopsis thaliana columbia
  unsure (1)..(557): unsure at all n locations
ccnnaggtnnggctcatccaggttggacgggccatgggggatggnattncccngggcnntgntngggttggaccncaaaatcttgggggngnatgaatcaccccaacgcannccctggnaatggaatctggngttggggtctcaaaacttcaaatggtatgattcggtcttaaacttcataagctgtacaacgggactcatctttcggnttaacaatgtgactncaaggaagtgtacaaagcatcgaagttgaagagattacagacagtggaagtatctatgtgcagtcagatggagaacatcttggattcctacctagaaagtttcaggtgttacccggtgccatagacataatcagctgatcaaaaccgcagatttcttaggataaacttgtcaagtaaagtgtagaatacttcaactttatattcttcctgtaatatgattcattgtttagcgaatcagatttatgctcgtgttacttgtgtaactcgttactatcactatttattgtgtggtctctgttaaccacaaatagatnctttaaaacattttaangc

SEQ ID NO: 135389 - DNA, 508 bp, Arabidopsis thaliana columbia
  unsure (1)..(508): unsure at all n locations
tntaacagcatgtgtnggccctgncgntgggnaaccagntggccttgaaggctggctcagancnggggttntgcgccctnggacaagtgngagtcactccatgatgcgacgtggcctgatggnccaggaccctttgtaatgcgtgtggactgatgtgggcaaacaaggggactcttagagacctatccaaagtccctcctccgcaaacacctcagcatctatctgtgaataagaatgaggacgcaaatcttgaggctgatcaaatgatggaagtaactggtgacattagcaacacacagtgagaactgagaaaccattggaagcaagaaaggatctcaaacaaaaacagttgttatcatttcatttgatgatggaatcgaatctgagttgtgtttactctgggttaatctcagtctatgtgggcacattttagtcttctacaaattataagacactcttcacttatttagaagctcactcatcagaaaagaaaaaaaaaactttgctc

SEQ ID NO: 135390 - DNA, 525 bp, Arabidopsis thaliana columbia
  unsure (1)..(525): unsure at all n locations
caggnacaatttgtntagcngcnatggggggatacccggtaccataaggncgggcttgacncgnaatggaaacccttgcgattcagnggcattgtgaattgcaagaactgttactganccccattgcataggcaagccattgcgctgtcccggacggaaaatggggatgtgttcggtcataagaggacagatgttcattgagttggggtagtacaaaagtatctaaaaacactgattctaccatcctgagttgttcctgatttcagatgttgcctcctgaatcttcttcttgatggaactgaaactattctggcttgctgtgctccagtgagtggatgtgcttctcacgatttcggataaagcaggcagattcaatgttacatcttcatattctgcaacaaatagcaggaatcaatggtttttaagagttatggcaatgttgatacagaatcatttcttttgagttcaaaacaattgtagctctctgacttgtaatgatcttaatgaaatttatctctcttattt

SEQ ID NO: 135391 - DNA, 515 bp, Arabidopsis thaliana columbia
  unsure (1)..(515): unsure at all n locations
gncggttccccagggggcgaaggtcaccggaattccaattccnggcanccttgntaactttccncatggtaccnatggccatggacttgtggcagatgtggcgttggccccaacngaggatcactgtggacaagctctggatcaccagtaccttggctaaattgcacgacccgaatgatgagccaatctgtcaaaagccattctcttttgagttcgaacaacagcctctggatgaggaacagataaaagagatgatctaccaagaagccatagcactcaatccaacatacggttagaagtgcagcagccccgtgaatgcctggtattacccaataaccatccgaatggctacttagtatctttgcctgttcttttattcatgtacttcttccacatatgtaatcttgtaacttttatttgtttgttcatgttatttactgctagtgattaagtgtagctccaatgtaaagtactccagttattaaagaatatctatagacttttttacttcacat

SEQ ID NO: 135392 - DNA, 482 bp, Arabidopsis thaliana columbia
  unsure (1)..(482): unsure at all n locations
ccccccccnaagccangggnngtttttttccctcngggataaacggggcnttttnttgncaacccccnaggtccccggaanggatggngcccttggntccccaaaggaaatttntgggngtnccccggnggaagggggaaccccacnctgggtaggattncatcggtgtcaaaccactcaacancacgtgcaggcgtctcagatgcttgagctgttgcaatcaattctagacgaagaagctgagatgtttgtgctgaagatgtggagaatgctcatctttgagatcaagcgggttgaagctggagtcccggtaaaatccaaagcctgaaacttttctttaaagatctttatcttcctttgttgcttagtatcccaatttttttccaagtcttcttgtctttggattaaaaaagaatcgccatgtttaaatgcaaaagaagatattgaaacaagaaaatacaaaatatacatttagttcacag

SEQ ID NO: 135393 - DNA, 581 bp, Arabidopsis thaliana columbia
  unsure (1)..(581): unsure at all n locations
angccncccccttttttagggccaaaggggggccccccannggntncncccncccattgttngggngggnccccaccccttgggattntggcnaaacggttcggcngntttnaacccctttttaagccccaggaccgggttacccggncattgnttaggaggttaccngngcttgggncttgtaaccttggtgcccggttgcattatggttatccccctagggggatnccttcccctggaacccttactcctctagggngatatcctctttgaaacttggaccccggagaaaagtctcacaccgcagcctcctctttggagcatttcaacaaaagcttttatgcgtcgatcgcacgagcttactatgatcacaagttgatccgagatttctcgaagctagtcttcaagcttgaatctctgcaggtcccaatagatctaccatcccttgcaaccttctcgaagttatgcattttggaagactcatggaatctttatctctatctttcatgtaatgctttaattttactttgtataaacccacctctcttgaggagttagattaatgaaagcttcctttgccc

SEQ ID NO: 135394 - DNA, 571 bp, Arabidopsis thaliana columbia
  unsure (1)..(571): unsure at all n locations
tttttttcccnggaanaccccccnangttttttcccctttctnnatnggnacnggaaatccccggggaacccaaggccccccccaanattggnccccggtttcccaaggaaacccttttcnccccngaggncttaataagggtttgaaacttnccngattcccnanccnctgagattgtncggatccgatatgaccggctcagaagcataggaggaccggntncagacccgtgataggcgatcttagcaacacagggagagcggtttttatcgctgctgagctggagagacccgagggcaacccacattgtttgtgcttttctgtctcatagctgctatcgtgttgtatgttacgccgtttcaggttgttgcacttcttgctgggatctatgtgctgaggcatccaaggttcaggcacaagctaccctctgtgccgctcaatctcttcaggaggctacctgcaagatctgacagtctattatagataaatttatctgcatcagcttttgtaaaacgtttgttggatttaaaaaaactttgggtttaatgcttaattcggtcttttcaatgg

SEQ ID NO: 135395 - DNA, 606 bp, Arabidopsis thaliana columbia
  unsure (1)..(606): unsure at all n locations
aanccncagtccnccggatcccggnccccnccccnntaatttnncccccccctttgncctcccccnttttcccccgngcttaggtctcaactcggcctgggnctccnccccttncgccccagaagggggnaccactttcccccgaagggggccnggccaggtcctgatcttccgggatctagccagancggaacccncgatggcnccgactcccgaggagagcccggatcaaggaaatgatcncgggtgatcttagtcggatcagggaaaccagaaccaactacgacggagacggtaagagaggaggctagttaagcagactctccgactacatacactttatctccatgccagcttccagacaatccctttctctgagaagatgatcggattttcatattcatttgaaaatcttgtatgaaatgtaatatagttgttggctttggcttcttctttcgaatatgttatacaaaaagtttattatttttgttggggtaaattaaagatttaaaggtaagttactctgtttcatacaaagtttgggcctctgggctaatattttggtatctatgtaaaaatgtaaatattatgtttctttagaagttt

SEQ ID NO: 135396 - DNA, 536 bp, Arabidopsis thaliana columbia
  unsure (1)..(536): unsure at all n locations
cntngggttgtcccccccnaaggnnccccncttttnnccntgggccccnagttttttttgggggnttccagtttnccccnaaaccggcccggtttnggttccccgattanccccnccccntaggccttggccccccattttnggccattgtatgggngatttggnccgatggncaagtattgggagtgctggaccattaggagtggtggtgaccaccaaccaggagagagatactcggatacccattcttcttgttgccttcacacgatgtggaagtgaagccattagaagaacttgtgagtcctgaaaaccctccaaaatacaaaggctataaatggggtaagttctacgtcagtaggaatagaagcgattttcgaaaactggaaatcgaaaacatccaaatcgatgacttcaaagttaaaacttaatatactatgtatcggctttttttttgtttaccaagctatgatattaatcaaataatgtgtgtgggacttaatttgtgtcggaaagaataaatttgattacttttgaat

SEQ ID NO: 135397 - DNA, 589 bp, Arabidopsis thaliana columbia
  unsure (1)..(589): unsure at all n locations
cccctcnccngggtttcccccggnggnnttttgaggaacaanacccccgggggggtccncccttattcccccggaggttcccaaggcnttttcggacccnttttnncccncggtttttntnacccccnacngccgtttaagaagcccgttttnttcccgaancggtggagatggtcccttttaacggcccattntatggattcccggatnccagaggttgggaatcncttcctaattaggtataaaccggttaaccccagnccagccgaaggaagagncagagacggagactggaccggagatccgtagagcgtttgaggaggacgaacggcggagaagatcgccgttagtggaggagaatgccgttagggttatggaggcaatgcgagccatctcattccctggaacggctcctgattgggcctccgatgttaatgaggatcgttggattgatcagcttcgaagattgagaaccacttctcaataagctttctccaatctcgatagttgttttcgtttaagatctttctcaatgttgttcaatgtgacttcttttaaacattcaatataaaaaccagagaatttcacc

SEQ ID NO: 135398 - DNA, 558 bp, Arabidopsis thaliana columbia
  unsure (1)..(558): unsure at all n locations
ananaacnaccccccgtggtccctggaccggggggtttncctntggggccttccggancggaccagtttcccccaccgggccccggtttgttccanaatggggaaataacttgcggacccccanactggtaacccattttgnngtctaagatcaccgcggngtntctcgttgacccagggggaaagaaanccatttcaatcgtgcaangggaatccagggattccttggatggtgatggtagnccgaaaaaggaactcagtggaagttttgtgaccattgaagaagctcgagaagggangtgaagagaaagaagatcaaacatgtactagagatcgtttcgtggaagaattgaagaaactactctgagtcgttgaaaagaaatgaaaggtacacacactcactcctggttcgatgcccagacaaaaggaatcacagtgttttgcattcttttttgctgttttccttggtttgtttgataatggtgttttgcatgactcatgattgtggagacaagaacttagagattttgatgttgatgaagttttccgtatttaact

SEQ ID NO: 135399 - DNA, 506 bp, Arabidopsis thaliana columbia
  unsure (1)..(506): unsure at all n locations
cccgggggnnttttccccntttgaaaaaaacctntattttggncccntaaaccgggttnccccccnctcaggnnanaaccccgttncccccnccgngggcccccnntgggagggccccagtttacaaacccttgttcaancccccttttttccgccattnccagtcccccnatggctgctanattccccccgggcggacacacttcatcttggggagtgtgattggatcagtgatattgagctttggggttttaccactgtgatttggggcaaagcaagagaggattcaaccaaaacagtaagtgattctgagcaatcacttttattgccttcacacgacagagaagaagattgaaaccttgtcatgaaaatatgttggagacaagtgtaatcgttttcttattttattcataattatggtcccattagatgatgatgatccctatttatcttgtaagttgtaagatcttatgacttgtacaaaaaaaatctaacatgatacattg

SEQ ID NO: 135400 - DNA, 436 bp, Arabidopsis thaliana columbia
  unsure (1)..(436): unsure at all n locations
ccngggaacaaaacccctttggcttggnttaancccaaatttccngcggttncnnnccggaattcnnccggaagggttaaaaaggggggaaaccgttaaacccccngaactgaaatgggggaaaatnggangaantgggcttatttcccgngggattggaaaccncttggattagtttttgccctctctgtcttaaccatncaatgatgttggattttggtctttttgatgggagatagacgacaagaggggttgaaacagagagagagagaagtagagagatgctgcgagtgtcttaaatctctctgagccgtttccttcaaatccgtttcctttttatctttccctcttgtgaccgtcacaaaacttttggacagatccgaccacttgagtcttttctcttttcaaccaaacatgttcttaaattttccaaacc

SEQ ID NO: 135401 - DNA, 360 bp, Arabidopsis thaliana columbia
  unsure (1)..(360): unsure at all n locations
ggggccccnaaaaggggggnnttttnaaccccccgggnctcccaaatgggggcaancncnccccgtttccccctttncccaatgcnccgnnaatnggggggaaggaaggncttgaagctggagaaatggagttgtgctttatcattcttttaattctgtttcatataattgtgggaaaaaaaatccgaaaaataacaatcatcttagaaaattgtgagtttgagcactagatttttttatttttaaaattctcctttttagttgtatttatatataccagaatggtctggatatcaccagcatcacatattttctctcttttttatttttccttttttgttataaaaaaagatttggacc

SEQ ID NO: 135402 - DNA, 350 bp, Arabidopsis thaliana columbia
  unsure (1)..(350): unsure at all n locations
aaccgggttaannggaaatttttcccccggngttncnncnncnaaggancccccccccaattcagggtaccnttttncccgggggnacccntttcattcttggcacttcttggacgaatgtttggcgcccatagttgggaggtgtcttccacagtgtcccgggataatagacgcgtttatatcccatggtcaaaaagctatcaagaagaagatggaaattggtaaatttagctaaatcctttaagcctttttggggttttcgtctctctctttttgttttgcggataatacgattcatgctccaaatgtaatatggtgtcatttatttaattctttttgttaagctgact

SEQ ID NO: 135403 - DNA, 431 bp, Arabidopsis thaliana columbia
  unsure (1)..(431): unsure at all n locations
aaanccccccccnnttaaaantttnagggggggnnccccttttgggggggnaacccccnntntttncaaacaatntggcccggggccaaagagcctttggtgggggangggtnccgggatcccttaccncgtatatatatngtatgccagaggaggatcttgtgggaagtcggaagattacccagcgttggatgattagcaactttcccaccaaaagaagtaatggagatcaaatgtgcagatcatatgccaatgttctccaagcctcaagaagtttgtgctcttctcctggagattgcaaataaatattgcaaaaattaaccaatttcagcttccaccaataaataatacgccataagagaatacatctatatgtatgagaactaagcaaatgataatgcttatataataaagtttcgtgagaaaactgt

SEQ ID NO: 135404 - DNA, 553 bp, Arabidopsis thaliana columbia
  unsure (1)..(553): unsure at all n locations
tnccaanaaaccccctgggccccttttttgccaaaaaaaccnnttttnttcnnaaaaaaantttntttttttgnggggggnccccaatttncccctttggnccccccaaagtttnggnacccccccgggaaaacccccttttttttcgggcccntttttgtccccataggtgccccccccaagggcttgccccagggtnttggngacncccccnttgtcaaatctgggaaatccggctttgatggacttcgtgtggncataaaatattcggaaaagggcntccccagatggaaccccctgaaagctcatacagcttcccccgaacatatgggaaagctttcagcttcatcctcattcataaggtcttgtgctgctcaaactcaaagtttagtgaattctttcttctttattcaaacctctatggattgagtttaatagaaagttggccatgagaatgctcggccattgtgttcagatgaatgtatactgctaaaagcattgccagaatctcgacaaaagtcaacaaattattcagtgtctgattttctatgag

SEQ ID NO: 135405 - DNA, 559 bp, Arabidopsis thaliana columbia
  unsure (1)..(559): unsure at all n locations
ttgccccanttccccccnggtccngttaactnttaagcccggttacccccctggctnaacgtttnaanccggcccnttttttcccccgggggtaccattgtaacccccngaccccgcttnagcttaaggngnggaccnnattctaancccnggngggaatngggggaaaggatcaaacccccccggntccggaatggcggaaaccccccggccagggaaanccccatgttggaatacccggggnaagtcaaagggtgtngcaagcccgtggaaatcttaaaatcagattgtggaccatgtttgttcgtctgtaacatatgtaagtttggttagtcccagtaaagtgaaccccgttcatatttttgtttgttctgatttcgtcggtccatagtttttgtgaagatggtttacagatatcaaaggcttgttgagtttgttgaggtatacacacaccgaagcttcctttttctctcccccattgagtttgtttgttgggttatacgtgtgtgataaatggtgtctcactgatgattttaatataaattcatttattcatagc

SEQ ID NO: 135406 - DNA, 277 bp, Arabidopsis thaliana columbia
  unsure (1)..(277): unsure at all n locations
gnngnggangngggggaaaggggntaaatcggctaccggggtccaggattttngccattgagcccnggagtnttccaatggacantgctgctgatacttattttacagaacaaaagcatacatgagaagaaacgtttaactaaagaattcagaagatttgattttgataaaaacttgtaccnatttactgattaagctttctggtgtcttagtttgtagcttttggtttgtggaaaagtgttgtacacatcgttataacaccaggaaacattacagg

SEQ ID NO: 135407 - DNA, 475 bp, Arabidopsis thaliana columbia
  unsure (1)..(475): unsure at all n locations
gggcccanntttnccccccgggnaaatntaaggccgngnnntttttcccccccccngggnnnaccccccccaaaccaaaccccnngggccagggcccaaacccaatccccccttagggcacggaaacangcttatnccatcatggcaaccaggnctcttactatgatcccgcaggggacagcagccttcggcctccttatccccggcccagagccccatcccaacctcctcaccaaggtggaggatactacaggcaatgagttactttgggagcnataaaattctggtgttatatatctattgttgtgtttcctgtgagtacttgatgtgtgtctatctctttgacatgtttctgtcatgaaattgaatatctggtttgatagtgactcaaattctttattcaaagtagagccgatgtgatggatgagagttgtgtaaagcacgttattcatatatagtagataaaaggtacatc

SEQ ID NO: 135408 - DNA, 453 bp, Arabidopsis thaliana columbia
  unsure (1)..(453): unsure at all n locations
ccccgnggggttcccccgannnttgnggnancccaaaancccccttgggttnccccgggccccccaaantgggcccccatttggnccccgnacttgggnaaccntggntaaaaataggtgccngcctttgcggaccatttaaaccggntgccttaatacccctgtccctgagcaggaaaagcatttgccggagctccacttctccagggtcttgaaggtgcagagttgaagaaagctctctgggaagttcataaaagcgattttgccattggcagaggatttgctttgcccgactgcttctgtgaatttgagctgtaatgctgtttcttttcttaccacattcttgagctgacacaacttttgtaatgacaaaaatttgttcatgtactatggcattttgagagtcgatgagacgctcctgtctgcaaatacaagaaactngtatacattctg

SEQ ID NO: 135409 - DNA, 422 bp, Arabidopsis thaliana columbia
  unsure (1)..(422): unsure at all n locations
gggnaaccccgttttncccccngggggttcccccnannaggntcgggaanccaaagncgggccccaaggntanntgtgaatttggttcccccccntgaaaccatcggtggggtgtccccccgttggactgatggagttcggacaactcccctaggaacccataaagcccagagaagacaaacttgagataaaaaagatggtgatctatgcagttgaacaagctctgaaagaagtggagacattattgctagatcgcagctaaaagctctatagctttgttgttgtaggattaacagcagattttgtagaattgttaaagccatggctattgtagttggcttttgctgtgatatatgtatgtaaaagagacaagtgtctcttgaaaagaatgatttcctttttttcaaatgggattttgatgt

SEQ ID NO: 135410 - DNA, 535 bp, Arabidopsis thaliana columbia
  unsure (1)..(535): unsure at all n locations
cggtccccccaacttccggctgtntaagtccgaaaccagggttgnggatcnccatcccggtagctnnccnnngaccncggaantcccncnagacngttaggnccgaaaggcnctcccaaatggtgaagcgtggancccgacttggttaaggccgataactgatgtggcaaccaacccagaggaangccaattccatgtagccaagaagatggtagatggatcttactctgatgataaaggaaagaaactcatccctcttatcataggcgctcngtatttgatcgttaagatgattcaaggagcaatcagaaatgatatcaagacaagtggaaagccactttaagaggctctgaagaagnggttttgttgtgagcaaattacaaggagaagaagngtttttcgattgttctttcttttgttagattttatctgcaacattttcttgtttccggctttatctttgtctgtaatttatggagatttgttcaaagaaaagattgccatgctttctggttaaatgaaatggatgtttccc

SEQ ID NO: 135411 - DNA, 539 bp, Arabidopsis thaliana columbia
  unsure (1)..(539): unsure at all n locations
acttccccggatttggggacccgncnaattgtganaacccccggtgaacccttggcntaatgacccnncccgcngcaatcaaaggccttaaaggggttnctacncatcttacaggttctgatggtattagtatgtttatgaaggccaccngaagaagttggtatttttcttagcnccttattttatccncggtggaagttgtaccaaaggggacgcaacacgccgttcaacaatttgcagagttgtgatttatatgtaaataagcttgggaagggtttgttattgtaacccaagaaagaagatgaagaagaagaagcacattgagactggagaatctaagtccatgtgtagattcttttggtaggagcaaaactgggattagtttattctctgagttttgctttgaacgtgtttgttgttgctgttgttgtagtcgatactattagatgagacattctctgcaattatctcattgctaaatttatgtaatggtttttctttctttctatggaatgaagcatatcagtcttgaagtaaac

SEQ ID NO: 135412 - DNA, 509 bp, Arabidopsis thaliana columbia
  unsure (1)..(509): unsure at all n locations
ccnaattccggngcnccccaaanttgctnntttttncggtttngggggncccccttttnccggnggtttatnnccnttttccaggcccnccctngggggagaaattggggggaccttgggggggaaanccaaagccgtggggaacccccaaaacaattttggcgaaaccccnggggaanccggggagagaagancgccggcagaggcaaagagagggacagaggtgcaaaagtagttgaagttgctaatctcatgagagcccttggacgtcctcctgccaaacgctccttcttctctttctcctaatttttagttatatcaaaccattaaattaaacagtactcgttatatatctagttagtaaacaaaggggcagttttatagctcatgtacacataattgagagtgtagtactgttgtgtcatgtgtggttttgtacttttcttagttacacacaccatacaagaaaaaaagaagatcataattcaacttaattttgatttttgaat

SEQ ID NO: 135413 - DNA, 529 bp, Arabidopsis thaliana columbia
  unsure (1)..(529): unsure at all n locations
tgangccctccttccncaactgtcncttggcgtgaaggaggttccngcatcctcggtccccatntncagcagcagcngctnccatcagtcccggaaatggaaaggggacccngatggtatgatggggaagccagtgacccttacataatggatcttggtagtcccaccaaaacttatatccaatgaaagtcccattgagccacaaagatattatggagctttttgagaaagacaccataaagtttggcaacagcagccgagagtacgtactgttgcacgagaattctgccgagtgaatgaaatcagagtcaagcagaaacgagtaaatcacaagattagatagttgcgtttctcagggtttttagagatgtttgagctgcttcatgtatgctttctaccgtgctggtgataatctcagacatcatttagaaatcttttgcttgcttgttatataataaatgatgatgaacgattggtaagagaaaaaggttaacttttggtataactgtataagatcaatctctacttt

SEQ ID NO: 135414 - DNA, 518 bp, Arabidopsis thaliana columbia
  unsure (1)..(518): unsure at all n locations
acctaaatccngcaacttggcctccccggttaggagcccccagggttcttgccacntttaggnctcttgaannccccgcaaacctgtntggagttctaaccaaaagggggaancntttnttcaagnggtaaagncttgggatgngtttatcaaagctcttaccgaaaagaaccttcattttggccccctggtgtgatgaagaggaagtggaaagagatgttaaggcacgtacgaaaggtgaaacaggagcagctaaaaccctttgttctccatttgatcagcctgaactccctgaaggcactctctgctttgcttcaggaaaacctgcaaagaaatggncctattggggcaggagttactaagtgttcatcatgttttgattcaattcatgaaaatttacttttggcttgtaaagactctctcaagtgcattgtgctttgatctgatattttgaccaaaagctatttgagttattttgactgtgattgcactaagaattataaagagttgtttgattc

SEQ ID NO: 135415 - DNA, 526 bp, Arabidopsis thaliana columbia
  unsure (1)..(526): unsure at all n locations
tncgtgggcnctcngcaaacnaanctatcccgggttgncacggcgtcccaatncgccattcggggcncggctttggcagncacccccgtattgnatcngaacccatntanccacnggatatggtatggcatcacggatcattcaagcatcggtgtcccacaagacaattaggccccactaatcctcccatcgacattcatcccctcgaatgagagcatagatgcagctattggggacgttatatcaaagccgtggtgccgcttcctttgggactgaaaccgccgtcggttgacggtgttatgacggngttacaacgtcaaggngtttctaatgttcctcctcttccttgagaaagatctccaaaatttgtcgaaatctcaaacttttaacttcatttttttggtatcttctatgtatttttgcaagggaaagacgataaatccttgttgcttgatcatatgtatttctctatatgagtgcatgtatcgaagttaagcaactttaatatatcgttntaatcttngat

SEQ ID NO: 135416 - DNA, 511 bp, Arabidopsis thaliana columbia
  unsure (1)..(511): unsure at all n locations
antttnttaaaaaacttgnccctnttcccgggtnnaacccnggcaatccgggggggggccccnaaattntgnccttgacgganattnccnttacatggttaaagggtccatgaattttnngaacccagttnggcntatttccccncggacaacagatcttagctgctgctgggtgccctcaaggggaaggaaatgcactgcttatccagccgtgaaactgaacgtggtacttggaggaggaacttggctagaaccagatccaatcgacaggtgcttcactgacgggaatctagtaactggcgcagcatggcctggacacccggagtttgtttcacaactaatggctttgttgggcattcaggtttcattctaagttccatgttatgtaaacatcgttatcaagcagaacccatccaacacacttgtctactatggtatatgttactgccatcttttctatctcgtcttttgactagcttactgtcaagtcaatcacttgtgtttcataaag

SEQ ID NO: 135417 - DNA, 516 bp, Arabidopsis thaliana columbia
  unsure (1)..(516): unsure at all n locations
ttnccgggccccgngnaaagggccttttaagggccnnntgggcccggggttnnccccttgcgttcccaaagttttttggnttcttagggaccgncncccnaatcccactaaagnggacccgggccgggtttaaatctntaggngctgaagattnccaangccnctgcgatggacntggacagccgggaatggaaccccaaaggaagagttgcgaagtcggtgagagagaacagtggtgcttatcaacacttggctatctcacggcatttacaaggcaatatgcgagcgagatatggcctcacatggagaagttggagtcagaagtgttctcgggtgaagatgtgcatcctctctttctccaagccatatcttctgcacttcaattcccattacattaatcttcctctttcaatctcaatcaaacctgtctcttttgttttttgttatgagattctgattctgacatcaagttattaggaaattgaaaagagtcaaaaaacaagngtttaaactttt

SEQ ID NO: 135418 - DNA, 554 bp, Arabidopsis thaliana columbia
  unsure (1)..(554): unsure at all n locations
aaagagttnctttcagtcacaaaccatgnttngngttcgncatgccacgtcnccccncggcaaattgccgtggcgtcttgcgtggaagtttgncggtgttatccnaactttagtggtggtccgactcgaagattgctcgacggcttaaacggccatgctgacccagtcggattatggccattatgggtccttccggatccggcaagtcccacgcttcttgattctctcgcagntagactcgcaagaaacgtgattatgaccggtaatcttctattgaactgaaagaaggcaagactagactacggtctcgtcgcttatgtaacacaagaggacattttgatgggaacactaacggtgagggagacaataacatactcagctcatctaaggctatcaagtgatttgaccaaagaagaagtcaacgacattgttgaaggaacaatcattgaacttggtcttcaagattgtgcagacagagtcataggtaattggcactctagaggagtgagtggcggcgagaggaaacgcgttagcgttgcgttagagatcttaac

SEQ ID NO: 135419 - DNA, 530 bp, Arabidopsis thaliana columbia
  unsure (1)..(530): unsure at all n locations
cccccggggnaaacccttggacccctggggngggncccanctgcccggnaaagtnttttgggggaggncagtccgccaacttccccccggtttgaaaccccccgntcgccnttgtntttcnnccngaggncttgnggttatttccatccacccggnctgtaaaaggaaggccaagtcttgcccgaancccgttgatgcagcaaaagcagctttccccttacaaattttttcatcccgtttcttgaaactactactatggcctttgtttgggattttgaggttcttggggtttctttttttgtacaaaagtttcgacgtttggaatcggaaagtgatcaaagaagtagagtttgtctctcgtgtctgagacttcaaaaaatacgtgaatcataacccatgatgtatctactacagtttcagctttgtcttgcaaaaaaaaaagttttggattttggatatgggaccatgtcgtagtttgcatgtacatttgcactcttgcttgatcaacaatatctcatagttgaaagtct

SEQ ID NO: 135420 - DNA, 486 bp, Arabidopsis thaliana columbia
  unsure (1)..(486): unsure at all n locations
tnttttcggcnccctttgggnaacttgtcccctgcnggtcccggncgggattcccgggtgncccccgngtccggaaaagttcccccctgtnttggcnccaacncttcgggtggtgaaggctgtgatacntgnccntgnttttggttcgnttcaggacccctnctccatcagngnccgaacttaaacccagaagcaagccaggcagaaggaacccacgatgagccgagctcatcaaactaggcccatcctcagagtcacggaagatccctctagatctagtnttttggttcagattgtaaatcattttgaaagacagttatatatctcaacctgacgttgatttcagtatatcaccatttcctccgtgtgcagacttttgtctcatgagctcccataatgtagaaaggaataattggtgtaaaaatgttgttggccttaaaagaacatatcatcatgtaaataaacaaaacaataagacatttacac

SEQ ID NO: 135421 - DNA, 537 bp, Arabidopsis thaliana columbia
  unsure (1)..(537): unsure at all n locations
tttttttacccccanggnaagcgggggaccncccnttggggttattgggggnaanntttngggcccccagaaagaaggnggggaaggaaacnccncgtatccctgatgcgggggtnnccccaaaaggcncaaaccatgttcttggtncgagaaggcgttcccataggcatcaagctatatcagaacncggtgtctatggtgcttacctcgggngcaaaggccaaagttatngtaaacgagcagagtggttatctaatgcgcacgaagatcgcatcatcagatgaaggcggcgttgcagctggttttggngtcttggacagcatttatctgaattgagatggataactttcacaaccatcctgatcaattttactggtttattccttcttcttctcttcttgcttgttaaagatttgtgtattaatcatgaagatcaataagactaggcaaaagctctttacaattctttccacaggnccgcaaagcctacattgcttattgttatttttagaccgtgtgagatgattactcgtttat

SEQ ID NO: 135422 - DNA, 470 bp, Arabidopsis thaliana columbia
  unsure (1)..(470): unsure at all n locations
gaaacctggcccnttgnngnnnnacgggntttggcctaannaccggttcgngangccatcggtggatncccnattgcttggacggatntgngatggttaccccggaattgctcccttaatgtggcccatgactttccatctcgcttgcattcttgcatggatggaanggaagcgaggcgtgtccccgtttgcgataaggaattcgtgctcactgaatcataatcgtgaacangaaaccaatagctcggaacaagaagtgcgaaaaacggtacagaagatttgatataaacaggcattaggacttactctggtggtatgatgaacattgttgctctctactacattcagaagctttcacttccttttgatgatatacagaaattagatttgattgtttaatattctttgaaaaactcttatgtttaagatttgtttctgaatctgaattaattcgagaaaagttgaagaac

SEQ ID NO: 135423 - DNA, 532 bp, Arabidopsis thaliana columbia
  unsure (1)..(532): unsure at all n locations
agccnntgggcanccccngacattcgggttccccaacggtacccttacanatttnnccagccngctttgggtnntggccccaagttggggcaaaggaagcccatggcaatgaggatctgtngttaggacagtagcaggnggaagctacattgccggngagcactcttctctctgcgcttttacccggttccccggagattccatggagccttaccggagcggataagcacgtccctctcacattcatattagcgaatcacatgtatcttgttgctatgaatgatgagcttagtcttgtgcaaaagctatggcattggctcaatgtttgcttctttggattaatgtctcttgctgctgctattgctgctgttagactcatctctgttgactccaagaacttccatgtttttgctgatgtttgattaaaatncttcgacatttttaacgatgtaatctttataccaattagaaaaaatttgtaatccttttgttgttacttttattatttcaaatgaangaaattttttataac

SEQ ID NO: 135424 - DNA, 425 bp, Arabidopsis thaliana columbia
  unsure (1)..(425): unsure at all n locations
cccccttcccacnccntcacatgtctaggcctccacnacaccacaccaaggttgatnataatcatcgcctcngttcggcccaatcaactatatgtaaaccctttcttncctggcangtaatcccgaggattttccgttttagattcnatgaancctnatagggcgngngagaaagagaaagagagagggtgagagagngatcacaattaatattctatattgtcttgtctgcngagaatctcttatcttcggtttagagagagagagagcgtagaaattagtgccnatgtgtgtctggtttttagtgatgttatttcttgtttgtgttgcagaatctctgatgccgtgtgctttnatatttaccaaaactgtgctgtaaaatctcnataattttacttctgacctttgaggttgctttttactct

SEQ ID NO: 135425 - DNA, 530 bp, Arabidopsis thaliana columbia
  unsure (1)..(530): unsure at all n locations
tggcccntnggncggcggatccggcgcccacngcccctcangatttcccgacccatcacatcttggcnncctggtttatcaatgtggcgcgttccaatgnccgtgatgttgggaatgtgctctgtatccttttngtggcctctatattgcagaggaggttggatgaatgtagccgagatccacaagtcaagatcacaagagtggtcagcagaaaaggagatgacctcagaagctgaccctctaaacccataataaccaaatcaaccatgacataagaaaaaagaagaaacgccgttccgtttctcttgatgatttttctacttgtcttaatatgttcgttggtcataaagtctttccacttgtttagttatatttggattttgtgccttcaccagatgtagcaaacacaccctaatacctctgcacgtcagcttatttgggctttggccactattcttcttgaatctttcaactttttttttatgtgcgtcaaaaacaatctttataagtcgattttggccctaanccat

SEQ ID NO: 135426 - DNA, 533 bp, Arabidopsis thaliana columbia
  unsure (1)..(533): unsure at all n locations
atnccccggttccatttccccccnctgcngggaccnttcaggcgagttncccaatcagaagggaggtccatgattcnccatcgaaccggtggaagattcagaaacgtgccgaagacgaagttcgtgatttttcccgtgagatcggagttgataaaggtgttctcaaagtttggatgcataattaacaaaaactccttcaaattctccggcggaggagcaaccaccgtgcagagaaacgataacggtatcggcggcgagaacagtaacgatgatggagttcgcggtttagctaacgacggtgacggtggtggtgggagatttgagagtgatagtggaggagctgatggtggcggaaacgtaaacgcctcgtcgtctccgtcgtgaagaagaaaacatcatgtcgttttgcagggaaagagttataataatggaagcttaagctttgtttttagctttagatcatagagagtaagcactggtattattatcgttaatacgttttattaatattaattaaactcttttagctcttt

SEQ ID NO: 135427 - DNA, 524 bp, Arabidopsis thaliana columbia
  unsure (1)..(524): unsure at all n locations
cggncccccccccccangtaggattggcttgggtagccncggatnactggccggncnatccccgncgaccgnaccctgccnaattgggttnatggatgggcnccngttggggcgaatcgntncctgtaagcgtgtctgncccccatacgatctgnccaccaacgcataggacataaacaacaaattcagcgtaaagtattatctaaatcttgtgctggtggatgaagnggatcgccgttacttcaagcagcaagaaatcacgttgtacaggctcaaggaagagacatcttgatgtgtacaaaacaaaagagaagagaaaaattatttttcagaactttgtaaagccttttcaagactttctgtatgcaaattggttgggacttgtagtgatattcgtngtttgttcaacgacccaaatgttgtttggctttgtttggattcttgtgacttccattgtcttcttctccttctataaatgtactttttgttgtcttatgttactgaataagcagctttatttatag

SEQ ID NO: 135428 - DNA, 512 bp, Arabidopsis thaliana columbia
  unsure (1)..(512): unsure at all n locations
cagggcctttngtggcttntcccgcacncaagccttggncngggcttttncccctttcanttngcncccatgggcagtttggccccatcttcaggttgcggagntttgcngaccccaacgntcccttcaaacacttgatcaccnttgcggaggactctcatccatttgggctttgatgccatcactatcncccaaagactggagcagtctctaccccaatctgcctaagttactcaaagatggtaataacanacaaacgaaaggatctcagtttgccaagttcattgcagagacccaagacatgtttgtaaagccgaccaagctttcccgtgatgtgatccctagcaagttatgacaagattggcttctttgcagaatttgtgccttcttttactccttttgctggagtggcaactttaacttttgtatagatagagagattacaaaatgttgctgctgtttctggattattctgcttgtaacatatataaaaccttataatacgttttggc

SEQ ID NO: 135429 - DNA, 504 bp, Arabidopsis thaliana columbia
  unsure (1)..(504): unsure at all n locations
ccntcnntccgctggactgcatgaagcggnccgncccgtaccccgtagtgtaccccatgaggcccagngctctgttgccatttgaggntggagcattngcatcatggncagacttcatgactggtatcgcattgncttgatcgtgagaaactgattctggggtggaaagaatctgattgttacaccggtgagacatcggctcggacgcttccatcgaaccgttcctcctcctcggctagaccgccagcttcttcgtttgacccagaggcgacaaacataccatctcaaagaccaaacacgtcgacgacttctgctgcttattctctctctatctcactttcattgttcttcttctcaattttggccatcctttaattattacacgtntatatttagccatcaatttgtattctttagaagataattgggttaaatcaccaaaaacatattacactacagttgtattacttttttctatgttgtatatgataattattttttaac

SEQ ID NO: 135430 - DNA, 503 bp, Arabidopsis thaliana columbia
  unsure (1)..(503): unsure at all n locations
ggaaaaggnttccggtngnaagctaantcctgggggtagngcttggcaggggnattgcatggttgngtacgaagtggaatggcggcttatttngccccggctcaactcctatagngnttncggtaacanccncgttgtgcggtgnccgatgcnctatattggatgatcaactggcccgattgtctgaaccctatgtcttccaaactggaaaagaaacagcacgtttagaaagtgatttatcttggggtgcaatcactgacataatcgacaatctttcactcttcgccccgcccccctcggatattgtgcagccggcctccgattccgccccagtcccctctctcggagagtaaatgatagtctcatctgaatcagtaacttcaaatatttgcctatgtattttctgtttgctnttccgctatcaaacatttgcctatattattgtattatatgatcatattatgtttaatgtgctaatataacaagtcgatgattaagtttat

SEQ ID NO: 135431 - DNA, 462 bp, Arabidopsis thaliana columbia
  unsure (1)..(462): unsure at all n locations
aaggttccccgncccaccccntccccctgttgggnnnccngnttcccccagccccnaatccgttgtttccntttgattcccgaggggggccatngntggantnccgtggaaaccagattctggggaacatgggttggcacgaaggatccggntttggggaaagncgggagccngaatgaaaganccngtgcaagcgcaaggcgttgataggagagcaggacttgggagtcagcagaagaaagttgatgctgagtttgaggttcagcctggtgacacttacagaactcttctccataagaaagcacttgcgagatttcgtgacatgtctgacaataattgactctctctgtgtgtaaagtcagttggaaacttctaaattccgttgtgcttaaactgtgaaagtgattttgattttgttctttttgttaaattattattaatgaaaagagacagattagtact

SEQ ID NO: 135432 - DNA, 531 bp, Arabidopsis thaliana columbia
  unsure (1)..(531): unsure at all n locations
cntccccntgagccnccnggaaccccggggggntctnncccaanccgctgggaatccggggggnccctaccngcgngttcccctgtgggcctnaggtggggaagtggaccctggccaagnagggtttggccccctgatatggcccctatggggttgatttgggaccaggagntgctaagcattgctttngccaaaggaaagcgacttgttngctatcggtccagtgaaaagtagcatcggaagttgngcattcaatgatatcatctaccaaagagtttctggttntcttgtaatttcagtgacagcngcatatgttctgttgtttgagtttcatgaaagagctcaaagtggagattgatcggaaaccgaaattgttaaagtcaacaatgttctctcaaacagaaatcgttttatttgcaaatttctcataagccttatgttcatagcttagctggtgaacaagaccgatcccattcaattttttcaaggatttgatctttacttgatttcttaaaaacgaattattttacc

SEQ ID NO: 135433 - DNA, 494 bp, Arabidopsis thaliana columbia
  unsure (1)..(494): unsure at all n locations
attacggctttncnntttaccccattgngccttnncanggcgccagccccatnttggcctttggagggagnttcccccanctntggtgccggtggattcagntacccctttcccttcgggaatcccagnggcccnggggatcccntcttactggatcgatagtgngaaccggttaggccctgggnattaaaatagcctataagctccactatggagaactggtcgagaaggaaaactttctcccaaagggaccaatnacaatcggtgtgacatcaggtgcatcaaccccggataaggtcgtggaagatgctttggtgaaggtgttcgacattaaacgtgaagagttattgcagctggcttgattcggcattgtgatcgtattcaaatactatttgtcatgtcaagagtgtactnaaatatatgtagttgtatgatttgtctttataacttttgtaagaggttttgtaattcaaagtcaacatcctcgttatctt

SEQ ID NO: 135434 - DNA, 511 bp, Arabidopsis thaliana columbia
  unsure (1)..(511): unsure at all n locations
aaggccccttgagctgctgggggnattcnnccccttcgcccnaaacgtttggccccaaggcncattccngggtaccccanttggggggancngaggcnaggggnatcttaggatngancaaaactgggtcttgatagancacccagtggnttgtgtctggttatgcatcaggcaatacactcttcaggaaagagatttgccgaagcattggtgaaaatgggtacccattaaggttcttacccggacgttctggagagatcaggagaaactgcagagtcttcaacaactgaggacgttgattcttgcacacattctttacaattattcacggagagatccaaagactgagcggaatcctacgttttttcttttctttgctttttntcttacaaatcaaatcggaaagtgtgtttgttccggtatcatgttttatttttccctaaaaattgattcgcgtgtttcattttcatgaactatatattgttctaatttgatattaacttcttttttt

SEQ ID NO: 135435 - DNA, 475 bp, Arabidopsis thaliana columbia
  unsure (1)..(475): unsure at all n locations
tcggagnggntcngttccnccccttcccgcggtcctccgggtcaaactnttgagttgcccggtnnttttgnggggccccaaaggagggntcgccntgaggaaagggaccctccaaggggngggagggaggaaagncntgataggcgtgaaaaccgcgaaaggcatgagaancgangcgctcgtgattcagatgatagaangangcacaagaaagagaagaaggagaaaaaaagaaggcatgactctgattctgattgaagcgaattgtcccaggatggaacattttgctcttcagaggaagagtggtcggctaggtnccaaaatccagctaccacttctgcaagatttaaatctgttgcttatttcatttacgaatcgtggagtaaagtgttgttgaacattgttgaaaatgtttgttaaaacacatgaaaaatgtggtttgatattataacaaaccgagacgctcgttttagct

SEQ ID NO: 135436 - DNA, 505 bp, Arabidopsis thaliana columbia
  unsure (1)..(505): unsure at all n locations
cacanntnnccccccngtcagcncttccctgggcaagggcttngcttcggtcgnccngccttgccgggacctggnnnccntcnttagncttgggggccaaaaaggttntttgggtccgcgctcaacccctaagcnagggccaacctaaggctagaatgtggttcggatgcnactgatgagaagtttaaagaggcagcaagctttagtttaaagacaggaatgcatcaatacaatccaatgagtttcgtgatgagcggaacacagaggaactttgtgttatcgccattgtttngcttaagagatganacatacaatgtgtacttcagtgtgcaaacttgaagaaagaaacccttattgggtgaaaatataagaaagaaaagtctcatttgaaatatagacatgtgtttagatgtttagcctcttaggtttgtttgtgattttgtgttctgcaatgtcatctaaaaatgtatgttgctgttacaataaatataaacaaatgtgtttt

SEQ ID NO: 135437 - DNA, 519 bp, Arabidopsis thaliana columbia
  unsure (1)..(519): unsure at all n locations
gttcttngancccgaccaccntgctttgaaggccattccnngcttnttgcccaatttcggcaccccccttncatggnccncagctgtctcacccttnttgagccccngngttaaagngtctgtggctaaaggaagttaggtcatggctgattgggatcaccggcatgagactactttgcgagaaagccttgagaagttaggatcgcctttgtcatgggagcacgttaccaaacagattggaatgttctgctacagtgggttaacaccagaacaggttgaccgcttaacaagcgaatatcacatctatatgacccgtaacggccgtatcagtatggctggtgttacaacaggaaacgtgggatnccttgcgaatgctatacatgaagtcaccaagtcatcttaaatcattnacttacatgtttcagccaaacatacaaattttgtttgaagagtcaataagacaggaggctagatttgtacttctgcaattggttttgtgggaactgaaagtttacccat

SEQ ID NO: 135438 - DNA, 453 bp, Arabidopsis thaliana columbia
  unsure (1)..(453): unsure at all n locations
ctggnttaagccaggacttgtgcaantccggtctcncgggctntagctaggnacaggaatccaagngcngtcaacgaggcttcagcgncctaattatctccaagctcaagcagccattgactatggaatcgcagacaagatagctgactcgcaggacagttctttcgagaaacgggattacgatgggacccttgcccagagagctatgagacctggaggaggcagtccagcagctccagccggactaagatgatcaattcccaccagaaagaaagaggttgaatcctaatttcctagtcactctggaatatgtagctcttacaatctataagcaaacacatgtggtagtnacatacaaaaaagtgttggcaaaaagggaaataacatcaaaagttatctaggtggaaagttatttgtnttatacatgtatctctctagatgcaggtttctcac

SEQ ID NO: 135439 - DNA, 431 bp, Arabidopsis thaliana columbia
  unsure (1)..(431): unsure at all n locations
cttccctcnaaggnagagcgggntatttcattcccnggttcgtcttaccagtcntngtcagngngncgctgcngaggaagaagctgagattgcaaggctgaaagttcncaattttaagnagctaaacaagcggcagagacagctggtaccacacaagttgatcgagacaagtccaatctggaaccgcagaggtaccaaaggcaatcncaggtcatctgagttggtaccgtctcactaagtatcattgttccggcaactgtaacgngngcttctcttttatggtacttgtttgtatcggtaattggttactattccattcaatagatatgttgccagagacaggaaccaaaagaaaagtcatttttcaatttatatgaatcgaagaaaactgtaatcttgtaaacataattaacncgaataacatatttttc

SEQ ID NO: 135440 - DNA, 460 bp, Arabidopsis thaliana columbia
  unsure (1)..(460): unsure at all n locations
agacccntgggtttgagaccagagngtcccgcngaccgaaagtgaggncatggaatgagagaagatgccctaggaggaggangtaaaggagtgaggaatggttggatccatgancntcatcatagncaaanggcaaaccagatatggagganncatgtttggattgttttgatgtttgatctctgtatctgccttgttctctttggaatctggctttggatttgtcaagggtttcaatgcatcgatgggtaattatcttcgatcatctaagttatgtgtggttgaatgtttaaaaaaaatatccgaggtgttgtttccagggtttaaaaagaaagcctggtttacacgtttgtgatgatgtttttgtttgtgtttttttgaagttgttcttcatgaggtaaaaagaaaaaaaagtgtttgtaaaaatctcttttgtaatgatatctcttcgttttctttg

SEQ ID NO: 135441 - DNA, 470 bp, Arabidopsis thaliana columbia
  unsure (1)..(470): unsure at all n locations
tcccggntatcgaaggctcaaacaatgcacccncttcgggaaaagatctgattttgtgatcgtgactcnccaantctgatcttgaatggtcncccggttagaccttctccgggtttancnttaccgatatcgcgccgcagtgttgatggatagtcggaaagagagagaggctatcacagagttatccccggagtatcgcctttaaagcagatcttcatcttcttcacttacgagcggctttccacgagcatatcggtgatgtcacgagtgcgttgcgggactgtcgtgcagcgctctcggtcgaccccaactatcaggagatgctcgaactccatagccgtgttaatagccatgaaccttgaaccgcaaccacacacaaaagagcttcgatatgaaagtaaagtgtgaaaaattgtaatactaaaagaatcattgttggaaacttgtaatctcttgtaactcttttattc

SEQ ID NO: 135442 - DNA, 353 bp, Arabidopsis thaliana columbia
  unsure (1)..(353): unsure at all n locations
gggaaaantcgggnntnaaantggccggggggnaacccccntttaaccccccccgttgggcaangccccgcnccccatgggggncccctttttggaaagggcccaggtggaatatctttattccattggcaaaaccgaaaaaattcaaaccccaaaccactatcttattgtttcgttagctngngngcaattgtgtctgttgaaagattttatgttattttggggaaattattacaaggcttgtatctgacttttatctttcttctaaaacattttactttcagccttcatcaaactctcttacgaaacttatgtngtctcatttcctaaataaagatgtttttccctttgct

SEQ ID NO: 135443 - DNA, 506 bp, Arabidopsis thaliana columbia
  unsure (1)..(506): unsure at all n locations
aaanttcccccgggacncctttccccttttttccccaagcnnttaaccccccccttttggggaaacntntnccccctgccggtccccgtccnggattccccggtnnccccnacnggtcccccaacagagggnttcaagggaagccctggannctgctgggaatctttgaaactggactctggaagattctgctcctcggggcaaccggcggctctctgtactggnagtcccttaaggaagccaagtcgaacccgatgctgaaactgcactctaanccgatgcaggcttaagtacgtatatngaaattatacctaagttctcgtctgtggcattttgctgaataaagaaagcaaaaatgttgtatttgcgctcaagggacaaagaaacagngttgtctgtatgttgtgaattgtgatggttttcaactttcaatgcnctaatcttgcaatgttaaattgttaagcatgattgtactctatgcacttgtgaaatttaaaaattaagat

SEQ ID NO: 135444 - DNA, 505 bp, Arabidopsis thaliana columbia
  unsure (1)..(505): unsure at all n locations
agnccggccggatcccggcacccncgtccccccccattcccataacnccccacggcggtccggaagnttncggaacccgaactccntggcganaagaagtnaggaaggtaaagatttggatggtgtacccatgtccgatctgagaaggtganggatgagattgtcctggccggtaccgacatcgagcttgtttcaaaggtcatgcgctttgatcaacccagaaatgtcacgtgaagaagaaggatatccaggaagtttcttgatggtatctatgttagcgagaaaagcaagatcgtagaggaagaatgaatgcccatatcatcgtcttagctcctatttcttgtcttttgaatgttagtttcgttttatggaccaaatccaccggtgttgcaaaactctggctatcccttgttccctttttgtgttcgagattttatttacttatgcacaagttttggagacgagctatcattttcacctttgcttaattaaatcatatcgtgtg

SEQ ID NO: 135445 - DNA, 498 bp, Arabidopsis thaliana columbia
  unsure (1)..(498): unsure at all n locations
tgtntaaattngacctttgcnggnccccaacnggtccccatgnctttccagtcnggtccncantcaatggggccntnncggcggccctcatgtaccttacggngcatcatccgtcggaatgcgctgttngtcaattcgntaactaacgttagtatgngcaatggaagggtacctntcccaaacttaacccggcccaaatggaacagcttgtcccccccttttacatcaacttcaacaccaccctctcagccccaaaccgttgttgtagaaaaccccatgtccgttgatgaaagcggaaagttggtgagcaatgttgttgttggngtgacaactgacaaaaagtaatcaagaatgagtgagatcttaaagatcaaatccaaattcttcctctattcctgcgtttggtttgtgcatattacatacgcggaaaaactgtatgttatatatctcttgactcctttttaacccaagagaaaaagcttatcagaatctcttgtt

SEQ ID NO: 135446 - DNA, 408 bp, Arabidopsis thaliana columbia
  unsure (1)..(408): unsure at all n locations
ccggggattcccggggggacccccnccgnccccnggnantggggnccccnggaaaatgttttcntggnccnangccccntttcnggccatctggnaaccccccatttcaagngttccccatcttgggccacagattttaaagccccaaaaatggtatggcccgtttctaagcttaccaaatacgccggagcattggattgccgggtcggaaaagcatgctaaaaatataactcactnctaaattttttctctttgtatcaaagcctatataagaactgataaaatcatggggtaaaaatggaaattaattattctaatttatgaaaggctctgtgtaaagaatctatgcgaacggcttgatactttgtaactcttaatttgtttgtgtatgtttttttgtgctcgttg

SEQ ID NO: 135447 - DNA, 496 bp, Arabidopsis thaliana columbia
  unsure (1)..(496): unsure at all n locations
acnaaannaggttacccaaaccctcgggactcnttnaacttgggacccntccagccggaanttnttaaaacncccgcttaancaanaaaaantcgggnttttttggcnggcgatcaatggctcgggggtacccagttgctgaggctgatgagttcgaagaccaggatganggaattggagagcatctgcaacccnaatcattgccaaggatgtaccaaaggagctggtggtgaagccggtggtccaggtgcctctggtatggacgatgatgctccccctgcttcaggcggtgctggacctaagatcgaggaggtcgacccacgcgtccggtgacattgatccacaagaagctcagcaaactcttgaaatagcagaagctaacttgagaaaagctgaaggtaagagacagacaattgaggctaatctagctctcagacgagctcggacacgagtcgaggctctcaatacgatttgattttgtaactagctgacgtgt

SEQ ID NO: 135448 - DNA, 505 bp, Arabidopsis thaliana columbia
  unsure (1)..(505): unsure at all n locations
tnccncaggtccggncggatcccggnggcccccggncccaaacttaaatcgggccctggcccccgggnttggtttaaaggttcttaaccccntcaggggcncatntgcaaacaaggctntgatcccngttncggggccacggcccactccggngaacttccccagngattgttgaagatcccactcagtgaagccctttcttgcccgggagcttcaagcctggtgataccggcttttgtagttcttgatgatacccggaaacccatcggttcggaccaaaccagattcttccactatacgagttacagacaaaacatcgatcgcatagtttcaccattggaggattgtatataaagattctttgattatactcactcgtcttatacttaaatctcaattgcttgttgcaaacttgtatatataaagatacatagtgattagtccgtgaggtaattgtattaagtatttgttattcctcgaattaaaactatcctttcattctctg

SEQ ID NO: 135449 - DNA, 502 bp, Arabidopsis thaliana columbia
  unsure (1)..(502): unsure at all n locations
cnnnaanaacccgggnggaaatcccccaaggggatttccctccccccccntnaaattgccccggaagcncaaaccccccacggatccnagaaactgntttgataacctccctgcaacatggnccccccntgccgttcgttgcaccccgttttgctgacttagccaagaagcncctcgacgtagtcttcttccaaaggtcgatgttgacgaattgaacactgttgctgaggcgtttaaagttcagacaatgccaacgtttatcttcatgaaaggaggagagatcaaggagactgtggttggtgctgctaaagaagaaatcattgccaatctcgagaagcacaagacagttgttgctgctgcttgatttgcttttctctcttacctattttgctaaaatatgtttggtgttttaataaatcctttgttcgcccgagtcttttcaccttaaatgtgctcttatgtgtggtggtgaataaatgttgttgcaaacttgattactcgc

SEQ ID NO: 135450 - DNA, 388 bp, Arabidopsis thaliana columbia
  unsure (1)..(388): unsure at all n locations
cccttaaattttaacatgggncccaatccnatntgctaaaaaaagttggtnaggntgaagggtnttgangacnctggctcaaaaggntngttgancatngtcgaccccacgcgtccgtctcaataccctcctggggcttatcctcctcctcccgcttacccaaagtgatcactctttgccngttttctctcccgattggaaaattttatttcatctttttttaatgctgtcttgttacgggtcaagaattgaacgttcgctgattgttttgaggtcgttgtttgtatgagattttgacctcgcatgttgttgttgttttctgaaacgtccctcttggnctaagngatttcatgactttttcctttccttttaaattctctctttttcg

SEQ ID NO: 135451 - DNA, 539 bp, Arabidopsis thaliana columbia
  unsure (1)..(539): unsure at all n locations
catctttaatctcttccatttggattcggagagagaataaaaacgaatagacaatttgattctctgtttctctctcacctatttttattgtgttccgatctgatcggatttaattatcaggttcattttcgatttaaatttcgattctttttttgctggtctcaacggagaaattttccggtgacagcttaaagttttgatttttaattcttttttcacgaagaagaatttcaattttgtgaaaccgttagaagaagaagaagaaaaagattataagcttatggntccatcggagatagaatctctaggagacggatctgatcgtcggttcgccaatctgagagggctgcgatggcgcgtgaacncggngtcctnccggttccaggctcctccaacgntgatctccgaaagcnacagcngaacncccgaananngcgggttaagaaacgggcctgnttggccanaattggccaaaangccgaatccccggccccaacggaaccnntnnaaaccgaanaaggggggggtncaaccngcaa

SEQ ID NO: 135452 - DNA, 541 bp, Arabidopsis thaliana columbia
  unsure (1)..(541): unsure at all n locations
tttaattataactttccaaagtaactagagtaagatatattctacacataaatttatgacaccaagacagaagaacgaacagacagatacacacaacaaaagtaaaaaagtgaacaaataaaacaatgaaaaataatttaaattctgtgttttttttaaccctcaaaacaggtaaatatttgctcgcttctcaacagttgattccacattccagaatgtccgggccagtgactcggctagtgaagggatcaatcctaacccacaacaacgagaagatagaagccaagagnacagaccagaccacaacaatggtaggagtccgggttctgtcgacccatcaaacccttgagggaagggtccaagtgnaccatcacccaggagggnaaggacactttccaagntgggccccntgattggnncncngttggtgcgttagnggncctggaaaatccccnangtttcatggcacgcggtgggggntngaggtgccntttgccagtngccgnaagcccgttacngggtttgggcggagtggncacgc

SEQ ID NO: 135453 - DNA, 551 bp, Arabidopsis thaliana columbia
  unsure (1)..(551): unsure at all n locations
tcgagtctctcgacggtcgcatatcaaaagtccatttctttcttctctttggaggatcagcaactatggatgaagagtacgaagtcatagttctgggtactggtctcaaggagtgcatccttagtggtcttctctccgtcgatggtcttaaggtacttcacatggacaggaatgactactacggtggagagtcaacttctcttaatctcaatcagctgtggaagaagttcaggggagaagagaaggctcctgctcatttaggttctagcagagactacaatgttgacatgatgccaaagtttatgatggctaacggaaagcttgttccgtgtccttattcatacggatgtgaccaagtacttgncttttaaagctggtgatgggagctatggtttttgtccaaggcaaggccaaaaagtgccacaatcccatggngggccncaaacccccctaanggganttttggaaagncgctggaaagtttcancatgtcaaaaacgcgggaggcccaaacctgtgntggttgggggtcaccaggttntcgaacgctt

SEQ ID NO: 135454 - DNA, 553 bp, Arabidopsis thaliana columbia
  unsure (1)..(553): unsure at all n locations
cttttaactttaaatacacgtaagatcaataggtttagattctttcttatcctttactaaaaagatattaaaacaaggtaacaacaacaacaacaacaaagaagaagaagcgaanatatacacttttgagtttaaagactttttaatcagcacttgtatttttgttcctttgcatcaatcatatcgctcaaacttggctgctcatgttccaaattcctgtttgaagaatcatctcatcaccacccttagttggagaagagagagtgaggaagaactttgtaagggttgagaattccctttgggtccagcaactttttaatgggagccattaatgcaacagtttcgggtgatttgctgtagaagatttcattagctttcattacaccgaatccatgtccgcacngatgctccacggggcttgatggcacnctnggcataagggccatcaaccaaaagctaccgtaaatccgngntggnntgttaatggaggttccggcccaggggccaanccaaaattggagcccaanccccgggtgnacaatggatctcccgg

SEQ ID NO: 135455 - DNA, 476 bp, Arabidopsis thaliana columbia
  unsure (1)..(476): unsure at all n locations
tatttatccgtatagttgttcttgcattgttcttgacttggagggttaaacatcaaaacccagacgctgtatggttatggggaatgtctgtggtttgtgagctatggtttgccttgtcttggcttcttgatcagctccctaagctatgcccgattaatcgtgccaccgatcttcaagtcttgaaggaaaagtttgaaacaccgacagccagcaacccgaccggcaaatccgaccttcctggattcgatgtctttgtctctactgcggatccggagaaagaacctcctctnggtcactggnaaataccaatttaancnatncttggctgggggaaaatcccgggttgagaagctttccttgcaangaanctgatgatggaaggggggctttctaacggtttgaagcaatggnttgaaccggcaanctttgccaanatttggggcccttttngcngnaaananggnntnncccgggaa

SEQ ID NO: 135456 - DNA, 529 bp, Arabidopsis thaliana columbia
  unsure (1)..(529): unsure at all n locations
agacactaataaggataaaaaaacttcgcaacagaatcagatatctaaaaatcccggaaattcactagatttcttcgattggtaccgagaggtgtcatcaaatttaacagacttcaagtttattaggccaagcccacgagcttctcactgatctcccacactttacgagccttctcaacgtcacttgcttcttctgataactggttctcaaaagaagccggagcattgttccagctccaataaacccctgatttcgtcaagcttggatcactcaccacctgagcaagtcttttgcctgactctggttcggngacatatcccttaagtgatgtacttctgaaaagggaggggagaggggcncggaagagaggnatgtgcncccgggataaacctgtggaggcggtgcaaccggggnaaacganggnagtggctccagttctcatggaaaggctgtgannctggatggcaaanttggngnttancggcttgaaaccnttgacgggnatccccannanaaaggggnggtaat

SEQ ID NO: 135457 - DNA, 540 bp, Arabidopsis thaliana columbia
  unsure (1)..(540): unsure at all n locations
ttaccaagaaattcctcttgccccagaggcggcttctgttggactcgaaattagggttgttggaaatgatagcggagaaaaggtttccatactggctggtactcttgcgcggttggatcgggatgctccacattacaaaaaggatggttataacgacttcaatacgttttatatgcaagcagcatcaggtactaaaggtggttcaagtggttctcccgtcattgattggcaaggcagggcagtagctttgaatgctggcagcaagtcgtcaagtgcatcagccttcttcctaccacttcaacgagttgttagggcgttaagttttctccaaaaaagcattgactcgcggacggataagccaaaagcagttcatattcctcgtggacacttcagatgacatttcttcataangntcgatgagatacggcgccttggcccaggagcgaactgacaggtggtccncatggatcccactggggaacaggatgctgtgccnatctgtgggcaatggccgctgtaanattgnccgggntttctntc

SEQ ID NO: 135458 - DNA, 544 bp, Arabidopsis thaliana columbia
  unsure (1)..(544): unsure at all n locations
tcatcattacaagaaacctcattgtgctgtcagaaaatataaagaatcaaacccaaaccaacccatgagagaaatataaatgagccaagtaaataaaattgaagaagagaaacaaaaaaacacactcttcaaaccaacaacaaattgactgacccacataaaaccaaactagaacaagtcgaacttcttcttaagcagatcttgcttccaacgtggtaagttgttgaatgcttctttctcgatcccaaacacactttggaactcttcctcagatagataagcctctntgcgtttgaaatcgattccagtcactgggttctcagatttagctctcagctgttcataggtgaaagttgctccacttggttgtatttcagaacaccttgctcttctggttcctgctttgcttctggttcatctgctgcaggngaacttccgcttcttcgtgggtcaanccagnacctctgaagctctcntcaacctttggtccggcagagggntgcaccggtgggtgggnagtgggccctgagggagntcngggttc

SEQ ID NO: 135459 - DNA, 458 bp, Arabidopsis thaliana columbia
  unsure (1)..(458): unsure at all n locations
cagaggaagaaagaatctgtgtttcttcgttgtggcttatttctttctctattgctatttatgttccgtagaaatttgatctggtgaatgctcctgcgataaaatttccctgagccaacgcggctcgggggagatctgttatatcagctatgtcttcatcaacggacgatgcaggaacaacaacacattctcttcaggaattcaaactcttcgaaactcaatcgaacttttatatgattgggttggggatgggaagtgggagtttatagagtactaaaagaattgaatcggnccttgatccatcctgagcttaacattaaggccaagnatccgnncncatttacnccaaggaaaggaatgntnattnagttggcnccaaacgggttncncgnagggaattaaagctacccgggnggggcttaaaccttgngnccccctttggtanngggacccattgg

SEQ ID NO: 135460 - DNA, 526 bp, Arabidopsis thaliana columbia
  unsure (1)..(526): unsure at all n locations
ctttttttttttttgaaaccaaaacactcaggaggagattagatatgcatccatatttacagcttcagaaaagagttcaacagaagatgtaaatggatggatatttcatcgttactgaaatttgaaaacgaaaacaaaagcgataaggaaagttacaagcaaagaacaaccagtgactattttatatcaagccagaccccttttcttttggggactacttgtttgctgcagcgagttccgcagtgataatgaaacttgatttcccagcttgtctcaagtactgaacatctccattcatcagcttcaccagtttccggctaaccattaagctcaatccttcttctgacacatcttcctcagtcccaaacatttggtttagtaaaaactcagggatcccagctccggnatgggtaacctgntctctagattagcaagatgnncagacgcccgagtgntccttccccagggangtgaacagtagtgnccccgntggggaagttnagcntcggtgaattgcanctgtgag

SEQ ID NO: 135461 - DNA, 368 bp, Arabidopsis thaliana columbia
  unsure (1)..(368): unsure at all n locations
gaantctcttcttcgagcttccatggatgcaatcaaatgcagttccagtttcctccatcacaccaagctcaacactctcttctctaatcacacctttcctaaaatctccgctcccaatttcaagcccctcttccgtccgatttcgatttccgcaaaggacagaagaagcaacgaagctgaaaatatcgccgtagtagagaaacctcttaaatcagatagattttttatctccgatgggactttcttctccattcggnaccaccggtcagagaagacggnggtaaatttctctggttantccaacaantncggtttcggnaacaanctgnctgnatttcnncnctcgganttccggtcagaacaaagtg

SEQ ID NO: 135462 - DNA, 535 bp, Arabidopsis thaliana columbia
  unsure (1)..(535): unsure at all n locations
ttcagcttgaatttcggatttggtgtgatttgttgagacattgatttgatgaggctggtttggcaaagcgttggtttgcagcggctggttcgttgagatggagactttgatttggaggttcaattgccgttcggtttgaagaggaggagcttcgttcggtttacagcggcttggttcggtgaaatccttgttcagcgaggagaagaagcgtgcggatcggttcggcgagaggggaacttgaattggcggcaaaatttgacaatctatttggactctcttggttcggtgataagaggaggagtaagcctggttaagaggaggaggaggaagcttggttcggtgagaagtgagaagaaggaaccggtttggtgagaagaggaagaaacctaccggttcagccaaagaagaaggaanccggtccggtgnagagaaaaanattttccggtccggttggnagacaaccggcctggtttggaccntgaccgaagttggttgatttaatggtatgaccacccaaatcctacccgnnnaattc

SEQ ID NO: 135463 - DNA, 545 bp, Arabidopsis thaliana columbia
  unsure (1)..(545): unsure at all n locations
gtagtacaactaaaaatcttacacaacaagctccaactgtcaaaacctcaaaaattgaaaaacttcatcaaagtctcctaacgagtctacttaacgaggaggagagacaggcacattagctttcgcgaaactgatccaagcaacaacaccaatggctagaatcacccaacccatagcatcatacttggcatcactacttttcttattcttcactgcctttgagctcggcggtgctggagcttcaacgcgacccattggttgtgagcctaagccttgtttgtaagcttctgcgtgcagctgtggagccttggccgtcatttcgagtgatttcaggtagtgtgtattatctgggttgctcatccacagcttgttgnaaagaactgagnagntaaggcaaagttatgttagnttcagctcggcaggggccgaaccaatgaagggatgattcccatnnacaaacggttcacctccttgggnaacaaangncctcnaactttgggtgncnntgaacatngttcaccggntggttgaacgggaacccgngc

SEQ ID NO: 135464 - DNA, 566 bp, Arabidopsis thaliana columbia
  unsure (1)..(566): unsure at all n locations
tggttttcacggttctcactactctctgtgatttttcagactattgaatcgttaggaccaaaacaagtacaaagaaactgcagaagaaaagatttgagagagatatcttacgaaacaagatcaaatggacagcaaacagatgttgttgtcggcgcttggcgtcggagttggagtaggtgtgggtttaggcttggcttctggtcaagccgtcggaaaatgggccggcgggaactcgtcgtcaaataacgccgtcacgggggntaagatggagaaggagatactccgtcaagttgttgacggcagagagagtaaaattactttccgatgagtttccttattatccccagtgnacaaacacgagtgcttctaacaagtgcagcttatgtccatttgnagcacttcgntggttccaaaaattcgggaaacttgtntccagctagccgggccatctcttgtccgggcctccggggcttttcaaaaaatgggtnccnaancccagcccatttttttggngnaagaaattnttctnggggaacntttnncccaaaanaaggaaacgggggggc

SEQ ID NO: 135465 - DNA, 525 bp, Arabidopsis thaliana columbia
  unsure (1)..(525): unsure at all n locations
tttacacaacaacaacaacaacaataataacaacaatcttcttctccaacatgtctctatatcttatactcatatagttacatatagaaatcacacctctatgggttttatataagtaacattcatatatatatcttagaagatctttcaaagtagacttacactcagcttgttccatagtccaataactcccacctgaacggttgaaacacatagagcacttccgggcaactcttaaacagaagtgccacacagacgcaaaccgcagcaatcgccaccattgacaacatagctggtctgtacgctacagacctgcgtggttgtcccatacaccagtttatgggtcacagagcttgcatgggacctgtgtgntctcccagggtggagccatcgggcccgattttgggcccttcnggcccccggnttgggnaagaaccggggggntggcncaanatggncttccggnggnggcctttaatgggcttgnggngnancanggggnnntttaaaggncccgnaggggng

SEQ ID NO: 135466 - DNA, 516 bp, Arabidopsis thaliana columbia
  unsure (1)..(516): unsure at all n locations
taaaacccctatatttccatttctaccctttttgcatcatatacaaagcacattacatattcacatatttgcccaagtagtaggacaacaaaacctaacttaaggcctttctttttttgctaacacaagcaaaagaccatttcttttggtatacgaggaaagataagagacagaagaagcctctgtattagctaaaacctgtgtgtaatctcggttcttatcccattggagatcggtgaggaattccctttcttcgcttgacgattctgcagttactagatgtagtaagtggaggtgttgatgggctggaactctggggatttgtaatgtccttcccaattggcaatgctggtaacttgaaccccnggttccattagcagggtcccccttccctttcaaaggcncctggangtccagnatcttggagccaagnnngcaaagnggaggatcnncangggggtnngangaaacttgggggatgggncccctttcccaggcnnggggggccccntncgg

SEQ ID NO: 135467 - DNA, 556 bp, Arabidopsis thaliana columbia
  unsure (1)..(556): unsure at all n locations
cgctatgaaaatctacagtggcctttttcctctaaagaacggggagggggtactttctaggatcgcagcatatgccctatatctcgaggaaagcttacgtggtctcattgcggggccatttcttagtgagagtcttaggtaccagtggcgtaagaagttagaggaagcttcaacatgcaaagcgatgaaagccctcctgcttgaacttgaggaaaatatttgcagtattgctctgtcaagcgactggcttaaactaatggacgattggttgatagaactttctatctttcaaagcgctccagttactgttgggggcacacagaaacgtagacctggtaggagggagcagaggnaccaggctggaaatacggcccnagggtctgatgatgatagccttacttggtggccagggggggagtntcaaaattatccccncaagggagcttttncaaacccnagtaaagaaacacttgcaagggggccgaaaagtcccgattaantnggggggggctnnannccaaaaaacngnggcnntttgaaccccntnaaaanaaac

SEQ ID NO: 135468 - DNA, 560 bp, Arabidopsis thaliana columbia
  unsure (1)..(560): unsure at all n locations
gaattttagtaacaaatcatattcataatacaataacgtaattagaagatttagtagtataatctagtctgttatagactgaaagcaaaaactaaagacgcataaaatttaacccatttgagacattaccatttaacaaaatcgaagtacccgtatcaaataaaaaaaatgagatgagtgcttctcaacaaagaacacagaaggatctgataatccaaagtcaggtatatctatatattgtatattgacctctgtgtatctatattctcatgcgaaagaaaaatgatacaatttcatccgcgactcaagggattatgcttaatgggcctctccctaccaaaatgggttccaaccgggntggcggnaacctggttccctcctacccacttaccattatcatccatcgntttcacnggcatcgctttgtccngggacctgggtaccggcnggggacccatcccggaaggattttgggcgggttgancattctgngcctttggnatngggncgggnaancatcttctgnggagccccgggggcccccctcaaatcggangggc

SEQ ID NO: 135469 - DNA, 482 bp, Arabidopsis thaliana columbia
  unsure (1)..(482): unsure at all n locations
cgttgctagacatctaaaagatatgatcaaaacaaacacaaaagacaatgatcggctaaaagataagctgaagccattattacacataaaccaaacctaaaaacaccatcctatatatggtttacttattgaataacttaattaattaaagagactcgattatctctgcttatttaaaaaggcttcttcacttgcaggtgcaaggntcacacttgcagtcagatccacacttgcaagcatcgttctcagcgttgttactctcccctgaagcctcgtactgattcttcatcgccggtgnaacgcccaagacaaaagtctccagttgtggttgtctcgccggnggatccccagtcaggggacattttgnaacctcccnaaccgggggttttgggaatccggnaagaacgnggnccgnaaagnccggganaaaagcccccggttntncnggnnngggaacccgggttcggggggaannaatcggg

SEQ ID NO: 135470 - DNA, 572 bp, Arabidopsis thaliana columbia
  unsure (1)..(572): unsure at all n locations
tcgagatctccatctgtttcctccaccccgaaatttcaacgatatcttctcgatctgtgcgtcaggatctgggctttttgaaatttgagttttctcctcaatcataacaacggcgatttccgggaatggctttggctaaaacggattcaatggtaattgaaaaagcattgatttgaagcaattggagagggaacatttccctctgcgagatttcgagtatttttcaatggcatcagctactagttcccggaggcaagaggacgttgaagctggacgccgtaagcttgagcagtttcgtaaacgaaaagcagcagaaaaagctaaaaaggcatcacagaatacacaacctgttgntaatagccaacaaagtggccatagattccagatggggctgggggatccaaccccaatngnccnctcaagcaactgggggatccacccccaatggaaccctncccaagggggnnaaattncccatttccggaaacgccatnggntgntggggncccaaaaaangttnccaantttggccggancngggggaagggtttccaaanccnggggnngggggc

SEQ ID NO: 135471 - DNA, 500 bp, Arabidopsis thaliana columbia
  unsure (1)..(500): unsure at all n locations
aattgaaaaaatgaccatggagtttgaaaagaggatgtgtgactatgaacaagagttacttaggtctgcagcggatagtgatgctttatctagaactttacaggagcggtccaacatgctggtaaaagtcagtgaggagaagtcaagagctgatgccgagatcgagaccctgaagagcaatctggaaatgtgtgaaagagaaataaagtctcttaagtatgaagtccatgttgtttctaaagagctagagatacgaaacgaagaaaagaacatgtgtattagatctgcagaatctgctaataagcaacacttggaaggagtaaagaaaatagctaagttggaagcagaatgccagagactgagaagtcttgtgagaagaagttgccaggcccagctgcacttgccccaatgaagcttgagggtgagaccttagcnnggnttgtggtgatncccgccaaagantccctgccaggcccngncgtnagcgcngggggnccngc

SEQ ID NO: 135472 - DNA, 500 bp, Arabidopsis thaliana columbia
  unsure (1)..(500): unsure at all n locations
gacaagcnttgatatcngaattcgcggccgcntttacaatcaaataaaagttaaccaaagatataaaaatggaagtctcaatacatatactgcttcttcaccgatctgtgtcatacctacaaaacttaatagcagtaaaagttttgattgcaaagacctaatgaataaaaaagcaacacnggtaatttcaatgcagtttgatcgaagatttcagtcgtcactaagagaattaccagtcaccatcttcatggattcttcatcttcttcttgtgcctcctggcttcctnccttctgcattggtggttttgactttccagcctccaatggggctcacacnggcttngtncaatggcattttccagattccttggccccccttggnttcccanctggatgaagccgggggtcggtccagacnncaactttcncaacaggttccggngncnaaggccccaacctgggtnaaaaggtccngggtcagngctttgggcccnaagggg

SEQ ID NO: 135473 - DNA, 504 bp, Arabidopsis thaliana columbia
  unsure (1)..(504): unsure at all n locations
gaatgtagagagaccaagatgtatgagttcttggatacaaaataatatgtattcttctaaagcgaactcttgtaaagtagctaaaaggagtcaaaagaatcaaagtcattatataagatataaccagaggaagtacggacatcacaaaaacatcgattgagccatgaccttaaaggaaattgtcgagttgggtttgcaaatcctgaatggagatcatattaatattggcttgttcttcagctgagtactcagctttgagcaaagactccacttgcgtatgagcttccactatatttgtcttgatcggcttgaaaagtatggtccttgttgatggggttttgcaaatagagtttcaattttggcaaaaatcgggaggcacctcttgttggantcgcagcggnaaccttttgaacaanntncaccaccntanctgggggnccggaaanttngtcccttcagcgggntntccnggcngnancaccttggggnnctnntcccggggga

SEQ ID NO: 135474 - DNA, 430 bp, Arabidopsis thaliana columbia
  unsure (1)..(430): unsure at all n locations
agattatagttacacgagttaagccaaacatgttacatatacagccactttctaaactaatctaaaactgaactatcatataggagtttgatcacatttactcttttacccgctacgacgttggaacttacctttcccgtctttgatccatatcgttgaccgcgttcttctcacatggtctgtgaagagacggtacctctcatactcaagcctttgggtaactatcccatttagtagtaactccgagctatatacctcgggncctctttccagaaagggnatacagatagcgngatccncttcaccatgataagaccagnagatctctngggncnttaacntcgnctttagggggaaaatttcccggggnttttttaagggggggccccgaaangggttttnccaaanaaggnggtggngtttaaaaaag

SEQ ID NO: 135475 - DNA, 528 bp, Arabidopsis thaliana columbia
  unsure (1)..(528): unsure at all n locations
tatataacagaagaaagacagtaagcaggagaacttttagacaaactaaaaaacgttttagctttttagcgtcaaatctcacaagtcacataacgcaatacaagactatccaccaaacaaaaagaaaaactaacgacaagacgctctatggaaatttcccagctccaggatcaatttaccacaacaccctttgaaacttttctgaaaaccgcttcttaaaaggtcgaaattgcccctcgtcatttgcacaaatttacagttcctccacaacacaacacacccactcctcctctattattccattcagntctcctccggagncatttggtcaagttcttgggatcccacntaatccaggtggngtttcttccatgngncagtttaaccttcgggaanctgggggngcctcttggggcngggaaagggccggggntttaancangggccntnaggggggnccccgggttnttttggggtggttggaagaaacccccnnggggnacccctttttnnggggggggggttcgg

SEQ ID NO: 135476 - DNA, 547 bp, Arabidopsis thaliana columbia
  unsure (1)..(547): unsure at all n locations
ttcgtgccggggttttgtgatatccggaagcaacgcgcacgacaagaccgagataaaagctcccgatcatgccgatacgcgaaaccacggatccggcgggcaaggaatcggctaagaaaccggcccaccgagagtggtgatctttggttcgcgggtcgttctgttttggacaggtatcgacaatgatccttccgcaggttcacctacggaaaccttgttacgacttctccttcctctaaatgataaggtttagtggacttctcgcgacgtcgcgggcggcgaaccacccacgtcgccgcgatccgaacacttcaacggatcattcaatcggtaggaagcgaagggcggtgtgtacaaagggcagggncgtagcaaacgcgaantgatgantcgcgctancaagaattccccgttgaaanccaacaatttgaatgatnnttccccatcacggtggaatttcaaaaaatttcccgggccttttggncaaaggtttaanccggttaaaaaaacantntcnncngtngggcaaaaatttnggggnncaagc

SEQ ID NO: 135477 - DNA, 533 bp, Arabidopsis thaliana columbia
  unsure (1)..(533): unsure at all n locations
aggtttaagcatgaggtactaagttattgttgtatagtttttgtagttatgaaagtgtaatttataatgacatcatttatgtaagggcaatatagaaatttgaagaacggtcgcgccgaaagttagtcaaagtgtcaaaccctgcttcgagaacttaaaaatttatagtaagtacgattaatgaccccacattattatggatcgatccctaacttctcacgttatttgtccagaatttgtttgcttattgcgcaaattacattaacaggcccaaacaaacgcttgataaagcccattaaacatctggcctaggtccgaattattccgttaatcctaaacgactgcggtgtaactgtcggttaattgtggcgggcaagnaaatgcgagaagccggtgnccacaattcataaatgcnncggtttcgngagagtgcangatcnccccanagccggttnctctnagcaaccncaaattcttcatatcccaattagcccccttggctgtcccggngtncggtcnngngcccgaggggc

SEQ ID NO: 135478 - DNA, 514 bp, Arabidopsis thaliana columbia
  unsure (1)..(514): unsure at all n locations
aactatacaccaaaactgacggctccaaacgcaaaaagaaaaaagaaaaacaaacaaaaaatgtggagtagccgcgtagtgaatcatgagccatatgatcccagtccatgtcactttaaaaacaagttaacttcttttctaccaccaaaagtttgcataatctttaagagccaaagagtctttaccattaaggacctccacactaacaccagtttatagaggcaaggcacaaagtctgcaattcagcattatgtgaaaccgcgatattcttctctgtttcaagatttcactaactcttggattccggtttcccctggtttggcttctggaccaaaagatctggtggtatttggcacggacttcaccttttgaagactggaagccatccaaattcccacccggtgnaaaatccaactttcccnnggaaanggnnccccnaggttnnccaaggggggattttttttggccgggnaaanngcgggtcncnanntggggggttcncttttttnggnna

SEQ ID NO: 135479 - DNA, 501 bp, Arabidopsis thaliana columbia
  unsure (1)..(501): unsure at all n locations
gatcctaagagtcgggggaaacccgtctgatagcgcttaagcnganacttcgaaaggggatccggttaaaattccggaaccgggacgtggcggttgacggcaacgttagggagtccggagacgtcggcgggggcctcgggaagagttatcttttctgtttaacagcctgcccaccctggaaacggctcagccggaggtagggtccagcggctggaagagcaccgcacgtcgcgtggtgtccggtgcgcccccggggcccttgaaaatccggagaccgagtgccgtcacgcccggtcgtactcattaaccgcatcaggtctccaaggtgaaaacctcttggtcgattgganaatttttggcaaagggaattcggnaaatggntccgaaattncgggaaaaagnttggccttnnnggntggnctcgggggnccaatttttaaaacccgggggttnaaaggnanttnaaaagtttttccgnggaaaaagggnccccctttnccg

SEQ ID NO: 135480 - DNA, 569 bp, Arabidopsis thaliana columbia
  unsure (1)..(569): unsure at all n locations
ctttttttttttttttttttttttttttttttttaagatttcggaaacgatttacgcaacaagagaaaattagagtaaagaagataataaccgcaggaaaacattcattcatataacagaaattttaaaacagttcaaaatgagaaaacaaataaaaagcaaaaaacaggaagaatgtgtgtgtagatccgccacctccgatcaagaacccaattacgagaacaacgctctgacggggagaaaacgaaacaagaacacagacacgcgaccaaataccaaactattgtaataaaactaacactgtcctttgattcacctgcggcagatagagttttgagggtggttcacttcgnacccttcttgacggnagccttgggaaccttggcccggttggggccttcttggcanacncttgntaacaccggctgnaacagntgcctcatggccccnacaggggaacggccaagtggggggncnccagagnagggcccccaaccatggggttgggtggggcacntnnccatcccagntcccatntttaanaantggggcctnccaanccntttngc

SEQ ID NO: 135481 - DNA, 479 bp, Arabidopsis thaliana columbia
  unsure (1)..(479): unsure at all n locations
gtgtaggggaagcaaaataccttctttgacaaaaactgacatgcaacaacaacaaacattaacaaaaagggctgacgaaaatcagaagtaaatacagagcttctcggctatgctattctgtaccatgttacatttttccaacaattcatctaatctctcactctctctcttctctatcgtcttcttctctgccgcttctctacctttacttctccatgatctctcggctaactcatcatcctcagttatcatcagatcaatacctcgacaagcttctctggtctttttccaacatcggattcctcnanaacctctatgntcatccgatgggcattcctggnctccaacaaatccctgggggttttggccancatatgggagggggngggttcaangggggtgaagctngntttccnaacatttcatgnagncatggggaantttgggggggcaaannggggntggngnacntcaggcca

SEQ ID NO: 135482 - DNA, 536 bp, Arabidopsis thaliana columbia
  unsure (1)..(536): unsure at all n locations
catttgcctttgagagttttaatcttcaatttttggctacatcgagatttggttctgaattttggcatctctattagtagtgaggccatttcctgatttggatcataaagagtggagaaaaatcttgcctttgtctccttaggattgtggcttgatcaggtaatgagactatgtgcttcaaaattgagacttgtttggtgaaagaagcggatgaaaaagtttctgtgtacagcgagaggaattagtggtttctgcttacgaatgatatgagaggttcttggtacaagagtgtttcctctgtttttgggctcagaccacgggatcagangggtgtaatcctccattggttggtggtgtggcnccaagtaccaaatttagcacccattgncanccaaatccggatgatcctncgccaagtncgacactgngccnaccattaaaggaccaaagggggtnaagggccaacccccgtnnnaacctgaccgnggcccntcctanggnnagtaaaaagtcccttggggaaaaaanaannangc

SEQ ID NO: 135483 - DNA, 512 bp, Arabidopsis thaliana columbia
  unsure (1)..(512): unsure at all n locations
taaaagcgtcaggtcatacaaagatcccaagataatgaaacaaagcttaaacggagagtagaaaaaccatgagataatagacgaaatagtaaaactagtgacaactggctggaagcagaagctctctctcttcactcctctctgtagtctgggttctcctttaagatgatgaatccttctagtattggcgacagaggaatgtatttgtccgtggctagttcggctctctctccagcagccaggagaacaggtgtggagtgtgtctggaaaccggttatggtcttgggncgacccgcttgcccaaccacatcaactgcntgtcctacccgnactggcactganagtggcttcaggttttcatccactgtcaacatcanccttggttgcatcgccaaaacgngggagttcagncatantgganttcccgagntgattggttcatggccaagngtnattnaaaagggccctnttcacantnggttgnggtanaanaccgtcaantggaaggggta

SEQ ID NO: 135484 - DNA, 656 bp, Arabidopsis thaliana columbia
  unsure (1)..(656): unsure at all n locations
gaaattcctgggntacccactcgtccgttttttaactagcttagctcaaagtgtttgcttaagacaagaagaacatggcgtcttaccagaaccgtccaggaggtcaggccactgacgagtacggaaacccgatccagcagcagtatgacgagtacggaaatccgatgggaggaggaggatacggaactggtggtggtggaggagctacaggtggccaaggatacggaacaggtggccaagggtacggatcaggtggccaagggtacggaaccggtggccaaggatacggaaccgggaccgggactgaaggctttggaactggcggaggagctaggcaccacggccaagagcaactccacaaaggaaaagtggtggtggcttnggaggaatgcttcaccggtccggatctggatccagctcttagctccggaaggattattgnccaaggaggnagnangaanaagggnntancccaaaagatntaaggggaantttccagggcatcatgattagccttggcaacctcaanccnttggggggcattgggtccgganttatcctggtggcacggtggttgcccccnnnaaaagggttttgcaaatttagnaactcccggggngccgtaacnttnaaaccgngnanntttaaaaaaaaat

SEQ ID NO: 135485 - DNA, 559 bp, Arabidopsis thaliana columbia
  unsure (1)..(559): unsure at all n locations
aagaaaaggaactgcctgtatgaagcttgaagagtatcggactgctaaaacagctcttgaaaagggtgcctctatcacgccgagtgaatccaaatttaagaagttgatagatgaatgcaattttctaatcacagaagaagagaaagatttggttcaaccggtgccttcgactttgccttcaagtgtgacagcaccaccagtatctgaacttgatgtcacccctacagccaagtacaggcacgagtactaccaaaagccagaggaagttgtggtaactgtttttgcaaaaggnatacccaagcagaatgttaacatcgactttggtgaacnaattctgagtgttgtgattgagggtcctgggagaggatgcgnattatcctccaaacccgggattgtttgggaaggntatacccggataagtgncaatatgnaggattgtcggcccaaaattgggnacctgccttgnaaaagccgntntaaaccccatgggngtcccnngngcaccgggaaaggggcaccnggttttcccaaanccctaatgnncnnccnggggggtccc

SEQ ID NO: 135486 - DNA, 636 bp, Arabidopsis thaliana columbia
  unsure (1)..(636): unsure at all n locations
ggacccnncnnntttccttgnnganagatnanggacctggcctgnaatncctgggctacccacncngtcctgagaatgaccctgcaacaacccnttcacgangtttacattgcgagaccgctaagggcaattggctgctacacctgctgacgtcatcgagcaccctaacgcatatgcattcgtcgtggacatgcctggaatcaaaggagatgagatcaaggttcaggtcgagaacgacaatgtgcttgtggtgagtggagagaggcagagagagaacaaagaaaacgaaggtgtgaagtatgtgaggatggagagaagaatgggtaagttcaatgaaggaagtttcagttgcctgaaaatgcagattttggacaagatctcctgctgttttgtcatgacggtgtgttgaagggttacctgttcagaaacttccctccctcccggaaccaaagaaaccaaagnccaattccaagttcaagttgccttgaagtttggttttgtgatttgtgtgtttggattaaccaattttggttttgatttatggggttttgatgaatgaaanccggaatnccgtaagggaaatgggnggttttggnccaaaggtgaaannaaaagtttgncccggtccaaaaaagc

SEQ ID NO: 135487 - DNA, 538 bp, Arabidopsis thaliana columbia
  unsure (1)..(538): unsure at all n locations
taatccccagaatctccgatccacccgcaaatttagcaattttctgagatttgatcatttgggtcaccaaaaaatcttgtctttttgatctgggtttaacgccaataacatatgggaaacattagcagcagcggtggtgaaggtagacgccgtcgacagcgaaaccatacggcggctccaccaccacctcctcctcctccttcttcttctcttcctccacctccaacatcatccaccgcatccttaccacaaccactcttgggctcccgtggcgatggccagatacccttatgctggtcacatgatggctcaaccgactccttacgttgaacaccagaaagccgtcacgattcgtaacgacgttaatctcaagaagggagtctcttaggnttgaaaccganccggataatccggggtggtttntcggcnccttaaggttgatggaacggtttcggaagnttagggcatttctttggaaanatccganttggaacnccagggcaaggngantttggcccntcccaannttggaagggtg

SEQ ID NO: 135488 - DNA, 338 bp, Arabidopsis thaliana columbia
  unsure (1)..(338): unsure at all n locations
tcccgtnnccngggtcagcccactgcagccnggtcatatgcttgtntcaaagattaanccattgcatgtgtaagtatgaacgaattcagacngtgaaattgcgaatcgctcattaaatcagttatagtttgtttgatggtaactacnacncggataaccgtagtaattcnagagctaatacgtgcaacaaaccccgacttatggaagggacgcatttatnagataaaaggtcgacccacgcgtccgcagttaataaacctcagttcgtggcgccgatctcaagtttcaatcgctttgcttttacgctttntnnttttgtttngcctagaacttgtttg

SEQ ID NO: 135489 - DNA, 238 bp, Arabidopsis thaliana columbia
  unsure (1)..(238): unsure at all n locations
ggaanaatgtctaancctgtgaacnngatgatcgatataacantcacactantatatcctctgtcacagtcttagaccagctacaggcgcaacatcnccaccgggacccttagctaaacgcncctctcnccnagcatgcttcctttctcggctagccttgttcntcgcccncttagcctcaaacaggatcagacagagtcttcaccctaagccttctcagcctttgacttgtggatac

SEQ ID NO: 135490 - DNA, 285 bp, Arabidopsis thaliana columbia
  unsure (1)..(285): unsure at all n locations
ccagggnancccacngcgtccagantgaatggangcangtggagtccangcgctccatgtacaagactgacaagaacaagtacgagtccacagcacgaagctggactcagaagtatgccatgggctaaatggaaaatcccaccnactaaattatctctttatgaagaaaaaaatcaggcttaattgcctatgtatgattcgatagncatcccctttgtggcccttnnaactttccggaagnccagggaccaaatggangangggccntggtttaaaacggaacca

SEQ ID NO: 135491 - DNA, 341 bp, Arabidopsis thaliana columbia
  unsure (1)..(341): unsure at all n locations
ancctaatcnctcttcnttggcttgaaagcaatgatcgnnccacctgagtcttggagccttagccaacntctttggagaggaagagagattggagatgatgaaccatcataatcatcatgatgaacaacaacnccatggttttcaagggaagataagattggagaatngggaagaacaagtgttaagccaccaacaagcttccatggtggctgttgacatcaaacaagagggtaacatnaacaacaacaatgggctatgtcatatcntccccgaacncaccagcccnaacaaatcttgtgttacaacaacagaccacaacaaaccngttatnaatgaatgg

SEQ ID NO: 135492 - DNA, 277 bp, Arabidopsis thaliana columbia
  unsure (1)..(277): unsure at all n locations
gaacaaccggcgaatttttccggcgaagagatgaatggaggaggcatctcacnaccaccaggaacagacngctccgtctcactgaagagcatctttcttcttcgatgagatgcttgaaacagtggcacaaggctgaactcagggtctcttcttggttacnagttttcgttggattgncttaataatcatgtttaaatcgaatacaaagaatttgatatccatatttgaactgtaaagcttgtnggctcaaagggtccccttggancgcacaagttaa

SEQ ID NO: 135493 - DNA, 231 bp, Arabidopsis thaliana columbia
  unsure (1)..(231): unsure at all n locations
aaaagcttgaanatattgttccatctncccacaattgnnaccagttgattgatancactgaggatggcntcgtgagccttctcactgacagtggtggcaccaaggatgatctcaagcttcccaccgatgatggtctcaccgcccagatgaggcttggattcgatgnggganaggatattgtggtgtctgtcatgtctnccatgggagaggagcagatctgtgccgtcaagg

SEQ ID NO: 135494 - DNA, 583 bp, Arabidopsis thaliana columbia
  unsure (1)..(583): unsure at all n locations
tccccggaactgntgggtaccagnnggcggnaccctaacccnggggaagnttncgggcccnaattcngccccccggnaaaagggcctcanaatnnnnagnngcnccattgaccaaggaccgggncactcgtagtngngtacncgnggctgctgataaactcgcaaaccatgcccattgggggcaactggatctcgaaagccactctgtgtctgtggttggacagcatcaaccagctgaaaccacctccgatgaaggcaggttgggtaggagaaacacgtgacatgtnccttagaccaacacaacccaccaccaatgcctactctaggaaagtcgccggatgacccctaaaccaatagtaactcaagcatgcctcttctgagcaaatattttactttataaactctctaataatcttatacatcatcagaaaaaacaagtctccttttttctttttttttcgacggcgcgtctttgcctcgtcaatggttctgcttttgttttcttttcttaatttctgtattgttaaggtttgttttttgcgtgtgtgacaatttggtttgcaataaagatcgacttgggtct

SEQ ID NO: 135495 - DNA, 312 bp, Arabidopsis thaliana columbia
  unsure (1)..(312): unsure at all n locations
ccagggcagcccacagagtcccaggtaacnatgcacatttnangaatgctcttaggtttcttggaggaagctaaggaagcagtgcatcaaacagttcgcgttatcnttgaggatcnaggagttcaggaatnacntgtcaagctttaccagaaagaatggngcgagggacaggttaccgagtacntcgtggcaactttcggtgattatntcacagatgtgaaaatgtatntcgaagaaagatcatttagaagatttgtcgaagcatgtttggaagaaacagtcgttgtctatgttgaccatcnccgaactcag

SEQ ID NO: 135496 - DNA, 287 bp, Arabidopsis thaliana columbia
  unsure (1)..(287): unsure at all n locations
ctcatcactcaaccggagctcacaaagctaaacaaaaaaaaagaacaagaaaccatcgtgatcggactagctgctgactctggctgcggcaaaagtacctttatgcggnggctcaccagcgtctttggtggcgctgctaagccaccaaaaggggggancctgattccaacacactcatcagcgnnacgaccactgtgatctggcttgatggttancattcttttgggtaggtacggtagggaagagcagaaagtcacgnttttgnnccacgngcaatggctttgatc

SEQ ID NO: 135497 - DNA, 387 bp, Arabidopsis thaliana columbia
  unsure (1)..(387): unsure at all n locations
gttttttnttccacngngtcctgaagacaaccntgaagaagaattggaaagaaanggacaaaagggaagcagcaattcccgcagcagcaaagacaagaagcagatttcntcacgcagcagcaaatacagtcgtgataagtttgattggacaacacaaatgtctgttcnagctgcatcttcttgaatctgtgtggtatgaccaaggctcttgcgtcttccttgctccttggtctcncncnctcctctttccttggtttataaaataaaaaggatttggaaggtgnaaaactttttccccggaggtttcaagaacgnactaattggttggttgggaacgggaaattggantttnggttttnaanccccaattttacccaacttttaatt

SEQ ID NO: 135498 - DNA, 285 bp, Arabidopsis thaliana columbia
  unsure (1)..(285): unsure at all n locations
ccnggccngnaccnccagggnagcccacanngtccnggatcattganaagaatctttgcgtnacngcggcacatcnncctatccgagagattcttgaaaaagaaaagaaggagagaagtgtngctcaagccgaaaaccgagcaatnccacagctatatagcagtacagacgttagacccttgaacatgaatgatttcaaaaccgcacatggatcaggtatntgcgagtntggcgtctgattcatcgaacatgaataangccccagcaatgggacgagctctatgg

SEQ ID NO: 135499 - DNA, 500 bp, Arabidopsis thaliana columbia
  unsure (1)..(500): unsure at all n locations
ctctctttccgagtcaccgcctctgaccgacgttcttctacctcatggaacgttgctcctgccacgtggcagtttggtcagactttctccggcaaaaactttcgagtctgaaatctgaaaaaccacccaaaagatgttttttaattttattttttacaatggaagaagacacaaacaagaagagagatgagacattttccagccctgggttttccctttaattttcttgggaatatnccggtggcttgtggaaaatatttccgtttttagtattattatcagcaaaatttcttttaatctttgcgatttacgagtgatttgtttttcncttggttattttgtccnttaattatttcgttggtggcacttcgttctgcaataagccaaagagtgtcgaacagtcagtgangagccgaatggaccgtgaatgggcattgggcaagttnctgaaaaaaaccgaaaacgccaattcataaaaaaaaattaaaaaaaangggggc

SEQ ID NO: 135500 - DNA, 566 bp, Arabidopsis thaliana columbia
  unsure (1)..(566): unsure at all n locations
aagagatntngagctcatcttcttctacttcttcttcttttacatcggttccaaagatccttcgccaccatcttcatcctccggcatcttctccaccatgttccctcatccctccaagggttctgcaagagatggttcaaacnccaaacatggctcacaagctcaacgtagagaatctttaaatgctcaagaagacagagttgagccatgtcatctaagctcttctctttacnacggtggtcaagacgtatacgctcgatccaccaccaaccaaacttaccctccagtcaaaaatgaccgtagaagaagcggagaagatgacgctaatgggncagnacccggcaagatgtttcaagagggaactggtgggcaanggtccnctttttnactaaaggancacttcctttaggtcctttggaaaaccccccnggnaanacctggagnttaagccagggcnaaantttnctttnccaagactttgggaaaaaaagttttggggaaaaaaagtttttggggnttccngggtaggaaaaatcnggnatcccccgggngggggncaaaagtcc

SEQ ID NO: 135501 - DNA, 403 bp, Arabidopsis thaliana columbia
  unsure (1)..(403): unsure at all n locations
gaggnaagnaagcttctcagagagatccgtggaggagaattcgatctgtttgtcggagcttttgtgaatcatcatcatcaatnggtttgttggaagcttttctcaatnggcttcgtagcctcntcttcaagcaagaaatggagctttctttgataggacntcaaaatgcaggaaagacatcacttgtaaatgttgttgcaacngggtggatacagtgaagacatgattcctacggtcgggtttaacatgaggaaagtaacaaaaggnaatgttacaatcaaacnatgggatcttggtgggtcaaccaagattccggagcatgtgggggaccggtacntgtcgcgctggnttcnggccaatggggaatgaagtttnannccgcnanatccngggaaacccaaag

SEQ ID NO: 135502 - DNA, 231 bp, Arabidopsis thaliana columbia
  unsure (1)..(231): unsure at all n locations
ggaggacatnggtggttacgatgaatannacctccacgcaaaaccaagctctcaagatntctctcggtgtattcaccgctttcagcatcggtgttngggtncctatcntcgcagtcgttttccagcagaggaagactcaatctggttaantccctcaggatgctcttgttcacagcttgaataatttgtatgaatnctcaaacncngcttttgcaagagagtttttctttc

SEQ ID NO: 135503 - DNA, 375 bp, Arabidopsis thaliana columbia
  unsure (1)..(375): unsure at all n locations
ttttttttctggccngnantnccngggctacntgacananccggcctgctcagccangcctcatcgccatcagccgaacgatagggtcatgcggcgacgccccctcaggcgtcgacccacgcgtccgcgcatccttgaccatttcttccttgtatatccttttgtaaagnccaatcattaccgtgctttttttttctttctatagagaaatacngtcgtttgtaaatgtttgatgagaaagtagaaaatatttgtggtttccttggaccaacaatgaaaacnacggtctgatgacaggatttgtagttgttgggtcgtagacgatatccaaacaacttgtccctttatattttgggattaaacttgttgctcatt

SEQ ID NO: 135504 - DNA, 482 bp, Arabidopsis thaliana columbia
  unsure (1)..(482): unsure at all n locations
catagctgtttcctgagtgaagcctctctttagtaatttcctgttcctcatcagtcccaagttcagtgttcagaaaaaacgaatctcgtcccatggcaacggctaaaactggaagcctggaaagaggattccaagnggacgcgtgggtcgacccncgcgtccggcttaagctgttgtgctagcccacgaagctagaaacttaaaattcgttaccctttcaaaaaggtagctctcagttttggtgttgatcagagagattcaccgagagccatatggttttatgtctccgatgggattgggttcctcctgcaagtgtcaaagtgatncttgtaatggtnctagnactaagattctgatgaggccaaaacaaaaaaactcatgnatttggtttcgagtctgnagtgatggnggtattgacctgntaaaaagatgttccttnagaaaacccgggttttngtaagngaatnaagtttggntttcct

SEQ ID NO: 135505 - DNA, 579 bp, Arabidopsis thaliana columbia
  unsure (1)..(579): unsure at all n locations
cccagtcgggcttttnaanngtancctnccctnaagcccgcnggnaancnccttncaaggaaggcccagtttnggaatgtcctgangcncagggggatgctgcaaaaggcttcatgggatgnccctaagggccgtnccttgaatcnctttggcncttaatcngcngtcacacccccattacnaaatgtgcaatcccaaccaacgntaaaggttncactttctccctaaaggaaaagtttcatcgactcctttcccagtcggtcagcgcccgttcatgaagctatttgtggatacacaactcttctctgtacatacagatctcgttctttcctttatccagaagctataggatgactacatgtatacgtaaaacaagtcttggtggtggaaacacaatacctcgcgatgaaagtgccatcgattctgtatttgtaacttactgtttgagaatgttgtctatggaaaaaaagacttccatagatgagggtgatacagagaaccatcatttctttgtatcctccaaccgcaaacacagttggtgttttaactcttaagccaaaagatcttttatttgtgcnt

SEQ ID NO: 135506 - DNA, 483 bp, Arabidopsis thaliana columbia
  unsure (1)..(483): unsure at all n locations
aagaaggtcntatnanancccccttggtcaancccttggnccaagttaagggtttccccccntcggggccaaaagggaaggnccctttgaanccccccccncgntgagcccntttttggnntnccccacaggccaaactccttccggngacncccggcgatgatgttaccagngataacttaatgtaaaaggacgatgaaggngaaagcaaccagtggcgcgataagtcttctaagtgaaaaggtgcttgcaaaacagcaaggatcttggcgtgacagagctcgcaagtcatgaaattcatacatatgtattggaactatggaactcgtggtggttaatctagtatatagttgacaaagttttgatcgtatgttccttgtagaaattttggtttgaaagtgtttgcgatccatatagattgcccatcgatggaagatataattggatcatgttttttatccagatattagtttattngtncct

SEQ ID NO: 135507 - DNA, 457 bp, Arabidopsis thaliana columbia
  unsure (1)..(457): unsure at all n locations
cggagaaggtgtcntctgggcccagncgtcgtntctagggagagttagggnaccagcgtcgnctcgacgtaagngtaaggnggaaaatggcatcatcatcttgngcgtncaaagccgcgtcgtcgtggtgagaagnggagngttagtaggaagaacaaacaagnacaagcttgttctgttatnttaaggatttttcgaaggttattatcttgtgctgctaccgttgatgttgttgatccaaactaaatgacttactttttctnaaaatnataattagtatttggaatttttgtttctttgtnttaatagtganccttaaatgcatggtctnttaattatatttacttttttgtttgttgtatttatacttgtaatatatagaatttttcatggtatattttgtttttgtatgaagatgtgtgtatataaactcttatattgaaactattangcnggc

SEQ ID NO: 135508 - DNA, 393 bp, Arabidopsis thaliana columbia
  unsure (1)..(393): unsure at all n locations
agcngnaattaaaanccntctncccnaatttccangtcatctccgatatccaannncatgccaaagcgccagtccctctgcggncaatgttcctggtccccgggttacatccctttgctaaaaggtggctcctatacaaaaaacaagcgaagatcacatgtcaggtattaaagtttttngaatnctcaaatttnatgtgtaaagtctgttgcatatacctatactgaactcgaagataacaactactgtaagaattgcccagagatagtggccgctgagctctaatcctgggatctgaagatgnggatagaggtaagtgtcagagccaaacccatcttcgccgagaatatcatcttcctcgggtcagctgttcccatctcccatgccgtnncc

SEQ ID NO: 135509 - DNA, 500 bp, Arabidopsis thaliana columbia
  unsure (1)..(500): unsure at all n locations
ggacnntnaaacgggttgaanccagggattnccnccattaaagnattctttccnncaagnaaantcanccaaaggctccnaacaatcatccatacntggactcgtnccaccggattcggnctaagattagtggcgaaaaacgtttaaaggttctcgggtacaagaattgcnaaaatngtgacagatggatntctctggtggcagaggatggttgcagagccggttaggcactgattcttacaacttctcgtttgcacaagtcttgtctccatcgcggattatcccggcagcttcgagaagctttggcactaggtccggaaccaagttccttcctagctccgactgaaaacagaggatatataaacagttttacaagtcttgtttagtattcctttatttctcaacgagagatcttttgataagattttcgaattattacttacttgtcttttacattgatgatcatatatggaaaagctgaagcnattgtgcttcgtnng

SEQ ID NO: 135510 - DNA, 265 bp, Arabidopsis thaliana columbia
  unsure (1)..(265): unsure at all n locations
tcccgtgaaaagcctgcaacagtggtggccccgtggnnacggtaaangaatggngtancaggctatctttgtganccaactccagaagatttcagttcngcgatggctagattcatcgagaatcctgagttggcgaatagaatgggngctgaagccnggaaccatgtcgttgaaggncagaagttgaatcagtatctcgttgatgtcgtatcaagtcctaaagaagattgagattcctctgtttngtnatcatngatcgttcgtg

SEQ ID NO: 135511 - DNA, 330 bp, Arabidopsis thaliana columbia
  unsure (1)..(330): unsure at all n locations
cggggtggataaatcctgctcccccaaaccccgggattnctncctatcctactggngaatnccatttaggngcctctaggccttggcgatngaaccaatgtgttataagctgctttngtgatttctctttgcnggcttcttgttctgagggngctgagcngagngatttcataacatcagaagagataaaacaagcnttattcagaaacgccggttatggtggaagctgcttgtactttagatgttgttttaattcccttgtgngtttggtttttttttcctnggggaaaacattatgngttcngttgtntaaacaaaaganggnnattt

SEQ ID NO: 135512 - DNA, 487 bp, Arabidopsis thaliana columbia
  unsure (1)..(487): unsure at all n locations
gccccaanccnttaccgtttngtcaanccntttcatcttcagggctanaattnnttgncgtggaacccngttttggaaactttgancccaaagaaganctgcnaaagtccaaanctcgttgacccgcctgagagaaacaccgttggagtacctaccggtggnttgggctnccancagattccagggcttgataatccaggtgtttggtttatgcactgtcacttggaagtccatacaatgtggggtttgaagatggctttcgtcgtcgagaacggggaaacacctgagctttccgttctaccaccgcctaaagactatccgtcctgttaagaatctgagatgggaacactactctgattcntcgtctttatttgttaagtttcgctgatgatcccttctgttgatttgtgtctgagattgtttcctatggggctgcataacataatacaccccgaaattgcataaganatganattnattnnnnnng

SEQ ID NO: 135513 - DNA, 535 bp, Arabidopsis thaliana columbia
  unsure (1)..(535): unsure at all n locations
tnacagggnccgttccaggctttctcaagcccctcantttctctagccgacaactnnccccctngtncagatcngaatccgtcttcaagggcnttagagngccccatgggaggtcggncccccntgntagttgcncaccgctgtccccccttaagaggtgttgattgcattggtgtgattcaaggccggccggattgtggagcaaggcagcccattcagagctcgttagccgacccagagggagcttattcaaggctgttaccagcttcaaacacataggatttgaagcttgatcatggattaaaaacaaaaaatcggtttgtgtaattttttttatattaaaactttaatttggaagatttctatggactataacgataatatgaataggtgtagataatgaagcttttggagtgtttatgaaggttctttaattaagggttatttttttcgcattttgcttatgtgcccgttttggaacataagactgaactatgttttcgttatgtttttaatttatgcctcgaaacaaaac

SEQ ID NO: 135514 - DNA, 276 bp, Arabidopsis thaliana columbia
  unsure (1)..(276): unsure at all n locations
ccaaaggcctccggggcctggaaaacccaaagnctccncccagcncctgaaccnccaaagcatgtatgcaagcccccttactncaacagttgtgatgttgtgtctgttactacctatgaaagtggaagcggctgcnccattctttgngncatataaagtcctgtatttagccnatactaattcatcatgttctcatgcttttttgtttatttctttttctcaaatatgaanctctgttgtttgtccctcccctntttntaattagtcgcttctttg

SEQ ID NO: 135515 - DNA, 230 bp, Arabidopsis thaliana columbia
  unsure (1)..(230): unsure at all n locations
gtgatttcgaagtttggaannaagcggcgagagttgggaataagtttgatgtgaggaagagtgagnntagagtaaggattgaaggtaaacagaatggtcggaaagggaccccccccccccccgcggagatattcgcggtggganattttctggnnctctacacctgcttgaattngatgaattcttgngtgtttcaaatttctatgttgtaatatatattgttggattct

SEQ ID NO: 135516 - DNA, 259 bp, Arabidopsis thaliana columbia
  unsure (1)..(259): unsure at all n locations
tggaccccttcacacacacactcctcantcntcatttcatcattgcttaacccanccggctngtctgattatacagngtgagcggatcgagattttttcctgcgnctgtgatgatggtgaagtgagttttttttcttttctattattattacatttgtaaaagtnattaccggaaaaaaaaagaaaaaaaaaaacagatctcattctgtataatataacgccttcttgttttttgcctnttatcgatgangntttacac

SEQ ID NO: 135517 - DNA, 492 bp, Arabidopsis thaliana columbia
  unsure (1)..(492): unsure at all n locations
taanccangancagcttcngggagttttccgntttgcccccatccantttgaanncatgggaggagntaattgtccaggaancccggcaanccttttattgtctgatctttaagcttaaggncagtcattgagaatgcncgccagatacttaagggtgattagaagaatacggatcatttgacaagtatatatggagttttgtgaagaataaggcgattgtgagcaagttcaggtaccagcgacaagtacctgcaaaaactccaaaagcagaagtgataagtaaagatctagtgagaagagggttccgcagcgtcggaccaacggtggtttactccttcatgcaggcagcagggataacaaacgatcatcttaccagttgtttcaggttccaccattgtatattcgaacatgaaaggtatgtctgaaaagaaggacttcctaaaacttgttaaagtccttttatgttttgtaaagcctccaatttgagtctc

SEQ ID NO: 135518 - DNA, 428 bp, Arabidopsis thaliana columbia
  unsure (1)..(428): unsure at all n locations
atgaacccanaagggcctacccccaanattatccggnatnatttatttaaaataagggccatgtatattccctnangngnntttactatcagntcttgtattgttattagttattgtaataacgttatgataaaagacttatttaagcctagtcacctaatgtgtatttgttattacctattttaaatcatttttctttaaaatgctatttattgtgataaaaatatcaagtactgaaattgtaatatcgtgtgtttagtgcataaataggttacttgaactacttgtttgtaattttttttttgactgtattgatttttaattgttccataatattaaataaaatccattgaaaaaataaaaataaatgtcttgtagaataacattacagtatacatcattataaatattaaaatacctaggcgttc

SEQ ID NO: 135519 - DNA, 332 bp, Arabidopsis thaliana columbia
  unsure (1)..(332): unsure at all n locations
tcaagnttgccaaccagngtttnaaccgngtttcccgntaatttcccantttccagctagnnttgccacctcctcnttcatcgggttgtatcaataaaaaatccatgtttgggccnccattagtgaaaccataaggcnctttttggttaatcaccaaactcaaagaaaaactgtaacatgtcaaagttgtaattctttctncctttttggaaccatgcgactttttgatcataagtgtgggttggttcctttttaatgctgcgtctgtgtcaccatactttctgtttctcagatattactttcttcttttttgggnttngtttnnannncag

SEQ ID NO: 135520 - DNA, 510 bp, Arabidopsis thaliana columbia
  unsure (1)..(510): unsure at all n locations
gtnccgaagacttcatggcccttgntccaaaggttgncgggtntnggacgngattnttagccggaacacttngngaancttccctcttcngttgtgcccggaaagnnggttaancntcggggnttgataaccacggcggnctccgtttagtcagggatnggaacancaacgacagaaggttaactgataatgcccgttgttcacaccgagctcgatgaccttgtttggttctccaacctcaacttatgtatatgtcaccgaaccggaccgattcatttcgacccttggtttttaagtccgaataagacttcttagcaaaaaaaaaaaaaagttccaataagacttcccataaaatatgcttttatgatttctattttatatgtatacaattggtttgttcattcgttcgttcataagttgtttcactgtgattagttggtgtaaatgtcacttaactttacaaactaaaaacaatgtcacttaatatctgtatttggttgttttaaacat

SEQ ID NO: 135521 - DNA, 248 bp, Arabidopsis thaliana columbia
  unsure (1)..(248): unsure at all n locations
ccccctctcaccatttccgngtngggcatcctngattcgggatgtnccttgatccaaggaagggttcnccagcgatgncgagctggaggaactggatcccctcttacatccatcattggaaaccgtatcgctgtcatcaaatgaatatgctcctagaggattgtatttaacaattagctatctttatttctggacatttcttatgtttctttgttgtttttcctcctcaataaaccatcaaagatact

SEQ ID NO: 135522 - DNA, 301 bp, Arabidopsis thaliana columbia
  unsure (1)..(301): unsure at all n locations
atttggctttggtgncgggntcttagctgcaggtgtcttgtcccactcacctcagacagctctacttttatcctggtnccatctacgttaggaccggtgatcttcatgtcatggcggngaanggatcttgcggagctgtgggaaggacctgcattatctaatcccattgngaaatctcatgaantagagatctgagtttattatcaatcaagatgattcngaaatctaaaacatattncataaaacaaagacgcttagtaggaaaacatcngatcaagaantantgtattcttaagttcnc

SEQ ID NO: 135523 - DNA, 284 bp, Arabidopsis thaliana columbia
  unsure (1)..(284): unsure at all n locations
ccatcaaaagatcccaagttncggacgatntgagtttccgagcgtgacattgtgaagacttncgngttncgaaaatgcatggtcgagaagagacncccgngggaaanccncncgatnttacggctttcattaatggaaacagcacgtgactctctgtncgatgttacgtagcttgattatttagaaacggcncgtgattagtgtttaacttgctgtttatttattttatttttcttttcccgcgaataatgaaaactcatgaaataattaattcgttttcgggt

SEQ ID NO: 135524 - DNA, 237 bp, Arabidopsis thaliana columbia
  unsure (1)..(237): unsure at all n locations
caatgcctaatggaggatgatgcataaggaaagactacnatgggttcnttaagttatgngaaaatgatgaagaaagnttatgatggtgaggtatagtattagcnaaagtaataatcntaatgaaaatttctgatggtgatgaaattttgtcgattnggngtgaataacctttgttcttngctgataanttntantttttggtngagttcnaaaccaaaaaaaaaactcttttgtgct

SEQ ID NO: 135525 - DNA, 203 bp, Arabidopsis thaliana columbia
  unsure (1)..(203): unsure at all n locations
taccttttgttggttttcccatttaaaccccctanaaggtgntgggaacagttttgtntacttataaatgcccaagtgaggggttgatcgatcccgggacttgtctncaactcttgtgtaccatatatnaatatccttggaacccttgatactccntaagcntaatncatntggcttcgaaaggaacangtgggccaatgttg

SEQ ID NO: 135526 - DNA, 552 bp, Arabidopsis thaliana columbia
  unsure (1)..(552): unsure at all n locations
ttgntntttcccgntntggttcccccaacccggnttcctcgtggtttacgtcccnttngcccttgaaggcttnttccatttattccggcgcctttnccatttttccccncggaggaaaaaccgggnccaatnttaatcccggtcaggaacccngggggaaaccccggcaaaggcccccnggaaaaagccccgncggaaccaggaaaggggatatcttgctctcggggagataagccagccaccaccgctaaaagtagtcggtcgatgcccggaagctgagcccagtcaacgcttctaaggaagccagcgatgccggaggagaagccgaccaaacaccgctgataaagccagtcattgtcggtcaaaaaaattgaagctgctttgctctctctgaaagatgaggagagagaagagagagaaaaccattctttttctactactctttttttatatttggagatttagcattgctacgagatgaatattttctataaaaaaaaaatatatttattttctatccaaaaatattttataatccagttattttatttt

SEQ ID NO: 135527 - DNA, 528 bp, Arabidopsis thaliana columbia
  unsure (1)..(528): unsure at all n locations
aggaccntttccctnttccccagnttntcnccccctttggggancctgtcccctcggtcccgtccggattcccggttggccccacngtccncaggnancgggccaaaccggcccctgagaaaaggggggggacccttaaaattctgagatcagtggaggccagnncantgccgntnagattgggaagganggccntaactgtgaggaaccaaagncaaatcgttgctcaaaattcaagttanccccaatgaagaattncgaaaggagccggtcagagaatcacgagggctcgaagaagagttcttgtgtacaactgaagagatcagagacagagagncctgctgatagaattgtttctgatgatgagctacgatacaaaatcgagtctttcattgctagacagaggaggaaccaaaaggatgaagagttctgtattatctaaaatgtataaatactaaaaagcaaagaagaaaaaaagaaaaactttagtttatgcaataccattcacatatatttgtgagtgtttgt

SEQ ID NO: 135528 - DNA, 353 bp, Arabidopsis thaliana columbia
  unsure (1)..(353): unsure at all n locations
ggccnngctggnggcctcccnacntttccccgnatggcncccattggtgnttnccntctacggncaggaccgtgaggagtnagcggttttttccctccttttttcccttacggtttaattgganncaataaatagttccgcagtgaaattgacggataattctttttttggatatgctcggttttggtttttttttatctttcttttataattaagcactcttcttgaatatacactcaggtgatttttttcttttcttttagtacaatccagttaaaaaaacaaaaaaacatataaacaagttgatatgatgtaaatctcttagacattagcaaatcttagataaacaagtt

SEQ ID NO: 135529 - DNA, 564 bp, Arabidopsis thaliana columbia
  unsure (1)..(564): unsure at all n locations
ttggcccggtttttggggggctttnccgggntttccccccanttncnnaaccccccatttnnnaaacttttnggcccccgggnatttnaccttcccccttaagctgttgcccnaaattgggggnttcccagttnagccgttttnncggcaaccgnttaggcannctttcaggttcttctccccaacaatggaagcctgggcccgcttgcttcattccaagcccgcttggaggaggntccattaaggaggaaactcgaagagtctcttaaagaagaagagaatccggttgcaggatgctttggctaaagaagcttgtggaagttcccccaagcctcggtgctacaatatacgcatcacggtttgctgcaaatatcttgcgcacaatacgtaggagcggatcagtaaggaaaccaaggatgccggaacgaatgccacctatgctacttcagaaaccagcagagccagatttcagtgatgattaattaattagcatatatgtatatgaaagattttattgcgaaccatagagccnatatataaatataagtctttttataaaggngt

SEQ ID NO: 135530 - DNA, 331 bp, Arabidopsis thaliana columbia
  unsure (1)..(331): unsure at all n locations
tccnaggggaccgggttttggtaaaaagtggttggnttccctaaagctnaccnagnaggaagnaagaagngttgaaaaagaacccaaagcnagagtgtagtgattgatcttcccatggaggttgagatcgggttaggaggagagtctaagtgggagtaanctgcaaccagagggagtgttttactctttaaaagaagggncagctatgtctgtaacccaacggctagggagtattttgatatggttaaagancntaggagaggaagaaagtggtttcgatcttctttataaattgttttctgcactgttgagaagctntatctaattttnt

SEQ ID NO: 135531 - DNA, 455 bp, Arabidopsis thaliana columbia
  unsure (1)..(455): unsure at all n locations
tttcccccccanaangttgtnttcanggccccctgntttttccccccntagttcccaagggtccttngtttgnatgggccccccgaagccaagggtccntctccaaaattccggngncttccantttcccccgctttancttcccctcttcttcggncttaaccgtccagggnttattggctgaaatgtggcaacctgangaaaagtccgtgtggaagccctctagccggaatttgcaaatcttagctgcacaagagtaacttaatggcacaagtggagctaccngtgtatagtttttcatgaatgcatctcccgcaagtgtagcaatactcatcccatagtaaaagttaaaatctgtatttgtatggtagtatattcccatggagtngttaaagataatttctgactctgctttgtcacaaataaaagtatgtataatcagtaagattgatngg

SEQ ID NO: 135532 - DNA, 578 bp, Arabidopsis thaliana columbia
  unsure (1)..(578): unsure at all n locations
acggtnctgccccgngtccgcgtcttaggtggccaggcncttaagncccgggcttccggcggtncnaaaagcccaattcatgaccttgctgnntntccaagtgggtccntggaccggcccgtcatcacatgggacccgttnccgtccatcacngctgcttcaagcgatcgttccatggttttanccnccggatggattgtatgaattcttccagcaacgaagaggttgtngctcacgtgacttggttcatcgaaaacgttcctgaaggcgatcctgctcaatacctcattgcagagcttctctctcgtgctgccaccaagaacggaatggagtttcatgatctgttggatattcctcaaggagatagaaggaagtaccatgatgatgtctctgtcatggttgtgtcacttgaaggaaggatttggcgctcgtctggacaatattatccagagagaaaacaaaaattcaatagataaattaaccaaacacaaaaaaaaaaaaattaggttttggcttattgttttcaaacaatctttcaatttcccggaagttcaaaaaaagaaggcctaattctgttt

SEQ ID NO: 135533 - DNA, 452 bp, Arabidopsis thaliana columbia
  unsure (1)..(452): unsure at all n locations
ccctgacggncttttgcntcggaaggaacccnttttactgaagcttgacggntctnttacttcggtggaaagnttttccgttcaacggngcagtcntttgcccggattgctaaaccggttttaaaccggnaggatccggcgtatggatccaacaggngctgaacattcggacggccctctgtttcttccccaatccaactcacaacagatcacaaactatttttgcataccctgcaatagaagatgagagatcgcagcaagacgaatcgttcaagaagatactcaatgagtccttaacgttccatttctggaacagcgtaacttcctcactgatccctgaacctgagagccttgtggctaagttccttgatcatagttgtatcagatgctccgatgtattataaaactatttttttgataaaatcatttatatataaagattacatttttgc

SEQ ID NO: 135534 - DNA, 468 bp, Arabidopsis thaliana columbia
  unsure (1)..(468): unsure at all n locations
agggnanaacnccgtgtctnccaaggatccttccccccctctctacccccccggcatcaacggaagcccttaggttgtggcgttacccgcctcccacgtcaaccaaatactatccaaggcgttactcatcttccacccagcttccagcgtttaggtcgcatgagccaagagactaataaggagccctaataactggccgtaccagattgatgaaacccaatgtgcaagatcatgtgagtctcgatcttcatctctgacttcttttattttatttttttatcatccatcattgctgtgatatatgagactcgctgatcggtgaagccaattcttttgagagtgttggagactgaaaaaaagaaaaagaaaacgagaaccggtttggtgtgtagatcatcttgaacctttttgaggttttcacattctgagtttatattaataaagggaataatattttggttaattagt

SEQ ID NO: 135535 - DNA, 402 bp, Arabidopsis thaliana columbia
  unsure (1)..(402): unsure at all n locations
ccccccccccccccccncgnngggnggttttgnttncccccccccccccccgnaggggggggaatttttttttccccccccccccnaaatntntttttnggnggganaaaggggtcctttgtccatgggccaacngccgccgcccccagaggtcctgnttcncctggaggtgtggttcttgagaagcacaagacacttaaatcagtaggaaatttgagcattggttccactgcctccatggcaacaacagttgggagaaaggaatttaacagatttgtgtgatttcttttgatttgaacatttttctttgggttgtgttgattttgagtgttgtaacataataaaaggtaaaacagaaaaacaaaaaaaaccggaggatttggtttgaagtagaactcttag

SEQ ID NO: 135536 - DNA, 207 bp, Arabidopsis thaliana columbia
  unsure (1)..(207): unsure at all n locations
ttgaagaaggggggnttgaacccatcttggttgaggntttttcnnagagncctcacattgtcagaagtgttctccccccgtgtattttgcgttgcttctgttgattgtgcggtgcttaaatgtctgaactttgtcnccattggcaatggtggcaaagcttatgtatcncctntaagacncaaaactggatgaaataggatttgggcc

SEQ ID NO: 135537 - DNA, 301 bp, Arabidopsis thaliana columbia
  unsure (1)..(301): unsure at all n locations
attcctaatagatccntcaaaagagaaaccgtcatggaggatccaccacccaagttagcttggggacatagcacatncgttgttggaggaacnagagtatnggtccttggtggtcacaatggtgaggaatggatacncaatgaattacatgaacncngcttggctagcnggcaagactcggatctgtaaagacnctttccttattcatttggtttgtggttacgtatctgtcacatnccaaacncttatgacagaagcgtgtgtacatagtaaatnagtgattgttgtacgctttagatat

SEQ ID NO: 135538 - DNA, 231 bp, Arabidopsis thaliana columbia
  unsure (1)..(231): unsure at all n locations
tccngggcancccacncagtccngaacaaaacncaacataattgtgttatnacccaaaagngcaagtagcttgagtccatntctaggctacctatcaaagggtggggtggtgccaccnccgtgctgtgcaggagtcaaaaagttgaacggtatngctcaaaccacacccgnccggccaacaagcatgcagatgcttacaggtccgcttgcaaaaanggggttaatcccaag

SEQ ID NO: 135539 - DNA, 595 bp, Arabidopsis thaliana columbia
  unsure (1)..(595): unsure at all n locations
agtcattccctctgcgccttttggccaatgtcctagccttttgttcctcgcccttatccgagaacatagattggactaatattggtcggttacattgtcaaatgccgtggtgggaggatgctatggtcgattttatgattagcgggggctataacgtcgcgtcacacatcaaacatattgaccataagacgctcgtggtatgcagtgagaacgatcagatagttagcaaccagctctcagttagattgttgtgtgagctagcaaatgcggttttgcgggaagtaccagattccggtcatcttccacatgttgagaatcccaaacacattgtgaaagctgatatcagatttcgccagtgggaaagccccaattgnattccatataactggaaaacnctgcttaaagctcaattggattggcnncanaggaaggggtttnaccttttttnttnttaattaaaaaatcccanttaatgggtaagcccnngatnnccctggggggggaaaaaaatggattnggtttgccaatgggaattggaccccccaaaaaaaaaanggggggcctngggccacctcgaccggntcgngganncttt

SEQ ID NO: 135540 - DNA, 278 bp, Arabidopsis thaliana columbia
  unsure (1)..(278): unsure at all n locations
agtgactgaaaagttcgagcaaanccaaattacgcaaaaaccgcgatgaccaccgtaaactgaattcgaattctaagagacgaaacccangtttcttaaatcaagaaaaccaatcttagngaggaagattgagngngttcagaacttcnatgttgatgcnatttttatacnatattatgttactcatctttgttctttttttcttttacgttggnntactctttgaattttcgcangtattttttaaaatttctatttctngtaaccnanatttcatt

SEQ ID NO: 135541 - DNA, 231 bp, Arabidopsis thaliana columbia
  unsure (1)..(231): unsure at all n locations
gtccgggacaaggctaattcttacagcagnggctgtgcccccattacaagatgcgctagagncncaancgacntcancccatgaaggtaaganccaagaaaaagtaaattatatgattaagcttttgcattgctgttgttatatatgtgtttttgacataagaattgttntaatatatgtaactctgccnctagttggttntcaatgttcaattnttgngatctntaaatt

SEQ ID NO: 135542 - DNA, 487 bp, Arabidopsis thaliana columbia
  unsure (1)..(487): unsure at all n locations
caaacttcccgtttnccntggggtcnnnanngcaatnggcaactttgaccggaagntnaggagcttcaggccatccaatgaggnaggcatttcngcngctattactttccctncttcaggcaaacgncggaaatgctgccatggaagctggtcgagatgcagagtcgatgagctcgtatctggattcttgctcaatgatgtcaacccatttacaatctttccatttcagacaatgattacccagaagatctcaagacagaactaaacctgatcgagtcacagtttnnccagtccttccaagatctgctgaaactgaaagaggatgcaatagagaacgctaagcgaaaatggattacgaaaaagcaaaaagcagttaacatctcttgattcaaaaatattttactcntcttttggtcttcaactttgctgagatcggtgtgttatacatttgntgttttggatatatatatttgatntgatttgatac

SEQ ID NO: 135543 - DNA, 229 bp, Arabidopsis thaliana columbia
  unsure (1)..(229): unsure at all n locations
tccatcaccaccacttgcagcttnttggntcacaagttggagctctncctctggccttttgcggttctttcantccccgtttcttacggttgctgagatttcagattttgtttgttctctctcttgtctttagttcgttccatatttgcntaatttataaaaacagaaactgagannatcttgtagtnacggtgttattgtccgnataatccnattaggggnttctcat

SEQ ID NO: 135544 - DNA, 415 bp, Arabidopsis thaliana columbia
  unsure (1)..(415): unsure at all n locations
ggacccccccatnccccggaggccccgttattggaaaatnctattccgattttttttngtngaccttagggggttnatgaagncnggaccncttgccaggccaatgnggggcttgtncagncctcttgggccggtctgcgttcncccacacnccntttttagganggatgatgatnctgaaggaggaatcagggtgtgttgttcctgaggaggctcattgcgaaggtattgtagactgcctcaagaaatcccattacaagttaataaattagaaagtaaactaaaaaagattatttgtatcagctcatgaacaatagtacttgggaataaaggaataatgtgaaattcccatcgttgtgctagtgtgtgagagaatcaaataccctaatgatgtaaatgtaantnnangngctat

SEQ ID NO: 135545 - DNA, 534 bp, Arabidopsis thaliana columbia
  unsure (1)..(534): unsure at all n locations
ttttttccccccccgggtggaacnttcnnggncggggggcgaaaccctttcnccttggaaaatccggnaaccctttcccccnccngggntggnnnancttttaaaagtttcccatgaccccnncncttttggccccggaattgttccttgggaaaggnccngtggttccacctccagggnaaggattgcccttttcgccttaaccgcgtttcgatcctgtggccgatatggtggangccggttaactctgcagctgatacttggagacaggatgagaggaatgtctgaacatgagcgtacttgtggttcaagaactgcaccatgcgactcatgtggtcgatctgtgatgctcaaagacatggacattcaccagattgctgttcatggcaagngtagctgatttctgtatccggtttccaccaattgttattgaaaactgatgtgtcaaatgtttgaacagagaagcatcgaaccatttgtattatttatgacaccatttgattcttcaagtcacaatccganatattttcacgt

SEQ ID NO: 135546 - DNA, 529 bp, Arabidopsis thaliana columbia
  unsure (1)..(529): unsure at all n locations
ccgtcngagnntgagggtctccccnggntntnnncagatatggcctggtcgggatttcgttgggngattncgnggccacaaggctggcctccaggaaacccttctgnggcgnggccctcattnccaggttacccggaggaaaaaccagtctgccattcaactgaacaacagncttcaaggngnctggatcagttaaggcgtgaaagcaaaaagagccaaagtggtggtatccccattcatgtacggttcttttggtcggactcatcggtctaattttgggatacattatgaagaggacataaaccacccaccttgaaattaatccctcacccgccacgaaggaaaaaaaaaagacttttaactcttttcagtcggacatttttttctcttctgtatttgtcaatttcgccttaaaaaggtgtcctagaagatttgtgtttcgtaactcagtttgctatgtttttttcaacttttgtaatccaaatgactttgcgttggttctttctccactaattctcttatatttctt

SEQ ID NO: 135547 - DNA, 354 bp, Arabidopsis thaliana columbia
  unsure (1)..(354): unsure at all n locations
aaaagtgttctgnaccccttattaaccatttnatatacaatccgccngtcaccaaagnangtccaagcttgtacaaccctgattcatctngtgangcaagcntggaagacaatagcttaataagggattcaacagaaaaagactgggnatcgccgtctcccttgtcagatacagagctnctagagaaggcaaagaagagagngtttgtacaaggtttaatatcatcagcnatatttgatcacatttacaacttctgagtaagatgaatctttgttgctcttngttaagtctttgtatatgaaactctcgcaaagtngtctgtactctgtngtataagcnnatgagcttctgttt

SEQ ID NO: 135548 - DNA, 229 bp, Arabidopsis thaliana columbia
  unsure (1)..(229): unsure at all n locations
tgttggttnctcancattccaggaccnagtttcgacccatgtagctaagaaganagaaaaagtaatnntcttatcttaatatacccccttaggaaaanagttatactagtatatcttagtagatgagagaaaatatcaccccaactgtttctatagtncgaatgcccagttgatgtagtccctgtttatcccccgttatattnancaatatgngaacnattnattatat

SEQ ID NO: 135549 - DNA, 204 bp, Arabidopsis thaliana columbia
  unsure (1)..(204): unsure at all n locations
cncccccggattctttaagaaaaacttggattggtgcagaaagcatcatcagattattacattcatttggggaattttatttttcnggttcaaaagaaatgttttatcnaaacaggatttttaagccccggataagnttaaaatcatttcttttacatttgtaattnttgccattgttataattcacncannttgcttcttctt

SEQ ID NO: 135550 - DNA, 363 bp, Arabidopsis thaliana columbia
  unsure (1)..(363): unsure at all n locations
caaagaanntaccttttnccctcnanaacggcaactcaacaatgtcggagaggcccgtntacatgccaanatgtgatggggatcgatggccntgattgtnggattttgttgaggcgattataggngtccacgacacgcatgatgataagaccaccaccatcatcatcaccattaccatcaccttccaaggatgatgatgttgccnttacaagacctgngttttcacagaaggngatttcttttcttctcaagcttctctctcagtctttttagggtttgattttcttattgatttaattattattctgggngtnttaccnnatngttggnnttgtanataattataaatttatttctttttnc

SEQ ID NO: 135551 - DNA, 303 bp, Arabidopsis thaliana columbia
  unsure (1)..(303): unsure at all n locations
cctgatgcttgtggtngganaaccccctgagaattntggccgttaaagaaggcgttcccgtcatcgtaggagagatggagttgatatggcatgattccgccaattggctcgagccgtcccacngattcaaacaagacttcggcagactcagtcagatggccccaatggnaaggaagtgaatcagattnctttttcggtcattggnttganccggtcgcagatcnttgaatcaatttttttagatgtactattntaatgtngngatgacgtntttataattntctntatatacatttttgcaac

SEQ ID NO: 135552 - DNA, 457 bp, Arabidopsis thaliana columbia
  unsure (1)..(457): unsure at all n locations
agcgacctaaaggccccctcnnntccngggcctcccgtnnttgttgncgangagccggtgccggtgaccggatttnccggcggcggatccggccgtggagaaggaggtggatagtgtanagattgagctggtttttgaggagaaatgtttatcnccgagagtgattgttaattcttccctcctctccaaaccgacggcgatgatgacntggcngtggagagagaagtgaaggcngtccccggattagcttcacnctttaaggaaaagccctaaataaaaaattttggngttttttttttaatttctttttctaattttcaaggtaataaaaatatataacagtaaccatatattcgctttttttttttcttacatttttgtagtttgttttgacctctcttgtttttttctttacaaggggtttttaccnctttgtactttagtnccgtccncggtg

SEQ ID NO: 135553 - DNA, 412 bp, Arabidopsis thaliana columbia
  unsure (1)..(412): unsure at all n locations
aatcaagacnntcttctttngccnttggcgtgacccccgacgatnnattgaaccccgatgngatttgccagaggaaanggagataggagcatgcattggctcagctcgggtgcagccccgacagtgccagtggtgttcataggagggcagcttgttggtggagccaatcaagtcatgagtctccatctcaatcgctcccttgttccaatgcttaagcgagctggngcnttatggctttgacttcncccccccccnccnnncnaatgacttaggttctgagaaacttattaatgtgaagaagaaaagtgaaaacatatacaaggatgtatgtatgagtttatttctatgtatatctatctaagttttcaaaagatagattatgcggttatcataaaatcagcaaccgttggnt

SEQ ID NO: 135554 - DNA, 242 bp, Arabidopsis thaliana columbia
  unsure (1)..(242): unsure at all n locations
gctngaaaaatcccggnttgatgcnctcaggttcagaagatcactcnaggtcctgnctttacctcaagagattactgataagcngaagaaacaatatgaataaaaaagtaaaggctctgttcgttcatattcagaagtaatcgagtaacncagaaccnaagatgacattgactttaaattttagttnncnctgagcnataatgtaaaactgtgccnctannnnnacaaagcttttttcaccc

SEQ ID NO: 135555 - DNA, 462 bp, Arabidopsis thaliana columbia
  unsure (1)..(462): unsure at all n locations
cggggcgtttaaannnccccnggcccccaaggtnaaaccnccctgaaactggccttnnatctttccccctttggcccngatcttggaaagatntnggggnccntcccnttaccggggattatgtggcccctaacaaagcttagggcgattccataaacctgccaggngtatttggggttttcaagtaaggaatgtggcccaaggaacttagtggatgcgttcgagctcccctgatcatgttactcgagcnccaattgctatgcagtccgatgcttattcccngtatactcaagttgttggattctaaaaacacaagaacaaaacatatatcatcacaatgatcttttaattcgaagcaaaaaaaaaaacaatttacagggggtacaaaagaatctgcagtcctttgtatgtgtttttagttgttgtttgttttcacaggngaataaaaaaaaacagngtnat

SEQ ID NO: 135556 - DNA, 264 bp, Arabidopsis thaliana columbia
  unsure (1)..(264): unsure at all n locations
ttgaagaaaggtggcggccagngtcaactgatgcaaccgaaggaangcaaaaggtggcggtggtaagangaaagggaagaaagggaggcaaatcgatccagctcnccccccccccccaaagtcantagcaatcgaattcttntgggcgagatccncacatgtcaagattagattctcatacttcggngtataggtccttttcggccagatttcttncatcncatncgngcacncgaaatgaaatannaatgttttttaggtnnt

SEQ ID NO: 135557 - DNA, 218 bp, Arabidopsis thaliana columbia
  unsure (1)..(218): unsure at all n locations
gattacnggaaaaccccatcgnttcggcccaaacccagattcttccacaatacgagttacagacaaaaacatcgaccgcatagnttcaccattgaanctcaattgcttgttgcaaacttgtatatatnaagatacatagtgattagtccgtgaggtaattgtattaagnccntnttattcctcgaattnaanctnncctttcattctctgaancgngt

SEQ ID NO: 135558 - DNA, 399 bp, Arabidopsis thaliana columbia
  unsure (1)..(399): unsure at all n locations
ttttttgganccnntcccgntgggacccccnaaccccgaaccnctttancccccgtttcccnntnctcggatgcccccatggcagcccgagcagttcttcaattcccatattgatggggaaaccatattggggtatccggttgacggtgncncntgggaagagatgtgagntccaaatgtgatgacattgtttctaagatcaaactggtgatggaggagactgaagtagggaaagagattaggaagaaggctagagaggtgaaggagttagtgaggagagcaatggtagatggaatggtcaagaaagtggagaattgagatagtagatggtatatgtaaacgtcttatttgnnntcnnntnttnatgaaatgaataaaaccatgtccggtnnttntncc

SEQ ID NO: 135559 - DNA, 201 bp, Arabidopsis thaliana columbia
  unsure (1)..(201): unsure at all n locations
gagaattttatggaggcgtttggantatttcngagagcggggaccgtattagaaaagtaactttttgngcnattacatnttaacgtagtttggttatgttttttgtttgtttgtctgcntgngttttttttttatgaaccntcagataatcntcatcntcatccataatatatcttgtgaataaagntnntgagngnggng

SEQ ID NO: 135560 - DNA, 385 bp, Arabidopsis thaliana columbia
  unsure (1)..(385): unsure at all n locations
ttccttggtgtgcttactcagacagtcttctctatgatgaagaatttgccgggtcccgcaanggcctntccagaaaattttcaggtncgncnanagcgctgagccagagnagaggaannaccangnacggcagggnnaatgtatgtnccaggacacgatttgaagaatttcagcgatgaaatcnttcaaacttctggaccatggagctcatatttacttttgcggacttaaaggaatgatgcccgggattcaagatacgcttaagagagtcgctgaagagcgaggcgatagtctttctgtggttttcgccatttttncnnctgaataatcntgtcnattaatggacncagtgtaactcaaccaagaaagtcaatcatncgncatg

SEQ ID NO: 135561 - DNA, 260 bp, Arabidopsis thaliana columbia
  unsure (1)..(260): unsure at all n locations
taaagcgccgctgaaaaagcttttgccattggcctggccacacacagtcgtatttttcaancnaaggatgttaaataagagaagagcctttctcngggtnataacgtaacatcatttttatgtgtcataaaaatctttgatgagaccngttctcacctgaaggtgaattactagagngttttatgaggntaatcncgaaaacttgtttttttcgcctcataataatcncacatgattttgngattatatcatttgttatg

SEQ ID NO: 135562 - DNA, 212 bp, Arabidopsis thaliana columbia
  unsure (1)..(212): unsure at all n locations
tcacccgtcttgttgagaccgaanncntttgttgggtttcagaaaagtccccnncctctttcatgggtcgttcaggggatncggacaacccaaactgtgagggctgtctttattatacaaagncaaaattgtttttcgtttgtcctttttctggttgtaataacaatatttaggtgaaccttaaattgttagaaaacagngtttgaatcntc

SEQ ID NO: 135563 - DNA, 334 bp, Arabidopsis thaliana columbia
  unsure (1)..(334): unsure at all n locations
gccgggtgcttacatgtacggcaaggaaaaaancaacgtcaaggccgtgtaccntaagattaactggtgcaaaccacaggaccagagttggtggatgcaatcacatgntgcattaaccnatacaaacaaatgttttntcntcancaaggaaagtcacaagctgatttaccgtcgccattgtttcacactcacatcntancctactttttgtcacacaacacatgcagttttgtgcacacatagaccnccncatgctaaacaactctattacncattgttgcagttttgaccacacattagtacanccagttattgttaacanntntngttttcc

SEQ ID NO: 135564 - DNA, 427 bp, Arabidopsis thaliana columbia
  unsure (1)..(427): unsure at all n locations
ccantggngaaggnggttccgctatccgttggataccaaggntcngnttgttgnacgnnncgtcnctctacttaccccaaaaggngcttcaaccacctgcnccagttactttctggaagaggcnncaggccgaatgggggatgacgaggagcncccngtgatccaaggaagtcgatcccacgagcaaaatatgaatctcaattcagtggttaatagattgaaggaatgacaaaaagcatacaaatatagaaatccaatatgggaggtttgtgtgcttcttaacatagtaagatttcaaagttaaaaactgatttttaatttcttggctgatgtttgttttcctcatatatagaaaagagttaggtttgtgttttaactactaacttgagcttagtgtgtgatttattgtatctctctctatcttncc

SEQ ID NO: 135565 - DNA, 285 bp, Arabidopsis thaliana columbia
  unsure (1)..(285): unsure at all n locations
ggtgcttaccaaacaggcatcaaacacccacttacatacttctnctttatctanattcagcatactgctgatccaccgagagcccccccccnngcataaatgtgcagagaagtatggagacgattgggtgaaatacaagacagctgtgccgtatagaattataccatatgtgtattaatggtcggatggcatnntagaaactcgntataatggcgtacataagttgtatatnaatnatatactatccaatagtacgnatatatgtgcacaacntcngntcgnnng

SEQ ID NO: 135566 - DNA, 565 bp, Arabidopsis thaliana columbia
  unsure (1)..(565): unsure at all n locations
aaacagcagcaaaccaaagaaatatataaaaaaaaaaaggaaaggaaacagaatgtttgtttgtcctgactacacagtattacaatgcaaaagcacttttgttttgtagtttgatatcgctctctctctctctctccctctactttcgtttattgccttctcctcctctgcaagtgtccttgtcttcttggagagctttagaagacgtccggattgaatcttgctggcattgagttgccatgttccacttgctgcagctgcattctcaacgcgtaattgttcacctccagatttctaagcttttcctgatactgagggaccagttgcttcaaaagtcctagctgatgggttcgcatcctcccaatggcttctggcggtcatgctggntaagcaacagacggttgaggnctgtggtggccctcancaagggcccancngtngtgaatgcaacttcnccccttggaattggttccaggttttcaagnggagggnatnaaaactcncaaggggcaagggccttggngaagaantttggacacngaccaacggtgaaaacccccggnna

SEQ ID NO: 135567 - DNA, 354 bp, Arabidopsis thaliana columbia
  unsure (1)..(354): unsure at all n locations
ttgatttggtccatagatagttcgagggctgcacctgattcttccggctcggtagtnccatggtcgaaatcacacttcttgaccttgatcnatggaaagnccggtacagtgaccggttcggtatcagatttactttccggttcggtaaagagtncgtgtttgaaaacagagatggagacagcggtggagtaagagttcatnccgtaggagacaaatcttggaatgttgaacttagctgcagacnccgatgtccaccagaggaatccatcagagaccacggncgcgtgggtcgacccacgntcggggttttcgtgtgtttggagaanaannannaccagttnaaatccggggggg

SEQ ID NO: 135568 - DNA, 684 bp, Arabidopsis thaliana columbia
  unsure (1)..(684): unsure at all n locations
aatacctttttcagttcaaccggagtaatacacgccgcgcagaatnagnagcagagcaccttaaactgtgccgcggtaatatccagcggagacagatactcgttaagcaggcgatctttcttctgattaaccatatggattaagcgacccaatggaataatttcattgaacagatcgctggtacttttcacattagttgccctggcaagtaattagttgcaggggataatattgcccaggcaagtataagtcaaatgaatgaattgaccgatgccacgttttgctaaatcggttcaagttttgttcaatgcgatgcaaggctaagctaaagagtgacactttatccttggtttacccccttanacttttccgctggataanccccagattccncaggggttaccaaccaccaatggttaagnatttggtttaaagccaaattgggccctggggcttgggtggtgttncctgccgggtaagctaaccccatttaaccaacttggccgcggttaatttcttnggcctggcaagggaacaattgaacaggtgccgaaccggnaaccggcaagnccgnttnatngccccccgggggaccggantttnccaaccannnatgggngggggantnccnccggggaaccttggggaatgggaannatttgggaatttcnggnncccggggtt

SEQ ID NO: 135569 - DNA, 594 bp, Arabidopsis thaliana columbia
  unsure (1)..(594): unsure at all n locations
gaagaagtctaagaagtgaagaggatatatagtgtgaagctatatcgatcatcagttcacggattagacttcttcttcggtacagctgcagttggagcaggtgtagcagcaggtgctggagcagctacaggcgcaacatcnccaccgggacccttagctaaacgctcctctctcctagcatgcttcctttctcggctagccttgttcttcgccctcttagcctcaaactgatcagacagagtcttctccctagccttctcagcctttgacttgtggatacnctccatcaagacacgcttgttcttgaacacattacccttaacacgcatgtacatntcatggtacatgtgcttgtcaatcttcttcgtctctctgtatntcttcaacaagacngcctaagaacaacgcatccnacgcatccacttctagatccgcgagcnggncggtctagaggatncaaagcttacggacgcgtgaatgngacggcatagcncttccaanngnggcacctaaaatcaaatcactgggccggcggnttncaacggnggtnccangggnnaacccctgggggttcccaacttaaccggcnttgna

SEQ ID NO: 135570 - DNA, 421 bp, Arabidopsis thaliana columbia
  unsure (1)..(421): unsure at all n locations
anagccganttcaaggtccttgaanataaccacgcgacattcgtggaaaccgttccattcaaaacgatcgcaatgttcacaattttccaaacaacttatcncttaacttgctttggtctcacgtggataccaatcgctggagttatgtncccnctactgatcatgtttctgatacccgtaaggcaatatatcctcccaagattcttcaaaagtgctcatcttcaggacttagacgcagcagagtacgaagaagcacccggtttaccgttccatctcggcagtancggaagctgagatggggattcaacaggcttcggaatccatggtggattccngagaattcttgnatgaagtttattaacaaggaagccngagggnnantttaggncccccangggaggccccaaaggttnccaagttc

SEQ ID NO: 135571 - DNA, 554 bp, Arabidopsis thaliana columbia
  unsure (1)..(554): unsure at all n locations
ctctctcttagccatgtttgggtcaagaggtctctgttgcagcagaatctggaatcgttctctgtttctcaaacgttcttcaaacttccgagctagtttctctacgaaacgtgttgggacccataatggaacattccactgcgacgaagctttagcttgcttcatccttcgtcgttccaatagattctccgatgctcaaatcgtccgaaccagagatcatcaggttttggagaagcttgatgcggcacttgatgttggaggtgtgtatgatcctcagagtgaacgttatgaccatcaccagaaaggatttagtgaagtgtttggccttgggtttaatactaaactcagtagtgctgggcttgcctataagcattatggattggaaataatttccaaggagcttcaacttgagcagagacatcctgatggccttcgattggttccaagcggggacaaaaactcattgggnagnaaagctttgncaanggaccnccaaatggacgggcaacccccagattgaaanaaccancnggggaaggntgaaatnacctanc

SEQ ID NO: 135572 - DNA, 488 bp, Arabidopsis thaliana columbia
  unsure (1)..(488): unsure at all n locations
gacaatccntggagcttttgtccaaagaagccctaaccgatgaaatgggtctcaagtcactgacagatagagaagtctgttgcttcatgatatcttgcaagaacnctaccaacatcgatcaagtcattgattggcttgtaaagcactccaaatcatcgaattaaactttaccccaaaaggagagaagtcaactctctgcagttgttgatctttcttgtgtttttggtcatttgatgatgatgatggtgattgtggaagaagacacagctttttttccttttaatcccggtggaaaaaccaaggatttgnccaatggtccnctggccngaatccttaacctggccttcctccggcggaagntgggctggngntccccgggaaannnagatttgaattggggggtcccccctcctnaagccanggtgngggccncntccctccgggggcaaaaaaaaaaaaaaaagggggggcggccnaaangggncaag

SEQ ID NO: 135573 - DNA, 376 bp, Arabidopsis thaliana columbia
  unsure (1)..(376): unsure at all n locations
cgctctttcttctttcttactgtctcagatccgccattgttacntcttcagttcttcttcttcaacaacaacaagaagtaataattagggttgagaaacntcgaatnccgaaacaacagagagacgtacnagttttagccatcttcttttcctagtttcatcgaacttggtgtnacnncaataggtcgacccacgcgtccggaagcatctatcggagatggtagtntcaaaagcactgattgcaaaaatagacagaccatctggaattgtgtgcntccagatcgcaaagggcagcaacgagattcttaaacnccgtggggcagggnanttttggggaagcctcctaganccttgtggaaangggtttgncccccaa

SEQ ID NO: 135574 - DNA, 590 bp, Arabidopsis thaliana columbia
  unsure (1)..(590): unsure at all n locations
ccgggttctcgggtcggatcttctaagtctagctagggataatngctactgtcactactcatgcctcggcctcgattttccgaccttgtacntcaaagccaagattcctcaccggttcttccggtaggttgaaccgcgacttgtcgtttacatcgatcggttcatcggccaaaacntcgtcgttcaaggttgaagctaagaaaggagaatggttgcccggtttggcatcgcctgattatctcaccggcagtcttgccggtgacaatgggtttgacccgttgggtctagcagaggatccagagaacttgaaatggttcgtccaggcagagctggtcaacggacgatgggctatgctcggtgtcgctgggatgcttttnccggaagttttcacccaagaatcggaatcataaatgttcctgaagtgggaccgattcagggaaaagacagtattttgcatccgccggcnnacccangcggccgaaaacaaaaatggncttcnatggggngngtacaccggngancccccggnggtnctttaangaaaccctaaanggcaantgggcccaaccngcntaaatggncctnnaaaa

SEQ ID NO: 135575 - DNA, 502 bp, Arabidopsis thaliana columbia
  unsure (1)..(502): unsure at all n locations
ggttaanttgggnacccccagggtttccccnggncncgccnttgaaaanccgccggcccggtgaattgaatttngggngccccctntggaagggcctatgactggccctccgtttacctgctccccagaancctccggaaggccaaccacaagccattcttaactcctcctgtgctccctatactggagctgctacctttgagttgatgaacatggggatcaacttttttaacggtctacaacttgttgatctagggaaagtgagngatcattgagaatcctatcagngtcttggaagaagngtgtgacaacttgtgaaacaaaatctggattgctttcatcttgtngttgttgcngctgcaagaactggctgtccaaaatcccttctaagaagngtgatttggtgtaatcttgcaaactcttctgcttctgaaccaaatccnatattctctgttatttgcttttgttctttgtttcntttgtttccaggactntgtgggct

SEQ ID NO: 135576 - DNA, 402 bp, Arabidopsis thaliana columbia
  unsure (1)..(402): unsure at all n locations
accccgttgtccacaaagatcaatcaactggtggacgggcaaaacccttgtcttcgacgatacccntcagttcgacgttaagaaccnggattgttcgcttaagtgtgagatatttatnatganccgcgtgaagaattatcttgaggatcagttacttggattcnctcttgtacctttgtctgaagtgattgtnaggaatgggaaattggagaaagagttcnccctttcntcaaccgatttgtatcacacncctngcgggttttggtcgagttgtcncnctcgtacggcagggagattccgccctgacgtggatgcatatccccngcgggttccaacnagcgggatgaagaaccggagttgggncccaatccgaggtttgaatgaanagtgaagtttttggga

SEQ ID NO: 135577 - DNA, 658 bp, Arabidopsis thaliana columbia
  unsure (1)..(658): unsure at all n locations
ggataagagccggaagctcatcgccggtgaacggaactagggtttcattcatccccaaattgataacaagaaaatggctcatgcttgcgtctctacatcggcttcttctctcagattcacagctggattcgtctccgctagtcccaatggctcctctttcgattctcccaagctttctcttcctttcgagcctctccgttcaaggaagacgaataagttagttagcgatagaaagaattggaagaattcaactccgaaagctgtatattccggcaacctctggacaccggagattccgtctcctcaaggagtttggtccattagagatgatttacaagtcccttcttcgncgtattttcctgcttatgctcaaggacaaggnncaactcctatggtgcaagaaacggtttccagagtatcattaggcagctccttccaatataggnttattcgctgtggtgggtgtgtggatgccgaatgggaacataattggagnccaaccccggaacctggtgntggtgaccaacaaagggaatgcatggatggaaancccnggngggnagtanantgggtgggaaatcgaacatnggnaccggnctaagggccnggtgggtgnaacgganagggnttcggnaggngnccaaggaagaagccnagc

SEQ ID NO: 135578 - DNA, 408 bp, Arabidopsis thaliana columbia
  unsure (1)..(408): unsure at all n locations
taagatnctcaagacggctccatttcgacttgtttgtataacgaaatactcaattgcttctaccaacaatgcgaacctcatggagggaacctatgaggatcaaacnacctaagattaaagcngcccccaagcttgtgggattctttgtccaaatcatggttgtttgcgaaaagcccttccatctacagtttccagcgttttcttataattgggactgtgaaggnagcaggttatatcggattaacctcaaaccaaatctctatcaatcatcagagatgatgggaggacaacaataatagaccatataaatnggcatcanccnggtcattggtccaaatcccaacgnggnatcatcagnggcggaaattggatganggngnaattcgaatcccannnccaagttccggg

SEQ ID NO: 135579 - DNA, 295 bp, Arabidopsis thaliana columbia
  unsure (1)..(295): unsure at all n locations
agagaactattggtcacccttgaagtcgttgacgacatcgtatgggatgggagtgatagtctccaagccttgagctcatcatttttcttcttcctcagcttgaactccacagcacatcttgactgctgcacatgctccacaagaacatggatcctcttccttatgatcttatcgccaatctgataaacccacctcaagcaaaaactcaaaaatcagtgtaaaacgacggccagtcnattgaatttaggtgacactatagaagngctatgangtncgctngnancgnntncgtnag

SEQ ID NO: 135580 - DNA, 599 bp, Arabidopsis thaliana columbia
  unsure (1)..(599): unsure at all n locations
gagttgtgtattgagcttcatctccttcaaatggcttccttatcaaccacttccctaagcttcaaagctccgtccaccacaatttcacaggttttaaggaatgcctcaagttctcagtctgtgacctttggtcgtttcacgtcttcaacaaagagccttcgtcttcaaatcagttgtgccgcgaaagcagagacggtgcagaaagtgagtgacattgtaaaagaacaattggctttagctgcagatgttccgctcacngctgaatccaagttctctgctcttggtgccgattctctcgacaccgtggagatagtgatggcgttggaggaaaagtttaacataaggtgtggaggaatctgatgctcaaaacattacgaccatcccaagagggcggcttgaattttgatagagggacccttggttcaaaaangaaaccccggcgggcgggaaacnttnccttgaacccnggnttggccttttcccttttccccttgaccctaattnccnttngccnttcaaagaanncgggttttaattncccggggaanatcttaagnccccggtttggnnaaattntnaacttnaanttnccggnaacc

SEQ ID NO: 135581 - DNA, 646 bp, Arabidopsis thaliana columbia
  unsure (1)..(646): unsure at all n locations
gtctctgagataataaggacttgtgtatttttccatcgttaaaaggcatttcaaagagacaatatgtcaggtgatgaggctgcccctgttgttgttcctccccccgttgctgagccagcggccatcccagaggacatggacttaatgactgcattggagttgactcttaggaaagctcgtgcttatggtggtgttgttcgtggtctccatgagtgtgctaagcttattgagaagcgtgtggctcaactcgttgtcttggctgaagactgcaaccagcctgattatgtcaagcttgtgaaggctctccgtgctgatcacgaagtcaggttgctaacagttccaagtgccaagacccttggcgaatgggctggtctctgcaagattgattctgagggcaatgnaaggaaggntgttggatgntcatggctcgtgataaaggatttcgggtgaggagnccaactggactaaacatttggcaaagaagcaaccttgantncnaactaaaancaanncaaaaagggccangttncaagatgcttccnnccccaaaaagggaaaccnantttttgtggccaaccccttttttcnnttccaagcctttcccgggttttncatnaaaaacccnaganggngggaatgncnttga

SEQ ID NO: 135582 - DNA, 665 bp, Arabidopsis thaliana columbia
  unsure (1)..(665): unsure at all n locations
ggacgaaaacactcaagcttgcagagatctttcactttaatccttgagaagtagcaaaaatggctgaaaaggcggtcaccatccgaaccaggaaattcatgaccaacagacttctctccaggaagcagttcgttattgatgttcttcaccctggaagagccaatgtttcaaaggctgagctgaaggagaagctagcaaggatgtacgaggtcaaggatccaaatgcaatcttcgtattcaaattcagaacccactttggaggtggtaatcatccgggtttggtttgatctatgatactgttgagagcgctaagaagtttgaacccaaatacagacttatcaggaatggacttgacactaagattgagaagtcaaggaaacaaattaaggaaaggaagaacagggcgaagaaaatccgtggtgttaagaggnccaaaggctggtgatgncaagaagaagtgagancctgnaagagagaanctttancttgtggggccttgtcccccataatncaancacctttaatggtatttgnccgctgtagnaccggtcccccacccntgccatggttcccggaaacctggggttccggnaantttggntttggcaggtaanggttnngtntgggacanntggccaaggggtttggcnaaaacaaccantttt

SEQ ID NO: 135583 - DNA, 705 bp, Arabidopsis thaliana columbia
  unsure (1)..(705): unsure at all n locations
gccttcacagttctggatggtattacgaaaaaagtatcctcagcttagtcagttgcagaatggaatgcacatgcagcaggatgctgaagaatgttggacacaactgttatacaccctttctcagtccctaaaagcaccaacttccagcgaaggtgctgatgctgtgaaagctctatttggtgtcaatctccagagcaggttgcattgtcaagaaagtggcgaagaaagctcagagacagaatctgtatattctctaaaatgtcatatatcacatgaagtgaaccacttgcatgaaggattaaaacatggactgaaaggggaacttgaaaaaacatctcctgctcttggccgtactgcactctacgtcaaggagtcacttatagattccttgccaaggtacttgactgttcagttcgtgcggtttttctggaaaagggagagtatcagaaagccaaagatccncaggnaagtggatacccgtggtggtnggtaaatttgacctttgccctgaggacctccggaagaaactggagnnccccgccagaaccttganaggggnangnaaaaacnttggcttcaaccaggcgaanngggggccaaggnaagtatntnaaatcctntcaaagggctcaaattggantggngccccccngaaccccngggggggncttnttgaaggaccccnntnctgggccttnnnttgcc

SEQ ID NO: 135584 - DNA, 539 bp, Arabidopsis thaliana columbia
  unsure (1)..(539): unsure at all n locations
tggaagacgaatatnctcacatcacttctcattccttacatcttcttcagtcttccttccttgatctttggtattttcagaggagaaattggtaaatggattgctttcgtagctgttgttgtacaactcttctttcctaaacacgccagagaatacctggaattaccggtggctttggttcttctcgccgtggtggcaccaaatttgattgcnggcacattcagagacagttggattggtttagctatatgtttaggtattggatgttacttgcttcaagaacacattagagcttcaggtggattcagaaatgcatttacnaaagccaatggtatccccaacaccgtcgggatcatctgtcccgnccgtcttccccggtctggggctcctaacttttaaggntaaccccttcaagttncttttnccaatttgcccntnnntttccaaggaaagaggngaatggcctttggaacganctggccccccccccggaaaccccaaccaaangaaangggaattngaaaaaagnaannggnncc

SEQ ID NO: 135585 - DNA, 378 bp, Arabidopsis thaliana columbia
  unsure (1)..(378): unsure at all n locations
agcaactgccgctctttcttctttcttactgtctcagatccgccattgttacttcttcagttcttcttcttcaacaacaacaagaagtaataattagggttgagaaacttcgaattccgaaacgacagagagacgtactagttttagccatcttcttttcttagtttcatcgaacttggtgttacctcaataggtcgactaattactgggnttatgctgctccagcggctctggtggtactgntgcttcctggcntggggtantactanggtctccaagatcnaacggggtgggtcaaaggggnangngccnttggtggantttgggaaaacctttaaaacnngggngttttggcccnctggacccttaaaaaaaccc

SEQ ID NO: 135586 - DNA, 602 bp, Arabidopsis thaliana columbia
  unsure (1)..(602): unsure at all n locations
gaagaagtctaagaagtgaagaggatatatagtgtgaagctatatcgatcatcagttcacggattagacttcttcttcggtacagctgcagttggagcaggtgtagcagcaggtgctggagcagctacaggcgcaacatctccaccgggacccttagctaaacgctcctctctcctagcatgcttcctttctcggctagccttgttcttcgccctcttagcctcaaactgaccagacagagtcttctccctagccttctcagcctttgacttgtggatactctccatcaagacacgcttgttcttgaacacattanccttaacacgcatgtacatgtcatggtacatgtggcttgtcaatcttcttcgtctctctgtatttcttcaacaagacgcctaagaacacgcatcctaacggatccaacttctagatcgcgagcgggcggtctaagaggatcaaggttacggacgcggnnatggacggcaaanccttcnaaagnggccctaaatcaatcactggcgcggttaaacgnggnctgggaaccngggaccaantaatgctgagaaaccccttgaagtgggaagnnaaggcgccgtgnctca

SEQ ID NO: 135587 - DNA, 615 bp, Arabidopsis thaliana columbia
  unsure (1)..(615): unsure at all n locations
agatacatatcaagagattaaaccttatccaactaagagaagccattttttttttttttgggtctctgagttgtgtatcgagcttcatctccttcaaatggcttccttatcaaccacttccctaagcttcaaagctccgtccaccacaatttcacaggttttaaggaaagcctcaagttctcagtctgtgacctttggtcgtttcacgtcttcaacaaagagccttcgtcttcaaatcagttgtgccgcgaaanagagacggtgcagaaagtgagtgacattgtaaaagaacaattggctttagctgctgatgttccgctcactgctgaatccaagttctctgctcttggtgccgattctctcgacaccgtgggagatagtgatggcgttggagggaaagtttaacataagtgtggaggaacctggatgcccaaaacattacgnccatccaagagnggctggatttgaaagggggccttggtcaaaagaanccggggggggaactcctgaccgggntggctttcttnccggccaantctgcctcaggnggttttcnggattaancggtggaatttattntccgnacaaaatggggtnaatggaaantngnggggc

SEQ ID NO: 135588 - DNA, 604 bp, Arabidopsis thaliana columbia
  unsure (1)..(604): unsure at all n locations
aatacctttttcagttcaaccggagtaatacacgccgcgcagaatnagnagcagagcaccttaaactgtgccgcggtaatatccagcggagacagatactcgttaagcaggcgatctttcttctgattaaccatatggattaagcgacccaatggaataatttcattgaacagatcgctggtacttttcacattagttgccctggcaagtaattagttgcaggggataatattgcccaggcaagtataagtcaaatgaatgaattgaccgatgccacgttttgctaaatcggttcaagttttgttcaatgcgatgcaaggctagctaaagagtgacactttatccttggttaccccctatacttttccgctgataaccccagntaccaccagggntaccaaaccanccaatggtaagnatttgggttaaaagccaatttgggccttggggggtgggtgggtggttnctgnccggtaaggcaaacccccttaaacaaactggcccncggtanttccctgggccctgggcangggaaacnttgnacaaggggnccgnancggaacccggcaannccgntnaatngccccccnggggaccgnanttt

SEQ ID NO: 135589 - DNA, 613 bp, Arabidopsis thaliana columbia
  unsure (1)..(613): unsure at all n locations
aagggttgctgnggcnccgcttagattnccagtttttgccggganccggtaaaancncccgtggnagntccggnccggttccatncaagtcaancgcctggagatgtncttgaaccgtatcccccttgcancacaaacttcctttncaaatttacccnggaactcttaattccagccggatcctcggaagncagagcttcttctccaacaacagctttcatggcnttgaacatcttttccgattgcataatttgcgtatagctggttggaccacatcagaatggtctttgcgagtcattccttcaccaatagcactcttcatcagccgagaaagtgatggaagcacgttaatgggtgggtatatctgtctgttgtgaggttgcctatcaatatatatctgaccctcagtaatgtaaccagtaagatccggagtagggtgagtgatatcgtcattgggnatagtcaggatagggatttgggtaatggaaccctttcttccttcaatacgtcccgcacgttcataaatagttgcaagatctgtatacatataccccggatatccacggtcttccanggaacttcattcntcgnggacngctgtgggcngcccngg

SEQ ID NO: 135590 - DNA, 558 bp, Arabidopsis thaliana columbia
  unsure (1)..(558): unsure at all n locations
agaaaacagaagaaactatggcaactcaagccgccggaatcttcagccccgccataacaaccactacttccgccgtcaagaaacnccacctcttctcatcaagccaccgtcccaagtctctctccttcaccaaaaccgccatccgcgccgagaaaacagagtcctcctctgctgccccagccgtgaaagaagctccagttggattcacncccccgcagctagacccaaacacaccatcaccaatcttcgccggaagcacaggaggtctcctccgtaaagcacaagtagaggaattttacgtgatcacatggaactcaccgaaagaacaaatctttgagatgccaaacaggaggagctgcgataatgagagaaggacccgaatctattgaaacntggcgagggaagnacagtgtttgggcttttaggtacgncggttgnagggcaaaaggttcaaggattcacntncccaagttttncaaggagtggttccccnaaccgggnnaagggtcanntnttcntntanccccgaanagattgggnggtttttccnagangaaa

SEQ ID NO: 135591 - DNA, 646 bp, Arabidopsis thaliana columbia
  unsure (1)..(646): unsure at all n locations
ttcctcaatcttgggaccngcaccnccggcagaaggaggaacatcctcgtccattcctcctgcagctggaccaccagcttcaccgccttggtacatctttgctatgatcgggttgcaaatacnctcgagctctttcatcttgtcctcaaattcatcacacnctgctagctgattcgcttctagccattcaatggctgcggacgcgtgggtcgacccacgcgtccgcacaacctagctagctagtaaacagtattttctatataccaaaaatggcttcaagttccatagctcttttcttggctctcaatcttctctttttcacaacaatctccgcctgtggtagctgtacnccgtgcggcggaggttgcccctctcccaagccaaagccaacngcctaaaccaaccccaaagccctaagctctggntcngngcaagtggcctaaagacaccctcaagctcgggtggtctgnggtaatggtggntaaacggggctcctgggacttgnccccttnggaaaggcaaccggggcgnngcaattggtggaagcctcaatccaaagggnctccntggtggttnaggaacncggtttggcnnttggaccgggcctttaagggaaaaattttttgggancaannttgaaccngcc

SEQ ID NO: 135592 - DNA, 411 bp, Arabidopsis thaliana columbia
  unsure (1)..(411): unsure at all n locations
cagatattntgantagttcntctgcagaaaatccgaaggagcccaagaaacaagctatcagcaaacaaccctttaaatccgttcacataaaagtcatcaagaancaacctcaaccaacttcatcgtcaactccggctcctgcaaaaccagaggngaagaagagtgatngtgcggctaacaccagtttagcctctttattccaganttatggtagtgatgaagatgaagattnattgtttttgttctcgacaagttccgcactttcacagatctcatatcactgttttagaattcgagctcttatactgggcgctatatgtgagaatctttcaganttttnaagngaatttgttcatngaaaatttggnttttncnatttgagtttgggatttgaataagtttagcnttctg

SEQ ID NO: 135593 - DNA, 464 bp, Arabidopsis thaliana columbia
  unsure (1)..(464): unsure at all n locations
gtcagtgtggagcaaaaagtcgaaccggagcaaaacacggtgttaatggtggatcgtctaagagatcgtaccggtcggaatattcttcacctcatcaccaaatcaaacagcaagagattaaccaaaccactagtagtagtattcctccagcagccgacaagggaaaaacnggcgtgccttctcctagaccggccactcgtaggtacaagcttctcaaggatgttatgtgttagtaatgttttcgaaataaccaaaagttaagagagacatagagagtttattaggatcngggatgatgataataagacacatgtctgtaagatatataaaacnagctagggctatgatagctgttgttatggtttgagnagcnaatgtaatatncctgcggnagttatttcattgggattnngctangtggtttgaggttaattnnggagngnannnngaaggggggggcccgg

SEQ ID NO: 135594 - DNA, 627 bp, Arabidopsis thaliana columbia
  unsure (1)..(627): unsure at all n locations
ccccttggggnnncccaanccaatttttccttnntttccccccccanttttnccannnncctttantnntaacnngcccggnttnaaggttaaaaaccatnctttctggntcttaatttaaaacaaaaaaaaaaactncaaaagttccccaatccaattttttaggctttctttggaacccaggttgatctatactttgtaacggcattgccccaaaaggaggttngtgcaagaagttagctgcactaagaacacacattagccaatagaagtagtctagtttgtaacggtttatgctttttcctctgagccaaggtgtgttccctgagcttcccggacgcgtgggtcgacgactctctcaatcgtaacaacaatccgttcctcatcttatcctactctcgcttccatcaatcacttcccttcccgaaccaccaccatcgaattcccctctcgcttcggtggtggttcatcatccacattgacccaccgtgcaacccatctccgtccaatcgccgccgtcgaagctccggagaaaatcgagaagatcggatccgaaatctcatccctaaccctcgaagaagctcgtatcctcgtcgacccgggtaattccggtaccggtnactgcag

SEQ ID NO: 135595 - DNA, 455 bp, Arabidopsis thaliana columbia
  unsure (1)..(455): unsure at all n locations
anagccnaagttcgcttacnngtctcngttaaagctctcagagagggtatctcgatctggttggttcctttaaccatctgtaactatggcggcagaaccgaaggcagcgactgctgaagtagtgaagatggatctgtttgaggacgacgatgagttcgaggaatttgaaatcaacgaagattggttggagaaagaagaagtgaaggaagttagccagcagtgggaagatgactgggatgatgatgatgtcaatgacgacttctcacgtcagttaaggaaggagcttgagaatggtacnggacaagaaataaggtcgaagatttgtgaaagaccaggtcttcacattttagggaatcctttgntttccttttangancccgggaccttttgnttgaacccgganccatttgggttaaggtaaccgggnccngnttttcccnttnnnaaaaaaaaaa

SEQ ID NO: 135596 - DNA, 545 bp, Arabidopsis thaliana columbia
  unsure (1)..(545): unsure at all n locations
gattgtgtgtgaggctgctgctcctaccaagaaagctgattcggctgcaaagagagctcgccaagctgagaagaggcgtgtttacaacaaatctaagaaatctgaagcccgtacccggatgaagaaggtcttggaagcacttgaggggctcaagaagaaaactgatgcgcaactgatgagattgtgacggtggagaaactgataggagaggtttattctgcaattgacaaagcagtgaaggttaaagcactacacaagaacactggtgcccgtaggaagtctcgattggctaggaggaaaaaagccgttgaaattcaccatgggttggtacgtcccagacgcagcttgctgcagcaccatccagaagctgtgcccatggctgcataagacattggggttaccggaattttgtttttggnancaagatctttccaaatcnaaacnggttccttaaaagggncnttttagccncttttaaaccctccccttttaaaaaaaaaaaaaaaaaaaaaaagggggcccccctagggcccaanttttnntgc

SEQ ID NO: 135597 - DNA, 539 bp, Arabidopsis thaliana columbia
  unsure (1)..(539): unsure at all n locations
aatatctttgagatcncctctttatttggagaagacaaaacacagaacaagaattagaaagaagggagagaaagcaaaaatggcactaagaatgtgggcttcttctacagcaaacgctctcaagctttcttcttctgtttccaagtctcatctctcccctttctccttctctagatgcttctccacagttttggagggtttgaagtatgcaaattcacatgagtgggttaaacatgaaggctctgttgccaccattggcatcacngcccatgctcaggaccatttaggtgaagtggtgtttgttgaacngccagaggacaatacntcagtgagcaaagagaaaagctttggagcagtggagagtgtgaaggcaacaagtgagatcttatcaccaatctcaggtgaaatcattgagggtaacaagaagctcacagaatcacccggcttgatcactcaagnccctatgaagatggtngntgtcaanggaaccangnncccccggggttganncttanngggccaaggntanccaagtctgg

SEQ ID NO: 135598 - DNA, 463 bp, Arabidopsis thaliana columbia
  unsure (1)..(463): unsure at all n locations
agctttgaggngcattgagaacgtacctccacatcattcgatgatctctcacacagtccataagagaacctacgctttgatcatcgatggattgttttcgtatttcgcgantntagatgaggtcgtagcgaaatcggagtctgtatggctantcaatcgattgaaatcagctacagagtctctaatggaagacggatctactgcggattcgttggataatccgactcaacactgtctccaatcaaagctagatccagttttcgctgagantgcngctattggtggtaatcataanaaggatttggaattggagtttggatcaccgaggagtatagccgagggagattaagagtaataatccagagnttgggattcggccaagggncgaaaaggcggtccgtnaatnccgcttttaggaaanccgtanagggggtttaanancagnaggncttcagaccgganc

SEQ ID NO: 135599 - DNA, 596 bp, Arabidopsis thaliana columbia
  unsure (1)..(596): unsure at all n locations
taatccccagaatctccgatcnacccacaaatttagcaattttctgagatttgatcatttgggtcaccaaaaaatcttgtctttttgatcngggtttaacgccaataacatatgggaaacattagcagcagcggtggtgaaggtagacgccgtcgacgggaaaccatacggcggctccaccaccacctcctcttcctccttcttcttctcttcctccacctccaacatcatccaccgcatccttaccacaaccactcttgggctcccgtggcgatggccagatacccttatgctggtcacatgatggctcaaccgactccttacgttgaacaccagaaagccgtcacgattcgtaacgacgttaatctcaagaaggagtctcttaggcttgaacccgacccggataatccgggnggctttctcggctcctttacggttgatgnaccggctccgnaagnntaagtggcatttcttggnaaaaatccggagatggaacnccaggggcaaaggangttttctgcccaataccttgattnnggaagncttgnnaagttaanaacatngggttggaaaacttnnggcttnggggtagnttc

SEQ ID NO: 135600 - DNA, 522 bp, Arabidopsis thaliana columbia
  unsure (1)..(522): unsure at all n locations
agtgtacttagcaggtcacctgtttttggcttaagtcctacaaggaacggccacttgtctggtttggcttcngctctaaattcacaaggaccaagctcggagcttgcacccattggcaggggtcaaattggtagcaacggcttccaacagtcatcacatttatnccaagagcctaagatggataataagtacacaggaaatctctctccttcaggtcctttgatcncaaatggaggtggaattgagacgttgtcgggttcagagtttctcnggggaagncctaacgcacgctctgaaccntcaagttcctcggtttggtcaacatcatccacnggggaatccactcttctcaactcgagtagaccggatctgttccatttccacaatcaggcatcaaaatcaaagtcgtagccatcatcactttccatgttggggctgnaccaanctgggnggncccccctagaaaaagncattttngggatnccggccccaaganncctncaaaggnncgcttttggncca

SEQ ID NO: 135601 - DNA, 500 bp, Arabidopsis thaliana columbia
  unsure (1)..(500): unsure at all n locations
aacaaaacacaaaaacaacaaaaaaaccatttccccaaaaaaagaaaacaaaaacagaggatgaaacaaaaccagagcaagttcttgagaataatctcaacacctctaagagctttaggcaaggcacgtgatttctacgtgagaagcatcaccggttgcgcantcgtactcaatattcctcctccgcctccgtctccgctccttttccaagaagccggagctcctcctccgccgccttctcctcctccgcatcatcccggagaaccaccgatttcgggatagatgaagattacagcgagctagtgagagctgcgtcgggtgaggagtttagggnacaagaatgggataggncatggttgattccaaggngaaagcttgcaacaggcaggnaggcaaccaggaagccaagggnggggttgnccttaaanaagcccccaagttgcctggggatttggccnaggnttttngnggganngnggngggnacccngagggnanggg

SEQ ID NO: 135602 - DNA, 561 bp, Arabidopsis thaliana columbia
  unsure (1)..(561): unsure at all n locations
cnggtttccccccnatnttgcnantaanttntttggggttggaancatncngtgnccncaaanccggaaccttgtttggtggtttaatngggnataattctttcagnggaccccgccnnttgagagtttgaaagtccccccatccccatggntgtgtccatcagccccaattatgccancattccagggcataatgtttgttgncctgtgggagcaccactaatacccgcaggttgggtcttgctgcaacctcttgaaatccctcattaacctcttccttgctggcgtcgacccacgcgtccggagaagaatagtttgatcatcttgtgagaaaaataatggctgcttcagtgatgctatcttcggtgacattgaaaccagctggtttcacggtggagaagacggcggctagaggattaccgtcgctcacaagagctcgtccctccttcaaaattgtcgccagtggcgtcaagaagatcaagaccgacaagccttcggaattaacggcagcatggacttgagggacggcgtcgacccgggtanttccggtaccggtgactg

SEQ ID NO: 135603 - DNA, 542 bp, Arabidopsis thaliana columbia
  unsure (1)..(542): unsure at all n locations
ctgtcaaaaagaagcacagacaaccgaattctgattgcagaggcaggagccatccctgttttggtcaagcttttgacctcagatggtgacactgaaacgcaggaaaatgctgtcacttgcattcttaacctctccatatacgaacacaacaaagaactaatcatgcttgcaggagcagtcacatctatagtgctagtcctccgagctggaagcatggaagctagagaaaacgctgcagctactctctttagtctttcgttagctgatgagaacaagatcattataggcgcatcaggtgcgataatggccttagtggatctgcttcaatatggaagcgtcagagggaagaaagacgcagctaacggctctgttcaacttgtgtatttaccagggaacaaaggncagagcagttagagccggtatagtaagccatttggtgaaaatgctgcannctccccnncgaaaggtggctgatnaacccttnnccaaaccccggtccancagtaccaattgggaaccgggntttgnnccancgatncccg

SEQ ID NO: 135604 - DNA, 547 bp, Arabidopsis thaliana columbia
  unsure (1)..(547): unsure at all n locations
gaagaagtctaatccgtgaacngatgatcgatatagcttcacactatatatcctcttcacttcttagacttcttcttcggtacagctgcagttggagcaggtgtagcagcaggtgctggagcagctacaggcgcaacatctccaccgggacccttagctaaacgctcctctctcctagcatgcttcctttctcggctagccttgttcntcgccctcttagcctcaaactgatcagacagagtcttctccctagccttctcagcctttgacttgtggatacnctccatcaagacacgcttgttcttgaacacattacccttaacacgcatgtacatgtcatggtacatgtgcttgtcaatcttcttcgtctctctgtatntcntcaacagaacgcctaagaacacgcatccnacggatccacttctaagaaccgcgagcggccggtctaagaggntccaagctacggacgnggtgatgcncggcatagcncttcnaaagnggaccaaaatcaatcacnggccgcggttanaaggcgnncagggaaaca

SEQ ID NO: 135605 - DNA, 425 bp, Arabidopsis thaliana columbia
  unsure (1)..(425): unsure at all n locations
atctccacaaccagacctcagttttgggccatcttagatggaatgagacttatacnagcatcaccttatcttttgctcgtgtctttgtttctttggctcggtgcggtcatctcctcattcttctatttccaaaaagtgaatataatngctacgacaatcaaatcatccattggtcgaagaagactgtttgcccagataaacagctttgttgcagttttcatactcattggacaactgactttaacggggcgtatcttgactgtagctggtgtcacggtttgcaatatctgcatctccatttgttgcaccttgggaatttggntgctattcgccatantgggccaaacntggggttacggntngcntgtggctttaaaaccttgangananngnngccaactttatgggngnnacctagaactggg

SEQ ID NO: 135606 - DNA, 305 bp, Arabidopsis thaliana columbia
  unsure (1)..(305): unsure at all n locations
ccgaacatntcgtcttcatccnccgcaaatcttcttccnccttgaaatctcnccttgattccnccggagtncctctcttcnccatctctcgtcnccacaatggagtgtgggaattacataaaggagatgtggaaaagcgtaaggatttggttcnaacggtgaagcggacatcgaaaagattcagtaagacagagtcagaggtctccttttgctggagaatcggccgaaaatcttgttatcaaaggnggtccctttcagaatcanggaccatttaanagccaagatccattgtggaaagacgagtt

SEQ ID NO: 135607 - DNA, 506 bp, Arabidopsis thaliana columbia
  unsure (1)..(506): unsure at all n locations
tatagccggaaacatctgctagacactgcggtcaccccagaaggtgcagataggctttggtggttccaagtttgcactgaagtggcatatttccaagtggcacctgcaaacgatagcatccggtctcatcaaatcaatacagagtatcatttggatctatgcaagagtctgtttgggaaaggtgtttaccctgaagtcgatgcaacaaacctgtattatggaagtgacagaattgctgcgaccaagattatcttcacaaatgggtcacaggatccatggcgtcatgcatccaaacagacctcaatctcctgaacngccttcttacattgtgancttgccacaactgtggccantggaagtgatctccgtggatgccctcaatctcccatgggtcatttggagggtgattccaagaanttgcagttcacccgattgcacttggactaaanntnntgggcncnatntngntaggatcatattggnccttgtnggncccnctnnggtgc

SEQ ID NO: 135608 - DNA, 554 bp, Arabidopsis thaliana columbia
  unsure (1)..(554): unsure at all n locations
ggaagtcgaaatccgctaaggagtgtgtaaaactcacctgccgaatcaactagccccgaaaatggatggcgcttaagcgcgcgacctatacccggccgtcggggcaagagccaggcctcgatgagtaggagggcgcggcggtcgctgcaaaacctagggcgcgancggngncggagcggccgtcggtgcagatcttggtggtagtagcaaatattcaaatgagaactgaagcaatcacagaagctgttacaggatctaaagagaagcttaccactatctacctcgaaaataacccttgtgccaagtcttctgattatgttgctgcggtcagacaaatcttccccgaatgtggggcaaattgatttctaaacttatttggcttagagatnggtaaaattcccttgtcgtgcnggtttgaatgaatggcctggtttccncatccccatngggnattggncaccgaattttgggaatcngggnaaaaacgggttcccncnaaaataanaanggggccgncggttnncnaaaaaaaggngcaatgggncaatttaaac

SEQ ID NO: 135609 - DNA, 559 bp, Arabidopsis thaliana columbia
  unsure (1)..(559): unsure at all n locations
aaattagagtgctcaaagcaagcctacgctctggatacattagcatgggataacatcataggatttcgatcctattgtgttggccttcgggatcggagtaatgattaacagggacagtcgggggcattcgtatttcatagtcagaggtgaaattcttggatttatgaaagacgaacaacngcgaaanatttgccaaggatgttttcattaatcaagaacgaaagttgggggctcgaagacgatcagataccgtcctagtctcaaccataaacgatgccgaccagggatcagcggatgttgcttataggactccgctggcaccttatgagaaatcaaagtttttggggttccgggggggagtatggtcgnaaaggctggaaccttaaagggaattgnncggaagggcggccgctnctagaaggatccaagctttacgtncgcgtgcattncgnacgtcatancncttccnanagtngcnnccnaaaattcaattcacngggccggccgttttaaaacggccgtaccngggggaaanccctggnngttacccaacttaatc

SEQ ID NO: 135610 - DNA, 536 bp, Arabidopsis thaliana columbia
  unsure (1)..(536): unsure at all n locations
ggttacaacgtcccgatgctagtggctccacaaggaggctcgggtttaaactgtagcagcaccggatgcgttgtagatctgaacggttcgtgtccgtcggagcttaaagtgacgagtttagacggcagaggtaaacaatccatgggatgtaaaagcgcgtgtgaagcttttcgtacgccggagtattgttgcagcggcgcccacggtacacctgacacgtgtaaaccgtcgtcgtacttgttgatgtttaaaacngcgtgtccacgtgcttacagctacgcttacgatgatcagagtagtaccttcacatgtgctgaatctcctaattacgttatcacgttttgncctactcctaacaccagtcaaaaatccatctcaaggtccaaagnccagattccaaaccgnngnnaacaaaccggggnacgtcgtnganccaaggggcccgggaatccccttatncnggcaaaaagttcccaggtttttcaaannancgnnggnttgggtgnaacccaattttccgggggaaatcccggnga

SEQ ID NO: 135611 - DNA, 487 bp, Arabidopsis thaliana columbia
  unsure (1)..(487): unsure at all n locations
gttcctagtaatgtcgaggaacaaagcgcgatcgataacgaacattacattgttgtgaatgaagatcatgtgattgatgctgttgctcactttttggctaaatgtattatntcaaatcccaaagctaagaatctcaaacctgaagagcttcagaaaccgctggtgcaagaagttacngctttgagcaaggtagggaaggtagtggatatatggcatgctgggaaaatgttctacacgttttccacttggggacttgcttttggagggttataccaagctcgtggtgcgctgaagatagcngctaagggtgttcatgcgaccagcaaggttgttcttagggctccnctgaaagttataagagggctatcnccnactatctttggggttgccttcctgtgcgaaccctgttttaaaataaaagcattncgggggaanagngnaaaanggttnacaaggngantncaantggttccaatncgcattgncc

SEQ ID NO: 135612 - DNA, 407 bp, Arabidopsis thaliana columbia
  unsure (1)..(407): unsure at all n locations
cccccatgttanggaattgggaatccatncaatcatgcgtntattancatgaccaaataaagcttaaaggcttgaagcttcttcggtgcattttaaggtaaatttacgagttggttttactatcacacgccgttttttactaaatcgaaccttgtacgtggtggnattctcagccgcttgttaagcctctgctttgcctctttggctgctccgtcaagtttctcatcgttgtcttctccataagatttattcctaacacttctctccgagnaggagacatgggcctggtggctctcatgattggtacgtgtaaagagagaacgactggtcgcctgtgtccatgactgtgtccccnggactctgtgggctgaccctggnngtncagnccnggnccatnantagangat

SEQ ID NO: 135613 - DNA, 357 bp, Arabidopsis thaliana columbia
  unsure (1)..(357): unsure at all n locations
gtctacccgcccgaaatccngtcgaaacntctcttctttaccattgatttgcctcgtctcagctcaattctcttccgttgcngcttcgtttagttgttgcttcgcttcagtacncnggtggtgggagagatgaatcacggccaacaatctggtgaggcaaagcatgaagatgatgctgctcttacagagttccttgcttctctgatggattatacagcctactattcctggatgatttagtgggagcacnaacttgggctaagagtgggatttcaagtggncccgganggtacgattggataaaggncaanttggcngnggggaacanaaaaagntttgttgcaaaatgtttgccaa

SEQ ID NO: 135614 - DNA, 258 bp, Arabidopsis thaliana columbia
  unsure (1)..(258): unsure at all n locations
tggccaatgggcccaacattnttggcccacagttgcccccatagctttcatggcttcaaacccttggttccttggcctgaaacttgacagcngngtagngtttcatgtaatcttcaaacacaaatctcggatngttctctttcttctccttctctgcttcttttccgatcagctccggcgccggaaaaataacagngtcgcttcccggattatagacatgatgcgatcaganattcttccnttctcctgtgtgtntga

SEQ ID NO: 135615 - DNA, 204 bp, Arabidopsis thaliana columbia
  unsure (1)..(204): unsure at all n locations
aaccngagtnggcattgtggaagagatggggtttggctcaagctgtgacnacatcngctggtttggcttcttacccgttggatacagttcgtagacngataatgatgcaatccgggatggagcatccgatgtaccgtagcacatnggattgttggaagaagatanataggagtnaagggttggcttcgttttaccgtggagcac

SEQ ID NO: 135616 - DNA, 575 bp, Arabidopsis thaliana columbia
  unsure (1)..(575): unsure at all n locations
gacaagaagcttctcagagagatccgtggaggagaattctctcaggcggatctgtttgtcggagcttttgtgaatcatcatcatcaatgggtttgttggaagcttttctcaattggcttcgtagcctcttcttcaagcaagaaatggagctttctttgataggacttcaaaatgcaggaaagacatcacttgtaaatgttgttgcaactggtggatacagtgaagacatgattcctacggtcgggtttaacatgaggaaagtaacaaaaggaaatgttacaatcaaactatgggatcttggtggtcaaccaagattccgcagcatgtgggaacgttactggtcgcgctgtttcctgccattggggnatgnagttgaatgnctgcaaaatcctgacaaccnaagtgtggccgaaaagtggaccccntgatttggttgagcaaacttcccctaaagggaccccccctnncggtccttgggnacaaaatttgnnaaccccgngccctttccaaaangcccttacaancnaggggggctccnccccttcannaaaaaagncccccggttccngnannnt

SEQ ID NO: 135617 - DNA, 348 bp, Arabidopsis thaliana columbia
  unsure (1)..(348): unsure at all n locations
cacttgattctctcttccttcatcaatcaatctcgtctcctggaaaacattagggagcctctcagatcctcaagaaaaccctaaatcaaaagtcgagatcgatngcgtccttcgctcgccgtgccatgagcttagctcagatcccatcngctcgtatttcctctggagccgcttctatnggtcagcgtcgttncctcgccggcgccgctgatcaccatggatctaccaagggttgacttctgggaaacagcccacgaacccaggaaacnnggaaagagggagcatttttgngcttatttccccggccatggctggggggntantttttcnaaaggggggnnaaaagcc

SEQ ID NO: 135618 - DNA, 559 bp, Arabidopsis thaliana columbia
  unsure (1)..(559): unsure at all n locations
caacaaggaagagaacgcacgtgtccccatcatttgcactggtaacgatttctccaccctatacgctcctctcatccgtgatggacgtatggagaagttctactgggccccgacccgtgaagaccgtatcggtgtctgcaagggtatcttcagaactgacaagatcaaggacgaagacattgtcacacttgttgatcagttcccnggtcaatctatcgatttcttcggtgctttgagggcgagagtgtacgatgatgaagtgaggaagttcgttgagagccttggagttgagaagatcggaaagaggctggttaactcaagggaaggacctcccgtgttcgagcaacccgagatgacttatgagaagcttatggaatacggaaacatgcttgtgatggaacaagagaatgtcaagagagtccaacttgccgagacctanctcagccaggctgctttgggancgcaaccntgncgccatcggcgcggaanttcncggtaacagagaaagggccagaagnacctgcagtcctganggngantnccctgtggtnaacttttc

SEQ ID NO: 135619 - DNA, 626 bp, Arabidopsis thaliana columbia
  unsure (1)..(626): unsure at all n locations
cgcgcgatttctcaagcctcagtcacaagacaatttctagttaatctcaagcaggacggaaaagcattgccggatgggcctgttgttatctctcctgatggtctctttccttcgttgtttcgggaagtaattagaagagcacctcatgaattcaagattgcttgcttagaggagatacggggcttgtttccncccgaacacaacccattctatgctggttttggaaacagagacacagacgagataagctaccttaaagtcggaatcccccgaggaaagatcttcattatnaacccaaagggagaagtagctgtgaatcgtagaattgatacaagatcatacacaaatcttcatacacttgttaacagaatgttcccagctacatcctcttcagaaccggaggacttttacacatgggatttctgggaannggctcctcatcgnttatgnnatccgatgatggtgatggtaagatgtgattgcctccagaaatgggntnagtggngngaacgnntggggcnggggagggtttttcancctgnncaggncttgtttttgcacggtcgaccaggcgggtggggtnacctgatttttnaaaaaaaaaaannggggccnnggcantttgg

SEQ ID NO: 135620 - DNA, 517 bp, Arabidopsis thaliana columbia
  unsure (1)..(517): unsure at all n locations
ttggccnntnggggggcccccctttttttttttttttaaccggnangccccataagttttatttaacctgaaactgtgnaacaaaaccaaanggtgtgaagctgttacttggtctgatccttgagacnatgttcggatcaaacttattatcngttgcaactcagangaaacagcnactctggaaatactttttagatctgtcctaagatgacttctgcccctgtaaccttgaagtcagacggtgcttcttccacattcaccgccttaaccttcccgtcttctacataagccgaccatctctcagaccgtggcccgagcaatgcagcagagngatccttgtctagccccaagcttttgtgaaatttcccatcaaaatctccataaaactcaattgcatctttggcaccaagcttctctgcccaaccattgatagcaaagggatcattaacagagacacatgatgacangaantcaatcggcngcagtgggntgcccnggaagttcngnccnggtccat

SEQ ID NO: 135621 - DNA, 581 bp, Arabidopsis thaliana columbia
  unsure (1)..(581): unsure at all n locations
gcaaaatctctaacccgcaatggctcaactcaaccaaacacaccatcatccgcaagagggaccccaagaaacaaaaacagtttcttctcaccnccaactccctcaaggctaaaccaatcctcgaggaaatccaatgacgacgactccaaaagcacaatctcggtcctgtccgagaggaaccgcagacacagcattgctggttcatcagtcagagacgatgagagcctcgctggctcaccagctctcccgagctacatggttccaactaaatcagctcgagccaggctcaagccccaaagcccattaggtggtaccacacaggaaaacgaagggttcacagacaaggcatcagctaagaaacggntctcgtatccaacttcgcttgcagtngctaaaccacggcggttttcagttcccctaaggtgganantggcggngtttcggtnncaacggggcaggacttagggattttatttaaaaaattattttccccnttttnatgggccggnattttgcnnttaggggnccctnattggaatnatttgngngnaagncannattntttttcaaaaaattttacc

SEQ ID NO: 135622 - DNA, 476 bp, Arabidopsis thaliana columbia
  unsure (1)..(476): unsure at all n locations
attcttgtcaagggtgttcttacaggagaggatgcaaggatagcgattcaagctggagcagcagggatcattgtgtcaaatcatggagctcgccagcttgattatgtcccagcaacaatctcagcccttgaagaggttgtcaaagcaacacaaggacgagttcctgtcttcttggatggtggtgttcgacgtggcactgatgtcttcaaggcacttgcacttggagcctctggaatatttattgggagancagtgggttttgcaccaactggctgaaagnagaanccgagtcaaaaagggcctccaaatggtgccgtgatgaantccaagctgacaatggnanctaagttgggtnccggcacctcnagtggaaatcncccgnaaccnaatntcaccggattggggactccngccaattttccnaggtntttgnaaaaaaaaaaaaagggggcgcncttaangggccaaantttgaa

SEQ ID NO: 135623 - DNA, 580 bp, Arabidopsis thaliana columbia
  unsure (1)..(580): unsure at all n locations
ggtcaacaacgtcgagaataatggcatcatctctttgtgcttcttctgccatcgctgccatttcttctccaagtttcttgggtggtaagaaactgaggctgaagaagaagttgactgttccagctgtgtccaggccagatgcgtcggtgcgcgccgtcgcagctgatccagatagaccaatctggttcccgggaagcactcctccagagtggctagacggtagcctccctggtgacttcggatttgatccncttggtctttcatcggacccggacagtctaaaatggaacgtacaagctgagatagtccactgccgatgggctatgctaggagccgccgggatattcatcccagagttcctaacgaagatcggaatcctcaacaanccgtcatggtacacggcgggaaaacaagagtattcacgggcaaaaccaannnctttgccgttnagcnacctgntcggatgggcanaaggcgtaatgggcgaanataagcccggagggnaantggccagtttccaaaaaaaactgnggggaaacntggnncagngggaggnnccnttggtngnccganccggaaa

SEQ ID NO: 135624 - DNA, 579 bp, Arabidopsis thaliana columbia
  unsure (1)..(579): unsure at all n locations
ctcagaatctctttcttttctaggtttattactacacaaaaccaaacatcatcaactttagttactaaacaatggcatcaggctcaatgtcttcttatggctctggctcatggactgttaagcagaacaaagcccttgagcgtgctctagcagtctatgaccaagacactccggaccgttggcacaatgttgctagagctgttggtggtaaaacaccagaagaagctaagagacagtatgaccttctagttcgtgacatcgaaagcatcgagaatggtcacgtgccattccctgactacaagactactacaggaaacagcaacagaggcaggctgcgtgatgaggnaaagaggatgagaagcatgaagctgcagtgagacaagaagcaacaaaccnaactacgtatgatcgtcaaattaaagggatcacttcagagngntgtgttttttcaatggctgncgaancatggtttttctgnaattcccatgtttnccnaagnatgggtttttcgggnnnaaaaaaantcccccgattgttcaaaaaaaanggggcgcnttggncanttgncnggatgnggna

SEQ ID NO: 135625 - DNA, 338 bp, Arabidopsis thaliana columbia
  unsure (1)..(338): unsure at all n locations
caaacaaacaacaatggctgtctcaactatctactcaacacaagctctcaattcaactcatttcttaacctcttcttcctcctccaaacaagtcttcctcnaccgtcgtcaaccacaaaccaaccgtagattcaacacactcatcacttgcgcacaagaaaccatcgtgatcggacnagctgctgactctggctgcggcaaaagtacctttatgcggaggctcaccagcgtctttggtggcgctgctaagccaccaaaaggngggaccctgtttcaaaaaattttttngggggaaggcccatgggggatcnncntngnnnanacccattttttnggaa

SEQ ID NO: 135626 - DNA, 215 bp, Arabidopsis thaliana columbia
  unsure (1)..(215): unsure at all n locations
tcccccncggtgagtaatgatgcctgtttaaagggaaggcgtaaagnttnaaaaaaaaaattggggccaaaaatgaaaggtgaagaangaaaccggtgtggaaactgcgtgagtttttggaatgcccgttcatataaangattttacngcttttagttgttntagcccnccgtgacttttggtttggtcgtttatgtctgttaaaattataaatt

SEQ ID NO: 135627 - DNA, 263 bp, Arabidopsis thaliana columbia
  unsure (1)..(263): unsure at all n locations
ttcgtttttgaacccggcaaanatcagcgagtcnccgtcaaagtcatgcgtgcctggccccgtgtagaactctttgccccatccgaaatcaaggccgtacattggcaaagttaaccaggtcnccactccaagatttgggtttccgtagaatggnccttccgngcttcccaaggcatntngatcttgaaacttcttcagatctttttggntcttaagntactctntcccaatcatcacgtattcgtttgttacattctttatgg

SEQ ID NO: 135628 - DNA, 549 bp, Arabidopsis thaliana columbia
  unsure (1)..(549): unsure at all n locations
cgaggttcccaantggncncggacttctgancgatctganttcgtttgcttaccnggaaagccattgtntgggttntccnttggagcccatgcttttcttcccctgactcttcgntgaccaggggttntagagantctcgtaggatnccnccgagggaaaactccattagcantagtcgtcttcaggntagaattaagcttcgtgagagaagcattggcgaagaggntcaccactttgacaggagaagtgagaggggaagggacagaagcgagttaccttctcagggtagactccgagatagaattaagggtaggttagaggaaaaccatagtggtaatcaggaaagaggtttcggggctccatgggcgagaagaagagaaatggaagacgaaagaaaatcagctcctaaaagcagcagagaggaaagtaagccagagccatctcttgggaagaggaaaagctttgaagaggatcatcatagtcataagcgatcaagggattcatttgcagctccattgcctttcagtgagattctcaagagaaaaaaa

SEQ ID NO: 135629 - DNA, 583 bp, Arabidopsis thaliana columbia
  unsure (1)..(583): unsure at all n locations
tcgactcagccaaaggatgggctgcttcaataaggttcaacgagcctgtgttgagtcaatttcaggagttctacaaaagaccagacacgttcagtcttggaatctgcaatggatgtcagttaatggctctgttaggatgggttccaggtcctcaagttggcgggtcacttgacacctcgcagccgaggtttgttcacaacgaatcaggaaggtttgagtgcaggttcacaagcgtgaccataaaggactcgccatcgataatgctgaaaggaatggagggaagtactttaggggtttgggcggcgcacggagaaggacgggcttatttcccggacgaaggagtcttggaccatatgcttcacccagattttgggcaccattgagatactgtgatgatgatgggaacgtgactgaanggaccctttaancncaatggtcacccgttgggaatagcggcnatatgtccnccgnatggngacattttgccgataatccccacccgnancgtgttccttnatgtgggagtcccatgggncccaaaaactgggccgttaaaaactgcccacccctggtaaaattcntc

SEQ ID NO: 135630 - DNA, 578 bp, Arabidopsis thaliana columbia
  unsure (1)..(578): unsure at all n locations
tgaaattcaaagaacgttgtttgcgaacatagtacagacgatcacataatagaaacgccacgataaaaaaagacaggaaattgaaaagagtacagccattcgaacatctttatttaatattatctcatcgattatataatattcgaaacatccgctagtagcttcatttgaccgtcgctcatcacctcacggtgttgcagttggtgctggcgctgattttgtaaggaatattgactttgcatgcgctaggaagtccagctgcacgggcagtgttgagaccgggaccaacggctttagcggcagattgaaggcaacggcaagcttgctgacggtctgggggttgtactggccatgtttttaaaggttagtaacgccggttgcagcaccccttgggtaaagtggganacctcggggncaagtaaggcaatgcnccctgccaagnttcccgtttncgggtgccanaacncanaaccgggtcnntgtnatttgaccggccaaaattttgnanccaanccattaantccgggcncnggggcccgaaatcctngaccccggggggcnnaantnttaagngcccc

SEQ ID NO: 135631 - DNA, 611 bp, Arabidopsis thaliana columbia
  unsure (1)..(611): unsure at all n locations
aagggtttcaatacatccatccaatgcataggtctattatatcaaaagtgcactgaagaagaaagaaatgagacgctaagatgcggaggtaactgcaacttgggtggtttccttatccttagcctccttaagtagcttccacttctcaatggtgtcgatgagttcccctgttttgatcagatatcttaccttctgtccatcttcaagtaccttgtgacccacccggcttactacgtctttttcttttgaatacaacatcacatttgagctgtggataggtgcttctatcttgacaatttgaccaggctctccctcttctcggntcttcatgtgttttgttttgagggtcacatcctttgaatcacaatgggaactggtgtgaagggaaaaaccttaggaaccncccccgnattttanccctggngggggccaganattaactttgactggaacccccaaacttggcatgngattttggggngaaancggaaaactggttngggtggaatcctttcgggcccaaagggtgngnntttnaaagaanaananagggggnccgggggcngaancctgaacccnggggggcccaaggttaaaaggggnancngggg

SEQ ID NO: 135632 - DNA, 622 bp, Arabidopsis thaliana columbia
  unsure (1)..(622): unsure at all n locations
catgctttcgcaccccagcgtcggtagggacccagagagctgccttcgcttttggcgttccttcgtagatctgtagatttcacccctccacacgaaattccactctcctctgtctcactcaagtgaattggtttcgaaagcattccgccactttttggcgactttcactttcaacccgattcaccgcctacgtgccctttacgcccagtcattccgaagaacacttgccccccccgttttaccgcggctgctggcacggagttagccggggnttcttcctcgagtcctgtcatgatcgcgnactcgacgaaagagctttacaagcggnattgcctttctttactcacgcgataattgctgggatncggggtttcggccaattggccaagaattcccantgntggcccccgtgggagtccggggcgggtttaagtccaagtggtggtgnttaatccgaaaagacaagnaagnatcattnggnttggaagnctttaccaacnaacaaccaaaacnangaggggaattaaaaaggggttttaggttnttaagnattnggcnaatggttggaaatcaaggctaagnacggtgaaattggttaaantccggcctgggaanaanaatt

SEQ ID NO: 135633 - DNA, 617 bp, Arabidopsis thaliana columbia
  unsure (1)..(617): unsure at all n locations
cttctctgcccatcaactccatttttcttcaacaccttgtacgacccataccgtgaaggtgctgacttcgtccgtggataccctttcagtctccgtgagggtgtttccaccgctgtttcccacggtctgtggctcaacatccctgattacgatgcccctacccaacttgtgaagcctaaggaaaggaacacaaggtatgtggatgctgtcatgaccatcccaaagggaactcttttccctatgtgtggtatgaacttggcctttgaccgtgagctcattggtccggctatgtactttggtctcatgggtgatggtcagcctattggtcgctacgacgatatgtgggctggatggtgtatcaagggtgatctgtgaccatttgggaattgggaagtaaaaacaggtttccccacatttaccacagcaaacccagcaacccggtttgtgaanctttaaaaaaggggttccaaggnaactttcttggcaagngggnaaatnatcccttttttccaaaaggggaaacccccccnaaaaaanctntncaaggttaanantggnanntggggntnnccaaattggggaaaganaaccaanccccctttaccctttntttgnnc

SEQ ID NO: 135634 - DNA, 596 bp, Arabidopsis thaliana columbia
  unsure (1)..(596): unsure at all n locations
tggagtgatgaagttggcatgcatggtcttggcttgcatgattgtggccggtccaatcacagcgaacgcgctttatgagttgtggcaccgtcaacggcaacctggcagggtgcattgcctacttgacccgaggtgctccacttacccaagggtgctgcaacggcgttactaaccttaaaaacatggccagtacaaccccagaccgtcagcaagcttgccgttgccttcaatctgccgctaaagccgttggtcccggtctcaacactgccccgtgcagctggaacttcctagcggatgcaaaagtcaatattcccttacaaaatcagcggcaagaaccaaacttgcaacaccggtgaggnnattgaaccgannggtcaaattgagnctaactaancggattgtttcgaataattatataatccggtnggnntaatatttaaaataaaaattttccaattggntgaacccttttaaatttcccggccttttttaaccggggggttnaannngggnnnggctgaccaatgtcgaaaaaacgtctttgaanttaaaccttaagntaagngccggaatttcngggaaaaaaaggntncttg

SEQ ID NO: 135635 - DNA, 611 bp, Arabidopsis thaliana columbia
  unsure (1)..(611): unsure at all n locations
ctcgaagcaacagagtttcattggatgatcaaagggagtcttcatttcattctatagatggagatccaatttttcaactagcagggcttcaagtgacctatgaatgcaacaagaaaccacaaggtcttactcaagatgctattaactgtttacaccggcaaacttttagctcagccgaggttaaatccgagatgagagattgtagcatatgtttagagagtttcactaaaggtgacatgctaatatccttaccctgtacccatagtttccattcttcttgcttaaacccttggcttagagcttgtggagattgtccttgttgccgtagagccatagcaaaggnataggaacttgtaaatagaatcctttgcctaaccattagggccatagncatacacatcctcctcttcttcttggcaataggcatncctaaaaacgntcttcctgaggtttggcgccatgaggggtttttttaacngcacaaggttgnaangggtttggtggccattagggggtcaacggtgaancgangggggaacctttaggttancncnggnncccctnaaggctggnggaatgaannatttcngnggngtccganccgggggctt

SEQ ID NO: 135636 - DNA, 614 bp, Arabidopsis thaliana columbia
  unsure (1)..(614): unsure at all n locations
cttttccttctctttttggttacaagcggtttcagttgatcagttaaacttggtagaaacagtgactcacagcaaataaaatctccgtgtaaacttagtggaagatattttacaggtaaatgctctacagtgcccagtggaaacttgagacatgttatcaacgagaagttatattacaaaacgaagaaaaaagaatctttgtctgtgagagaactcttctgccatcaccggttaaacgaagtgncctgagttatcatcataatgacctctccaagcattgccactgtcaccgccactacaagcttgattagtaactggtacaccggcaaagttcccgtctaagctcatctgctggacctcagctgatgaaaggatcttaatgctctgaacacagtttacgaattcttcccatggntcatcgccggcgaggaggatggcattttcatgatcggcataacaaggttccagccagatggtttaagngctccgngntggccttcgntccaaaatgggggtanttatgcccagncatcgaacccctgaacggggncgcattgntnccnctggcccggtttgnccttgaaagncgatcggggntggngncaacccncaaa

SEQ ID NO: 135637 - DNA, 613 bp, Arabidopsis thaliana columbia
  unsure (1)..(613): unsure at all n locations
tcttattgataaaaggaaattaagcagcaaatagcagaaagtaattcatgattggaaggataagattaataagattagagagactaagcatctgtgactgcaacagcttctttgacctcagtggttccattgttcttctccgttgcaggcttctcaacttcaggaacaacgaaagcagacactgggaaagtcctggacagaccagttggtgtcctgaaattgatcttccctgaacttgtcggctgctccaagacaagctcattgagagtgacccaaataagaagctccttggccttaacaccggtaagcttcttgatctttccgacctccacctgtgcaatgacctcggtggcgtaagagaccaagtttaccaatgggttcaaaacttgtggggtgatgctcttcttctggcttcagcagncaatanctggcccctctggcggnaccaacttcttcaatggccctcaatgggataaccattagngtagaaactcccttgggaacncctttgccttcnacgggatntccancccngggaattccntgccaaggcccttatcggaccaaccatgggnggaatnnnggggnagagnaaagtggggcgggccttaaa

SEQ ID NO: 135638 - DNA, 612 bp, Arabidopsis thaliana columbia
  unsure (1)..(612): unsure at all n locations
taaatagacaaaagcagatgatggaagataactagagtagacaaagggggtagtatattacacagacaaaaggatcaaagaggtgaaacaaagtctttgtgtgccgtgtaatctatttgccgaagagagatttgaaccaccaaacgcccttggagtcttcaggggcagtgttggactcaggtggtgtgtcactctgaggagtcttgtgaagcttgctgatgtcataaccttcctccactgccttctccaccagctgcttatacgtctcttcctccatttgcgccgtcctgctcaatatccagagataactcctggaaggctggccaatgagagcgtgctggtagtcagggatcgnatgtagagcacccagtaagtctccggtgacgggaatgatttgggagnaaaggaggncatagaactttanctttgagcttggcttcgtcgcttttangatcggccttatnagggctgncttcgntaaaacccnnttnccggtggccacgttcggtcaanacgggaatngaccnccnggggnaagggtaaggtggccaattcnacccggtcttggcnaacttatggnaaaanacgccgaantnttnacccgggngccaa

SEQ ID NO: 135639 - DNA, 588 bp, Arabidopsis thaliana columbia
  unsure (1)..(588): unsure at all n locations
tttgctgctagtggacggtgtttcgtccatctgcgcgcttgatttccgaatggatgagtggggagtggacgtggccttgactgggtctcagaaagccttatctcttccaacaggacttggtattgtctgcgccagtcctaaagctttggaagctaccaaaacttctaaatctctcaaagtattctttgactggaatgactaccttaagttttacaagctaggaacctattggccatacacaccttccattcaacttctctacggtcttagagctgctcttgatcttatctttgaggaaggacttgagaacatcatcggccgccatgctccgtttgggaaaggccancaggcttgcgggtggaagcatgggggctgaaaaactgcacacagaaggaggaatggataagtaacacagtggcagcagttatggtgcctccgcatatagacgggtccggagattgtganaaggnatggcaaaggacaactaaagnctggcttggcccaacaagtgntggaaggttcanattgnnccnggaatgaatagtcaactcccnggggcttccgngtngantnacctaaaggtttggc

SEQ ID NO: 135640 - DNA, 628 bp, Arabidopsis thaliana columbia
  unsure (1)..(628): unsure at all n locations
aacattacaagccattaaagagaacagagaaatttgattacactttacagttacgaagtcttgaaactttgattcgcaaattcaagattagaaacatccacaagttgcctttggaacaattccagtggctctgtatttagcagccgtttcttctgctttaagaacgtcttctccacgcttagcttcaatcattgctcttctctcttctgcttccttgtgaatcgctgcaaccttattcttcatcctctctgcatactctgctttcttcttctctagttgctcctcgattttcttgagttgcgcttcgacagctgctttccttgctggtttcccaagcatgaacatctgcaaatcttcttctcaagcttttggtnctctgctttgncccttttccgntttcttcccaaggntctgacgaaaggncaaacctcttttccctttgncaaaatcaggcaaggctaaaanatctccaatcgagcggtgaagncggagggtttcgccgggggangggcttctaaaagggtnncaacaacagaanggggtttgggggnacgnaaaattgnccgngggggggttgaattcncccngaaggtttgggaanancgnggtggactgactgggcgnantc

SEQ ID NO: 135641 - DNA, 549 bp, Arabidopsis thaliana columbia
  unsure (1)..(549): unsure at all n locations
cgttacaagcccaaacgaaggtacataaaagaaaagcagaaaatgaaaacgaaatcgatagggataagtttttccaactgacggaaacacaaactacaccaggtgaaatagatcacctcccaagtgcatgagacacgaaccaaccacttatcatcagatcacaaaaagcttagaagcttccaccacgaagacgaagaaccaagtgaagagtcgactccttctggatgttgtaatctgcaagtgtgcgaccatcctcaagctgttttccagcgaagatgagtctctgttggtctggtgggatcccttccttgtcctgaatcttagccttgacattatcgatggtgtctgagctttcaacctccagagtaatgggctttccggtaaggggcttcacaaagatctggatacancacgggacgagcccagatgaagtgngctcctttggtgtgaattgcaaggggggccatntcggntggtnccgggaannaaccntntgatcgnggatcccctatttgnctagcttnnatgcaangggtaccccacccaggc

SEQ ID NO: 135642 - DNA, 532 bp, Arabidopsis thaliana columbia
  unsure (1)..(532): unsure at all n locations
tgataacacacattcgaggaggaatgaaaaaaaggaattcgaaaaaaagaagcgttcgatgggtttggcaccaaagtaagattttgcaaaatacaaagaatcacaacaaagagaaatctctcccaaaataggtaaataaccaaacgcaaaccggtttgaataatctcttttctcttttcctttctttcatcaggcagtaacttggccgaacaacgacttacggatcactgggagtttcatacggaatgccacatcaagacgcgcatcaagtgtgttctcgcacacgattttcccatcacgagaagctaacacaacanctccagagcagtggagaccatgagggtcattagatttaggnaggagggggaagggatatttttgtgtcanaggaacctctngggnatgaacctttgctttccagcatattccncctttgggcatcagganaagntccactaacccaagcccctttcggaangaanaaccagaagggnttnaccgnggaannctgnnaatngncctnngggcgttg

SEQ ID NO: 135643 - DNA, 540 bp, Arabidopsis thaliana columbia
  unsure (1)..(540): unsure at all n locations
ttttaccatgacactgttcaccagtttgctcctacctatcacgattatgtgctctataaccatcaagatggtggtgacgaggggacaaagaagtaccgatcgagaacctttgtgccaactggccaagagatggatgcaatgagaaaaaacaaacctgtgtatgcaaacaagatagatggtgtttcagtctcaagtagtctatcttcagaggcaagctcacctaaaagctccagcgtaacttctgatcctgcacgctctgatgctgtgaaatcttccttgctggtggatgcctcagattctcttgaaacaatgtatgatatgtcgctcattgacattgatctatctagtttcccccagcaatgtcccaatctgncaagtggaaagtggggcctagataggggcagnggaaatggtggaaanccccattaacagggtcaaaacatgnccccaaaaggtgnatccagntgaanctccgngggggggnctagttgaaaatgttgtagttgnnacttgggnaatnaaaagctttaacccgncgga

SEQ ID NO: 135644 - DNA, 625 bp, Arabidopsis thaliana columbia
  unsure (1)..(625): unsure at all n locations
tgctttcacatagaaagcaaaagtcttaaacaacattacattaactcctttcacataaacagaaaagtcttaaacaacattacataaactcctttcacacagacacaaaaggctctttcttgctcaacgcatcaacactcttagttcaagatttcacctgtaatgggtgaaacatgttggctcgtagacttctgcccatttttcgaaccgaccactaccataggctttggtggtatcaaaccggccctgaaaagcatgctttccactgtgtctgttggttgagctccaacagataaccagtacttgattctgtcgaatttgaggctcactctatccgcatcttctttgccttggagtggatcataaaagcctaacacctcgatttggtttaccggccctgcgcgatttttcatcggggggcaactaacaccgatagaaggggcggtgtttacaaaccgngggcngggaattcctggagcccgggggggtccaccaagtccnanaancggncggcaccggggtggannncaanntttggncccttaggnnggggaaattccgncttggggaacnanggnaaaannggtcccnggggnnaattgaaccggccaaaatccnnaaaaat

SEQ ID NO: 135645 - DNA, 478 bp, Arabidopsis thaliana columbia
  unsure (1)..(478): unsure at all n locations
ctttttgtttacactactactactactacttgataacaaaattactgcaaattaattaaacaaacagaaaaagttttttttttgtgacagaagaaaatgagcttgaaagtagaagaaactaaaaacaaaaccaaaaagaaatccatctagttaggaggtggaagccaaactctcatcactaagcaactcttcccagaaaccatcatccaactctctctctaccaccagttgatgatcctcttcttccaacatattcctctgttttccatgcccttgcatctccaaagccaanacttccaattccgncatccgaagaagaaacctcttttcctcttttgctggactcatttatcctcaagctccttaaatttttntttatctcntttgnttccaanaactgggatgccaaaaaaccggnnggactcctgnaattgggncnnnggcangaaaaccggnantnatttgnccgctggntttc

SEQ ID NO: 135646 - DNA, 470 bp, Arabidopsis thaliana columbia
  unsure (1)..(470): unsure at all n locations
atctgccaatcatcttgttgactctttgttaaacgctggagatagattggttgttcttgatttctactctcctggttgtggtggctgcaaatctctccacccaaaggtatgaaatatgaatagtgtacttttttgtggatagattcagtgaatctggttttgtgtattgatatgttgtttttttgtatataacagatatgtcaattggcagaaacaaacccaaatgtgatgtttctgaaagtgaatcaagaagagcttagaacaatgtgtcatggtctaaacgttcatgtgctgcctttctttaaggnctatagaggagcagagggtaaaagtctgnaagcttcagctgcactattgcaactgtaaagccaaataataanctgattgatccaaaataaccatttgnanaanggntttaaatatcnantggnacttaagggnggnaaacctggaaacnccntttngnnntg

SEQ ID NO: 135647 - DNA, 568 bp, Arabidopsis thaliana columbia
  unsure (1)..(568): unsure at all n locations
taaactaggatgaaaaagtaaattaaaaaggtaattaaaaaccgaaagctaaatcatcacgatgagtgaacacaagtggatctgcttctcgtgaacatattccaatcggacgacaagttgtagtcgaacacccgatttctcacatgtggataaccccataacctataatccgatggattaaaaacaggcgactccttattaatccggttttgctttggtataccataaaccggcggggtttcattggttcggttccccatgaagaatgcactattggtttttagacatctctctatcaccatgttctcttctctgaacttgtccctaaatgtccttgaggggttgacagaaccgggttcggtttagaaatcattacgggtttctttggatttgtgtgagactcggctgcattttagacaaatggtattccgccgggcaatggtgaagctcctccccttggttccgccgnaagcataaanagccccggggtgagctaaaagcaaaacngncttnggggatggttancggnnacctcaagcaattgggaccgtacgatgccnccccnatc

SEQ ID NO: 135648 - DNA, 531 bp, Arabidopsis thaliana columbia
  unsure (1)..(531): unsure at all n locations
cgggatggaaagaaagtttaaagtaaagaaaagcttcttactaagtcatttgatcatatacattgcggatttagagaagacgtggttagtatttgtttagtctgcctgctttgcagaatctcggatccagggccagtctgattcacagagatcaaggggagagtttccatcctcatctttagcggctgtgtttgcgttctgtttaaccagaaactcggcgatagcttctctgtcgcatacaacagcataatgcaaaggggtttggccttcgttgtccttagcattcacatcggcgttcttatcgaccagaactttggcgatgttgaggtggccacggtctattagcccagtgcaatggtgtgcgaccttcactggncccttgcattttacaggaaatgccgctttnaaatgcnttttcaggtaantncncngactttctcccttcncctagnaaaaatccggtggantnngggatcaatcnttcaaactcaantttttngggananccccaattannaaagcccanaagng

SEQ ID NO: 135649 - DNA, 557 bp, Arabidopsis thaliana columbia
  unsure (1)..(557): unsure at all n locations
tttcaaagaagagagagagaaagaaagatggagaagaacatgaagtttccagtagtagacttgtccaagctcaatggggaagagagagaccaaaccatggctctaatcaatgaagcttgtgagaattggggcttctttgaggtacatacacaatatctaacatattattgtttgaaaagatttgactatagctagctcttagtggtaaggttgatcttttgttaatttcatttttcagatagtgaaccatggattaccacatgacttaatggacaagatcgagaagatgacaaaggnccattacaagacatgccaagaacaaaagttcaatgacatgctcaagtccaaagggttggntaatcttgagacagaagtcgaagatgtcgattggggnagcacttccacggtcggcacctcctcaacccatctcatgncattcagatggggcngntgatccnggncctaatggtttcggcccgaatcggcgggntttttttccaccatcccaactgngggaggatttcgcaagttgaccggnccgatcagctaaatggggc

SEQ ID NO: 135650 - DNA, 561 bp, Arabidopsis thaliana columbia
  unsure (1)..(561): unsure at all n locations
gaaatacagtacaagagaaaaacataagagccatcataggagaggatcaaaaccataacaaatatgattgtttctttgttctttttaagagtataataactttgtttgatgcacaacaacaatcaaatcacaatacatggcagaagggtgcttctctagtgaagaaagaacccgaaaaatgaaatttgtttgaagcactttgagtgaacttagagaccagactcgataaggtaatcgccgagcctctccacgaccaagttgcattgccctccggtcatcggttcatcatagataccaaagactagagcttgagtagtcttcttgatagtgactccaccaggtccctttttccctcgggtgacggntcccagcctcaccttggncaaccatgtacttctcaccggcaagggatagcccggttgggggaaaatggccgggttcttcaaagncttggtgntcccggnaaccctggagggtcaactgggggaantgngnctggnccanaatgcggcttggcgaatgngggttttaggggtcctcnccnccatnanggcccangtc

SEQ ID NO: 135651 - DNA, 561 bp, Arabidopsis thaliana columbia
  unsure (1)..(561): unsure at all n locations
catttaacttaagttcattacacataatagcatacaaactatatctacataccaaatccagatcaaaacacagacaatcaaaagaaactgaacaatgtatttcatcgtaagaaaaaaaaaagagcaattaacaccaatcaatgtgttaatcaaatatattatcgataccacttatccttttaatttgatttcaagctctgctcttgcacttctccatcgccctcggagcgagaccaatggcatccgatcctttcatgagacgtaaacgcttgcatgtatcgacgaacattggccaaggaacgtcgccgacgagcatccaatcaccgtctttgtcttcataagagggnacatagtcccagctattcaccaaatccatcaatttcctctcattcatgnaggccaacattccttcttctcctccatggttggccatggnaaagagtgnacatggtgggcaagcatntgnaagcccangngntttancaccccaaacggtttcccaganngggccggccatggacctnangagcgnggtcgggacngtggttggggnacnncnnc

SEQ ID NO: 135652 - DNA, 569 bp, Arabidopsis thaliana columbia
  unsure (1)..(569): unsure at all n locations
aagaaccgaactcatcactcactcatcatcctaaaacaaattttaatttttcttaactactccattattaccggccaagatcaaatacttgtcttttctagtgagacttgtgcactcgaaatccaacgccttcccaatatcactctgaacattgttggccacctcaaacttcaactttccatcaggatcttggcacgtggcaccggagacagggtcgagaaattggatggtgtaggtaggataaggatccaagaggaagaaaagcgggtcaagtgccttaagaccactcgccgttgtaccgtagaagaaggtcacgtgtaccgtcacagccacggggacgatgacatcactaacctcggtgaacaaagggntaaacctaagcaggtaaggtctctaacaagtggtccttcagggcaaacaacggntttccttcgggtaacaattccccatggggtnaccggnggtnanccgattangggnaagntcaccggctttatcggggccaaatctcngtacccatncaantggnnngaatcctaanccggggtcctgtttaaggngancggggc

SEQ ID NO: 135653 - DNA, 565 bp, Arabidopsis thaliana columbia
  unsure (1)..(565): unsure at all n locations
ggactaatcactatgtatctttatatatacaagtttgcaacaagcaattgagatttaagtataagacgagtgagtataatcaaagaatctttatatacaatcctccaatggtgaaactatgcgatcgatgttttgtctgtaactcgtatagtggaagaatctggtttggtccgaaccgatgggtttccggtatcatcaagaactacaaaagccgtatcaccaggcttgaagctcccggcaagaaaggcttcactgagtggatcttcaacaatctctgtgacagttctccggagtggtcgtgcaccgtaagctggatcatagccttgtttgcatatgagctccttgacgggttcagacacctctaaaccaactccgagtgccacgagcctcgacttcaagnttggaagcatcagggtcaagatctccatcatctgnagcctctcnaggtggccggnaatggcgnattcggccaatcgggtcanaacnntgngnggaaaagtcctgagtcttcngnaccaaggttatccggaaaaaagggcctancacacgggganccatagcagnc

SEQ ID NO: 135654 - DNA, 567 bp, Arabidopsis thaliana columbia
  unsure (1)..(567): unsure at all n locations
cgttttctctgatgataaacaagattcaaagtttctttataaactattgaggaatataagattacaatatacgagtctcacaagataaaagttaacgttcattagaacagtatcacggttgcacaaacttggctaataaggccaggtccagaatcttgacgtcaagattatcatctatcttaacgataccgtcagacccgtcgattccgatcagcttacctgtagacccacgatactgaccgccaactattttgacacgatcggatttcctcggaggaattatctccagttcgcttgggagggccattatagtggcaccttcaccgntggacccgagagacacttttacacggttccatccggaacatctcgggatgacggccaanatcgggggnctctccagccttgnggntggnaanccaaaatttnggggatgaaccatggtttaggatccccncctttaaaaggggnnttnnnatcgggggcattccnggggaatttgggtnccccnggnaaccggggnggaattctnanccgggggnccaatttaagggcccccggggggcc

SEQ ID NO: 135655 - DNA, 496 bp, Arabidopsis thaliana columbia
  unsure (1)..(496): unsure at all n locations
tgactgctgtccaactactgtgggttaacatgataatggacacacttggagcactcgcgctanactgaaccaccacaggacgacctgatgaagagatctccagtgggaaggaaaggaaacttcataagtaatgtaatgtggaggaacatccttggtcagtcactctaccagcttgtcatcatatggtgtcttcaaacaaagggaaagacaatgtttggtctcgatggccccgactctgatctaacactcaatanccctttattttcaacatttttgtcttctgccaaggtattccaatgagataagccncgaggggaatnnggaaaaaattgaatggggttccangggggttacctaaaggaactnacggnattccgtancnggttcctaacatggtncnagtggggggtnccaagggaatccctaatccgacctgcctgggggaacattttgcngggtccaancccnttaaatttttggggnnantgggttgggt

SEQ ID NO: 135656 - DNA, 487 bp, Arabidopsis thaliana columbia
  unsure (1)..(487): unsure at all n locations
gtatttgcagatcgccaagaacaaattgataaatctaatggcagttttcttgctgaaatatgtcaaaagaaatcgaactccagataattactctggtcagacttgacactagtagatgtggctgctgctggagtagcaggcgcactctcataatcaaccggttttggtatctctggtgggctagcgcatcgaaccaatgcccaattcactccttcaaagaaaggatgttgcttcatctcagttgcaccacgcttatacgctaatctatgctgaggctctttcacaagcagactcctaatcaaatccctagcagcaaaactggcaactggagattctggggaaacgcagaggctgacccacaagttgaagagtgttgctcggtttcctgaccctttaaacgggggtttncaaacaatagccntacaaaaaggtnccaaaggccccaatcancggatcccatgccctcaccttggtggtnnagggnnat

SEQ ID NO: 135657 - DNA, 488 bp, Arabidopsis thaliana columbia
  unsure (1)..(488): unsure at all n locations
ttcttctctctctccgtcaatctcttcttcgtagtacacggttagcttccccttcgttactccgtccttacacaacaacaaactccaatcctcagtctccgttaccttgactctaggaggtttcgtctccataaggagagcagcctttgtcgcttgtggttttggtggctcaagaaaagattcatctattaagccattgtctctaccacctccgctggtggtggtagtggtagtggctcggatccgccagaaactaacggcggccgtcacgacggcgatccatgtccaaagattgttaaagacgaagttaacgtagtcgaaagccaaaacctctaacggagaatccaaagtcgccatttctgaaanggttttattatatcctaacggagaagattgaatcagtgggtatataaagggggaagaaagagaggnttagtatggggagagattgatcttagccgttggatggatttgaagaaannaaatgg

SEQ ID NO: 135658 - DNA, 528 bp, Arabidopsis thaliana columbia
  unsure (1)..(528): unsure at all n locations
ctgcaaatagctctttgctgttgatctttctcctccatcaacaaacatgggtaagacacgtggtatgggagctgggcgtaactgaagagactccgaattaaccagaggtgggctgacaagcagtacaagaagtctcacttgggaaatgagtggaagaagccttttgctggttcttctcacgctaaaggaattgttcttgagaaaattggtattgaggctaagcagcctaactctgctatccgtaagtgtgctagagttcagcttatcaagaatggaaagaagattgctgcctttgtccccaatgatggttgtttgaactacatcgagggaaacgatgaggncttgattgctggatttggccgtaaggggcacnctgtgggaanatncccgggttaggtccaaggccntaaaggttccgggggtcaaccctgggcccctccanggaaanaaggggacccaaanttnnnaacccggnaaaaactccacctttnaaaggtttgaanccngntanncngccngccaccnaag

SEQ ID NO: 135659 - DNA, 503 bp, Arabidopsis thaliana columbia
  unsure (1)..(503): unsure at all n locations
aaagaatgatacaaatcacacaaatataaaaccacttcctttcttctangctttagaagtgccacgatgatccttatcgatatgcttcaatagatccaccggatcacgaaaccctctactacatttgggacaaacatcaaccgtaactttgccacaattctgttttccattcctctcttgcgttttctctgaattgccatcattgccactcgcaaactgtaacttctggcttatatcgttaccgagtctactaatacttgcttccgcagaagcgaaaagactagaccatctcgaagaagatgatgatgatgcaggagcttcttttgtgtttgtactcaagaaaccccatgaatggagnaactcgattcaggnttcttggggccagaacaanctatgatnagggcccaaaccggtggttcaaaccaatgatcgntgnaacaatcccgnncatttaannggtattggngnatggncagagntccctgnaccaggnanaggnnatt

SEQ ID NO: 135660 - DNA, 573 bp, Arabidopsis thaliana columbia
  unsure (1)..(573): unsure at all n locations
catttgactgtagaaatttatagcaatttactttatcaatcctcccaaatcactttatcaaagtaatggggtcaaatgttaaaaattgaaaagttatggagtgaaacttaaattacataaatgctcttccaaggggaagaagactaagagtatagaatctctctaaccagaggttctatcaccaccaaaacctgattgtaagaagccggtttcctccagatgactcacatcaccccaaacttggatggtccatttgtctccgtcgaataaacggaacacattgaccgatgtattgagtatcttttcaacttttcttgcacttggacgagctctttccgtagagagatcgggtcacacctccatgggtcactaactaacaatcctttcacctttatggttggcgccggtccctggaatggaggtggacatctaccggaaaagttggcaaggcttctcccccanctgggaaancacggctgngngggtnggtggaaancctggnaggtccgggggnatttcgaaggcctggaancaacccttggganccccnaaagnttcccggaaacaggtgga

SEQ ID NO: 135661 - DNA, 562 bp, Arabidopsis thaliana columbia
  unsure (1)..(562): unsure at all n locations
tttacgtcatcggtttctttagagacatggtcgatgctctttgtccttacatcggtctaccaagttttcttgaccacaacgagacctctcgatccgacccgacccgactcgctctctccacgtcagcaactcttgccaacgagttaatcccggtggttcgtttctccgatcttttaaccgatccggaagattgctgcacggtttgcttatccgattttgtatccgacgataagattagacagctgccgaagtgtggacacgtgtttcatcatcgttgtttagaccgttggatcgttgactgtaataagataacgtgcccgatttgtcggaaacgggtcttaacgggaggaaaagtccaagccggttgaattgggggaacttcagaattgggttaaaaatgaagtggngagancaacaataatgatgggttaactttaacttttaactttttcacgggaaaattttccaccggaaaatccttctccnaacaacnggaaatccaggaaaagttngaaatggggaatagcncaacaacctncttggaaaagggggggaatccnca

SEQ ID NO: 135662 - DNA, 590 bp, Arabidopsis thaliana columbia
  unsure (1)..(590): unsure at all n locations
cagagacttcctcatcatcgtaacccgaaagaactcgtctcgttggattacttggcagagttgggagtgttgtactggaagttgaaccctgagaactacgagaatgattctgaacttagcaagattagagaagacaggggttacgattacatggatttgctggatctgtgtcccgagaaagtcagcaactacgaagaaaagctgaagaactttttcacagaacacattcacaaggacgaagagattcggtactgcctagcaggaagtggctactttgatgttagggacaaggatgatcgttggatccgtatctggatgcaacctggcgatctcattgtccttcctgccgggaatctaaccaccgggtcacactcgacggcagcaaactacatcaagctaattgaggctgttcgtgggggaccggntttggcaccatataaccggcacaggaagaacatcctgtttggnaaaagatttcncngggtanccncaagntttgnganccgtaagcccttacaatntaaaaancctgtggnaatgnagatggtcccctagctaacggaaanaaaaanggcccnctggaantgctt

SEQ ID NO: 135663 - DNA, 598 bp, Arabidopsis thaliana columbia
  unsure (1)..(598): unsure at all n locations
tgccagaggatgatagtgggtgatatcaaggattccatttgtcgagttcctgatactccctatgacgataaatcatattcaaacatccctactacgtcgtacgagcttcctgatggccagacgctcgagattggtgctgataggttcaaagttcctgatgtgatgttcaacccgtccatagtccagacgattcctggaatggagaagtatgctgagatgattccttccgttcgtgggttaccacacatggtcatggagagcatcaacaaatgtgatgtagacatccggagagagttgtatagtagcatactgcttgctggtggcacatcgtcaatgcaacagctgaaagaaacgtctcgaaaaggnacttgatcgaagagtctcctcactcagctagagttaaagtgttgcaaancggtacaccaacagaaagaagatcagtggatggtnggaggngttnttgnatnctagggcattcaacanatgnggtcccaagctnagattgganatgggntccacatccgggaaatcctaaagcgnggtccantntgngggctnaaacgaacttggaacnaatgggnattcnttgcnccggngc

SEQ ID NO: 135664 - DNA, 608 bp, Arabidopsis thaliana columbia
  unsure (1)..(608): unsure at all n locations
tcaggtgacagacgtcgttgtgattcaaatctttttccggtgaacttaatttcggaggctattcgatggcatacgtcgaccatgcgttctcgatatcggacgaagacctaatgattgggacttcgtacaccgtcagtaatcgaccaccggtgaaggagatctnactcgcggtgggtctactcgtattcggaaccctaggaattgttttaggtttcttcatggcgtataaccgtgttggtggngatcgaggtcacgggattttcttcattgtactgggatgtctactgtttatcccggggttttactatacacggattgcatattacgcttacaaaggatacaaaggtttctctttctcaaatataccatcccgtttaaagccttatgacttggtgncccttcnctcttaactcaatgnaatagggtggttaccgntttaatnacttgactaatgcccttaagtgggaatttacatgacttgaatganccatggttgaaccaaatgaaccccntttggggtcccccnccccaaangnaaancaagaagccncnggaaaccaccccgngaaaaangannccaanncaancccaatcggggcggaaanccc

SEQ ID NO: 135665 - DNA, 565 bp, Arabidopsis thaliana columbia
  unsure (1)..(565): unsure at all n locations
gaaagccttccttctcatgtaatatatctgttctagttttatcacataataactaactgctatagcttataatatggtcactgatgtgtttgtgagcaatgccacagctacaggagcatctgtcctggtattcaattctgaaacatagaatccgggagttggatgttcgaattttgtcagtctaccctttttgctctatgttttattcagtaacttttaatgtgttttctatcccacatgaaaagaatttgttttcactaatcattttttctattttacaacatctaaactgctactagaatagaatccaaaagtttgcccctgttattgnatacatctcattaacacgaatctttggtttggtgacattggtaatttttttcaggngtgatgttcctgggaganctgnaccngattcctacaccttcctggtggaagttgggnccacacccaacccgggcangcnggtgggaaangnngggntcagngggaggcccggtcannaatgccttgngaaggcctggnatttataagnncgnaaaatgggccccttgagggnncagga

SEQ ID NO: 135666 - DNA, 593 bp, Arabidopsis thaliana columbia
  unsure (1)..(593): unsure at all n locations
ttactagagcatcaatcatactatttctcaatcaaatctttcctttgccagagttgctagttacataactcgtacattctcctaaaaattaaactcacaaaccttcaacatgttccagagcgctgctacatctaacgacctctgccgcgaccacgcccacggccacgtccgcgaccgcgtccaacagctttccctaaagaagaaagaaagagagaacgaataaatggactgataaagaagtcttttagcttatgaagacgaatattacaaacaccaaaaatgaatggagcagtaccagcaacaggcttcttaggtttaactctaggagtgtcttccacaagtaaagtctccgaggttcaagctatcagggaagaatgtagtagcggatattattanccctcaagctaagatgntcaagtgtactggggtttccccttcaggtcanttcactggcctcaagtgggtgtcatgggcacatcacaccagtgtgggccatggccaaggcccatcttnagcngangancagtccatggtaactccccaaacngnngggtnggggggatnctgancccggggggcccttgntnaggggc

SEQ ID NO: 135667 - DNA, 540 bp, Arabidopsis thaliana columbia
  unsure (1)..(540): unsure at all n locations
tctaattctgcggcngcaacactgaatacatttggcgggtaatgtaccaccgaagcgaatctcggtgatttgaggggtttagccggcggattaaacggtttaaacagctcagctatgattgatggaggagatttcgacggtgcaaaggcttacaaagacagtaaagtctgcaatatgttgacaatgcaagagtttcacaggcgtttccatgaagaaactggagtcactttcgcttcgctttaccccggttgcatcgcctccacaggtttattccgagagcacattcctctcttccgtgccctcttccctccctttcagaagtacatcactaaaggntatgtctccgaaacagagtcaggcaaaagacttgctccaggtggtgagtgntccaagcttgncgaaatcaggggggttattggnccngganaatggcttngggtccttttgggaaccagtntccnaagaagcaantncggttnaaaggccnaaaatgtgggaaccnngaaacccnngggttgccaaaaactgnagcnggaaatt

SEQ ID NO: 135668 - DNA, 435 bp, Arabidopsis thaliana columbia
  unsure (1)..(435): unsure at all n locations
taaaatactantactaaacttaattaaaaacaatgataatcattgagtatttcaagaggngaacactatattacaaagtaaccaatgaaaataacaaagagtcgagtccaaaccaaaaccttagtccaaattggtttctacgacccagtggatataacaatttcataaaattcatagccaccggttaaacctggacccaataccgaactcacacacataactgaaactccagttcacctcctatagccggttcccttctctcacactctcagaaatttccaagcaatttctcaccgtttcgttatcnacaaatccactataaatacttcgactcttcagctttgtattattcncntnaacattccattactccgaanccgtttacccccgannanccncnacnaatttncaggntttggcaacccgngctttngg

SEQ ID NO: 135669 - DNA, 700 bp, Arabidopsis thaliana columbia
  unsure (1)..(700): unsure at all n locations
cttgaaacttgagcttcaattacaaagaatggctgcttcaagtgctgtcaccgcaaactacgtcctcaagccacctccattcgcactggatgctttggagccgcatatgagcaaacaaactctggagtttcactggggaaaacatcacagagcttacgtggacaacctcaagaaacaggttcttggaaccgagcttgaaggcaagcccttagagcacattatccacagcacttacaacaatggtgatctcctccctgctttcaacaacgctgctcaggcgtggaaccacgagttcttctgggagtcaatgaaaccaggtggtggaggaaaaccatcaggagagcttcttgctttgcttgaaagagatttcacttcttattgagaagttctatgnaagagttcaatgctgctgcagncactccagtttggaagtggctggggcctggnttgnttaattcaaatggaaaaccncaaagtagtggaaaactccccaaatgctggtgnaanccccttgnggtcggggnctttcccaattgggttacccaattgnatgccttggnggnaatcgttaccaaccctttggcttcccaagaaccccgnangccnngnttccntaaanngaatncatggcccaaacccttgnggcntttgggaaacccgnaangtccaaaccttttgggccccnaaaangggggntttg

SEQ ID NO: 135670 - DNA, 613 bp, Arabidopsis thaliana columbia
  unsure (1)..(613): unsure at all n locations
ttaacattaaagcaaaagcatcaaccatcatcaaaatccaacaagatagtgaaagatccaaccgccacttgcaactacactacacaactctgaaatacaaaaacttgcaaaacacagcccaaaacagaaactaacacacattgcttaggtgggaagacagttttttgtacaaaagaaaaacattccccgtcactttatccactctgataaagtacacaaaaacaatataaaaaaaacaaagtaaggtggcggaagatcaggtcaccatatttacatcacccgcatgtcacactccatcggnccatccctaacgggtggtgactcctttgagtccaccggctggtacaaccattatggcaccaaaaaggggagggttggattttgggccaaatccaggatttaaacntattccactttatcccacggggggccacnttaacacagngggcacatggtnccttncctttgggggtttcattttctacgnggtcggtaangggggggggantttgnnngggggggggttttccaanngttttgggccgngggccttntngggggggttntncccngggttaaaagggcccnccacgntttctttngggggnccccg

SEQ ID NO: 135671 - DNA, 644 bp, Arabidopsis thaliana columbia
  unsure (1)..(644): unsure at all n locations
agtatgtatctgagctatggaggaagaaacagtccgatgtgatgagattcctccagagggttaggtgctgggagtacagacagcaaccttcgattgttcgtctcgtcaggcctactcgtcctgataaggctcgtcgtttgggttacaaggccaagcagggctttgttgtgtaccgtgtacgtgtgagacgtggtggacgcaagaggccagtgcctaagggtattgtgtatggtaagccaacaaaccagggagtgacacaactcaagttccagcgtanaagcgttctgttgctgaggagcgtgctggcaggaaattgggtggtctcagagttgtcaactcttactggctcaatgaggattcgacctaccaagtactaccgagatcatcttggttgacccagcaacacaatgctgtgcgtaaatgancccgagaatcaactggatcttgaaacccagtttacnaagcanccgtgagccccagangncttnnccccagaggggnaaagaagnaccannaggcccccncngaaaaggggntccaacaaacccccaaagaacccggcccaacttttnaaggggatcanttgggngaaaaaaaancttttttancctttgncnggaacccggtgaatncccttttngntt

SEQ ID NO: 135672 - DNA, 597 bp, Arabidopsis thaliana columbia
  unsure (1)..(597): unsure at all n locations
tcgggtggctcccggtatccatcccggttcaggtcggttcacagccgtgttcggtttcggaaagaagaaggcagctcccaaaaagagtgccaaaaagacggtgactacggaccggcctctttggtacccaggcgccatttctcctgactggcttgatggttccttggttggagattacggttttgatcccttcggtttaggcaaaccggccgagtatcttcaattcgatatcgattcactagaccagaatctggctaagaacttggccggagacgtgatcggaacccgtacggaagctgccgacgccaaatcgacgccgtttcagccgtacagtgaggtgttcggnacccagagattcaggggattgcgaaatcaaccacgggcggtgggcgatgntccgtaaatcttcggggtctctccggcgaatggntttaccgggggttaaattgggaaaaccttggnaaggtngancttttaaatggatcgnccaaatttgggggancaataactttccgnatcccgaaattaaattgnnncagggtttannaatngnaaaaccgngtttaacgaaacccggnttttttgaaaggttaancc

SEQ ID NO: 135673 - DNA, 594 bp, Arabidopsis thaliana columbia
  unsure (1)..(594): unsure at all n locations
ctttttattaaagttaaaacaagaagaagaaagaaacagacatgaaaacataaacaggtgctgaagcatacgaatctttgtttagcccatggcatacttctgagtccagtttcttgcagtagcctcgtatttggctctgtcggttttgtacatgtgtgcaatctctggtaccaaagggtcatctggatttggatctgttaacagcgaacatatcgagagcaacaccttggaaatggtgagggcagggctccattgttctttcaaaatgtcaaggcaaatgcttccgttgctgttgatattagggtgaaacaccttcgtcctaaatgcaacctttggtggtttgaatggatagtccggagggaagtgaatgggaaccgagaaacacaccgcctgaatacggnctctctgcaggncccataattgtagcntgccaatgaaacatgcctcagaactggncctgcactgcaganggttgagggccttcctgnantcctcagccctcaagancggtcgaccatttcncctgagaacggccngaatcctganccnggggncccagtctaacggcnnnccggnggnccacttttcctttga

SEQ ID NO: 135674 - DNA, 531 bp, Arabidopsis thaliana columbia
  unsure (1)..(531): unsure at all n locations
tacttgttattggtaaaatccaacaaacaaccagagaaaaagagtcatataaatatacattgttaaggaagattaggaacaaaaagagaagcacaatttctgccacaagtgtctcctaaaaggctacaactttgaactcaaaaaccatccaatcttcactcttttcagggatgcgatttagaactccacgaacctacacacatatttgctcactctgtttgagagtatgagccacggtatgatcccgnccattacatggcctgtcatgtgacctcctgttccccaagataacaaagtcccaacgggttgnacaagntgctttagcggataatngncanttgggggcctccagaagcaccaattcccaggnttagggatatcacaaccttcggaggaaggagnccctttccaaaaatttcggatggaagcctggattccttggggagnggggcccaaanttngnaaggnctttcccttaggangngggggcccccnaagtttcggggttnggaattnggggggngganaang

SEQ ID NO: 135675 - DNA, 566 bp, Arabidopsis thaliana columbia
  unsure (1)..(566): unsure at all n locations
ttcttgcaaccagagattatatgagttatctgagaatttctataaacatcataaaggagccacttgatagagaaaacacctctcttttattccttcatgtacaacttcattaatgtcccaagaaacttagctagagttgttgattgagccttgcccctgccgacatggaatctgcgacaccaccaggagttgtcttcatctctgaactgcttctaagttccgctccaaccactgcctccgcatcttcacttgtcaccaccttgtctccgggaagcctctccgccgcatcctacacaacccaacaatccgaatgcaccaatttattggacttttagaatgnaacactaatagnaacaaacaaaccaaaaactccatcatattgnatccatctcgatgtagcggtaggaataggcacaaatcatttccaacaatatctggtggacctagnctagcactctgnaattttgggcgggacntnaaccaatcaancnngggaatatgnaatttcaancccncatgggttnaaatnccncaanaacccccccanctanggtcngnggacgggc

SEQ ID NO: 135676 - DNA, 557 bp, Arabidopsis thaliana columbia
  unsure (1)..(557): unsure at all n locations
cgcgaaatttctcatttctcgtagccgccgcagcaatcaacgatgacaggcaaagcaaagccaaagaagcacacagcgaaggagctccaagctaaagccgatgcagcgttgaccaatcgcggtggaggaaaggcagggctcgccgatagaaccggtaaggagaaaggtggtcacgcaaagtacgagtgtcctcactgcaagatcactgtaccggatctaaagacgatgcagatccatcatgaatcgaagcatccaaagctgacttatgaagagccgaggaatcttcatgaggctttagctgctcctgctgaatcatctaagcctaagcctggaatcagaggaagccttaagaagtgaagtgaagatggtttgggattgtatcgaatttcgatttgaaatttgtgggccttttaatggtggttttgatgtagaatataaccttnggtgatnatcccnatgctcgggggccngaatncngccgttccaatgtggaagaaanctgnaagggnancnccccntaggntaacccnnggctnannganacctccnatggangc

SEQ ID NO: 135677 - DNA, 582 bp, Arabidopsis thaliana columbia
  unsure (1)..(582): unsure at all n locations
aaatcaaggctttggtggttcagccactggcgctgtcgtcgttgtctccggttccttaactggagtttcaaccactgccggagccggagtagcctcttccttcttctcctctacctctggtttcttctcctccacgaccgcggtttcaggggtctcgcctttctttgtctcttcaacaatctcctctttctcaccacttgttccttcggttttggctggttcttcagttttggcaggttcttcagctttcacttcctccaccggtatttctttagtcttcacctcctccgggaggaaaacagataccttctcgaatatgaacgtgaaccgggtcctgcgaacatagccagctccgaagctaagacgaagcctcaatcaacggtttttgaatccggggnaattcaattttgaacaagntcccccgagggaanttctggaanagcgntgaagtttttcttcaaaacaaagcaacttaagggncctcaacaaaagcttgnattctgaaaangngggtcaaagggtccaagaactttgggtgaaggncggcttttccccnaantccctggantgtccaaaananaa

SEQ ID NO: 135678 - DNA, 540 bp, Arabidopsis thaliana columbia
  unsure (1)..(540): unsure at all n locations
gttgtaattgttttactcgtaggtcatgatggttgggttgggttatttagcgatactatngtgattaaagaggagtttgcatcattgaggttttttcttgctgcctctataactcttgattcaatccaaggagttttatcaggagttgcaagaggatgcggatggcagcgtttagtcacggttataaatttggcgacattctacttaattggaatgccgattgccgccttttgtggtttcaagttgaagttttatgccaagggtttgtggattggtttgatatgtggaatattttgccaaccatcatctcttttgcttatgacaatattccggaagtggncaaagctgnatgttgctacgggctgaaaacnccaagtaacgtcccattttcnacgngggcacattaatttcctaagcagananggancagtaaccaagnnaanattggacccagnncatttccaaacnctagtaaaataacctccaaggtcccntaanccttggnggaagggaaaaccnggcccaagtggcaggggtgaa

SEQ ID NO: 135679 - DNA, 571 bp, Arabidopsis thaliana columbia
  unsure (1)..(571): unsure at all n locations
ttatttcttaaagaattttgctaagttgctaatacaaaaattacaaacttggatactttcacagaggcactcgcagtaatatctaactccaaatgtatatcaaactttaatttagacacaatcaaagaaaaatgaaaaacaagtttcaagtttcagcctaagagacactcgatcaacgatgcttaagtcaggacaacgtaatatctttcacctctctttttttgttgatattaaacacttccaaagaactgttctattgactgcgaggtgaacacatttggagctgttcgctcggggttcaccggtagcgacatgaagctggtatttggtggacctagctagttgtggngctggattncgggggttggtaccaatatgncagtcagggtcctagctggcctgncaaaggagtcctcccaaccccgggcctccaaagngcccctacctttacggggcgggaatccggggggnaattgggnaaggaccccatccacggnnanccnggggggcnacnggcttttccanaagggaggggtccnccggnnctngggggcannngggggaaccaagg

SEQ ID NO: 135680 - DNA, 393 bp, Arabidopsis thaliana columbia
  unsure (1)..(393): unsure at all n locations
aagggaaaggatttgttttncctttcgatgataaacttaggaagcagatgtngttngaangcaaaaaatgtaataggtngattagaaagngaatgctngtttaagcaagaagaagagttcgttatttaatnccttttacatttaggngttgtttagngtatttgtgagatgctgaacagagggtgagagtgagtgggtaggtactgtaggagaagaagaagaagaaaagagtctttttaggttctatgactttatttatttttctttgttagtngtgttaaagagtctggttgtggtaggaaaaatggtgatagaagagaagaaagaaatcaatgcaatgtatcagatgtaaatggttggcatattaaaaaagaaaagttgattttccatctt

SEQ ID NO: 135681 - DNA, 291 bp, Arabidopsis thaliana columbia
  unsure (1)..(291): unsure at all n locations
cacatatatgtatagaangcgnnatatgcagaggtcncattcgcggcaaattcntgagcngttnctcaaaagaaaatggggaaacttagctgcttngggcatagctctncaagaggatcaagctctccatcaaagcagtctttcagaacagattcaaaggtactgatggagagaacttgcgcaagcnctttctcttacctgttgctgctttttaagtgagacttgagnctggtgtgtgagtgatattgtaaatggatttgattgatatangncnacaaaggtagntggctt

SEQ ID NO: 135682 - DNA, 225 bp, Arabidopsis thaliana columbia
  unsure (1)..(225): unsure at all n locations
tatctnatgaaaatgggattttttgtgggggagtttgcccttttgctgattntttnccctttttttaccgagggatattttttcatctgagattttntatcagtgtgtttgagatcagcaaanccccngngaaaatcctaagaaaaancgaaattatgtatttcattttcgtctttcatgtaaggttcaatttgtcgtcntaaataaatattagtngtttngnnt

SEQ ID NO: 135683 - DNA, 391 bp, Arabidopsis thaliana columbia
  unsure (1)..(391): unsure at all n locations
gganctttcgacncnttnttcgnccgggnaaacttaccggcgtttaacgttgcagcaatttcancggcgattagtggcgtattagcgttaaccgtttnnccttcaccaccaccggacgcacccanggcaacgaccatgggnggattccactngtttactattttttttttttaatgaaactcatcaaatacngtattactgtgcgaaactgcaaaaacccaaataaaagaaaagaatggataaaatgataaaatctaataaaccttgggtcgtctgtatttcaccctttttagttttttttcttctttttttataacttttgtcacttattttaatttgaaatagaatgttttttttttttgccnttaaataagatttgtgtgttgngtnc

SEQ ID NO: 135684 - DNA, 219 bp, Arabidopsis thaliana columbia
  unsure (1)..(219): unsure at all n locations
agattgtgttttgactcaagctaagaagttgcataaaacgcttaaagngngcnaaaggggaatttgaaccaaaaggngtttttagttttgttttaggggcttacaantgtaaaccttttacttctttacttgatgtattttttttttttttttgngaaagccagaaaagataaatngtaatgattgctncaaacatttttacttccaaaaacttcnnac

SEQ ID NO: 135685 - DNA, 295 bp, Arabidopsis thaliana columbia
  unsure (1)..(295): unsure at all n locations
ggaagctcatccaaagcgggacgggtgggagaacaaaccacccgatcttcagcccggacagtaaatcattagtcttcacttctnattatnctggaatctcggcggaaccgatctcgaacccgcatcattaccagccatacggtgatatcttcacggtgaaattagatggctctaatgtnaggaggctaacgnataactnttatgaagatgggacaccggcatngggccctcggttnatccaccccaacaatttttggggctacaaagggaggaattnattctnggngcttnttcg

SEQ ID NO: 135686 - DNA, 419 bp, Arabidopsis thaliana columbia
  unsure (1)..(419): unsure at all n locations
aaaccggaaattncccgggtggaacccacgncgtccgtntgcaaagaagtaagcaaaaataatggggcgtatggnttatctagcgatgaagaccgacgacgtcgatacggtggcgttagtcaattccgatatggaagagctcaaggtcgctgcgaagaaactgtttagcgatgtttcgaagcttggtggattaggcttcggtgtttcttttctcaaattcctcgcttctttcgctgccatttacttgttaattttggatcgtaccaattggaaaaccaagatgcttacatcactcctaataccatacatcttccttagccttcctagtgtcattttcaactttctcagttggagatnttgggnaaatggattgctttccnttnccggntnnncttcagncatttntttncctangcaat

SEQ ID NO: 135687 - DNA, 244 bp, Arabidopsis thaliana columbia
  unsure (1)..(244): unsure at all n locations
ccggccccggaaattccccggagtggaacccacgccgtnccgcaaagctcctattcccnattcaagtgaacacacttcggaagatggagatcactaacgtnaccgagtatgatgcaatcgcaaagcagaagcngcctaanatggtgtacgactactatgcatctggtgcagaagaccaatggactctncaagagaacagaaacgcttttccaaggttcctntttnggcctcggnttctaattga

SEQ ID NO: 135688 - DNA, 234 bp, Arabidopsis thaliana columbia
  unsure (1)..(234): unsure at all n locations
gggttttgttgggaggtgtgggtgcnccccaaaaagccccaattaaagagaaanaaaagtcccaanccaggcccaaagtggaagaaaaactttccactgcaaacaagtgtactnctacgccggccaaggcatgaccttcgacgggacgcttctggagttggacttagactcggtcnnccgggngaagtacaaggaggagtcnaggtgtttgggttgntgttcaatttcacccgt

SEQ ID NO: 135689 - DNA, 451 bp, Arabidopsis thaliana columbia
  unsure (1)..(451): unsure at all n locations
cnggattncctgggctgcccacngagcctgggctattcaaaccctttgatgaacaatttgttgattccaaggatttcgatggtgaagctctggagaaatttgtcaaagaatccagcnttccacttatcaccgtctttgacaaagntccaaacaaccacccatatgttatcaagttctttgaaagcactaataccaaggcgatgttgttcattaacttcactggagaaggngctgagtctcttaaatcaaagtaccgtgaagttgctacaatccancaagggaccagggtcttaggcttncttctaggtgaatgncttngaaaccaggccaaagggtgcaatttccaaggtaactttttggggcttnggaagnggaggcccaaggttccctctcaatcaatcaatcccggactttcnttacgggcaanggaaannncctggnaaaccaaatt

SEQ ID NO: 135690 - DNA, 342 bp, Arabidopsis thaliana columbia
  unsure (1)..(342): unsure at all n locations
aacaaaatggttcaagtggacggtggcagagttcgagcggttnaataactttgggaactgcgagttcagagtgatggagttgggtgcgagcggagagtacactttcgcgatacaccacagtgaagaagagatnttggattggggcatgtctaaagatatgattgatgatcaaaaggntcgtnttgatgggtgtcgtgtaacaacatcaaacgattcttgttcattgcatctcaatgagtattttnatttgtnagatgtcactgatgatgaagaatgaccactaaatttatatcgctatactttgttttgcgtattgaaagtttataatatttatttcatttg

SEQ ID NO: 135691 - DNA, 325 bp, Arabidopsis thaliana columbia
  unsure (1)..(325): unsure at all n locations
gcccactgagcctgnagatttaaatattgtagagtgagattctaaagagagagagagagagagatatggctagtggaatcgctcgtggtcgtttagctgaagagaggaaatcgtggaggaagantcatcctcatggttttttggcaaagccggagacggggcaggattggaactgtgaaatctaaattggtgtggcattgcactataccctggtaaagctggggaccttantttgggaaaggttggganttcttttnccattaaancgnttgncactttccangtggaggggtttantcccgagncaaaaaccnttccgnaaaat

SEQ ID NO: 135692 - DNA, 253 bp, Arabidopsis thaliana columbia
  unsure (1)..(253): unsure at all n locations
tctaatgatgattccggtgatgttgacgatgaagaaggtcttctctctgctttgaaatctntntgtcttaaantggatgcgagaggnttttggaactntgtgacggcgaggaagaaggagtnngagaatctccggtcaaagattccggcggcgttggttgnttgtgtagatccggcgatgttagtgcttnaagcgatatctgaggtttttccggtggatacaagaggagataaagttagcaatgattatngat

SEQ ID NO: 135693 - DNA, 362 bp, Arabidopsis thaliana columbia
ctatcctccaccaccatatgtctacagctccccaccacctccaccatactattctccttctctagaagtcagctacaagtctccaccaccacttttcgtctacaactttccaccacctccaccattctattctccttctccaaaagtcagctacaagtctccaccagcaccttatgtctcaaagacacccaactattgagtttgaattgtttcataatccataagaatgattgaaataatttgtttttatgattctgtccatttattcttgtaatattgtcccttgattcttttgattttgttccttgttcaactatttgttaagctttttatgtaaccaataaattttggttaatttcctg

SEQ ID NO: 135694 - DNA, 205 bp, Arabidopsis thaliana columbia
tatcacaagttcagcttaggattgatctttaatagacttgtgggagttggtttagctatatttgtattcatccggttcagtgtataagcagtaaaattattggtggcaatgtgaataacagagcagaaaactgctaatattttcattattaaataaaacaggaaaccgaaaggaatttgagcttcaatacatttttttactttag

SEQ ID NO: 135695 - DNA, 322 bp, Arabidopsis thaliana columbia
aatcgcacgtggaagctaacggtaatgacttcaggtatgtgccatttggtgttggacgtcgaagctgtcccgggattatattggcattgcctattttggggatcaccattggtaggatggtccagaacttcgagcttcttcctcctccaggacagtctaaagtggatactagtgagaaaggtggacaattcagcttgcacatccttaaccactccataatcgttatgaaaccaaggaactgttaaactttctgcacaaaaaaaaaagcttgatgcatattctatagtgtcacctaaatctgcggccgcagcttaggttcggt

SEQ ID NO: 135696 - DNA, 294 bp, Arabidopsis thaliana columbia
  unsure (1)..(294): unsure at all n locations
taaaagagagagaagctcccngagaagaaaagccctaaaagccccactactctttncagtttctnttgatctctcagcatcgnaaangtctgtgcgcagtactgaatcctaatgctgaggtgctcaacanatcggccgcgcttcatatgaccatcaacgccgctaagggtttacaagatgtactcaagtcgaatctcggtcctaaggggactatcaagatgcttgttggnggttccgnngatatcaagcttaccaaggatggcaacacgcttttnaagggaatgcaaattnaaa

SEQ ID NO: 135697 - DNA, 310 bp, Arabidopsis thaliana columbia
  unsure (1)..(310): unsure at all n locations
atcagattggaagatgctggatttgattggaaagtcttaggaccagatgttcaggaggntgattatgttgcatggcaatgtgatcaagatgcatacgcgtgcagtggacagaagtgttctgcacagtctatgctttttgttcatgagaactggtcaaaaaccccncttgtttccaaattaaaagaactagcggcaagacgcaaactggaagncttaaccattggtcctgtccttacatttacaactngaggcaatgttngngcacatggcgantctgcttcagattcctagntcacagcttactctttta

SEQ ID NO: 135698 - DNA, 264 bp, Arabidopsis thaliana columbia
  unsure (1)..(264): unsure at all n locations
gcttctctccagatttcaatgtttatggagctatgctagttggtttagccttctctgtagttttccctaacgcgattataatctgcaacacngcgnttgtgatctcggntttggaagatgtttcagggttaggagcnttgatgagagctagtgatttnatcaaagggcagattcaggntggtttgttganattccttggatcaactttaggattngcgnttgtggaaggattgtttgatcacagngtgaatgaaagttagttat

SEQ ID NO: 135699 - DNA, 361 bp, Arabidopsis thaliana columbia
  unsure (1)..(361): unsure at all n locations
caacgattcaggattggcttacttcaagacttgcaatggaattgatgaaacagggagcaatgcacactgtgttggcctctcttttaatggcattggcatggccagcgacaatcttagtagctgctgatttcatagatagcaaatggagtattgctattgacaggtcggataaagcaggaagacttctagctgaagtgctacaaaaaggcttncaagggaatagacccatcactctagtnggtttttcgcttngngctcgtgtcatcttcaaaanncctccaagctctnngctgagacagaaacanaacgctgnanctttttggagagagttgttctttctttgcgcacccnntttcaanca

SEQ ID NO: 135700 - DNA, 204 bp, Arabidopsis thaliana columbia
  unsure (1)..(204): unsure at all n locations
gtaagaagacgatggagattgggttcctttgacttataaacctaagcaacctttgtggaagcatttntctgaagaatcatttctctctgatttagatcccagcattgtctcatcctacaagaaagctttntcttctaagctattaagcaatcatagtantactagaaacccncatagacccncaaagnctctntnttgtagccc

SEQ ID NO: 135701 - DNA, 419 bp, Arabidopsis thaliana columbia
  unsure (1)..(419): unsure at all n locations
attcccatgcagatgatgagatcttgttcttccattcttcaagatcacttccctaaccgtcttggctgcctattcatcattcgcctccctcctgttgtccgtgtcatttcccagactttcatccaaattcttagaccaaccacacgcaagaagctgagaattgaaggggaaactttccatcgagtcctctctgaatacctccagacacttccttcataccttggtagcaactgcaactgcaaaagatgctcaaatctcaacgaacaagatccaccacagccacaaacacacccaagaagaaagagaagaagctcgagtgaaacagagaagctagacggcagccactggagttacaatggcccagncaactggttttatcctatgaagccgggccgagcctngacatatgtaggcaagtt

SEQ ID NO: 135702 - DNA, 234 bp, Arabidopsis thaliana columbia
  unsure (1)..(234): unsure at all n locations
gagggttaatgtactgtnccaacacattcagantatgctctcttctgagtctgctgtgcttgctgagacaggagattnctggttcaactgtcagaagctgaagctccctgnaggttgcggttacgaatttccaaatgcagtacggatcanattngctggtcagtgggtgctactctaggctatgctnangccatgccaaacaggcgtgtcatttncttgtattggagatggtag

SEQ ID NO: 135703 - DNA, 369 bp, Arabidopsis thaliana columbia
  unsure (1)..(369): unsure at all n locations
tgtgatacttcaggacttcaggtgataaccttcagacagctcgaatcttatgattttngtctgttttctggttacatctcagtatttgctgacatcttgggcttattgcaggcgtttcctcttgaacgatcatctgatcctcctaaaatnatatcagttgctcaatttcgtcctgagaagtcttgtaacaggctcatatgcttcancttgaggccttttcactagccttagagaagctagatgcagacgtccctagacccaagctccaatttgtgggaagttgtagaaacaattcagatgaagaacgtctgcaggaattgaaagccagagcagtggactaaaagtagatngtgacgtgcaattctntaa

SEQ ID NO: 135704 - DNA, 325 bp, Arabidopsis thaliana columbia
attcaagcaatgaaactatgaatcaaaggttttatgattatgggtctatgtaacaaaatgtagttaaatctttaatgctttacaaaattctataatatctcttttgaaatcattggattgggttatatgtaaataacatttttcatgaataattctattgcgattaatttaaagttgttaactaaaaaaagatttgattgagaaaaatatattttatataatccaatgctccaaaagttctgatattttggattttaagttttggatctcaataacaacaatatcacaaccttgatttcataaacttatatgaatcttattgtgt

SEQ ID NO: 135705 - DNA, 491 bp, Arabidopsis thaliana columbia
  unsure (1)..(491): unsure at all n locations
aagcgaaacaatgatgatagtggtgatgatggaggagaagacgaagaaggcagtgcagatgatgcagaaggaaaggagaccaagaaaggaccggtaagtgatcctgatttgaacggtgaagctggagataatgatgatgaacctgaaggggatgatggtaacgatgacgaggatgatgataaccatgagaacgatgatgaagatgaggaggaggatgaagacgagaatgatgatggtggtgaagaagacgacgatgaggatgcggaggtagaggaggaggaagaggaagaagatgaagatgatgaggaagcgcttcagccaccaaagaagaggaagaagtnaacaaaccgctttgatctcctaacattttagattcaaaaatcaaaacttgttatcggtttttacctgaagaggagagaatcttaaggcatcatcagctttagcttcaactgtgtcttttgttgttccataancaagactttgtttagtgt

SEQ ID NO: 135706 - DNA, 359 bp, Arabidopsis thaliana columbia
atctcgagctctagttccagcagcaggtccagcaccatcaccagcagttcaaccgcctagcccagcggctttagctgatgatccaggagctatgcttgctggcttactttaaattcattgggataaaagattacttgcacatgtcgaaaagtttgttttcggttattgtagaatgtaatgccgaaaatatggaatgatgggagagtaaatgtagagccaagggagagaaaaaagctagttttgattatatttgtgccgtttatccaaagcgggcgggttgcgttaggtaagaaattttgcattcattctgaacatttgtattgtgaggtcagtggttgtatcagcttgttcttgtgcct

SEQ ID NO: 135707 - DNA, 256 bp, Arabidopsis thaliana columbia
  unsure (1)..(256): unsure at all n locations
aagccagagcatcactattttataattgaaagattcataggttcttccaaagaatgttagggtactattaattggcagantctacagccatctagtactggctttatgtaagtataatgtctaaaagtatggtctatataagagagtcacacatgtattttgtatatatatgcgtgtagagtagtagcagatatatgatgtatgggaaacttagagaattacgtttacaatatttggtgccctattgaataccttc

SEQ ID NO: 135708 - DNA, 480 bp, Arabidopsis thaliana columbia
aagcaacaataagaaagaaagaaaaagaaaaccagagatggcgatgacgacagcatctacggtatttgttctaccggccaatgtcacctcggtcgccggcgcttcgtcgtccaggagctccgtgtctttcttgccgatgagaaacgccggttctaggctcgtagtcagggcagccgaagatcctgctccggcttcctcttcttcaaaagattctccggcagctgccgctgctccggatggagctactgccaccaaacccaagccaccaccgattggtcctaagactcgatacccggttgtggtccggttcgcaaaagtcaattacgcaacatatcgaccaacaactatgcattggatgaggtcgaagaagttgcagcttaaatgggagaattcaaaaactctgtgtattctataccggtttatccgtttgtaacttgacccaaaccgtatgtaccgcaaaagtttaccattatttctcct

SEQ ID NO: 135709 - DNA, 334 bp, Arabidopsis thaliana columbia
ttgggcctcgctactgaccccgaggctttcgcagagttgaaggtgaaggagctcaagaacggaaggttggctatgttctctatgtttggattcttcgttcaagccatcgtcaccggaaagggacctttggagaacctgcgccgaccatttggccgacccagtcaacaacaacgcttgggccttcgccaccaacttcgtccccggaaagtgagcggctgcttattatgtgaatgagagcagcagaaagagcagtttgtttgtggtcgtattctatgtaaatttgtgaactttcctctgtggtatctttgtatagaaatcgacctcttttttctct

SEQ ID NO: 135710 - DNA, 268 bp, Arabidopsis thaliana columbia
  unsure (1)..(268): unsure at all n locations
ttccagatagaagaatctcacggagttcagttctgaatcagagaatcagaactctggagagacaactcaaggaccgaaagatcaagaagtgagagattcttttatgtcagtgacntttttgctaaaactagccgatactgaaaaagaaccaagtatcctcgggaaattaagattttgagttaataggaaaaatttcagttgaacctttgcattgaaatgaattagcttaattttaacttgaagatgaatgataaaagtaaattttccc

SEQ ID NO: 135711 - DNA, 387 bp, Arabidopsis thaliana columbia
  unsure (1)..(387): unsure at all n locations
cgacatggccttgagacacatggatgttagaaaaggaagcatggcggggaatttccgacattcagtgacgnaagcaccggcgacttcggtgtacagtgtgagatcatgtcgaaaccggccggtgagcagcagccgaagctcggaatcaagtgtcaacattttgtgcttagacggtagcgacgataatctcagcgacatgagttgctcttaagagttacaacttacaacaagtaactataactttaagcgacataagttgagatacatatttaaatactctcatgaaggttctcaactattagaatggccatgaattttgatttacatgttaattttggaccgaagaggccaattgttttcccgacttgcaataaacatctgtctctt

SEQ ID NO: 135712 - DNA, 353 bp, Arabidopsis thaliana columbia
  unsure (1)..(353): unsure at all n locations
aaaacgttggctttcttcaaagcagcttttaaactctttnaagctgattataatgtcaaagccgacgatgacattnatttnanaccagatcgacttgcgacgcttcttgccaatnaaagacttcattcacagacatacattggctgcatgaagaaaggaccagttataactnaccctaaactaaaatggtacgagaaacaaggcaatttgattggaaatgaatacttttnacatgcttatggaccgatatacggcctttcagccgngatagtagcttcacttgcagcagctagggaatggcagtctgaggantgtttaataattgaaggntntaactatcngggtncttnggg

SEQ ID NO: 135713 - DNA, 391 bp, Arabidopsis thaliana columbia
  unsure (1)..(391): unsure at all n locations
attgattctttgaagcagcaaccaaagatgatgaacagctgtggaatccaacaaaacgcttttnaagagatgaggagaaacgccgccgtttctnatcggagagacgccgtgatttgtcctaaacctcgtcgtgttggtgctcttaatcaccactcttctcgatctctccgttggcaactcaatcatcagatggaattatgtgaatcgaattcaggaagtnagattttggatttnatcctcacaaagggtggtggtggtgggtggtgagcaagatcagacggggacggtgatgacggcacctctnttccttttacaaggggtcacctcccaaggtaaggggttttttaaccccnttaacnaaaanggnttcgntttttttcngggnaannng

SEQ ID NO: 135714 - DNA, 390 bp, Arabidopsis thaliana columbia
  unsure (1)..(390): unsure at all n locations
cacaaagcaaaacacagaaaaagccattctttttgccccttgagtgctttcagctcttcccacaaggttacagaagtaatgtcacgtgtgtacgtcggaaatttggacccgcgagttactgagcgtgaacttgaggatgagttccgtgcctttggagttgtcaggagtgtttgggttgcccgtagaccacctggttacgcttttntagatttcgaagatcctagggatgcccgtaatgctatccgtgctttagatggcaagaattngctggaggggttgacagtctcanaatcgagggtagctttggtngcgggccgtccnttggttggttacccctgggaggttgnttgncggncgnccntttggttnnccnttggtngggccnctaaa

SEQ ID NO: 135715 - DNA, 236 bp, Arabidopsis thaliana columbia
  unsure (1)..(236): unsure at all n locations
tttattcaaacttttcagaaacagatccttcctttgtaatttcttgaagtatttactctcatcatcattttnttgggttgattcaatggcagaatcaaggtaaaancagagattggctgaaacagaatcggaacataagantaagacaaaacccgtnttggcaaaananctgaagatatgtttttttgcggtggtgcggatgaggancccgccgntccgcccncaaaccagtatgc

SEQ ID NO: 135716 - DNA, 383 bp, Arabidopsis thaliana columbia
  unsure (1)..(383): unsure at all n locations
acgagtctagtgtagataccacgaacaagccttctacgaactcgtcatggggtcctcttctgcacgggacaggctctacaaatacaaaatctgcctcatctcttccatcagatctctgccgtcgattctccatctacgaaatcaaatccgccacaaatnatttcgaggaaaaactaatcataggagtaggcgggtttggttctgtctacaaaggacgaatagacggtggagccacacttgttncggttaaacggctnggaattacatcggaaccaaaggtgctaaagagttcgntancagagctcgagatgntttcaaaaggcttncgccatgtnccacctngtctntctaattcgggtnattngcgattnacggcnaacgng

SEQ ID NO: 135717 - DNA, 351 bp, Arabidopsis thaliana columbia
  unsure (1)..(351): unsure at all n locations
acttgtccgcgtctnattgcagattgcccaaaggaacagcttagatgttgatgtggacttagctcttggttttncctcgcattattgtaaaatcggaacaatgaagtgcctagtggaagaaggtaatgccattnccttcttgggtcccttaatgagagcagcagagagaggttgcatgcaagttgttcaatggtttgtnaaaagaggttgccgtgacatggagctttgcttggctctaacagcggccacttcaaggttgccaagtcgnggtngcctgcttanctnccttcctcgtgntttccaccaacctgtnttnaaccggtctttagcatnngaaatnctcaaaaggca

SEQ ID NO: 135718 - DNA, 244 bp, Arabidopsis thaliana columbia
  unsure (1)..(244): unsure at all n locations
gtttttggttctacgcttgataattgtatgatacttggagcatcttcggtgattcagtcgaattcagtgaagaatcatgagaatncggttnatgaagacaatggtaacatacctnagtcgttttacactaatggagggnttaagcttcgtgtggtttggacgataagctcgttaatcgctgngtcggctcggcattatctncttcaacccnttatcaatnagcataagtcgtnagatcgtttgg

SEQ ID NO: 135719 - DNA, 425 bp, Arabidopsis thaliana columbia
  unsure (1)..(425): unsure at all n locations
ccttcgtttacatgtctcccgagtatgcggtgcatggcaaatnctccatgaaatctnacgtctacagctttggaatcttnattcttgaaattattagcggcaagaagaatagcagcctctaccagaacgatgaaactactactgctggcaacttggttacctatgcttggaggctttggagaaacggctcgcaactaaagctgctggattcgtccataggaaggaactatcagagtaatgaagtcactagatgcatccatattgctcttttatgtgttcaagagantccagaagaccgtccaanagttgtcaacccattgtnttcaattgntttaccagtaacanaaatcagttgtgncccancgccttgnnnttacccgggnttttttccccccanaggnagggggtgaacttggncccttttt

SEQ ID NO: 135720 - DNA, 384 bp, Arabidopsis thaliana columbia
  unsure (1)..(384): unsure at all n locations
ctctaacaaccaactcaccggtgagattccggcggantgttgaggctcaagcttaatcaattcaacgtctccgataacaaactctatggtaagattccttctggatttnagcaagatattttncgacccagtttcttaggtaacccgaatctntgtgccccaaatttggatccgattagaccttgccgatccaaacgggaaacccggtacattctcccaatctcaattctctgcatcgttgcactaaccggagcttttggtttggctattcatccaaaaaccaaaccgttatttcaagnggnaanccgaaangggnccaacaaaaatnacccnttttcccancggggttngggttcaanggggggggttggccattttnccccg

SEQ ID NO: 135721 - DNA, 206 bp, Arabidopsis thaliana columbia
  unsure (1)..(206): unsure at all n locations
ctggcagttgtncttgcgtcgtggttttggtacaaaaataaccagaacaaagcaccacctccttcataagtggcttttgtgcaactttatgctgtttgtttgtgtgttgtttaaatggggtgttaaagatcatttggttgctttgtacatttgtgtgtctctttgttaataattntgttgtaattgtcagttactattttaaagat

SEQ ID NO: 135722 - DNA, 334 bp, Arabidopsis thaliana columbia
  unsure (1)..(334): unsure at all n locations
cagcaatctagtctttattgttagtggtcgaggtaaggnccctctcagcaaatggtttgactcttgcccaaatcttggtatctcagctgaacatggttatttcactagatggaactcaaattccccttnggaaacaagtgaattgcctgcggatttaagctggaagaaaatagctaaaccagtgatgaatcactatatggaagcgactgatggntcattcatagaggagaaagagagtgctatgantgtggcaccaccangaaagctgaccattcatttngttnttggcaagctaangnagcttcttnatcanctagagagntgttcttaccna

SEQ ID NO: 135723 - DNA, 425 bp, Arabidopsis thaliana columbia
  unsure (1)..(425): unsure at all n locations
aattcatcaaaggagagagagatcgacaatggcaccttcgtcatcaagcggtttaaccttcaagctacatcctttggtaatcgtcaacatatcggatcactacactagggtcaaaactcagctcaatcctcctgcttcaatctgcgcaagggccatggctcaaacaacggcgaagaaatgttccagcaaaaccctagggtttacggatgtgtgatcggtgtccagagaggtcgtactgttgagatattcaacagtttcgagcttttatatgatccttctactcaaacccttgatagatcttttcctcgagaaggagcaaggactcttataaggaagggtgnttccccnnattttctaaaattnctngggnttgntnctnttcnggggatntnattccttngggaatttgnanattgcatntnccc

SEQ ID NO: 135724 - DNA, 396 bp, Arabidopsis thaliana columbia
  unsure (1)..(396): unsure at all n locations
gaacatcaaaaactaacacacagaaagaaaaaaaacagttcctgttccattagattcttttctaaattgtctgaaaatcatggaagtaacttcccaatctaccctccctccagggttccgatttcatcctaccgacgaagaactcatcgtttactatctccgaaaccagaccatgtctaaaccatgccctgtntccatcatcccagaagttgatatctacaaattcgacccatggcaattacccgtgnaaacagagtttggngaaaatgagtggtatttnttncagccctnngnggaaggaaatntcccaaacgggggtcaggcccaaaaccgggggaagcttttttncggggtnttttnggaaagnaaacccggttcaaggncaaaaggcntttt

SEQ ID NO: 135725 - DNA, 365 bp, Arabidopsis thaliana columbia
  unsure (1)..(365): unsure at all n locations
gtggatcaagattctttcttatcttcatcactccacacattttcttgtcttcaaactcacacaaagaaaagaaaagtctccaaagctcaaaaaacaatgactcgaccgtcaagattacttgagacggcggcgccaccaccacaaccgtcggaggagatgatcgcagcggaatccgacatggtggtgatcttgtcggctcttctttgcgctcttatctgcgttgctggtctcgccgcccntcgtacgatgcggctttgnntcccggcgggttttacaagcccggaggaagattcnnccggttaaccngaacaaaaaggntttntaaaaangaaaaagctncttttnantgntttttttccaaggna

SEQ ID NO: 135726 - DNA, 240 bp, Arabidopsis thaliana columbia
  unsure (1)..(240): unsure at all n locations
ctttttttttttttttttttgatggaaaatctttgttgtatatataatagactcattacaagctttagtggtatcatcctcatcacgtttganctctcgcaaaactttgaattacagaaaaagnaaacaaaaaaaaagttgcatattaggggttaagaagncccntaaaatgngngggnaagntcaaaatttntaaagcaaagctctgttttgtagttcatcatcacagagttagcttct

SEQ ID NO: 135727 - DNA, 454 bp, Arabidopsis thaliana columbia
  unsure (1)..(454): unsure at all n locations
agcntcaacaacgtcaagcaatggctaaatgaaatcgaccgctatgcaagtnagaatgttaacaagctactggttgggaacaagtgtgatctcacatcacagaaagttgtatccactgagacagctaaggctttcgctgatgaacttgggatcccattcttggaaacaagtgctaagaatgctaccaatgtcgaagaagctttcatggccatgactgctgcaatcaagaccagaatggcgagccaacctgcaggaggatctaagncaccaacggtccagatccgagggcaaaccttgtttaccnngcaaatcaggnntgcntgctcccnctttaatttcgcttttnggtaacactttancccatattnattgtcatttcnggttgccatgtnaggaattcttancnaacggttgcttttttaaaatctntttggaattttgggttttaaaantt

SEQ ID NO: 135728 - DNA, 434 bp, Arabidopsis thaliana columbia
  unsure (1)..(434): unsure at all n locations
ggggtccatcatctatggcagattttgtagagcaactgtttcgtgggagactggtagatgaacaacttatgtcaacaatgataaattcacaccattggcagttaaggatttccgatgtaagtnatgaagagcgggaggatgtttatggtgaactggaagctagaggcttatcgggtgactctttaaggaaactaccatgctatataatgtcaagtgaaatggtcaggaggcaggtcactcactgcacaatttgtctgcaggacatcaaaacagggggaatcacacggagcttaccgnaatgtgatcatacgtttcancctggtattgtgttgntaaatggctcatcagacacggggtcatgccccatttttcaggcnaggcantttaaaggtttaaaaacaggcntttncccnnnctttnntccnttggnaaaa

SEQ ID NO: 135729 - DNA, 451 bp, Arabidopsis thaliana columbia
  unsure (1)..(451): unsure at all n locations
caaagattcaggacaaggaaggaatccctccggaccagcaaagacttatttncgctggtaagcagcttgaagatggaaggactcttgctgactacaatatccaaaaggagtctactcttcaccttgtccttcgtctccgtggtggtatgcaaatctttgtgaagactctcacgggtaaaacaatcacccttgaggttgagagctcagacaccattgacaatgtcaaagctaagntccaagataaagagggaatcccaccggaccngcagaggcttatcttttccggtangcagctagaggatngtcgcacttcttgctggattacaacatccaaaaaggagtcaaaccctttcatttttggtgctttccgtctnaagagggtgggtattncagattttttgtnnagnncctttacttggnnaagnctttnacctnttggnnggtttaagag

SEQ ID NO: 135730 - DNA, 308 bp, Arabidopsis thaliana columbia
  unsure (1)..(308): unsure at all n locations
cgttttgatgtacaatggcgtccttggtagcagctcctatctctttctcaggtgactctcatgtcaaagcacaccgaaacttcaatgcgattcgcaagagctctacattgactgtncaaacaaaatcaaaccgcagtcacaaactctcggtttctgcaggttaccgtgggggaagtaagggtggtggaagtagtgattttnttaccngttttnttctagggaagtgctgtnttnggaactctggcttatatcttttnttccacagatncnacgatcagngctttgcgggnattaataatggnttttaa

SEQ ID NO: 135731 - DNA, 366 bp, Arabidopsis thaliana columbia
  unsure (1)..(366): unsure at all n locations
taatcaaaatgangacacagaaggtggtcgaaactnttgtacttgctgcttaagcttcatcttcacagctggtctcacctctnttttcttatggcttagtctccgtgcggacaaacccaaatgctcaatccaaaactttttcattcctgccctcggnaaagacccaaattcacgagacaataccactntaaatttcatggttcgttgtgacaatccgnataaagacaaagggntctactacggcgntgtccaccttaattttttccaccatcatcacgngccangatcanttcanctgctcttgtnttaggtgggtacctccacagtggcctaagttnttttcaaggggcacaaggaagaagggcc

SEQ ID NO: 135732 - DNA, 256 bp, Arabidopsis thaliana columbia
  unsure (1)..(256): unsure at all n locations
ctataaccaagtataagcttggagggggttattttcntaaaagggattganttttnaanatcatgtctatgacagtggagataagagtnccaaacttggattgtaaaggatgtncttctaagcttaggaagactctactcaagcttaaaggagtggaagangtggaagtagagatggaaacccaaaaagtgacggctcgaggataccggttagaggaaaagaagnttttttaaagcggtcgccgtcccgttangna

SEQ ID NO: 135733 - DNA, 506 bp, Arabidopsis thaliana columbia
  unsure (1)..(506): unsure at all n locations
tgaaagtacctaggcttaagtcgctaacngccaatctgcatcgtatgggggtcacaaataccatagtttgtaactatgatggaagagagctacccaaggttttaggtcagancacggttgatagagtattgttggatgcgccttgcagtgggactggaattatatcaaaagatgaatcagttaaaataacgaaaaccatggatgagataaagaaatttnctcacttgcaaaagcaacttctactcgctgctattgatatggtggatgccaattccaaaaccggtggatatatagttttattcaacatgttcaattatnggttaccttngnattaagccgtcattggctttgcccncaaaaagggggggttttaaaccccgtnccggttggccncnnttttgggcaaaaaanggtttnccccgttttggggnaccccggttttaaccctcttttggcaaantttngcggttttttcccntnncaaaanattggggggttttttttgg

SEQ ID NO: 135734 - DNA, 432 bp, Arabidopsis thaliana columbia
  unsure (1)..(432): unsure at all n locations
gaaaggaatctncacaaatgtgacttctcctacggctaaggcaaagttgaggctgttgtttgaagtggctcctcttggcctgctcatagagaatgctggtggattcagcagtgatggacacaagtccgtgcttgacaagaccatcatcaacctcgacgatagaactcaagttgcttatggctcaaagaacgagatcatccgcttcgaagaaaccctttatggaacatcaagactcaagaatgttcccattggaggttacccgctttaggaaactnatttcaaaaataagttgaattcantggttaatttttccnataaaccccggtaaatcntactttttncccnttgggttnttaagggggaggcaccaaaaacttgtggnnttccaagtttttaaaaaaaaanttntttnnggtttgggtttngggttng

SEQ ID NO: 135735 - DNA, 402 bp, Arabidopsis thaliana columbia
  unsure (1)..(402): unsure at all n locations
ctgatttttgaaaaagatcagatagagatagagagacagaggtagagatatggaattnctcttnctcctctgttcaatcatctacacttcaatcacttccatcttcttctctcttctcctcccgtttcgcttccttctccaccgtctccttccttcacgcgccgccgtcgatcctaatgtctctttctacgaaggcacagtctngcacgaccgtntccgtcctgtccggcactctttccgttattccgttcgttaaggactctttgacctngacaaaagctattaacanaaccggccgggntcattttnttccggccgacggaagntcgnccgtggttttttcggnaccacccgggggccaataattttctaattngncnaataaccnnccaaggggtttgg

SEQ ID NO: 135736 - DNA, 281 bp, Arabidopsis thaliana columbia
  unsure (1)..(281): unsure at all n locations
tctgtttacacggtaagaaggaagncctctggacaaaaaagaagtaaagacgcatctncctctactagtgcagcagctcgcattcgtntcgacttgtnatcaagctctgggaagaaaacacgtcaagctagtgaaaacaaaaagaagaccttgaaagtggctccaaaaaagagacagcggacggtaaagcaagagaaagaggntccggttagtgcagcttntnaggnttatatcgnggaagcagaaagctttnctttgcagagattgattgcatttnagct

SEQ ID NO: 135737 - DNA, 279 bp, Arabidopsis thaliana columbia
  unsure (1)..(279): unsure at all n locations
acaacaacaaatcttaaacgttttactttgtgctgcactactcaacctcaatggccgnctcaacaatggntctctcctcccctgccttcgccggtaaggcgtcaagctttcccccgcggcatctgaagtccttggaagcggtcgtgtgacantnaggaagactgttgccangccaantgggcccatcangcagcccatggtacggntctgnccgtgtcaagtacttgggtncattctctggcgaaatcaaccgngctaccttaccggagagttccccgg

SEQ ID NO: 135738 - DNA, 327 bp, Arabidopsis thaliana columbia
  unsure (1)..(327): unsure at all n locations
ggagaatggcttggatgaagaagaaggtgatgaagagattgaagangatgatgttgatgaggacatcagcttgagtnctggcaaatctgagcctctgtccaagaggaagagggttgctaaggaccacagtgagcaaggngatgtcactggtgataacattaggccttctaaacggtagttcttctaacttcgaactgatctcaatccaagaagnaaagtcagnaattgattcgaattctcagtattttnnaatcattncgtttgggttgaaaataagtttttnaacctaangggtagtaagtnttttcctttagaggcnntaaatgg

SEQ ID NO: 135739 - DNA, 235 bp, Arabidopsis thaliana columbia
  unsure (1)..(235): unsure at all n locations
attcttttgctgctttttnaactgtgtatttnggaatctnnattcaaggtaccgcgctggtnctggatgaaatcattaaccatgtccagtcattacaacgtcaagtggagatgctatcaatnagacttgctgcggtaaaccccagantcgacttcaatctcgacaccatattggcttcanaaaacggttctttaatggatgggagcttcaatnccggcaccaatgcagcttgctt

SEQ ID NO: 135740 - DNA, 432 bp, Arabidopsis thaliana columbia
  unsure (1)..(432): unsure at all n locations
gtcaagggacgccaaggagaacgagtcagactctacgtgaggggaaccatcctcggatacaaaaggtcgaagtccaaccagtatccaaacacgtccctcgtccagatcgaaggagttaacactcaggaggaggtaaactggtacaagggaaagaggatggcttacatctacaaggctaagacaaagaagaacggtagccactaccgctgtatctggggaaaggttacccggcctcacggtaacagcgggtgtttgtccgtgccaaatttcacatccaacctttccttcccaaggtccattggggaancaagagttnggngttttncatgtttttcccggntnaancatttggggncantncaaaaaattnggtttnaaccttttnaattttgnccccctttggtttttttcnccangggtttttnatttttt

SEQ ID NO: 135741 - DNA, 476 bp, Arabidopsis thaliana columbia
  unsure (1)..(476): unsure at all n locations
cgcacggtgatattgagaatcgccgacctgaatcgatcggaaaactttctctgattaccggcggtcaacaccgctgaacacatatgtttgtttgacgacctcttctctccgcgatctttacctcaacaacgagatctgtttccacgaaagaaaggaggatgtcgacgccagcaaggaagaggttaatgagggatttcaagaggttgcagcaagacccacctgcgggtattagtggtgctccacaggncaacancattatgctctggaatgctgtcatatttgggnctgatgacacaccatgggatggaggtactttcaaactctcactgcagttntctgangnntatccccattaaaccancnaccagttcgggtttttgtnangggttgttttatccttaaaattttagtcagattggggnggtttnttgnttttgggaatttntcaaaaccnatggggggnccnaacttttana

SEQ ID NO: 135742 - DNA, 364 bp, Arabidopsis thaliana columbia
  unsure (1)..(364): unsure at all n locations
catttttcctctataaatcctttattattgtnataaaaactccgatggatcggcaaaattccgatgacatcatgagatttctcgatggaatggctagctccgacgacgttcttttcggttttntcgacgaaggaaaccagtcaccggaagatttctccgtaaacctcaacgccggcgaagatgacggcgacggangacggccaataataacaatttttgaangttacaaaactttttttggcaggaccacggacaacnttntttnaggggcaactgtttagggcaaggtcccctttgtggcaaaggnntnnggccaaggttcaaaagnaaggcgntngaaaccaaagtttaaatcttagggggc

SEQ ID NO: 135743 - DNA, 511 bp, Arabidopsis thaliana columbia
  unsure (1)..(511): unsure at all n locations
acgagaagaaaaaggcgaaaacctcgccaatccgattacgcgaaaaatcaaaggtttttggatatggcgtcgaagcggatcttgaaggaattgaaggatctccagaaggatccacctacatcatgtagcgcaggtcctgttgctgaagacatgtttcactggcaggcaacgataatgggtccttcagagagtccttatgctggaggtgttttccttgtaaccatccatttccctccggattacccattcaagcctcctaaggtggcctttaggaccaaggtgtttcatcccaacattaacagcaacggtagcatttgcctngacatcttnaaaggagcagtggagtcctgngntcaacattttncaaggtgntgctatcgnnnctgttctttgtaaccgatccaaanccggatgatcctttgggtgcccgantagctcacatgttcaangctttcaagacaagttgggncccnttgacgnggttggcntanaatttncatnggntaaattg

SEQ ID NO: 135744 - DNA, 512 bp, Arabidopsis thaliana columbia
  unsure (1)..(512): unsure at all n locations
ggtatgtttaggttccagcagagtaccatgtctcctgaaattntcgaagttcaagaagaatcaaccaaaatcgagcctgaaccttcgatgaaactggaagttggatcggttctatggttggaggagtcaaactatcaaaaaggttatcagattaacgnaatattgactaatggtacacttccttatcatattgcatcgccagtggatgatgcagggaagtctgtgtttctgtatgttggttctcctccttcacagcttgagccagcttgggaagacatgaacttttggtatcaggttcagagncagnctaagntattaagtataatgaaacagagaggcctctnttagcaaataccntgcccgcagctccnatggggcttngtcggatcattcatncaggccaattttnaaaaaccaagttcaggtggncggtgttatcatccntnggggtggactcccattttttgtgacctacnccttttgngggacatnagctnttttggtnaccgggg

SEQ ID NO: 135745 - DNA, 482 bp, Arabidopsis thaliana columbia
  unsure (1)..(482): unsure at all n locations
atttgcttagggctaagagtttagagaaaggttgggacttgaatttgggtgaaatggctaggatttggaaaggtgggtgtattatcagggcggttttcttggacaggatcaagaaagcttaccagagaaacccgaatttggcgagcttagtggttgatcctgattttcctaaagagatggttcagaggcaagctgcatggaggagagtggtgggtcttgctatatctnctgggattagcacaccaggaatgtgcgcaagtttagcgtatttcgacacttacaggcgtgctagnattacctgcnaaatcctggttcagggcgcagaggagatctncttttggngctcaatacatattgagnagaacccgatcngtccttgggtgccataccnccaacttgaaattggnccttaagcttttcaaagggnagnngtcaagtnaaancatttggncacnagntccccctttantttaaggggcttt

SEQ ID NO: 135746 - DNA, 443 bp, Arabidopsis thaliana columbia
  unsure (1)..(443): unsure at all n locations
ctggattccgggcgcccacgcgcctnagaaaaggggagaagcaaaaatggtttctctgaagctccagaagcggctcgccgcatcantgatgaagtgcgggaagggcaaagtttggctcgatcccaacgaaagctccgacatctccatggccaattcccgccaaaacatcaggaagcttgtgaaggatggtttcatcatcaggaagccaaccaagattcactctcgttccagagctcgcaaaatgnagattgccaagatgaagggtcggtcactctggatacggtaagaggaagggtacccccttgaagcctngggttgcccaaccaaaaggttccttttgggattccnttaggnattgncgtgtttcctttngggngntcttntttttnaggnaaattacaagtggttgncngaagncaggattttttnaaaaggtacatttt

SEQ ID NO: 135747 - DNA, 428 bp, Arabidopsis thaliana columbia
  unsure (1)..(428): unsure at all n locations
ttaaccggcgacccgnaacaatgacccggtccgtcagtttccctctcttcctcttcgccgttgtactctccctctcttcttctctcctcgccgacgatcccaaaccaatccgccgtgaggtctacgaaggaggtaagatatacgacatcagccatcgttacacgtcggagattccagcttgggaatcttcggaaggattgggaaanacgttcctgcgattagccgcgagtatgaagaatggntcattcgctaacgtatcggagatgnaaactatctgttcactcctggaactcacgtgggattgctccagggtcactttttnggggttaaattaattacgnatngctgggtttttgataacttgaattccgcttttgannnntccaaggtccttaaaannnggcccngccttttntttgggttnaagg

SEQ ID NO: 135748 - DNA, 466 bp, Arabidopsis thaliana columbia
  unsure (1)..(466): unsure at all n locations
ggagttctttactctggctgaggattctttgagacttatggaggagaaagctggaagtagcttcaaacgcccgcttttaatcgtcattggtgatcacacctgtnctcctgagtcacttaaccgggctttgtcgaagggagctatagaatatnaggattttnttgcaaccggagatccaaattatccgtggcagccaccagctgatgagtggcagagcatcgctcttggttatacctcgggaacaactgctagtccgnaaggagtggtgcttcatcatcgaggtgcgtatataanggctttnagcaatcctctcatttgggggatgcaagatggtgctgtttacttgtggactctccccatgtttcattgcaacggttngngtttcccttggtcccnttgctgtgtctcttggtacaananctttntccgncaagttncggngnaggaagngttttcanttgtagcc

SEQ ID NO: 135749 - DNA, 436 bp, Arabidopsis thaliana columbia
  unsure (1)..(436): unsure at all n locations
gggatctggagctggcaatttcctcaaggttcttctcaggaacttcgatgttcttgctgggcctgtggttagtctcgtttatcctctatatgcttcagttcaagcgattgaaactcaatctcatgctgatgacaaacaatggctaacttattgggtcctttattcattacttacactcatcgagctcacattcgccaaactcatcgaatggttaccgatatggtcatacatgaagctgatcttgacttgctggcttgtnattccctacttttagtggcgctgcttatgtctatgaacaatttttntgagacccggtggttttgttaaacccctcgggnggcatttnaacaattttggnaattttgcccaaaanaaagggntggggtaattttnnaggaaaaaccnngacggtnggtgttnaacaanntgctntngg

SEQ ID NO: 135750 - DNA, 484 bp, Arabidopsis thaliana columbia
  unsure (1)..(484): unsure at all n locations
caatctcattacaggaaacgaatttnactcgcgaatctccttcagaggtatggtttccctccttcttctcttcagcacttcctctcaagaaacaatcacctattgaattcggatttagttgaaaccgaaacttctctcggtatcttattgtcattgaaaatccctcagaaatcactggtttcgttgatttccgattgccctaatattctgagatcagagttattaaggaaatggagagttcctctgtctgattgcggtaaacacggtgtcgtctcatcttccgcgattaaagagcgtccttgaaatcccgagccttctctgaaaaagcccattttttngttcngnccttcccttgtttcttccgatttttcccggganctgantcttgnttttngganaaagnattgaaaatnaagttcggtccntttggattnggtgggaaggntggaaancaagtncggnttttnggaatacgnttccaccc

SEQ ID NO: 135751 - DNA, 544 bp, Arabidopsis thaliana columbia
  unsure (1)..(544): unsure at all n locations
agagaagagataacattcctaagcaaatctcttctctctcccattcgtctccaaagagattacagttttgagcatttctcatctctcgaagctcttctctgtgtgtgtggcgatggctgctaattcgataatggcttcctccaaacccctaatctccctgtcatccaaccaacaaccaaaccgagtccaaattcccaaattcgccaaacttccccaaattcccaaatccctcacttcctccaccgatctccgtagcaaagcactatcactctcctccggcaccgncaaatccttagctttaatcgncgctttcggtcctccgtcgatggcggaggcgattgnggaaagcacagttcttcgatttcaaantcaaggttccgntcaatcgttggttgaggttttcttctttgatgttcggtctggcaagggctntnatttccnctttggaaacttcaanggtcaaagggaggttccanaaaaggnaggtnccgnggntttaaggcantttggctttaggaaaagnngcntgtttngaanncccccc

SEQ ID NO: 135752 - DNA, 505 bp, Arabidopsis thaliana columbia
  unsure (1)..(505): unsure at all n locations
caaagctttggactctcaggccaggaagactatgggattgggcggcgatcaatcctttgtncccgtcatggattccggccaagtccgcctcaaggagctcggctacaagcaagagctcaagcgcgatctctcggtcttctccaatttcgccatctccttctccatcatatcggtgctcactggtatcaccaccacctacaacaccggtttaagattcggcggcactgtcactctggtctacggatggttcctggccggctccttcacaatntgcgttgggntatctatggccgngatcttctcctcttaccctanctccggtggtctctactactggngtgctattatcgctgggncctccgtttggggtcctccttgccncttggatgaattngctggttcaaanancnttggtcaattgggaagtaacgggcaacgtttggattttttttttggaaaanntggttcaggggnttggccctnttttcancgncgggngaaanaa

SEQ ID NO: 135753 - DNA, 262 bp, Arabidopsis thaliana columbia
  unsure (1)..(262): unsure at all n locations
ttctncttcaacctttgtccttcgatctctgtcttttttttttttaaactctnctncgattgtaagaaaagtttcacctcaaagaaatctgggttaaagtgtgtttnaaattgtggatcgattcaaagattcnngataccaatagttttnaattcataggatgtggtgatacgtttgtaatctcgtgccatatctttggtttgtnaaagagagtgtgttttaatgtcaattnctgggtaaccaagtttgancttatcccttt

SEQ ID NO: 135754 - DNA, 477 bp, Arabidopsis thaliana columbia
  unsure (1)..(477): unsure at all n locations
acaaaaatggctgccatagcttctactctctctctttcttcaaccaaacctcagagacttttcgattctnccttccatggctcagccatctccgcagctcctatctccatcggtctcaaaccacgatctttctccgttcgcgccacaaccgctggttacgacttgaacgctttcacgttcgacccgatcaaggaatcgatcgtgtnacgtgagatgacgagaaggtacatgacggatatnatcacttatgctgagactgatgtcgtcgtcgttggtgctggatctgctggtttatctgctgcttatnagatcagtaagaaccctaatgttcaagnttgccatttattgaggaaatctgttagtccctgggtggtnggtgctttggctccggtgggtcangnttttntttntgccaatganttgtttggnaaaacaagntaanntggttccttttcggngaattnggggntggcttac

SEQ ID NO: 135755 - DNA, 527 bp, Arabidopsis thaliana columbia
  unsure (1)..(527): unsure at all n locations
ttcttccctcttcttcttctccattgttaaaagctctcacacaaccaccgttctccgtcacggtggcgctttattctctcatcggagcgcctcaccggtggcagacggtgtcgttgttcctctcctaaaacctccatcaatcaccatctctttacacagagctctaaccaaaatcttcgagagatggggcagagtatgagctgtggaagtcgaccggagcacggaatattcgcctctttacagtgcggcgatatcatcactatccgtcgtgtgatggcgacggagcctagtctgttgaatcaaactactccttatgatcgnaantctgttcttcatgtcgctgctgctaatngtcaagatcgngattttttcattgcttttggancgattttcngaatccngattttttgaattggnacaaagnagnctccgctnaannttgggntgcgatgtttggaagaatcnttttnttttnaagaaggttagcttnaaggtgggggctaaaaantttaagggttnggtctntt

SEQ ID NO: 135756 - DNA, 481 bp, Arabidopsis thaliana columbia
  unsure (1)..(481): unsure at all n locations
aacaaaaagagagagaagagaacgagagaatcattgagaaacgaaacaacaatggccgtctcatcattccagtgccctaccatcttctcctcctcctcaatctccggctttcaatgccgttntgatccagatctcgtcggttctcccgtcggtggatcatctcgccgtcgtgtccatgcctccgccgggntttnttcctcattcaccggggacgctggattatcctccaggntcttaagatttcctcctaatttcgtccgtcagctgagcattaaagcccgtagaaactntagcaacatcggtgttncacagatcgtggcggctaagnngtccaacaacccatnctccgcggccctgtgacttncgnggcttcngtcgtgctgaaaancgtcgatgaggaggtttttgtggccccgaggggatcaatgggaagatanggtnggtnacaacttncgggttncaaaaatttttttttangtcc

SEQ ID NO: 135757 - DNA, 443 bp, Arabidopsis thaliana columbia
  unsure (1)..(443): unsure at all n locations
cttcaacgttcctctccaaaatcctcagaccaagaaatcatcatggccgtcgatctaatgcgtttccctaagatagatgatcaaacggctattcaggaagctgcatcgcaaggtttacaaagtatggancatctgatccgtgtcctctctaaccgtcccgaacaacaacacaacgttgactgctccgagatcactgacttcaccgtttctaaattcaaaaccgtcatttctctccttaaccgtactggtcacgatnggttcagangnggaccggttcantacacttcctctgccgcatcttagaaactacagcgncagatcgttnaaaatactcaaacctgnggcttccgnttagtgaggaccaactacggatgaaccctcaaannngttnctncaccgtctagtggaacactcgnttttttttaaancaagggatntttggc

SEQ ID NO: 135758 - DNA, 446 bp, Arabidopsis thaliana columbia
  unsure (1)..(446): unsure at all n locations
aaaggataaaatcagtgccgttnttttctgtaccaccacatcctctganacggagatatacaaacnattacttccacttnncttncctcgagatgaacatgaggaagaggttgccatatcaaagctcccggctgatgttggagatgaaaatggtgagacggttatagacgaacgtaaaatcagaatacaggcgctgccaaataaacctccacccagatcttttccaactccactcgagcgcccttctactgatcttactttgttacgcaggaactcgaatcatcttgattcgtatttggntcctgccttcatgtccttaattaaggatccanatgaaaggcgcaaaggncaatgggagaagncttgcacaagcacaaagtgggattcaatttttnttaaattngctaggnttttggtgatcttnggnggncccccttttttttnct

SEQ ID NO: 135759 - DNA, 325 bp, Arabidopsis thaliana columbia
  unsure (1)..(325): unsure at all n locations
gcaacatgaagcagtangtcaagctacgncaacagancacttgtctgaggcaagtgacggtgaagaagttggtaatggagaaactgatgtgagagagaaagatgagaatnagcctgatcccaagagaagangtacagaagttcggatttcagaaccagctcctnctgcttcacatagaactgtgacagagcctagaattattgtccaaacgacgagtnaagttgatcttctagatgatgggatataggtggcgtaaaatatgggcagaaagttntnaaangggaatncttatccgggggngcttcttncaaagtgcaccaacacc

SEQ ID NO: 135760 - DNA, 562 bp, Arabidopsis thaliana columbia
  unsure (1)..(562): unsure at all n locations
attgactggaggaagaaaggagccgtggctgaggtcaaagatcagggtggttgcgggagttgttgggcgttttcaaccattggagcagtggagggaataaaccagatcgtaaccggagacctaataaccttgtctgaacaagagttggtcgattgtnacacttcatacaacgaaggttgtaacggaggtcttatggactatgcttttnagttcattatcaagaatggtggaatcgatacagacaaagattatccttacaagggtgttgatggaacttntgaccagatcaggaaaaacgctaaaagttgtcactatcgattcatatgagggatgttccaacttacagcgaggaatcgttgaaggaaagcagttgctccatcaaccccattagcattgccattnaggcttggtgggccgtgcggtccagctntttgattcggggaatantttattggaagtttttngacccaacttttgnccnncggggtttttgncgggtttgntncggnncttnnncccgnnaaaatttccntggcttttaaaaacccttgggggnaaaact

SEQ ID NO: 135761 - DNA, 552 bp, Arabidopsis thaliana columbia
  unsure (1)..(552): unsure at all n locations
agaagaagaagaagaagagtacctcatacgtaaaccattgatgggctcttttnatcgccaaagagctgttccgaaattcaaaacagcaacaccgtcaccgctccctctttctccttcgccttacttcactatgcctcctggccttactcccgccgactttntcgactctcctcttctcttcacttcctccaacattttgccgtctcctacgacaggcacatttccagcgcaatctctgaactataacaataacggtttgctcattgacaaaaatggaatcaaatatgaagncacaactcctcccttgttcctaccatctatgggtaactcagcctttaacctcaaactgggatttattcaaatccgaaatcatgtcgngtaacaaaaacctctngatgacggntncaatttgggnggaaatanngggcaggagcaagnnaaagggaaggggaancccgaggnggtnctttnaaaatgcacggtntccaaattgtttnncaanggaggaaagtagggcggtnnttttttaaggggctaggttgtttgaaattg

SEQ ID NO: 135762 - DNA, 505 bp, Arabidopsis thaliana columbia
  unsure (1)..(505): unsure at all n locations
agcagacctccctgagtctggtacttcagtgaagagtaaaacagctaaggataataaacctgttaagagaaagtcagggacgttttctcggagcccgagattcatgtctcanagctcttcatttccaactaaaggagcttatactgatattactagaaagagcattgatgccacaacatcaaagactagtcttaaacccgtcgttgctggtggntccaaaccaaaagncactccatcttcaagcagcggtntttccgcaaagggcanccagttttagtatctgcgncctctcaaaaaggcaaacctatggcctgttaaaaaccattttctaaagggattncagcttttcagggcccttacttnccaaatttaggggggttgaagggttnttaaatcccatcaaagganggaancttccgggggaagggatttngngggagggcttggatnaacccccgcttntgntggcagnttaaagntttnttaacccgtttgaaaggttnaa

SEQ ID NO: 135763 - DNA, 501 bp, Arabidopsis thaliana columbia
  unsure (1)..(501): unsure at all n locations
gttgcagatagcaatggcgtctggagcagtagcagatcatcaaattgaagcggtttcaggaaaaagagtcgcagtcgtaggtgcaggtgtaagatatgtcgattcttttnatggttttnaagtggacttgcggcggcttacaagttgaaatcgaggggtttgaatgtnactgtntttgaagctgatggaagagtaggtgggaagttgagaagtgttatgcaaaatggtttgatttgggatgaaggagcaaacaccatgactnaggctgagccagaagttgggagtttacttgatgatcttgggcttcgtgagaaacaacaatttccaatttcacagnaaaaagcggtatatttgttccggnatggtgtaccngtanatgttttacgngggcttgatatggtnctcctggtaatcatgntagctacctaccattcccataggnncttgggcncaagtaggtgttntntttnccccaatctaaggttnnaaatccttgtttgg

SEQ ID NO: 135764 - DNA, 442 bp, Arabidopsis thaliana columbia
  unsure (1)..(442): unsure at all n locations
aatttttaaatccagaggagaccccattcattgattgattgaataaaataattcgtaacgaagaagcaatcattatcattctctcgatttctcatactagcgataatagatcgacgctgttgatcgcatgtggtagttcctttttggatcagtggtttttgaaatggagaaagtttcgtcgccgtcttcctctttttcacggaggtctgcttatcttgaagctcttacacaagagattaagaagaagcttacacgggctgttgtctctccagcacaaacacgnaactttgttacaagaccttatttgctgatatagctctcgaaagtaagaccgntcgagcccaaanatgtgatccctaggcaaaagaaagnggggttttgattaaccttncngnttgaangcaanatccctnantgggcccctaanngnctttttnggnng

SEQ ID NO: 135765 - DNA, 524 bp, Arabidopsis thaliana columbia
  unsure (1)..(524): unsure at all n locations
agctcccggtataagtgcctctccatctnaggntaatatgcggtatttcaacgttatgattcttggtcctacacaatcaccttatgaaggaggagttttcaagttggagctctttttgcctgaagaataccctatggcagctcccaaggttaggtttctcacaaagatataccatcctaacattgacaagcttggaagaatctgtcttgatattctcaaggacaaatggagccctgcactacaaatacgnacagtgctcttaaggtatatgagctgattacataaggttatttcctgctaaaaactattggtttctttggngcttgacttctgctcctatttttattaaccggtgtgcaaatcccttataaaggtattcaagctccttctgagtgcaccaaacccnggntgntncggttttnttggggaccatttnttaaggcccttggangggtanttggggcaagaagctttnggttncagctnngggnattggccccggtttttttnnaagnggggggttt

SEQ ID NO: 135766 - DNA, 386 bp, Arabidopsis thaliana columbia
  unsure (1)..(386): unsure at all n locations
tgtgcacngcctgttnagtcaagagtgcaaattgatggaagaatagtgaccagtcgtggaccaggaaccaccattgaattctccatcacgcttatagagcagttgtttgggaaagaaaaagctgatgaagtctccagtatcttgctgcttcgtcctaaccctggtgaggagtttacttttactgagcttaaccaaacaaactggtcatttgaagatacaccacagattctngtacccattgcagaggagtcagaggaaattnaagctatagcgcttgtagatatcctgaggcgggcaaaagcaaattntagtgatttgctncaanttggttancangtttggaagntttnaangggttcttggcaaangtttaaggcttnggttng

SEQ ID NO: 135767 - DNA, 392 bp, Arabidopsis thaliana columbia
  unsure (1)..(392): unsure at all n locations
gaagcaacttcagaggctttctgcagctggaccttctgaagattcaaatgtcaggaaaaacgtccagcgatctcttgctacggatctccaaaacctttctatggagttacgcaagaaacagtctacatatttnaaacgtttganactacaaaaagaggatggagcggatttagagatgaatctgaacggaagcagatataaagcagaagatgatgactttaatgatatggtatttagtgagcatcaaatgagcaagataaaaaagagtgaggaaatatcantagagagggngaaagagnttcancaggttgttggaatccgtaagcnagctttgctcagnntcatgaaggntctgttcagcnctttttnantgnccccggggtccaataggt

SEQ ID NO: 135768 - DNA, 403 bp, Arabidopsis thaliana columbia
  unsure (1)..(403): unsure at all n locations
gccgtnanacctgagtttctgagacagaaggaagagcttttaacatccctnctgtttatggncggattccaactccggacttcttngctttaaccctttacgtccgatcttntcgctgaaatctttctttctccttttacatggttttcacgacgacaaaagtttgccttttnctagttgctgccttgacttcagatagcatcacaaggttcggcttcagataacatcacaagttgaggaaaacatgnaattcgacatcgacacattttgttgccaccgagaagngtttggtatatacggaccctgtncatcaaattngggtatgtgggggggaganttttcaaaaggcaatattatgcaattggngncttatnggaccancagcaaaaccaccataaattaa

SEQ ID NO: 135769 - DNA, 555 bp, Arabidopsis thaliana columbia
  unsure (1)..(555): unsure at all n locations
ggaaaaatcagaaaaggagagaaaaattaaaaaagtctctcttttctcttttncttcttcgtctcccatattctccgatcaaaaatatatttntntctcactttccttggttttntcggcggcttcttcttctcctatttctccctcaaatcgttttctccagttttnttgggataaatcttcctcctttctgcagacgccatgtcggacaaaggtcgtcccttgccaaaatttggtgaatgggatgtgaatgatccagcatcagcagaaggttttacagtgatattcancaaagctagggatgagaaaaagaccggtggcaaaccggggtcaacccggtaaatcccagtgagggtcatgttaaatcttggaggagggaggttccttagtaaacctcaagncttaaaaatnggctctccttgnatgnaagcnccaccttgtgggccttnttgncaggccacaaaggntgggtttnctttcctggctaaaaaaaaaaggccccaagnggtttccncaancttaaaaggaatggntccttttnnnggtttttttttc

SEQ ID NO: 135770 - DNA, 441 bp, Arabidopsis thaliana columbia
  unsure (1)..(441): unsure at all n locations
atcaatctctcttacacactacacaaattcaacaactgaaaccaactcagagcaaaagcttgatttgacactatggcgagcattagcaacgagcccgagcgtgagaacagagacgaagaagagactggagccaacgaagatgaagacaccggtgctcaggttgctcctatcgtcaggcttnaagaagtcgccgtcaccaccgatgaagaagacgaagacaccatcctcgatctgaaatcgaagttgtatcgatttgataaagatggaagtcagtngaaggagagaggttgctggtactgttaagttttttnaaacatagnngtttcttgggaaggattncgtctcgttattnaggcaaancgnaaaacctttttnagatcttttgctaatnaatcttnttttggatcccgnnnattaaggtgttcatggancacncttggg

SEQ ID NO: 135771 - DNA, 396 bp, Arabidopsis thaliana columbia
  unsure (1)..(396): unsure at all n locations
aaaacaatggcaactcaagccgccgggntcttcaactccgccataacaaccgccgcaacctccggcgtcaagaaactccactttttctcaacaacccaccgtcccaaatccctctccttcaccaaaaccgcaatccgcgccgagaaaacagattcctccgccgccgctgctgcagcccccgccacgaaagaagctcccgtgggattcacgncaccgcagctagacccaaacacaccgtctccgatcttngctggaagcaccggtggtcttctacgtaaaagcgcaagtnggaagagttctacgttatnacgtgggaactttaccnntaagancaagattttttnagattgccngccaaggatggnggnangnggttcaatgngggggaagggttcc

SEQ ID NO: 135772 - DNA, 286 bp, Arabidopsis thaliana columbia
  unsure (1)..(286): unsure at all n locations
aaagagtgattcttgaaacaatcgtaagccttctncctcgagagaaaaatgcaatgtcggtnagctttctctctatgcttctncgcgcanaatattcctcgaaacancggttgcttgtagacttnacttggaaaacagaatggnattacaattaggncaagccgtgctcgatgatctcttgattccttcttattcattcactggagatcactccatgtttganactgacactgttcaacgcattcncatgaattanctcgagtttgaagtcgaaggagttcgctta

SEQ ID NO: 135773 - DNA, 372 bp, Arabidopsis thaliana columbia
  unsure (1)..(372): unsure at all n locations
attggctcttcatttctgtgtatagcggtgttcctacaataacacgaagcaatgagagacggatcttgcgttcccggacaaagcaagtagaaggaagagatgcacctgtttctgtttctattgttccgggaacagaggagggttatactggaaaccctccgtctagaaccggaatcttggtgatactggatagaatatccaagtcctcttttnttggcgcatggagaatttatttcaatcaagaagttntcctccccggggtttctctagctctcttgttcttcancgtcctcagcttttgggaacaattnntnncgggtacaattgcaantggggaaggnantacctcccanatnatnaancgggttttag

SEQ ID NO: 135774 - DNA, 488 bp, Arabidopsis thaliana columbia
  unsure (1)..(488): unsure at all n locations
cagcctctgtaacgttcgatcatcttgtatttcatttcaaccactcattgtttttagtttgttttacgaagaatcaactatggcgacgaagagaagcgttggaactttgaaggaagcggatctgaagggaaagagtgtgttcgtnagggttgatctcaacgttcctttggatgataactctaacatcaccgatgacaccaggattcgtgccgctgttcccaccatcaagtacttgatgggtaatggatctagggttgtnctctgcagtcacttgggccgcccaaaaggtgttactcctaagtacagcttaaagccctcttgtgcccagattgtctgaacttccttngggtgttgagggttgtaaatnggcaaanaacctctnatttggttgagggaagtccnanaagtttggntnccaggactnncctnccnggggggtgttttttcccctttggngaattttaaggttntttccnccccanggaagg

SEQ ID NO: 135775 - DNA, 485 bp, Arabidopsis thaliana columbia
  unsure (1)..(485): unsure at all n locations
cttaaccaaaagatcaatagattacaaaaatgcagggagctctgtttatcaaaccaactattcttcttcctcttccttcttcagtttcttctccaaaactcacttttcttcttcctcacgcaaccaaagcttcaagactctcatctctcagatcaaacaactcatcatcatcatcatccttaacgtctgaccctaacaccgtcgactataactcctccatcctttctgtttttccagctgaagcatgcgaagtaatcagtggatacgnttgtnctgctgatatttaccctgaagtcaagctcgatacaaaggccggtnttacggtcccgtgggctttcagaggccccgttgacaagnggatttcggnggggttttaaccagncccccaaaaanngggttttccngtgaangnggccnttnggattgatntttgggnggggggaatttnttttggaacccttggattttntaaaaaanggtncccc

SEQ ID NO: 135776 - DNA, 457 bp, Arabidopsis thaliana columbia
  unsure (1)..(457): unsure at all n locations
caaagctctctttcttctctctcgagatttgctaacttgtcaatggcggatgttgagaatctgaactctgttccggcgtcggaagacacagagtatggatttaaacggccggagatgtacagcacaaacatagccaattccataacttcctacgctcgtnatgtttttntnctttacaaaactcctgaagcttggctctctcacgtcgaagaagaaggtttacctcaacgtttcgctacgttgcttaaagatcgcaaatctgatcttctttgttcagacgaagctcaatgtatgtaaaggtggtggatcctgacggtgatgtttttgattttttccccgattattatcaaggtncaaagggggggttaaagggntacgggaatngtnggaagggttnccttttgaaaggatgngttttttnttnaattggggaaagcccnttggnggtnnntggggg

SEQ ID NO: 135777 - DNA, 469 bp, Arabidopsis thaliana columbia
  unsure (1)..(469): unsure at all n locations
aggatttgcttttacgaacagagagcgagccagagagagtgagtaagagagaatgacgagcgtnagtgggtgtggttcagtgagtctgataactaaccgcagtgcgttcttgggaaacggacttcaacancgtgccgttttccttaaaccatggtcgtcttcttcgcttcagtctcggtccatggttgtcgaagccaaaaccaaaaccagcagcgaagacagaatcgcccgccactctcgtatccgtaagaaggttaatggtacaacggagaggccaaggctatntntttttccgatcaaacaaggcatctttatgttcaagtgntttnatgataccaagatgcacancntagnttcancttcccacttaagnaaggaaacccaactnttttgaaggggtttcgacttacaacctcttggggcccaacccantttnnggttggccaaanaaaangtttggggngagttg

SEQ ID NO: 135778 - DNA, 501 bp, Arabidopsis thaliana columbia
  unsure (1)..(501): unsure at all n locations
ctaaacccattaaagtaatttagctcctcatagattctcgagaagaacacttccatggcgactaaagtatatatcgtgtactactctatgtatggtcatgttgagaaattggctgaagaaataaggaaaggagctgcttctgttgaaggtgttgaagctaaactatggcaggtaccagagacgcttcacgaagaggcactctctaagatgagcgcaccaccaaagagtgaatccccaatcataaccccgaatgagctagctgaagctgatgggtttgtctttgggtttcccaacaagattttggtatgatggcttgctcagttcaaagcccttntttggntgcaanccgggtggnncttctggangggntccaaggnancttcgcccgggtaaaaaccaccctggntatccttnttacaaggaactgggttttcaaaggtggtnggccaagaanacccccaggcaattttcgggggataaantcannntgggttnnaccnc

SEQ ID NO: 135779 - DNA, 454 bp, Arabidopsis thaliana columbia
  unsure (1)..(454): unsure at all n locations
aaggnaaagattttagtgtgtggtggtccgagtggttacaagatagctaaatcagttggagctattgcaatcattgataaatcccctagacccgacgttgcattcactcaccatttacctgcctctggtttaaaagcaaaagactttaagtctctcgtctcttacattgagtcccaagattctccacaagcggctgttctaaaaacggagacaatcttcaataggacatctcctgttatcgcttccttctcttctcgtggtncaaacaccatcgctgttgatattctcaagccgggtataacagcaccagggagtggagatcctngcttgcattttcaacctaatggtggaccgtcccgaagntggncaccagacggtgtgnaggantcntgtttttntctgggaacttcnaatgggtttgttccnnnatgttttcnagggggnggnnttcgtt

SEQ ID NO: 135780 - DNA, 450 bp, Arabidopsis thaliana columbia
  unsure (1)..(450): unsure at all n locations
actcttagaggaagactcttcatcagcagagaaccaacttggtaatccgaacagtactcttccacatgtttctgaagccgaagaaggcaatatggggtattatacacctgttcaaggacttgttaatgagattgaacacaatggagagtctggngataacaatgtagagactgagagangcacgaagcatgcggctcaacggaactactacgatcatgtggatatagatattgngcaaatggatagtgatgatgatattnaagaatggggtagacacttagaggactgtcatcagcgaagaatcggccatggtnatccaaacactatgcagtattgtttgtnaagccgatgaaggccaatgnatgggatnccatttngacntgatcnncaaacgaagagccgatgnaggncaattaatnaattagtgatttntggcaaggnnggccttat

SEQ ID NO: 135781 - DNA, 505 bp, Arabidopsis thaliana columbia
  unsure (1)..(505): unsure at all n locations
caagaagaacaacaacactaagcaaaaaagaaaagctcaagccgagagagacaatggcatcaacattcacgagctcaagcagtgttcttaccccaacaacattccttggccagactaaagcctcaagctttaacccccttcgtgatgttgtctctctcggntctcccaagtacactatgggaaatnatctttggtatggacctgacagagtgaagtacttaggacccttttccgttcaaactccgtcttacctcancggagaattcccttggnggattatggttgggacaccgccggtttatccgcaggaccctnaagccttttgtncaaaannaagagcttcttgagggtggttcccatngggnggattggggcaaatttttggggggcttttttggnttgcataaacccctggaagtttttttaaaaagtgggggnccctgttgggcnttttnnaaagnacccnntntttgttnaaaagcccgggtttaaaaaaatttttttt

SEQ ID NO: 135782 - DNA, 526 bp, Arabidopsis thaliana columbia
  unsure (1)..(526): unsure at all n locations
gtgattgatcagaacttatactatatcggtctaaaactcacatcaccaacgttttcctccgccgttagcaacatcgtgcctgcaattaccattatccttgccacacttttcaggatggagaaagtggagatgagaaaagtaagatgcctggtaaaagtgatggggacgttagtgacagtggttggntccntattgatgatattctacaaaggtcctttcattaatttcttccggtctcacctcacggccgnctcttcgncgccgacggttgactatcttaaggctgccgtcttcctacttnctcgnttccctctcatgggnggtcggtccttttgttcttcaaggnntgcggcttttttnagggaattactcagnccatttttttaaatgtcaaacaaatgggtggggtttcaatggggancggttanaagtctttttagcccctagccttcggtaaattggnccanaaatccttcctngcttttgaanaccggnttttnaaantgaaccttctttggtttttnct

SEQ ID NO: 135783 - DNA, 387 bp, Arabidopsis thaliana columbia
  unsure (1)..(387): unsure at all n locations
aagttagtcaccaaaaaaaaaaaaaacacaaaaagtttcaatggccgcctccacaatggctctctcctcccctgccttcgccggaaaggctgtgaacctttcccccgcggcatctgaagtcctcggaagcggccgtgtgacaatnaggaagactgttgccaagccaaagggtccatcaggcagcccatggtacggntccgaccgagtcaagtacttgggtccattctctggcgagtcacccagctaccttancggagagttccccggagactacggatgggacaacnctggactttttagctgatcccgcgacattntcaaggaacccgtnagctagaagttnattcnncaggcaaggntggnctattnttgggggnccttaggntg

SEQ ID NO: 135784 - DNA, 403 bp, Arabidopsis thaliana columbia
  unsure (1)..(403): unsure at all n locations
ccattttnttcaaaacgattcgggtcaaggttattgactttctcattcagcagtgaagcttgaatcatggcctcgagaattgctaaagatgtgactgaattgattgggaacactccattggtgtatttgaacaatgttgctgaaggatgtgttggtcgtgttgctgctaagcttgagatgatggaaccgtgctctagcgtcaaagacaggattggttttagcatgatttctgatgcagnaaagaagggtcttatcaaacccggggagagttttctgattgagcccaacaaagtgggaacaccttggagtttggggttagcattttacgggganctttccnaaanggtttcaaaancttttttnttncnaaaatccncntttnttntngnggtacctnttgggg

SEQ ID NO: 135785 - DNA, 315 bp, Arabidopsis thaliana columbia
  unsure (1)..(315): unsure at all n locations
caaagaaaacattgtnaagacacaaaagagtcatattatacacatttttttnnttcttggaaaaaaatggattgtccttcatctgaagtaaggataatctcaaaatgcttcgtcaaacccaaaaccatccctcaaaaatggaaagaaccttaccatttttnaccaacggntcatataatgcnctcaatccattacatcccaaaaggggtcttcctttttctcaaaacccatcattttctggaatcctntcaaaccaaaangggttcatgggggacttttcctgcaggagnnttaaaggcttcncttagccnttgg

SEQ ID NO: 135786 - DNA, 333 bp, Arabidopsis thaliana columbia
  unsure (1)..(333): unsure at all n locations
ctctccgtcacgaatcgttctctcgtcgtcatcaaaatctgttagccgaatcagatagagaaaagaagaaagaatggtgggaagtggagctccacagagaggaagtgcagctgcaactgcaagcatgcgtaggaggaagccgaccagcggtgctggtggaggaggtgcctctggtggtgcagccggatccatgcttcanttctacaccgatgacggacctggnctcaagatnttcccccaatgttgntctttatcantgagcaancggtttcaatggtttttgggcncttgttccttcaangtttattggggnaangnnttanctttttcaaa

SEQ ID NO: 135787 - DNA, 484 bp, Arabidopsis thaliana columbia
  unsure (1)..(484): unsure at all n locations
tacaacaacaaatcttaaacgttttactttgtgctgcactactcaacctcaatggccgcctcaacaatggctctntcctcccctgccttcgccggtaaggccgtcaagctttcccccgcggcatctgaagtccttggaagcggncgtgtgacaatnaggaagactgttgccaagccaaagggcccatcaggcagcccatggtacggntctnaccgtgtcaagtacttgggtccattctctggcgaatcaccgagctaccttaccggagagttccccggagactacgggatgggacaacgncgggacttttnagcttgacccccgagacattttgnaaggaacccgtgaacttagnaagttattccacagnaaggttgggccattgtttgggggccctagggtttgggtttttcccctnnaggtttttgggntnaaaaaacggggttaaaatttnggnaagggnggtttttgnttaaagcnggtt

SEQ ID NO: 135788 - DNA, 367 bp, Arabidopsis thaliana columbia
  unsure (1)..(367): unsure at all n locations
gaaaacccttcaggtgattttaggagcatgtaccgccacatttcgaaaggagcatggacatttnntgatcganatcatggatggcaagtttcagattgtacagctgaagctttaaaggtaaaccaaaccaatcactaaagcaaaacaagtccaacattggagttttaacttgaatttttgttttaaatcagtccatatattataaatttatttnagttgtgtagtgttgcctgcngctttccatgatgtcagctgatatcgtcggccagaaaatagntgatggacaattatatggctctnttaaccncttgctgnctttacanagcggganatgggggggtntcaatncggtgggnggccatcccgg

SEQ ID NO: 135789 - DNA, 228 bp, Arabidopsis thaliana columbia
  unsure (1)..(228): unsure at all n locations
cttcantcctcaagcagatgaaaagcagtccagcaccaacaacacacgttgctagaaacaagccaagaccagctccagtcaaccagaagctgaccgnggctcctgctgagcctncagcaagacccgaggcttcanctcatgagnaatnttccgnatagtagccatgttgatgtgggaagattgatggncattcgattttttgtccggaaattttgcggttttnacttc

SEQ ID NO: 135790 - DNA, 393 bp, Arabidopsis thaliana columbia
  unsure (1)..(393): unsure at all n locations
cctaacatgcttctncgtcagccgttgcagcctaagttacagcctaatagagagttgcgtgagagggtacacttgaagcctatgagtcctttggtggctgagcaggccaagaagaagagtcctcccgggagcccggttcagaccgatcttgttcttggacgagcagaggattcggagaaagcaggagatgttcaagtaagagactttctcgnctgcatatcgtctgaatcagtgcaggacaataataacatcagttgttttttcaaaangaggaatcttttgggattccgttagaccaattgattttnttttnaagaaagctttttnaaggggnattnccccccgaaanttttttttggcnaaanttnnttcaaacccccttnngggggggtt

SEQ ID NO: 135791 - DNA, 346 bp, Arabidopsis thaliana columbia
  unsure (1)..(346): unsure at all n locations
ggaaaacaaaggntcttccatgggcgatcgctgagaagatccgcaagaacanaaacatcaaattccttgaaatcaggaatcttattcgatagtctatttgagcccttgatctgttttgaaatggtgctggtattggcattgggggatctccatgtaccccatagagcggctgatctacctcctaagttcaaatcaatgcttgtncctgggaagattcaacacatcatctgcactggaaatctctgcatcaaagnaatccatgactactttnaaggnctatttgccctgattttgcatatnagttccgagggggagtttttcngagattcnggngtnanccctgngg

SEQ ID NO: 135792 - DNA, 402 bp, Arabidopsis thaliana columbia
  unsure (1)..(402): unsure at all n locations
tatgatattattaagtagtagtataagcctctcaagaccagtttcttctcaaagcttctctccacctgctgccacttcaacaaggagatctcattcctctgtcacagtcaagtgctgctgtncttccagaaggttgttgaagaatcctgagttaaaatgttccttggagaatctctttgaaatccaggctttgaggaagtgttttgtttcagggtttncagctattttncttctctctcaggcaggccagggtntagcggttggntctctcatctggnttatcagaaccatttgccaanntagggnggtccttcctccttgttggggggaaaacaaagcttgncnctttcccancctaatgggtgaacncgggatcnaaatnnttgattgatttgattattt

SEQ ID NO: 135793 - DNA, 312 bp, Arabidopsis thaliana columbia
  unsure (1)..(312): unsure at all n locations
actctttactctcttctcttctcacatcaattattcatagtnctctcttctccggcaagaaaagatgcctatnaagtcgttgaggaatgaccatggaacccttaaggccatgatcggntccgatttcaacgagctcactatcgctgctaagaacctagctacacacggcttcacactcactggtttaggctttggtacctctgtcctcgaatgggttgctttaatngccgccatgtaancattctctctggttctnnggcccctttcccctaanccgtttcttggngttgancttnnatgaggttttgaatg

SEQ ID NO: 135794 - DNA, 375 bp, Arabidopsis thaliana columbia
  unsure (1)..(375): unsure at all n locations
cgcataccaagcaaaccaagttcttaagcagatgaatgactatggaaatgctcttggtttctnctactggttaaaaaggcaacctgggtttaagcatgatgggcatacttataccactatggttggtaatctcggtcgtgctaagcaatttggtgcaataaacaagctcctcgatgagatggttagagatggatgtcagccaaacacagttacatataaccgncttatccacagctatggccgtgccaattacctgaacggggctatgnatgtnttcaatcaaatgcaagagggctngnntgcaaacctnaccgtgtaacttncctgtacccntnttggncatttattgctaaacntngggtttttttnacattt

SEQ ID NO: 135795 - DNA, 447 bp, Arabidopsis thaliana columbia
  unsure (1)..(447): unsure at all n locations
ctgtaacaaagtgtggatggcagcatcgttcgtagctgttcaaggaaacgccgatcacgggtcaagttaaaaagcggtctcacctctgctcaccgtctccaacgaagactttcctccgatctccgtcctntcgccgccgcagatctaaccggcgactctntcccttcggaagaaagacgtcgtacctcttcttccactcccgatgagtctctccgacaagtcatgtacctcaactgctggggctcaaggctaaattcagataatgatggtccgtggntcggtcatgaaactccgctggaatcaaaaattttttttctngatgcaaactgtatatnagtttngggtcaacttttggggggttnacccnggggcnttttnaaatnccttttngntggggttttttttgggggttanaacctttttnangtttgggtanaaaccctttgg

SEQ ID NO: 135796 - DNA, 237 bp, Arabidopsis thaliana columbia
  unsure (1)..(237): unsure at all n locations
aaagatggtcattgggaagtnatcaacaacaaggaggctttgcgggcnctgttgtnagttttggacgataggggcagacgggaagctcgtnttattgagtcgttggagaaacgagaaagttttntttntcaagccatgctgagtagacaggtgacccantcggagacagcccatttcacagatatagttagagaggacagttcttcacctgtttntnatatagacaacaacctatgt

SEQ ID NO: 135797 - DNA, 384 bp, Arabidopsis thaliana columbia
  unsure (1)..(384): unsure at all n locations
tgaagacggtgtaccatattggcttattaagaactcatggggagcggattggggcgacaaaggttacttcaagatggagatggggaagaacatgtgtggtattgctacatgtgcatcataccccgttgtggcttgagatgatcagcgaatgtggttggtcaattatcaaattacgnaatgttcacgtatttattggattaagacattacgtaaaagttgggactttggaatgcatatggtttatgctttgttgtaacattaaaaaggncctgttaatatgttccaaattaaagccaaaccttttaggccggccaaattttttaaaaattttnccatgtttaaaatttttttggcccattaaatttgntttttggncccaangnt

SEQ ID NO: 135798 - DNA, 354 bp, Arabidopsis thaliana columbia
  unsure (1)..(354): unsure at all n locations
ctcacaacagtaccattgtgatcaaagatgtgaacctcaaaacaaaacacatgaagagccgagaagagggagagcctggtcaaattgtcaagatagaagcacctatccacagctcaaatgtgatgttgtattcaaaagaaaaagacgtagtaagccgggtgggtcacaaggtacttnaagatggacagaaggtaagatatctgatcaaaacaggggnactcatcgncaccattntgaagtgggagcttctttaagggnggcttaagggtaagggaaccnccccaagtttgcagttnccncccccattttttgggggcttcaattttttttnttttttcngnnccctttttngnt

SEQ ID NO: 135799 - DNA, 365 bp, Arabidopsis thaliana columbia
  unsure (1)..(365): unsure at all n locations
gagaaaacttcgtctctnttctctgcttcgccctctcatttcctgtgagataaaggcggagtctctctccagtnattttnctcatccatcgattctnagagttcaaaatggttgancaagttcagcaccccactattgcgcagaaagctgccgggcagttcatgcgttcaagtgtttncaaggacggttcaagtggggttaccagagggcttcttatgtatcaaaggcatgcaaacttngggaacctacttccaatgcctgcaatttcaaattttncctcccaacaatccccgggnnngtttgggaaanaaatnggtttttccccgtggttttttcccaaaacccccgggggggaaaaggggntt

SEQ ID NO: 135800 - DNA, 395 bp, Arabidopsis thaliana columbia
  unsure (1)..(395): unsure at all n locations
ttccatttatccgcaaacggagcttgttttcggtnnacctgcttcagccacttcaaacttgaactgagaaggatgggaaacgaatcatatgaagacgccatcgaagctctcaagaagcttctcattgagaaggatgatctgaaggatgtagctgcggccaaggtgnngaagatcacggcggacttcaggcagcctcgtcatcggacagcaaatcttttgatcccgtcgaacgaattaaggaaggcttcgtcaccttcaagaaggagaaatacgggaccaatcctgcttttgtatggtgagctcgccaaaaggtcaaagccccaaagtacatggggntttcttttttcgggnttaacgngtnttccccatnaaaaagnncntannctttcnaacct

SEQ ID NO: 135801 - DNA, 379 bp, Arabidopsis thaliana columbia
  unsure (1)..(379): unsure at all n locations
ttccatttatccgcaaacggagcttgttttcggtnnacctgattcagccacttcaaacttgaactgagaaggatgggaaacgaatcatatgaagacgccatcgaagctctcaagaagcttctcattgagaaggatgatctgaaggatgtagctgcggccaaggtgtagaagatcacggcggacttcaggcagcctcgtcatcggacagcaaatcttttgatcccgtcgaacgaattaagganggcttcgtcacccttcaagaaggnggaatacgngacccaatcctgctttgttatngntganctcgccaaaggtcaaagcccaaagtacatgggngttttcttttttcggnnttnacggggtnttccccattnaaang

SEQ ID NO: 135802 - DNA, 446 bp, Arabidopsis thaliana columbia
  unsure (1)..(446): unsure at all n locations
agaggaaaagaaaaaaaatggctgcttcatcttcctctttcactctctgtaatcacaccacacttcgtactctccctctgagaaagacccttgtnaccaaaacccaattttnagttcccacaaaatcatcagaatctaacttctttggctccacactcactcactcatcgtatatctccccagtctcttcctcttctctcaaaggcttaatctttgccaaggttaacaagggtcaggctgcaccagacttcacactaaaggntcaaaacgggaagccggtgagcctcaaaaaggtattaaaggggaagcctgtttgntcctcttactttttacccntgcaggntgaaancccctggggttnanccaagnaggggtttttcccttttcagnggnctttttttggggaatttcaaggaaagcttggttcaaggggnnntttnggnatt

SEQ ID NO: 135803 - DNA, 364 bp, Arabidopsis thaliana columbia
  unsure (1)..(364): unsure at all n locations
gaaaaagaaaagaaaagtagagtactatcttcctcttaaaccaaccattcaaaatgttgcgtactatcttcctcttatctctnctctttgctctatccaatgcctctnttcaagatttctgtgtcgcaaacctgaaacgcgctgaaacccctgcgggttacccttgcattcgtcccattcatgtcaaagctacagactttgtcttctctggcttaggnacttctnggaacacttcaaanatnatcaaaggcggtgntnanaaccggtttttggaggtttagttcccgggttttaaacgggtttagggccttttttaaaaagttggattttngnttaggtccccaaagggtttnntccccaattg

SEQ ID NO: 135804 - DNA, 280 bp, Arabidopsis thaliana columbia
  unsure (1)..(280): unsure at all n locations
tttnagtttcaataatctttctataaaaagatcaacatccatggctatcagaattnnnngagtnctgcaatcatcaaagnaacttctaaaatcgttgtcacactcatcaaacaatgtcgctattcctaaaggacaccttgcggtttacgtaggngagatgatgcaggtgaggagattcgtggttccagtgacatacttaagtcacccttgttttcaaaagcttctaagaaaagcagtngaagagtttgggtttnatcacccaatggntggcctcactatt

SEQ ID NO: 135805 - DNA, 332 bp, Arabidopsis thaliana columbia
  unsure (1)..(332): unsure at all n locations
ctcgccgtgactctctctgctctgccgccggcatcctctccggtacgtctctcagatccgnncgggatttggagtttgtgtacaaaaagactgttgttggaatgtgcaaatgagacaatattggaaatgttatttgcagcagaaggaggaggattctnctcttcatcagcttctggttatagcaatggtttagctcttcttctattagggcaaaagactgaacaaaaacctatcaaaggtttcatcacaatggnacccattatccatttaagtnggttaaggttctganaccggggtttcggttngnatcngctnaagnanttgggcncttt

SEQ ID NO: 135806 - DNA, 332 bp, Arabidopsis thaliana columbia
  unsure (1)..(332): unsure at all n locations
atcaaatggccaactagggaaaaaggtccttctcgtaaggttttggttaggatttatggtgaaggtgttgagattttntttgatcgtnaggntgagatcaggacatttgagttcatgtcgaagcatggtcatggacctttnttgttaggtcggtttggtaatggtcgtatcgaagagttcctccatgcacggaccctatctgcttgtnacttgcgtgatcctgaaatatctggtcgaatagcaactaggntgaagggagtttcatgttcttgaaatgccncggtgcgaaaaaaggcttttctttttgggccanattncggaattnggnncnc

SEQ ID NO: 135807 - DNA, 250 bp, Arabidopsis thaliana columbia
  unsure (1)..(250): unsure at all n locations
attttcttccaggcggggttagcgccacgcaaacaagaaatgtnaagncggaaganaatgatcaggatcggggtagggatggggatggagtnaataacttatcaagaaactttttgggtaatatcaacataaactcaggcaggaacgaggaatacacatcatggggaggtaacantncttggaccggtttcacctccaacaactcancaggccatctttnattctaagtactcagcactagctnttnttt

SEQ ID NO: 135808 - DNA, 429 bp, Arabidopsis thaliana columbia
  unsure (1)..(429): unsure at all n locations
caacaaatcttaaacgttttactttgtgctgcactactcaacctcaatggccgcctcaacaatggctctctcctcccctgccttcgccggtaaggccgttaagctttcccccgcggcatctgaagtccttggaagcggccgtgtgacaatnaggaagactgttgccaagccaaaggggccatcaggcagcccatggtacggntctgaccgtgtcaagtactttggtccatttctctgggcgaatcaccgaggtaccttacccgagagtttcccgggagactacgggttggncaccgccggnctttttaagctnanccccgnggacaattnggaagggaaccctnnaacttnggaggttnttccncaagaaggtnggggcccattntttgggggccctagggtttgggtttttcccntnagttttttggt

SEQ ID NO: 135809 - DNA, 284 bp, Arabidopsis thaliana columbia
  unsure (1)..(284): unsure at all n locations
cgaaaaccctagtttcagaggcatctccagacaccgaaaatggcggaaggactcgttttgaagggcaccatgcgtgcacacactgacatggtgacggcaatcgccaccccaatcgataacgcagacatcatcgtctcagcttcccgcgacaaatccatcattttntggaaactcaccaaggacggcaaagcctnnggtgtagctnanaggcgtnttcacttgnnaattcttaacttncgttttagggatgttgnttctcttccttccgattgggcaaattcgng

SEQ ID NO: 135810 - DNA, 262 bp, Arabidopsis thaliana columbia
  unsure (1)..(262): unsure at all n locations
gnctgatcagattaggagtaatttgtcgatcatttcttgtggatggtttggnaggatgattctatatgcgaattatatcgtatcggttttcacttcgttgctttggattcatccgttggcagaggttttagtgaagagaagtggtgatcctgggnctagtggtagtagtcagagtcagagtgggttggttggtaatgtaggcatgttgagtaatgantttncgaagtttccggggtttncanttngnaaactttcgggggnt

SEQ ID NO: 135811 - DNA, 336 bp, Arabidopsis thaliana columbia
  unsure (1)..(336): unsure at all n locations
ggaagagctggttattttggtagatcagagcgacttggagctactgcatccnctgcnacttctcgacaaatgcctcatcctacaacaccaaccgatcccaatccttctntttcgttttgtccatcaaatatatacagtagtactggacgcgtacatagcaatatgcctggnagccccacggaagctgacccttcaagctctttggtgaaccgggatggtttgagtcactacaacatgaatggaaattgcagaggtattgttggccctngaaaggattgacatggatgaagngctttcatatgggcanctnggctttttttngggnccnattttttt

SEQ ID NO: 135812 - DNA, 307 bp, Arabidopsis thaliana columbia
  unsure (1)..(307): unsure at all n locations
ggaagtccccggatacagtgccgttagtggacatgttgtnaccgtttttggatgcacggaattnttgggcagatacctcgtntcaaagctcgccaaacttggtactcaggttatnattccctaccgtnacgaggacgaagcgcganttttcaaacccatgggtgacctcggccaaatagttcgaatggagtgggacattcgaaatnaggcccagattgctgaatgtttnaagcactcggatatcgtctataacttngtaggacgtgactatnagaccaaaacttttnantacaagtcccgtgcacgt

SEQ ID NO: 135813 - DNA, 421 bp, Arabidopsis thaliana columbia
  unsure (1)..(421): unsure at all n locations
tgcaatgcatgccactctagccagccgagatgtggactgttgcttgatcccggaatctccatttttcnttgaaggctcgggcgggctttttgaatttatcgataaacggttaaaggagagtggtcatatggtgattgtaattgcagaaggtgcgggacaagatctgttgtctgaaagcatgaaagagtccacaactctcaaagatgcctctggaaacaaacttcttcangataattggcctatggntctcccaaagaatcaaggntcatttttgccaagaaggatgacccttaccctcaaaatattatagntcccaancctnncatgntaccggggtgtttccgagccaattcaatcaggcaaatttattgcttncncggntttttnggntcaaaaagcgcgggttnattggggtgnttgg

SEQ ID NO: 135814 - DNA, 390 bp, Arabidopsis thaliana columbia
  unsure (1)..(390): unsure at all n locations
ctgcattatttgtnccagatgttccatttgaagttcttgtcaggaggcaaatatctcgtttattagatcccagccttcagtgcgctaggttcatcttcgatgagctagtaaagattagtcatcagtgtatgatgaaagagttacagcggtttccagtcctgcaaaagcgcatggatgaggttattgggaactttctgcgagaaggtcttgaaccttcgcaggcaatgatccgagatcttattgaaatggaggtggattatataaacacctcacanccaaatttttatccgggggaacctaaaagcccgtngagcaagcaattnnaaacaagtcaaaatctntcttngggntttccggnattccttgttnncncggggcccaaggggntna

SEQ ID NO: 135815 - DNA, 476 bp, Arabidopsis thaliana columbia
  unsure (1)..(476): unsure at all n locations
ctcatccgccgagcgatattgttgatagctcaaaaaatggaggacactgggagcattaagcaagaagcacagtctcatcctccagggatcttcgagataccgggggagcctgcggttntaatcaatggtgtgcctgatgaacctcaaactgattgtatgattgccaaagatgaaccaatatcaagtggcactgtaggaagcggggaatggcttgagggtagagaagttcgcaagtttttcttgggtcgctactattctggtacggtgacaaagttcgataaacaatctggatggtacagagttgaatatgaagatgggggattctnaagatcttgactggtcttagctttgnaggaagtncttctaccttttggatggttaactgtncccanttnaggccttttctcatttggaattcctnnaaggntccggcaaantacatgccccnccttattgggttncnnggcncaancgnt

SEQ ID NO: 135816 - DNA, 326 bp, Arabidopsis thaliana columbia
  unsure (1)..(326): unsure at all n locations
aatcgattgcttaatcatttctgccgttggattgaatcgaaaaagggcgaatnatttaaaaagcttcagaatttgaaatcgaaatctgtgagtactgttgtgtttgtggaagagagagttttggggtttaataatggcgaaanctggagggatcacgaacgcagtaaacgtaggaatcgctgttcaagcagattgggagaatcgagaatttatctcacatatctctcttaatgtnccgtccgtctcttcggaatcccttgtcaattttgatcacccncaaggggcangtttgggntnntttaattgagnannttggtnccntttgg

SEQ ID NO: 135817 - DNA, 314 bp, Arabidopsis thaliana columbia
  unsure (1)..(314): unsure at all n locations
actccaaaagcggtagaatgtcagccaccgccgccgcctcctcctcgatcgccgttgccaccaactctctcaggaacgtgactctgtcttccagatcgccccttccatcagccatctccgtggctttcccttcccgtggacgcaatactcttcagcgacgnctngttctcgtttcctgcagtactggagacggatctaagcctacgattctcgtggcggagaagctnggtgacgctggtatttaaggtttttgggaggnntntccgcgaaatttccgacnttttncgnaataanaaatncttcctgttggnggc

SEQ ID NO: 135818 - DNA, 314 bp, Arabidopsis thaliana columbia
  unsure (1)..(314): unsure at all n locations
ggaaactacaaagccatgaaaggcattacattcttcacaccctttttatcanttctanatctcttatgcatctngtttatgacagaaactgaagctgggtcgngaaatggtgntggggtctacattgtctacangggatcagnttcctctgctgcaaacgctaatagagctcaaatactcataaacaccatgtttaaaaggagagcaaacgatnttctccacacatataagcatggcttctcaggttttgcagctcgttttgacaagcagagagggccaaggtcatagccangnaaccnggggtgggtttcaag

SEQ ID NO: 135819 - DNA, 416 bp, Arabidopsis thaliana columbia
  unsure (1)..(416): unsure at all n locations
tctcattctcgacaacgaaccagggaacaagaaccgtcgtggtcgaaaacgaagaccttggcggcaggtcatgtacggttctaggggttggcactggacctaccagctttccaccttttggctatgccgnnggattcccagtcgttcgcctcaggggtcttcccttcaactgcgctgacattgacatcttcgagttctttgcgggcctcaacattgtcgatgtcctgctcgtcagcaaaaacggtaaattntctngggaggccttttgtngtgtttnccggccctatgcaagtcgagattgccttncaaaaggggcagncacaatatggggaggngataagtgggaagnttttccggtgntcttaagnaagggctacttcaantcnggtggcttctttaggagggaccgtntnagt

SEQ ID NO: 135820 - DNA, 313 bp, Arabidopsis thaliana columbia
  unsure (1)..(313): unsure at all n locations
ttcattcatctttaatcttttttncttcaagaacacgatgagcgacaataaaaatntnctcctgagacgaatggaagaagaagaagaaaaagatcgagcaagaaaacaaatctntnttttatcctcaaaaagatcccaaaccacaaacgcaaacgcagctgttacagctccgtccgaggtggcgtttaacggttgtggtttatgtgnttattgtcctctttgtgttctttggggctgcatcaaanagncttgtacaattgggtgggggggccttnttaaacggccaacggnaggtttagccgggtncancggg

SEQ ID NO: 135821 - DNA, 385 bp, Arabidopsis thaliana columbia
  unsure (1)..(385): unsure at all n locations
agagagcacaagaagagaagaactggggaaagccaggcagcaaaaagtcagcaagaaccgtgtggtttggacgcactggcgagtgcagcagtcttaggagacacaataggcgagccagaggtagcgaccacgaccagacatccaaggcacagggctggatgctcttgcatcgtgtgcattcagccaccaagtgggnaaggtaggcacaagcctacatgtggctgcactntntgtagcaccgtnaagagaaggttcaanacgcttattattaggaggaaggnagaagcagttttgagcncgattttnccagccagcaagtaggttaggagaaggagggcattggancttgncttaggtctntttannagttaaggnggtggangga

SEQ ID NO: 135822 - DNA, 407 bp, Arabidopsis thaliana columbia
  unsure (1)..(407): unsure at all n locations
gctggtatcattcatcttcttacaaacatgttgagtttgatcttcattggtatccgccttgagcagcaatttggcttcataagagtcgggctgatatacttaatatcgggtctnggtggaagcatactttcgtcgcttttccttcaagaaagtatctccgttggtgcttcgggtgctctctttggacttcttggagcaatgttatctgaacttcttaccaattggactatctatgccaacaaggcggcttctctgatcaaaattctgntcaatcatcgcaatcaaacttngcattagggnantgnttcccccggggntgacaaacttttcacancanttnggnggcntttttaaccccggnttttttcccccggggggtttttccccccntgnttcccgnccccaaa

SEQ ID NO: 135823 - DNA, 434 bp, Arabidopsis thaliana columbia
  unsure (1)..(434): unsure at all n locations
attggattgttaaacctgtgcctgggacaacagaaaagcaaggtgatgctgtcaagagtggagcaaccattaggttcagcatatgaagaccagaaaatggcttcacagtcacttgcatgcatctcctatatcagggaacttagaggttagctgctttggagatgatacaaattccgatactggggatcactggaagcttataattgaaggaagtgggaagacatngnnacaggaccaaagagtccgtcttcaacacatagncacttagtggctacctnccntaggcnatgacaaagnagtacccacggtattagcttgggttgggcaaccaagagggtgnttttgnaattncngggaggaagaaaggcgggntaaccattttttgtttttgcaaccaaaaangggggnttttccttnccccntttaatttgggg

SEQ ID NO: 135824 - DNA, 376 bp, Arabidopsis thaliana columbia
  unsure (1)..(376): unsure at all n locations
cacacatccatatccaaggcgttgcaagaccggtcgaaaaccttgtaagactgacccctcttcanagcaacgctacgggggagagttctatgtaccaagagacgaggagttctctacagccaagggcacttnattcacaggcaaggccgtactggcagctcttccctccatcttccctcanatcgagtctgtnctattgagtccccaagaaccttttccacacttcaagggcatacaaaatctctttgaaggaggcattcagcttnccaaggatgcttggccttttaacctntggttncccaggattcntnaaaggcnttttnggggnaggtccaaagatggntattnttcccatttttnattgcccccatttttt

SEQ ID NO: 135825 - DNA, 462 bp, Arabidopsis thaliana columbia
  unsure (1)..(462): unsure at all n locations
aaaggaatcatgggtcttaaagctggaacctttgtncttctnttgttgggtttgatcttggtctctgacgctagatctttcgttgactccaccatctcagagaaagtttccaacaaggaagacgtttgcactctgtgtgaggaatatgttactgatgctctcagctaccttgagaaaaatgtcacacaagcggagatcatcgaagatcttcatgatcggtgttcccaattgcncggatattcgcagcagtgcataaggttggtggattactatgttcctcttttccttcttacaactagagtcggtttcaacctcaattatttctgcaagaggggttggaatcctttgtgggcaaaaagtttntagctcntttttcggagnaaagctncggtcaanggccaagtttcnggtgttatnccnnnaggaccttttcaagngnttctnaatcaaacntcaaagncc

SEQ ID NO: 135826 - DNA, 469 bp, Arabidopsis thaliana columbia
  unsure (1)..(469): unsure at all n locations
tctcaattaaaatcagtttgggattttttcgaaaacgcttttcaatcttcgtctatctgtctccacgatccacgccttgaccttcgttttttttttctcagagattagagaaaactccgataaccaatttctcaatcttttcgtagatccaacttttccaggnaaaaaagaggttccgcgaagaagatgagttttcaagatttagaatcgggtagaggaagatcaacgaggaaattcaatggtggtcgacaagattcgacacaagccgtttgcttctggnatattncagatcaataccggagtcttccacgtttcaacgnnttcgttaaacacacttggtacctcccaaagnttacaaccggagctccgggnagaagcttncacaagncaaaggtttgcaanatttggccagcttttttnaagggtnantncaggcttaacctttaaagnaggtttggttnaacttnnt

SEQ ID NO: 135827 - DNA, 226 bp, Arabidopsis thaliana columbia
  unsure (1)..(226): unsure at all n locations
aaaaaaccttcaaaacatttccttattctttcttcttcatctacaacaatggctggagttgcctttggttcctttgatgattcattcagcttggcttctctaagagcttacctcgctgaggtcatcttcactttactctttggtttcgctggtgttgggtctnccattgcctacgnaaagctnacgtcggangntgctttttnatacaaccggggctagtggccat

SEQ ID NO: 135828 - DNA, 290 bp, Arabidopsis thaliana columbia
  unsure (1)..(290): unsure at all n locations
agttgctattaagattgttaaaagaggngaatcttccgaagagattgcgaaaagagagagcagatttgcaagagaggtctctatgttgtctagagttcaacacaaaaatttggtcaagtttattggagcttgcaaagaaccaatcatggttatagtcancgagctttttactcggtggtacatttgcgtaaatanccttnntagcntgcgtccagggagttttngncatacgtgtagctttttggntatgcccttnaaaattgctccggggcganttgaattgctttaca

SEQ ID NO: 135829 - DNA, 364 bp, Arabidopsis thaliana columbia
  unsure (1)..(364): unsure at all n locations
aagctctagatagagagagagagagagagagacaaagtaacaaagagaaagagagagaaatatggaaganacaaaatcgagattcaagaggntctntntctnctntggaagcagttccggcaaaaaaccttcataccangaagctgccattcaattgggtaacgngttggtggagagaaggattnatttggtatacggnggtggtagcgtggggcttatgggtctcgtctctcaagctgttcatcatggtggtcgccatgttctaggggtcattccaaaaaccttgttgccangagagntaactggtgagaccatcggagaaagttaaagcccgtgggccgctattgcattcnangggaaaagc

SEQ ID NO: 135830 - DNA, 440 bp, Arabidopsis thaliana columbia
  unsure (1)..(440): unsure at all n locations
agaagatgaatccccgtttganttccgggcgctagaggtggccttggaagctatttgtagttttctagctncaaggacaacagaactagagaagtttgcttatcctgctttggatgaacttaccttgaagataagtagccgtaacttggaaagagttcgtaaattgaagagtgccatgacccgtttgacagctcgggtccaaaaggtaagggatgagcttgaacagttgttggatgatgatggtgatatggctgatctctaccttacaaggaagcttnttggngcaacttcatctgtnagcgtttcanatggacccatttggtatcctacttccccaacaatagggtctatnatttccagcgcaagtagngtgagttttantcaccggntcctgggggacgncggaaactnnttnttgnagngcttnaaaataattgctt

SEQ ID NO: 135831 - DNA, 262 bp, Arabidopsis thaliana columbia
  unsure (1)..(262): unsure at all n locations
ggagaagcaaggggatggatgtaaagagaaaaactttaatggtaggcagtgtaagctttcctcatctaatcgtacgaagtccaggagggccaagcagttntaacaatttaataaaagctgcagaccaggcttttntggtatctggcccagccaaagtnaagttgtaaagccacgtcgtcctctgcaaaaggttccaganttggnttatnaagttnatagtnatgaagaatgggaagaggaagaagctggtgaaagcntttna

SEQ ID NO: 135832 - DNA, 467 bp, Arabidopsis thaliana columbia
  unsure (1)..(467): unsure at all n locations
gctcgtgtgctcatcgtgtccgtatcgccctcgctttgaaagggcttgattatgagtatataccagtgaatttnctcaagggtgatcaattcgattcagatttcaagaagatcaatccaatgggaactgtaccagctctggtggatggagatgttgtgattaatgattcttttgcgataataatggtcagtagtaacacatccatttaacttttttttggtattgttgattaaaaaggaacatttcatcgatctttcggttttgtggtgtttggattgacagtatctggatgagnaagtacccctgaggccacctttttttaacctcggtgaccctccataaacgnngctggtgnaattacccagggcaatgnggtaattngtnctttgcnttggcatanaagccntcaatcaaaaancttgggctggttaataagggtatntccgnggaaaagnttaaaannttng

SEQ ID NO: 135833 - DNA, 451 bp, Arabidopsis thaliana columbia
  unsure (1)..(451): unsure at all n locations
gaaagacgtttgtncctggncaggcaaacaacgcatacancttccctgggtttggactcgggctaataatgtcagggacgatccgtgtccataatgacatgcttctggcagcatcanaagctttggctgaggaactnatggaggaacactatgagaaggggatgatatacccncccttcaggaatatcagaaaaatctcagctcgtattgcagctaaggtggctgccaaggcctacgaactgggactggccacgaggttgcctcagcccaaggagctggagcagtgtgcttagngcagcatgtncagccctttcggtatncgaagctaccncttgagngataaagcttaatctaattttnttaatggcctcatacgggctctttatgggccatttattttcctccncctantttggttcaactttccaatttccctnaananttttgnttt

SEQ ID NO: 135834 - DNA, 361 bp, Arabidopsis thaliana columbia
  unsure (1)..(361): unsure at all n locations
gcacatactacctcagaggatatagatgagcccttccatgtaaatttcgatgtggaggatataacacaagatgaaaacaaaatggaagaggncaataaggatgctgaagaaatcaagaacatcgatgctaaaatccgcaagtggtcaagcggaaagagtgganacattcggtctcttctatccacgctgcaatatattctttggtctgggagcgggtggnagccggttcctctaatggatatgatcgnaggnaacgcggttcgaaaatcgtaccataggggcattnctnattctttnaatncagncaaaactacatcaaaaagggngggtttttnaaacccagnacttcatttgncctgga

SEQ ID NO: 135835 - DNA, 391 bp, Arabidopsis thaliana columbia
  unsure (1)..(391): unsure at all n locations
ttcttcttctctttcgatcaaatcttttcagattcaacccaaaattgaagacaaaaatgtntcgcagatcgctaactctcctcaagaatctagctagaaacgcgaatggttcaggtattcaaacccgatccgtgacttacatgcccagacccggtgacggngcaccacgcgcagtgacgctgntccccggagatggaatcggtcctctggtgacgancgccgtggaacaggtgatggaagcgatgcacgctccgntcttnttcgagaagtacgatgttcacggngaaataagccgtgtgccgccggaaantgatggagtcgntaagggngaataaggtttttttnnaaangtggggctttaagaacttcctcnttnggtgggtgggtggtt

SEQ ID NO: 135836 - DNA, 473 bp, Arabidopsis thaliana columbia
  unsure (1)..(473): unsure at all n locations
agaagagccaaaagaagagtttatgcttacatctggatgggataacaatcagattggntcaggccacaataactttctttcagaagctgagcagtttcaaaaggtgacaaattcaggactcagaatcgacatggntccaagttttgaatcagcttcctttggtgttgggcagacattactaggcagtagaagaccnggtgagaagagaagaacanaaacagaaaagacaattggtttagaagttcttcgacaatactttgcaggaagcctcaaagatgcagccaagagcattggtgtttgtccaactaccttgaaaagaatttncagacaacacggggtaccacgntggccttcccgggaggtcangaaagttggggcattccttttnaggaacttccacctttgttattagccnctgttcaaggngtncaaggntncttttcaacttggttcaattnttttanaaatttncc

SEQ ID NO: 135837 - DNA, 497 bp, Arabidopsis thaliana columbia
  unsure (1)..(497): unsure at all n locations
acaaaagacaagagttttctcaggtttctatctctctcgtcaaacacaacgaaagacattgaaactgagagaaatggctcttaagacattgcaagctctgatctttcttggtctatttgccgcctcatgtctagctcaagctccggctccggcacctatcacgtttctccctccggtagagtctccttctccagttgttacaccaactgcagaaccaccggctcccgttgcttcaccccctattccagccaacgaacccactccggttccaacaactccaccaaccgtntcacccccgacccacgtggnccacaaactttccctgntnggtttctcctcctaaaacatatgcttttggnttcagggcccatnaagggtccaacaancagntttgnggccnccgctttctagnaggaaggncggggncggtaggntggactnaagnattttnctaaanaaaaaggttttcctttggttagnaaaagttaatttccggg

SEQ ID NO: 135838 - DNA, 504 bp, Arabidopsis thaliana columbia
  unsure (1)..(504): unsure at all n locations
ctttgacatcaaaacacaaacccggaaagcttcgtntgccattttcaattctnctaagccctagctcaaagctttctntctcaaatccgccatgactaaacagcacgcnaactggtctccttacgataacaatggaggaacatgtgtggccatcgctggntcggattactgtnttatcgccgccgatactcggatgtctactggttacagtattctnagtcgcgattactccaaaatccataaactagcggacagagctgttttntnttcctctggcttccaggctgatgtgaaagctttgcagaaggntctcaaatccagacacttgatctatcaaccatcagcatancaagcaggtgagctggtccctgcaatggnccagcttnttttcccaccacgggtttnntttcaagggggggtttccccccacctaatggnccttaanngttcttgggggggggttttcgggggaagggaaaaggggnggtttttttacntttcggg

SEQ ID NO: 135839 - DNA, 441 bp, Arabidopsis thaliana columbia
  unsure (1)..(441): unsure at all n locations
caaagttgaattgcctgattgtntctcagatactgctttgaatganctggccggtgctgtcctcagaggtgaattgcctgagcatgtctttnatgatgctttgtatgcacgggccggtggtatcttccaaggtgaattgcctgattggccctcagatgatgttttgaatgacggaaaacgattttacatggtgaaggaatcagagtggcaagccactgattggatttctatgtatttggaacttgtaattactacaactgataagtcgatcagtatcangccagaagttctgtccaagttggagattntnaaagtggcggttagaaaacctgcctacccaaaagattgaggagcccgtcttaaattttngnggcctnaaaaaggccctnncaagggnaccantgtnttccataaacggttttaaggggctttngnagnagc

SEQ ID NO: 135840 - DNA, 458 bp, Arabidopsis thaliana columbia
  unsure (1)..(458): unsure at all n locations
aaaggagaaaagcaaagaaatagaggagatggatagagagatccaaaacggtgcgtacagtgggagagtgatgactgaggagcagatggagattctccgtaagcagatcgccgtttacgccgttatttgtgaccaactcgtcctcctccacaactccctctcttcttaccatccactctcatcaggagtgaggccaatggttggcggatactttgatccnntgggggcatcgtcaagttctcatagggtatcgactaggcatcggtggactccgacttcaacacagcttcagatacttnagagcatttncggcgnagggaagttggacacccgnantcgncggagggattagaagagatccccgancgggngctgtntttanccatggncaagttcacggggggcaaattttttncaattggttttaaaaacccgnggggtnggttccaaancgnaaa

SEQ ID NO: 135841 - DNA, 457 bp, Arabidopsis thaliana columbia
  unsure (1)..(457): unsure at all n locations
tccgacaatggcgatagtatggcggttntttctttcccatctctactcaacaagtcaaccttatcctcttcactctttactcccactttcctcccggcgaaatcctcttcacttctcatcaaatcatcacccaaaaccagattcgttgtttcatcatccatggaagctggaatcggagtaatggggtcaaaactcggaatgatgagttttttcgaagaagacgggcacagtagttccagtaacagtcgtcggattccgcgaaggtaacatcgtaactcaaatcaaaaccctagccaccgacggttacgncgngggttcaaantcggttanccgtcgntgttacgncgtcaaaaaangnttagctnaaaccnggnaaaccgggtcaatttncanaaaaagcccgggttacaatttccncaatgggnctttcttccaanggggttcangttttaccaaa

SEQ ID NO: 135842 - DNA, 522 bp, Arabidopsis thaliana columbia
  unsure (1)..(522): unsure at all n locations
agcgattaaacctactcantctcagatctcgttaaacctagaaacctcgagaaaaaccgtatcaatggcgccgaaagcagagaagaagcccgctgagaagaaaccagcttccgagaagccggtggaggagaaatcaaaagccgagaaagctccggcggagaagaaaccaaaggccggaaagaagctcccgaaggaagctggtgccggagggacaagaagaaaaagatgaagaagaagagtgtcgagacttacaagatctacatcttcaaggtgcttaagcaagttcatcccgatatcggaatctccagcaaagcgattggggtcatgaacagtttcattaacgggtatctttcgagaagcttnctcaagaggcgttgnagcttttcnagggtacaataaggaaaccttcggntcactttttcggggtgntttcagnncttccttttnaggttttgtnctttccctngngnnnttngcgnanttttcccgtttntttaagggggcttaaaccnttacggaatt

SEQ ID NO: 135843 - DNA, 529 bp, Arabidopsis thaliana columbia
  unsure (1)..(529): unsure at all n locations
agaagattgtnactactactgctactactagtgcaagangctcgaggagaacgagcaaagagattgctgttgttgctaaagatactaaaacgggaagagccaagaataatattaagaaacaaacggatacgaaaacagaatcatctgacgatgatgatgatgagaaggaagagaattctaaaacagagaagaagacagtagcggataagaagaagagcgtggctgatttcttgaagaggataaagaagaactctccacagaaaggaaaagaaacaacgagtaaaaatcagaagaagaatgatggaaacgttaagaaagnagaacgatcatccagaagaagggttattgaaccctttaaggaanggggaccagttaaagttgaaccccncgggggatttgngggcgttagttnccggggttaaaaangaaagntttnngggttaggggattaattattaggtaaaggcccncatncgaaccgggaaccaaaccgnnggtnnccacccagnggttggcttcttngaaancc

SEQ ID NO: 135844 - DNA, 610 bp, Arabidopsis thaliana columbia
  unsure (1)..(610): unsure at all n locations
caacaccttgtacgacccataccgtgaaggtgctgacttcgtccgtggataccctttcagtctccgtnagggtgtttccaccgctgtttcccacggtctgtggctcaacatccctgattacgatgcccctacccaacttgtgaagcctaaggaaaggaacacaaggtatgtggatgctgtcatgaccatcccaaagggaactcttttccctatgtgtggtatgaacttggcctttgaccgtgagctcattggtccggctatttactttggtctcatgggtgatggtcagcctattggtcgctacgacgatatgtgggctggatggtgtatcaaggtgatctgtgaccatttgggatttgggagttnaagacaagggttttcccctacaattttaccacagcaaaagnccagcaancccgttttttgnaacttttaaggaaggagtncaagggggatcttttttggaaggaggggtatnaattncctttttttccaganggggaaaagtncacggaaanaaggtgttncaagnttaacaantgttnnatgggggtttncaattttggtgaaggggaggtnatccccnttntcccnattttgnaaatntaag

SEQ ID NO: 135845 - DNA, 538 bp, Arabidopsis thaliana columbia
  unsure (1)..(538): unsure at all n locations
gtanctatgttcaagggatggttatgaagacgagagggccagtttttgttactgcctttaaccctctctgcatgattcttgtagctctcattgcctcttttattcttcatgaacaaatccatttcggatgtgtaataggaggggcagtgatcgccgcgggtttgtatatggttgtttggggaaaaggaaaagactatgaagtatccggattagatatccttgaaaagaatagcctccaagaattgcctatcacaactaaaagtgaggatgacaacaaattggtttcttctataagcgncaacagcantgtgaccattcctggtggtgccgcatagtaaccacatctggaatataagtgaagaaagcattttttcgnagttataaaattacatattttgnattcggnctaaaannaaatccataangtattttgtatgcagttgggtattnaaatcattgaanttntttttttaaanaaactanngtagttnaagnaaaaaatgggggggccgccntttgngggncccaggtttcgnga

SEQ ID NO: 135846 - DNA, 379 bp, Arabidopsis thaliana columbia
  unsure (1)..(379): unsure at all n locations
ggaagaaatctagtggatggaacctaacagagggtagttcttgggaagctaagccttgttgtgtaaacgagaaagcaaatnatacagcttcagggggttgtttgacgactgaggaatggagggagaatcagtggatagccaaagatagggttaatgacagttgggagtactcgggccanggaaaggatgatggatgggataagtcagggcaccanaacaagaaagtaaaaggttctnaagagtataaaaagatcgncaatcctttggaagcccngcctngttgtataaaagagncagcanaagattcccccttttgggaggttnctctcgttgagggatttggnaggntagaggtttggaataatnantntttgggcca

SEQ ID NO: 135847 - DNA, 509 bp, Arabidopsis thaliana columbia
  unsure (1)..(509): unsure at all n locations
caaaaaaacacaaatcttggttcatttaaaatctctccaagaaacaaaatggcagcttccatgaaatttctctgcattcttggtctgattctcctcatcggaacagtcgttgacggtgcaggggagtgtggtagatcttcgccagacaatgaggcgatgaagctggctccatgtgctggtgcagctcaggacgctaactccgccgtgccaggaggttgctgtactcagattaagagattttntcaaaaccctaaatgtctctgcgccattnttctttccgacacggccaaagcctccggtgtcgatcctgaggttgcccttaccatccctaaacggtgcaatttcggtaancgtcccgtcggttacaagtntggnggatacacaatttncataaaatgttgacggttagnanggnttaagggggtnaacaattnggccttttgtngaagctttggngtttnctaataaggnttccatggnccttataanntntggtaacgggaaatntt

SEQ ID NO: 135848 - DNA, 425 bp, Arabidopsis thaliana columbia
  unsure (1)..(425): unsure at all n locations
cnttgaccagaaaaacacacagagaaaggngaaaaacatggaggagttggcgcatccgtacgttccgagagatctgaacctacccggatacgtaccaatctcaatgtcaatgtcctccatcgtctctatctacctcggttcttccctccttgttgtctccctcgtctggcttctcttcgggaggaagaaagctaaacttgataagatgcttatgtgttggtggacattcactggtctcactcatgttattctcgagggctatttcgtttttctccccnggaggtttttcaaggacaacacttctgcttatctttgctgaagtttttgnaaagaatatnagcaaaagggtgatttcgtgnntacngttnngtnagaggttcttgcaannangtaatcttttttgtaagggggtcaccncnctgtna

SEQ ID NO: 135849 - DNA, 262 bp, Arabidopsis thaliana columbia
  unsure (1)..(262): unsure at all n locations
gtaaattaacacagtcgggaagcaatcggtggaaaaggaaacanctttggaaggttgattccattacagattcgattcgaaactatggttcagatttccgatcttccacgggntttgacagaggaggngctctctaggattccggtggcatctangagagcagtgagatttacttgcaaaaagtggnacaccttntcgaaagatcggngctttacaaaagaagcacctncntggagcaagagcagcagcaacgnaggcagca

SEQ ID NO: 135850 - DNA, 381 bp, Arabidopsis thaliana columbia
  unsure (1)..(381): unsure at all n locations
agaagagtccattcagcatagtagtaggctagggatagaaaacttgaatagtacgatccanattcaggttccacttccgagttcttcatttnctgtatcagtagatgaatggcagaccatccaatcgggtggcaatnagattggaaaatggctattgaattctgatagttttnagttcggtgatcagattggaccaacttctctcaaaggnatttnccgcggtaaaagagtgggaatcgngaaactaaaaggttgtgataaggggaattcctatnagtttgagcnccgaaaagatttacttngagctgatggcttttggncacaagagcattctgcaattttacnggtgtttgcatcgtttgagacccatggnatnttncg

SEQ ID NO: 135851 - DNA, 552 bp, Arabidopsis thaliana columbia
  unsure (1)..(552): unsure at all n locations
cgatcgatctaaggagacgatgaagatcttccacgttccttgtctgcaagcaactactcttatctgataatcgatgagagcaccggagacgcggcggttgtggatccagttgatccggagaaggtgatcgcatcggctgagaagcaccaagctaagatcaagttcgtactcactacgcatcatcactgggatcatgccggtggaaacgagaagattaagcagttggttcctgatatcaaagtatatggaggttctctggataaggtgaagggttgcactgatgcggttgataatggtgacaagctgactttgggtcaggntattaacatattggntctccacaattccttgtcacancaagggtcacattagtttattatgtgaaccggaaaanaaggggaaaaccccagccgtnttcnccgggggtacacttttttntttcttgnatttgggagtttttttaangggcacttttcanatttttaanncggtttttntnttccntggtnnatnccntaaccncaaaggtttttttggccatngtancccgga

SEQ ID NO: 135852 - DNA, 448 bp, Arabidopsis thaliana columbia
  unsure (1)..(448): unsure at all n locations
gctgttgttgttgctgctgctgctgcaatatatcctgtctctgaagccactgacgtaaaatctgctgctgcaaagatcatcctgctttgaatctaatctaggtttttnccgtgcttgagttaagttgtttggatcctgaaagaacgattcagaagcacgccgagccatagaaagcgggatttgattagtttgtgatgtaggcagtgatgtagcactagagccacctagctgaacactaggatcatgccgttgtaccacagtcgacccntctacaactnatgaacccgatatgctgatattnttagaagnggacggcataggagacgccggtaaacggatatatgactcanttanttggtactagcactacgntgcaaaaaagggccncctncagagggccntaantagnancttttgncaagngacttagntccttcgctttgacccg

SEQ ID NO: 135853 - DNA, 540 bp, Arabidopsis thaliana columbia
  unsure (1)..(540): unsure at all n locations
attttccgtttcttgataccaatggaattgtcactgtagatgataaccgtgttgggccattgtacaaagacgtcttccctccagcatttgcaccttggctttccttcatcggtataccatggtgttaccgttccctatgtttgagctgcaaagcaagtggatcgcgggtgttttatcgggtcggatcccgcttccttccaaggaagatatgatgatagaaatcaaaaccttttactccacacttgaagtccaagggattccaaagcgatatactcatcgtatgggcaatactcagtttgagtattataattggttggcttcacaaatgcgggatgctcagaaacagaggaatggnggnaaagagatgtgttttgcggattggtgtttaggaaggaagnccctnccgnagacggtttagaggcggatngggttgtccacancttagtttnttgagnttttcaaagnttttnnttttgtcctctnaaacaaaanatttttttttttngnaggaaattncccgnnttntaaatnccaatctgc

SEQ ID NO: 135854 - DNA, 378 bp, Arabidopsis thaliana columbia
  unsure (1)..(378): unsure at all n locations
atggagaagaagttgtacaattcaatggagggaagaatctgtctcttcattacgctagtnacgattctcactgtggttcatgtacctatattgacaccgagttcagagagagagacagaatggaatttgaagtagagtcaagtggggattttcagacccctaagagcggtttgtttgacagattttccagtgagaggagtgttgtgtctaacccnttcagaaatggtgggcatgtcctatatcctgtgcatngcaattgancantggntttnggggatnatnattctttcacaattcagacggctgcacctcgggnaatggggccatatttcaaaatagtcttggggccaatttcnaagcttngggnagnggaccttt

SEQ ID NO: 135855 - DNA, 380 bp, Arabidopsis thaliana columbia
  unsure (1)..(380): unsure at all n locations
ccaaataatctccaaactctccaactctcaatttacgatcacatccttcctccagtttacacagtagcctttctcttctacaccaaaaatgatttgntctctcaagaacacacttcccacaaactcaagacttctctgtctgaaaccctgaccaagttctaccctcttgccggaagaatcaccggagtaaccgtcgattgtaccgatgaaggagctatctttgtcgatgctcgtgtcaataactgtcctctcactgaatttctcaagtgtccntgaatttcgacggccttcaaacaagttgctttcnccttaggatgttnttnggnaaccccttangggggctngtttnccgnnggggcccttttgctnnttntntgaag

SEQ ID NO: 135856 - DNA, 371 bp, Arabidopsis thaliana columbia
  unsure (1)..(371): unsure at all n locations
gactcttctccgacttgtctcatcactgcaaagttctctctttattcctcgttctctgtttcgttaattttcacagagtaaagagattttnatacattggacccaaagtgcaattttcaaaaatgtttcgctggaagaattcttctcaaaccgaacaagagcagaaagaggcagctctcagagaggcaaagatgaaagagcttaagactctcataggtcagctttctggaaggaattcattgtattgttcagatgcatgtctgaagagatatctggaagctaggaattngaatgtaggcaaagccaagaagatnctcgaggggncgntnaaatngngatcnngtttttaanccccggnaatccnttngatt

SEQ ID NO: 135857 - DNA, 340 bp, Arabidopsis thaliana columbia
  unsure (1)..(340): unsure at all n locations
tccttatctccataaatntaatctnaggagagagcttgatttgtnagggccaatnaacttcgctgagaagatggtcttagccgtgtttggtgggttggttgtnttgtggatgacaaggaatataactaatgatatccccggctggggtcggatcttcgccggccgagccgggggatggaaccgtaagtntaatgatggcgacattgttgtttatnatcccaagcaatattaaaaaaggagagaagctaatggactggaacaaatgcaagaaactaccatggaacattgtnttgttattggnagcttggattcgctatagnccgntggngtacngaccatt

SEQ ID NO: 135858 - DNA, 465 bp, Arabidopsis thaliana columbia
  unsure (1)..(465): unsure at all n locations
tgtttaagcaacagacaacttttattaagactcctagtactagagtagagtcgttcactagcattgaacctgctaaccgggctggcaaagagatcaaatatggaccatatgaaaatcgtgcttcatactcttacacacctgtcatcattcacttcgagaataacagtccatttgctgttgttgaggagcttgtgcgtgaaattgagatttcacactggggtagccttcagattacagaaaattataggttgactcatgggggagcgaggcataagggtgttttctcaagggttgattatcaatctaaacgatcggtcaagtggtgcatcctcttttcaatggcggtcccttgcagtcctacctcccagagtgnaactntggcttcttncagggnttgngntnnggaacaatctttanttcanaaattttngnancaggcttttggaangccagnccttnannttt

SEQ ID NO: 135859 - DNA, 279 bp, Arabidopsis thaliana columbia
  unsure (1)..(279): unsure at all n locations
gatgtttatttnatggctgagaagcttctaantcaatttaacgtttggttcaaccctacattgaagagattcgaggctcaanaggtgaaagtnatggnatcatcgtntcgtcctggacctgaggataatcaaagagtgtggaatcagaataatgtgacggagaatncaaggaaaggacctgaacagatttctatagctaaaaagctagattcantngaggcggctactacctacattgcctcctcctccagtaatttgggntaccangtgacccattcc

SEQ ID NO: 135860 - DNA, 481 bp, Arabidopsis thaliana columbia
  unsure (1)..(481): unsure at all n locations
aaaaaagtttccttttttagcgaatcctctgttttagaaatcttaaagttgtctcctttattaaagaccatcatgtcttccacttctttcaccgaccttcttggttcttccggcgttgactgttacgaagatgatgaagacttgagagtttctgggtcgagttttggtgggtactatccagagagaaccgggtctggtttacctaagttcaagacggctcaaccaccacctcttccgatttcacaatcttctcataacttcactttctccgattaccttgattctcctctgcttctcagcttctcacacagtttgatatctccaacaaacagggacgttttccatttgaaggcttttaatggnaccaccaaacaatnactcaagattttccccnggnagntaacaatntnaancatcaaanggttnctnctgntttgaaagaaaaananggtttcaaagttcangggggngntgcaggggc

SEQ ID NO: 135861 - DNA, 398 bp, Arabidopsis thaliana columbia
  unsure (1)..(398): unsure at all n locations
gtgacggaggaatcccaattccgagacgcaaccttctcctcctcctccgccgaatcatcaaatggatgcagacgacgatgacgagaatntgaacagctcaaggagtgttcttctctctatttatctttacaggattgtnttgttgatagtaatagggactggaaatcttgccaaaaacatgttcaagctttgaaggaatgtcatgaaaggagaatgaagaaatgatagagnttaagaaaagccaatacttgattagttactgcttatagnggnnccatataagtatgacatctttntcgtcttgcaaaaattggttaataanacggggncttntgnttgttttcctgttggggggggttgcaaatttncaagctttccattcnaatgnaaaccttggg

SEQ ID NO: 135862 - DNA, 334 bp, Arabidopsis thaliana columbia
  unsure (1)..(334): unsure at all n locations
aaacacaaaaacaaagattataatggcttcctcaaccatggctttgtcctcccctgccttcgccggaaaggctgtgaagctgccgcatcanatgtcctcggaagcggccgtgtgaccatgaggaagactgtcgccaagccaaagggtccatcaggcagcccatggtacggntctnaccgagtcaagtacttgggtccattctccgggcgagcccccgagctacccttacccggtgaagttcccgggtganntagggattggncaacggttggtctattccgccgancccaaagaccctttngcaaggaanccgtgaggntaggaagntnntccc

SEQ ID NO: 135863 - DNA, 368 bp, Arabidopsis thaliana columbia
  unsure (1)..(368): unsure at all n locations
acaacactaagcaaaaaagaaaagctcaagccgagagagacaatggcatcaacattcacgagctcaagcagtgttcttaccccaacaacattccttggccagactaaagcctcaagctttaacccccttcgtgatgttgtctctctcggntctcccaagtacactatgggaaatnatctttggtatggacctgacagagtgaagtacttaggacccttttccgttcaaactccgtcttacctnaccgggggatttcctgggggttatngtttggncaacgccgggtttttcgganacccttaaggcttttnnccaaaacagagngcttttnggggnntnccctgggggatttggnaaattttgggggt

SEQ ID NO: 135864 - DNA, 470 bp, Arabidopsis thaliana columbia
  unsure (1)..(470): unsure at all n locations
cacagcagttaaattgagtttgtgtctcgtaacttatcctgtgagcgaaaatggtgaaagcaactaaggcagagaagaagatcgcctacgataccaagctatgtcagcttatcgatgagtacacccagatcttggtcgttgcggccgataacgtcggatcaactcagcttcagaacatcagaaagggtcttcgtggagactccgtcgtgcttatggggaagaacactatgatgaagcgttccgttaggattcactctgagaacaccggaaacacttgcaatcctgaatctgcttcctctccttcagggnaacgttggtttaatcttttaccnaagggtgaccctcaaggaagtttagccaangagggtttntnaagtacaaaggtncggtnccccttgcttcgttttnggttttggtnggttccaaatttnngtnggnttgtcccaaccnngggaanaatttgntnttgg

SEQ ID NO: 135865 - DNA, 385 bp, Arabidopsis thaliana columbia
  unsure (1)..(385): unsure at all n locations
aaaaaaatatggaacatcaaacaactccaaagcagaaaactaaggagaagagcaaaggcaacaagactaagtttgtgggagttaggcaaaggccttcaggaaaatgggtggcagagatcaaagacactacacaaaagatacggatgtggctcggaacctttgaaaccgcagaagaagccgctcgagcctacgatgaagctgcatgtntcttacgtggctccaatactcgcaccaatttngnaaaccattttccttacaactnacaactatctttnaagntcagaaatcttnttcacccgaagcagagcatntngcagcagcancaacaacaancacaaaccnctttttttcttttncgggttttcaacatcaacttcnaacttgg

SEQ ID NO: 135866 - DNA, 389 bp, Arabidopsis thaliana columbia
  unsure (1)..(389): unsure at all n locations
agttctcctttgtcccagatctggagggaaaggtcacagcttcataaaaaaatctnaagttggaacaatctacacgcatcatcaaaaaactgtnattgtagacgctgaagcagctcagaaccgaagaaagatcgtagcatttnttggagggctagatttgtncacggacgatttgatactcccaagcatcctctcttcaggacattaaagncactccataaagatgacttccacaacccaaatttnntnactactgcggatgatggnccaagagaaccatggcatgancttcacagcaaggtttgatggtccagcttgcatatgatggtnnctttgcttaattttggggggaccgttnggttgaagggntttaaaaacctcggngggga

SEQ ID NO: 135867 - DNA, 606 bp, Arabidopsis thaliana columbia
  unsure (1)..(606): unsure at all n locations
agccaaacctccagttaagcccccggtttaccctcctaccaaagctccggttaagcctccggtttctcctccgacgaagccacctgttacaccgccggtttacccgcctaagttcaaccgtagtctagtcgccgttcggggtacggtttactgcaaaagctgcaagtacgctgctttcaacacactcttaggcgctaaacccatcgaaggtgctacggtgaaactagtgtgtaagagcaagaagaacataacagcggagacgacggcagncaagaacggatacttcttgttgttggcttcctaaagacggtgacgaacttcggttttcaaaagggatgttcggtggtgtaattttgggtgaaaatcaaaagggccttncaaattgcagcaaaaggtctnnaaagnntctttcggttggagnatttncgggcgcttgaactttaagncctnngaaaaaagcttgggaaaatnttccgggttggtcgtnaacaaagctcgtataccgggcttttttaacggttgggccaatttgcctttaacccggtttnncccaaattaaggttnttttatgccttggtannacttgntgtntagttnaaagttnag

SEQ ID NO: 135868 - DNA, 305 bp, Arabidopsis thaliana columbia
  unsure (1)..(305): unsure at all n locations
tgaaaccggggtcgcctttcgcggttaacccctacccgtttttngcttacnaagatgaccggagacccgaaacgttggcctattgcttgtttcaggccaatcctggccgtntcgaccncaacagcaacctcaagtatatgaacatgttcgatgctcaggttgatgcggtgtattcagctttnaactcgatggggttcaaggacgtagagataatggtcgctgagacttggattggcatacaagggagncccggaggagggttggtnnanaatttttggaacggtagngcttncaaatnaaaattt

SEQ ID NO: 135869 - DNA, 487 bp, Arabidopsis thaliana columbia
  unsure (1)..(487): unsure at all n locations
aaaaatcaaaaggggtcatttactatcttttaagagacgacatatatagttctcgaccaagaaaagaaaagggggtgacctgagttcttcaacacataacataatggccggagttttcaaaacggttacgtttcttgttttggttttcgctgccgttgttgtcttcgcggaggactacgatgttggtgatgatacggaatggacgagacctatggaccccgagttctatactacttgggctaccggtaaaactttccgtgtaggcgacgggctcgaatttaattttcgcttcttnggagggatgatgtggcagttgtntcanaaagctgcnatttggaaaactnttgagaaaagggnanccccttngcccaaaattacccgtttcccccgggcaaaaatttntgggtaaaccccatttgggcccaaaaantttttttttnncacccgnggggngcncccntgngnnttttgggaaaaaacctttcca

SEQ ID NO: 135870 - DNA, 475 bp, Arabidopsis thaliana columbia
  unsure (1)..(475): unsure at all n locations
tcgtttctctgatgtcttagacgaagttagatcgtagattcctatgttttgattcctcgatcatgcttcgaattatggtgtttttatcctcaatttttggagatttggtttctacggattttgtagattcaggaatttagaaatggtgattcgatttcaatggttttagatctgattcagtcttcactcttgtnccactattttnaaaattggctaaaaactaggtttcgtcgtctaattctcccgacgttcttcgagaaatgtgaactttgaggttttattttatacaatgggtcgtgggaaacagctttgggtngaggtcaaagctncattgggattaacctcttttggtgggtgacggntcctgcntccctaaggccaatttcccagntccttcgnncccggnttcctaactgnggtttaaaaaacggggccnttaacccnccagnnaacanncttttnacttgaaacngga

SEQ ID NO: 135871 - DNA, 593 bp, Arabidopsis thaliana columbia
  unsure (1)..(593): unsure at all n locations
gtgttcaatttccatggaagacgaaccaggaagcgaaaatgaagcagacaccatagttgcttcaccacttgcaaaatggagaatcgaattctcgaaatcgtttcagaattacttagacagatctgctcctaacattgttcgaagatggcttgtgactttagtcgctgcagtgatctatatctatagggtttactctgtttatggatacttcgttatctcttatggcttagctacttatatcttaaatctcttgattggtttcctttcccctaaagttgatcctgaacttgaagctttggatcctgattctttacctgttgatgagtctgatgaggataagncctttgttcggtcgtcttcctgagttcaaagttctgggtatgcaagcgnctaaagcantttnttggttgcaattttgtgnatnggcaatctttcntcctttnccngggatggtgccccgtgtttctnggccgatcnttggttggnggtanctgggttgggttttggaatcctnnacctttgaaacgggttaaanngngaacanggtcaaggaatagnanctttcccttcgggtgaagnaancctttaaagtg

SEQ ID NO: 135872 - DNA, 370 bp, Arabidopsis thaliana columbia
  unsure (1)..(370): unsure at all n locations
gaagactaactgtgttttttttttctttcctcgatgcctagatcaagcagatgggtcaatcagcgagctacctctaagattaaaaaatttatactctttttgggtgtagcctttgtcttctacctctacagatacccttcttcgccatcgacggtggaacaaatcatccacttccatctacaacatttccgttaaaggntattgaaaggggaaagatgtgagtttgagcaaagtttaccggggaaagtgcttcttnataggcaatgtaggccctaaaggngggncttacnaaattggnaccttccaagggaatnggaccaatntgnattngccaaggnncaaaactncagggggttttaaggtctttngg

SEQ ID NO: 135873 - DNA, 504 bp, Arabidopsis thaliana columbia
  unsure (1)..(504): unsure at all n locations
gaattaagaaaaacaaagtctattccatacgaagaagagcctcaggttaattttttaaaagatgggttattggaagtcgaaggttgttccaaggatgaagaaatttttcgagaagagtccagcaaaaaaggaagttnttgaggaggagaagccacgagaggtggaagtcgtggaggaggtcgtcgtgaaaaccgaagaaccggccaaggaaggagaaactaaaccggaggaaataattncaaccggcgagaaagagatagaaatagttnaagagaagaaagaagaggctaaaccggtngaggttccggtnctcgcagcttnggaggngaaggaagcccaccnttagaagaggngaagaagancggcgccntttgaaganaagaaanccantttttnagaggngaaaagccttcccttggaagtgaagaaacctttttngggtgggggaaaaanaatttttttccctttttcccgttgctttaaatncctttgcttaaggtnccc

SEQ ID NO: 135874 - DNA, 414 bp, Arabidopsis thaliana columbia
  unsure (1)..(414): unsure at all n locations
ttttttttttttanaagaactaaatctattatctttttgatttcaacgatacacacaaggaagaaacttagaacgtgaaaccacattgaactgaaaagaatgtaaggaaaaaaaagctacagactataaagagtgagtggtgcaaaagggcgattgtttgagagactgctctcaaaatcttatttttnattcancatccttctttctttcccccccaacaaaaccaaatatcaaaaaaaaactttttataagttggtgggagcagatttctccggtgaactgctaggngnttctccaaggggaccgtttnccgttttcgncctgnggnacggcaggggntctttaccggttgaaggttttttccnatttccctttttaaggctctttttttaancccgnaagcttttnaacnnt

SEQ ID NO: 135875 - DNA, 355 bp, Arabidopsis thaliana columbia
  unsure (1)..(355): unsure at all n locations
gcggaacatatatacactcaagtatttaaagaagatcacgcgcggcgattgattaagcgagaacgacgctacagtaaaccnaaaccaaatctagatctgttgctctccggtcacggtgcttctnaccggtggccggagagggcttctccctctnctcctttcctctctctnatctcctctncctctcctttaaagctccggtggtgttcaaatctggcttgcncttcgtctcttgttggtggtatgcggcgagtgggtcacncaccggagcaaagnacgtncggcggtgttttttcccgtttaaaggaaatggctttaaatgaaacggcctttanacnggtttttccgggtccct

SEQ ID NO: 135876 - DNA, 401 bp, Arabidopsis thaliana columbia
  unsure (1)..(401): unsure at all n locations
ttccctgagttcttaaacctaatggctaaaaagatgaaggacacagactcggaggaagagctgaaagaagctttcagggtgttcgacaaagaccagaacggtttcatatccnctgcagagcttcgccatgtnatgacgaatctaggtgagaaactgactgatgaagaggtcgaggagatgattcgtgaagcagatgttgatggagatggtcagataaactacgaggagtttgtcaagattatnatggctaagtgaattatgataagaaaaaantggaggnttaaaagtggttgatgtnatgaccctttttaggcttttnncttatcttccaaaanggattgattcggncctttnaaagggnctttggggttttnntttaagccnangtaggttccttaagg

SEQ ID NO: 135877 - DNA, 507 bp, Arabidopsis thaliana columbia
  unsure (1)..(507): unsure at all n locations
agccactatggcagtctcctcactctcaatccgctgtggtggtttctcaccaacaatctcccacaagacagaaattctctgtccaaatccatcactcaaagcttgttgtttactttcatccggtgcttaccaaaaaggcagcggaaacaattggaagagaaggcaagctcttntgggagtaggaactttagtggcaacttcaattccagcaactttncttcttgctgaagagataccaaaaagctactcgccttttgtggatcgagaaagacgggtattcttactatttancccatcaanacttggaaggggcacattgatttcagcctttcaaaagnttaggtacctttgcnaaacttccaggaaattttccggggtcaaggtttcattncccaccggggggaaaaaacgggccattcccttggaaggtagggtcctnttggaagnngggnggttttttnacctttgtnnnggataaagtttttttagggncccannccaagnngg

SEQ ID NO: 135878 - DNA, 364 bp, Arabidopsis thaliana columbia
  unsure (1)..(364): unsure at all n locations
caacaaatnatcagccacttcacaaggagttgtatactctagttcccacagtatgtttcgttcctgctttccttaaggcgataaatgaaaacacagaggaaagcttcagaaatataatatctgaaccgtctcctggtgttttcgtctttnacatgntccagcctagcttttgtnagatgangctagccgagatagacaattttnaaaggtgggtgggtgagaccaaattccggataatnngaccaaacaccatgantaaatacggtgctgtgcttgacganttnggtctagacaccatgcttgncaaactcatggaggggtttatacgtccccatctntaaagtattcttcagtngatgtgggt

SEQ ID NO: 135879 - DNA, 309 bp, Arabidopsis thaliana columbia
  unsure (1)..(309): unsure at all n locations
attttnatggagcttcgattagtttagcaaaaagttgtggattaatcagatttggtttnnncttaatcgatctgtattatatccttncgatctattgtgtagttaacggtgaagaaacaaaagantcaaaggtcgatatattcggcgatgatttcttttcaccggaatctgtagctcatatggcggaggttgttgtcggaaagctttaagnttttccctccaacacgngtatttncaaaatccagctaacggcacgtgtctctggggtggaatcacggatntcccancttcnttctttagggggtgccc

SEQ ID NO: 135880 - DNA, 456 bp, Arabidopsis thaliana columbia
  unsure (1)..(456): unsure at all n locations
atcagcaccagcaacatcaacaacaacaacaaccgtcggatgattcaagagaatctnaccattcaaacaaagatcatcatcaacagggtcgaccngattcanacccgaatacatcaagctcagcaccgggaaaacgtccacgtggacgtccaccaggttctaagaacaaagccaagccaccgatcatagtaactngtgatagccccaacgcgcttagatctcacgttcttgaagtatctcctggagctgacatagttgagagtgtttccacgtacgctaggaggngaggtagaggcgtctccgttttaggaggaaacggcaccgtatctaacgtnactntccgtcagccagtcacttcctnggaatggcggtgggtgtttccnggaggaggnnggaagtttttnactttnacatggaaggtttnannttnttttngttaacggggggctttttttt

SEQ ID NO: 135881 - DNA, 409 bp, Arabidopsis thaliana columbia
  unsure (1)..(409): unsure at all n locations
atcaaatcctcctcctctgcttcaccaccaaaaagcatattcttctctngtcttctccggttaatcaaaatctctccgtgtgaatcgtttgtnaatggtggaaactaatccgatcggtggtaagtttacgctctccctttccatcaaaagggcgagcttttctnttcctctctcgacatcctctgttttngctttcggatcttgcaaagaaggctggtactttcgntgccttggcctnggncccgtgaacgatttggcccctaaaaattcacaaacccgggacccctaatttccttaaaaagtgggtcttttttttaattgaatccnggtaacttttgagnattttgccccggtttttgggncccctccgntttcggagaatgnttgnctntacaaaaaagnngggggg

SEQ ID NO: 135882 - DNA, 331 bp, Arabidopsis thaliana columbia
  unsure (1)..(331): unsure at all n locations
gattgtaacgcgtatgcagacccacagaaaaatgacaaaagatcaaacagcggcccccgagtcaccttcttctaatgcagaagctctggttgctgttgagccgcgtccatatgggacctttaatacgnttcgagaggtttacgatgaagcttggataactggcttctngaaaggtgtaattccaccattgatcatgggnagnaatccgtcaattgcaattnatgtttttcggggcaattcttacccaagctttaggaaaagcgtgcctttnaggggttgggaanaacgtttnccnnttttgggggcnatttttttnttggngcctttgggg

SEQ ID NO: 135883 - DNA, 369 bp, Arabidopsis thaliana columbia
  unsure (1)..(369): unsure at all n locations
ggtattccaacgctattggaagatatctttggttttggttttaagcaaggcgntccattaactgggatgttagacgctttgtcgaatgantttnctgtccagcgaatgggcggagtaggtggagggatgctaagagatgtccttgctgtttcagctaatcttcctactcttagtaggatgttccctaaggacacactgctttggaggctggaaatncttaagtatgctattgcttctgtgaactctcacataaactcagtcagagcgggnaacactcatacttctgagtggaccgcgntcatntgctcntcaaggaggnagacatttttcaagaatacttcgngcacgnttggccaanaatngtattnt

SEQ ID NO: 135884 - DNA, 289 bp, Arabidopsis thaliana columbia
  unsure (1)..(289): unsure at all n locations
ctctcattctnactaacagagagaaaaagcaaaagcaaaaatggctcgnnctttcgctattncngtnatctgtatcgtcctcatcgccggcgttactggtcaagctccgacttcaccaccaaccgntacaccagctccaccaactccaacaactcctccaccagcagcaactcctcctcctgtttcagcaccaccaccagtnacaacatctcctcctccagtttcttctcctcctcctgcttctcctccaccagntactcctcctccagtnggttttcctncttcctcc

SEQ ID NO: 135885 - DNA, 314 bp, Arabidopsis thaliana columbia
  unsure (1)..(314): unsure at all n locations
cgngggatcaacatgactcgacatcatcccttagcctaagctgcaaacncctccgtcctctcgcccctaagctctccggcagccctccctcccctccttcttcttcctccggngtcacttcagccacttttnaccttaaaaacttcattagacccgntcaaaccggtccgacaaaatttnaacacaaacgngnccctcctcatcaattggagacgcacccgggagggacaaggtggaacccgactnaagaacagatagggntacttgagatnttgtacaanggtggaatgcgtactcctaatgctcaacagatt

SEQ ID NO: 135886 - DNA, 435 bp, Arabidopsis thaliana columbia
  unsure (1)..(435): unsure at all n locations
ggcaaagactcaacatttctagtggagaagatgagaggtgggagtctatggcagctagggcaatcaataacccgtcgtcttgctcaatctgacaagaaggttgtgtcacgtcgctactttgcctctnaagctgacttgaaaaagactgctctttacggcttccatgttgcccatggaggaaagatggttccttttcctgggttggagtatnccaattcagtacaaagattccgattatgggcctcaacgggttaacctncagggaaaaatggggagttttttttaatggttncacataatnttntggggttttnagccttaaaggggtaaaagaattgtgtttnccttttncttttgagaccactttttgggttccttnatttttggcctnggttttggncncctnggaacttgggngncttnaactgttttttc

SEQ ID NO: 135887 - DNA, 504 bp, Arabidopsis thaliana columbia
  unsure (1)..(504): unsure at all n locations
agaagaacagatcaaatacgaggagagatctctaaagagatttatcgtttcaaatttnttcacgttgagaagtttaatttagattaaacaacaaaaagatgggttactggaattccaaggttgtnccaaaattcaagaagttattcgagaaaaatagtgctaagaaggctgctgctgctgaagctaccaagacctttgatgaatctaaggaaacaatcaacaaggaaattgaggagaaaaagacagaactccaaccaaaggtcgtggaaacctatgaagccacgtctgcagaagtcaaggctttggtgagagaccctaaaggtggcttggtttnaaggaaaaacctcagcgggttgtccagaagtancctccgnggggcttagtcaaaatttgaatttccccgggtccaaaagcnggttngttaggcttcgtttgntttcgnngctggctttttnngagncccgtaaggtcnntttccggangggntnttttttnncccggggg

SEQ ID NO: 135888 - DNA, 381 bp, Arabidopsis thaliana columbia
  unsure (1)..(381): unsure at all n locations
accaaccaatcaactaaccatggattccgagatcgccgtcgactgctctccattgctcaaaatctacaagagtggccgcatcgagcgactcatgggtgaagccaccgtcccaccttcttccgaaccacaaaacggagtcgtttccaaggacgttgtttattctgccgacaacaacctatccgtccgtatttacctcccggagaaagccgccgccgagagcnactcgaaactccctctcctcgtttanttncacggtggagggattcatcattgagacaagnttttnttnttccgactttaccacgggtttttcnttaagggngggttnttttttgggttggaaacttttttaangggnntttttttnattaaccngngggg

SEQ ID NO: 135889 - DNA, 336 bp, Arabidopsis thaliana columbia
  unsure (1)..(336): unsure at all n locations
aaccattaacaatctcaatctcttattcccagggcaacgaaagattcaagttagttgcggtggtaagagtgaggtgttgaagagtgatacaatggaacctcatgaagcagaaacgttgtgaacaagagaaccctttatgctcccattgagccatatagcagtggaaatttaaaggtttcanatgttcacactctctactgggagcaatcaggcaaacccgatggncacccggttgttttttttcaaggngggncnggnaggagggacgggttcctagtaataggggnttttttcggtcccgnggntttattcgggnttnnccccgttttanccaaa

SEQ ID NO: 135890 - DNA, 282 bp, Arabidopsis thaliana columbia
  unsure (1)..(282): unsure at all n locations
ggcgagagacagagagcgaagaagaagactcaaaccaaaaaaaaaaatggaagctgcactgctttnttttcagcccttccnttcctccgccactcaacgacgtctctntccgtttaacctccacaatacacttaccagaccttnttcttatgctcctnttcgtgctcaaaaggtttcactttttnatccaattcaatcttcttgtttctatcttatcctcagaattgtatacaatatgtaaatttnagtgctgnnttcattgnttctcaaaatngatggaaa

SEQ ID NO: 135891 - DNA, 386 bp, Arabidopsis thaliana columbia
  unsure (1)..(386): unsure at all n locations
acgccgccgcttcttcttcttcctcgcagcaggtaagtcacacaggtaactgaaagatggggcgtgttagaaccaagactgtgaagaaatcttctcgtcaagtcatcgagaagtactactctcgcatgactcttgacttccacactancaagaaaatccttgaagaggttgccatcatcccttcaaagagactccgcaacaagattgctggattctccacccacttgatgaaacggtntccagnaaggggccagtccgtgggatttnaatcaaagnttcagggaagaggnagcgttnaacnccggaatgggcctttttttccccgattnaggttnnccattnaaangcnttttgngttcaaaggggggcaaaaggggcctttttag

SEQ ID NO: 135892 - DNA, 251 bp, Arabidopsis thaliana columbia
  unsure (1)..(251): unsure at all n locations
cccatttactgggcacagatgctctccccnngcatgtgcttgcntacattcgattaaccgaggaagacacnacttcctcatctngtatcttcattaagatcctattccaggaattgtcagaacacttggggnttaggctgcttaatgagaggcttcaggatccaacaatgcaggaatcacttgaatctatattccctaaggataatccaaagaacacgnggtttncaatcaacttntttacgnccaattgg

SEQ ID NO: 135893 - DNA, 426 bp, Arabidopsis thaliana columbia
  unsure (1)..(426): unsure at all n locations
ctttattctntccacgattgacgattaatggagatgaagaagtggagttatgcgaatttaataaccttagctttgtngtttctttnctttatnatnctcctttnggcatttcaaggtggatcaagagacgacgatcatcagcatgttcatgtggccatcagaactaaggatatctccatgggacgaaagttaaaaagtttgaaaccgatcaatccaacaaagaaaaacgggtttnagtatccggttcaaggatctcatgatgtacaagaaagagaagtatatgtngagctaagggactacgggcaacggaagtacaaaccccccgtccataattaacggttgcccgtagtacggagtcattgataccgggcaaattatgggtaatttacccgttaactttgnaaantaaccaatngntaagcnngt

SEQ ID NO: 135894 - DNA, 237 bp, Arabidopsis thaliana columbia
  unsure (1)..(237): unsure at all n locations
tccaaatccnaaaantttcccgagaaaactaaaaaantggcaccaaaagcgggaaagaaaccagcagagaaaaagcccgcagagaaagctccagcagaagangagaaagtagccgaaaaagcaccagcagagaagaaaccaaaagcgggaaaaaaanttccaaaagaggcagtcaccggaggantcgngaagaagaagaaacggntcaagaaaagcncagtgacatacaagttcttc

SEQ ID NO: 135895 - DNA, 445 bp, Arabidopsis thaliana columbia
  unsure (1)..(445): unsure at all n locations
cttttaccttatcatcatcatcactgtatttnaaactgtgacaatggagtcatacaaaaccctagaaatcattcgcaagaacactgattcctccgtatttaatctcatcatcaacagaccgtcacatctcaacgccttatctntcgatttnttcatcgaattccccaaagctctctcatctntngaccaaaacccaaatgtntccgtnatcatcctctccggcgccggaaaacacttctgctccggtatcgatctcaattccctctcttcaatctcaacacaatcctcctncggtaacggcagagggacggtctnagcggggcagctacggcggtaagnttcaagtcggntgcaaggggggggtttncaggggtttgaacagtggcggaaaacctgtaaatnggngggtttttnaggggggggtttttnggtggggggggnttat

SEQ ID NO: 135896 - DNA, 362 bp, Arabidopsis thaliana columbia
  unsure (1)..(362): unsure at all n locations
ttgcacggtctacagacatttagccagttatgtcattttaatttgaagaaaaaggtcatagagattctaatgactccatggaatatcatagaccagcctagattctcttaccgtggccttttaatcgatacatcccgacattatttgccacttccggttataaagaacgtgattgattccatgacatatgccaaacttaatgtgttacattggcacattgtgggtacacaatcatttcctttagnggtaccttcttacccaaagctatgggacggnggttantcnttcctctcagcggtacaccttcggaggcgnttcttgaaaacgncaaattntgctncggngnnngggggggtnccntg

SEQ ID NO: 135897 - DNA, 261 bp, Arabidopsis thaliana columbia
  unsure (1)..(261): unsure at all n locations
gtgaagaaactacttacaacgatgcatggnctgtnagagttactaacacttgcacatggttcanaatcttcagattcaccgaatgcggaagagcttnatctcattaacagtactgtacagaatctnaatttgtacatccaaaacaacagtcaggaacatgctgggaatcaaagcgttgcacaatacaattcatatgntctaaagctgttacctaacaagngtaaggnngggtaagtanctctgtgggtttcaagggggact

SEQ ID NO: 135898 - DNA, 405 bp, Arabidopsis thaliana columbia
tcctccttctcgccctggaatgcctccccccggtggtgctccgatgtttgctccgcctcatcctggcatgccacctgctccgccaaatcaccataatcagcaacattgattaggagtcacttcatctacaacgaaagcaacatccacatgattgagttacccctcggctagtcgtagcgtttttctccgtgaagctcagagaattgatgagttcatattggtgatttctcgtggaaaaagcaactgattttagaaatagtgaacttgtaggagttacaaccttgctccatgaacttgaatgttattacttgttaaaagaggctctcaatggttttgactggcaattcggttctcaacatatattaggctatgttgctggttatgttacgttgaaaaaaaaaaaaa

SEQ ID NO: 135899 - DNA, 377 bp, Arabidopsis thaliana columbia
aacagaattgaagaaaaatcacaacgttgatcatatataatagtgatacgaagagacgattgtattacaatatgtgcaattatttaaaacagtggttaagaaaaatcacaactttgatcataatcgatcgtcaagtggacgcctggtttatgatcgatggaagatgaatcaagcgaaagagaagtgttgaatccttggacgttactgtttatgaacatcataatcattggctctgtttttttctctaatgttcccctgtttttcggaacttcgtttttagccggaatcttgttcatgaggttggcgtccaggtttcactagattctgctctggttgaagcgttgagattcggtgtttgttgatttttggagaagaga

SEQ ID NO: 135900 - DNA, 206 bp, Arabidopsis thaliana columbia
tctatgtatcgttacagcagtagcagtgcatctccatgaaactttagagacttccaagtaaaggtggtaatataattgagggattgctttcttgttatgtgcttagtgactcaattagccttgttgtatttttgattgttatatcttgtttgtatcacctgaagtatttcactttctatacgagcttttaccgcaaaaaaaaaaaa

SEQ ID NO: 135901 - DNA, 165 bp, Arabidopsis thaliana columbia
  unsure (1)..(165): unsure at all n locations
tacaccgatggcagcatgttaaactcggntttanccaattttgaaaagtatttggggtcgttaaaacctacctcgtaggcaatttcggcaacggtgaggttgcttttttccagcagttgcaaggcccgtttaagccttatggagcggatgaactccatcggtgta

SEQ ID NO: 135902 - DNA, 210 bp, Arabidopsis thaliana columbia
tacaccgatggagatgaggtagaaggaagggatcaacaaagtgcttcattggactcaaacgataagtcaacagaggttgaagcagctgaaatccacaatgacgatgataaagagaatgagataagcaaggaggacgcagagccaaaggaagagtttggtgccaaaaacaggttgagacaaagagttaccaggaactcagccatcggtgta

SEQ ID NO: 135903 - DNA, 333 bp, Arabidopsis thaliana columbia
  unsure (1)..(333): unsure at all n locations
tacaccganggcaatacgaagttcgacgaagccggtatacaatggatcatcaacccctacgacnaatggtattcgcttgtacgtgccattgaattaaaagagaaagacccttcggcaaccattcacctggttacggttggcggcgccgattgcgatcccgtgatccgtaaagcacttgcactgggtggtgatnaagcntttcnggtaaatgccaatancggcgacagttatttcattgccgcacaaattgcggaacttgcctcanaaggcaattncgatatcnttttcncgggcaaggaanccatccattacaatgcttcttccatcggtgta

SEQ ID NO: 135904 - DNA, 378 bp, Arabidopsis thaliana columbia
  unsure (1)..(378): unsure at all n locations
tacaccgatggnaatacnaatccgcttggctcactcaatatcagttccagcattatattggaaacatggatctatgcaaccaaatcgagcggtgttcangacgtgcttagtaaatctccttccaatancaacaatggttatattttaccaaaaacaagcaatggatggataaatgttcacttcctgctgaacatanntggcttcggatggcanatnctggannttccgtanggccttgntnaattnantcaatggcaccaccttgctgctacctangatgggtanttcatgtcgatttatatcnatggtgttntggccggnnccaaatctttcncgggctcntttatcacnaatncnaatccattaaccnnccgtgta

SEQ ID NO: 135905 - DNA, 391 bp, Arabidopsis thaliana columbia
ttttttttttttgcccaccagggagggaatattgaacaaggaatgttgaattttgaatgttgaagtgttctgtttattcagttcatcattcaaaattccttgttcgatattcattattcccaacaggaaccgatgaatgttgaatgttgaactgttccgttcattcagttcatcattcaaaattccttgttcgatattcattattcccaaaaagaaccgatgaatgttgaatgttgaactgttccgtttattcagttcatcattcaaaattccttgttcgatattccttgttcgatattcattattcccattcccgtacttttgtttgatggaatttctcaaacaactcggtatttcccgaacagaacccccggcacatccatcggtggta

SEQ ID NO: 135906 - DNA, 377 bp, Arabidopsis thaliana columbia
taagtgcgaccaatcatgtactatggagggagtgtttggggtaaactacctcatcagatcctggctgcagcaaacaagacattacctcctccatcgccaacggattacatgactgaagtgcggcgaggattgctgatgccaaaagccaacaattgaatggtttttgttcagatgatggagcccatatagactagtgaaatggtgtttgttgagatggcacaagcggtgatatgtcaatgacttttatattgtgtgtgtgtaggataacagatattgcttttctcacgatcggttgttttctctggtccctgaaagtgtaaaaaacccaaaccagagatttgactaacaatcacgtttaccatcccaaaaaaaaaaaa

SEQ ID NO: 135907 - DNA, 550 bp, Arabidopsis thaliana columbia
taagtgcgaccggtgcagatgcttttaaatggaatggacccaatggttttaccaataataccagtagctttaaaatttatcccactgctgccattaataatggtatttataatgttacgggaacaacaactattggttgtgtaaatacaaattcaatcaacattaatttaggcagtgttccacaaccaaatgcagggaacgatacaataatctgtgaaggaacaacagcatttttacatgcaacaggcggaacaagctataattggaaacctgcatcaacattggataatcccaaacatttccaaatccttccagccaacaccaattgatacaatacaatatatccgtttacagttaagttaataacagtttgttagccagaaaattgatacgggtgatagttaaatgtttttttaaaaaaacctgtttgctccaggttttggacccttaaaccaaacaatattttgaaggtttaatttatactccatttaagccggaatttaatttgacggaacaaatgtttttccatttttattgggtccccacctta

SEQ ID NO: 135908 - DNA, 305 bp, Arabidopsis thaliana columbia
taagtgcgaccaaggaagcaatcatgagcgacactcacaagctgttcgaatgcgtttccgcgttgaaccttccatgggagcattgcgtcgcgacgcacgggtacggatgacatgaacacagcggtagccaaaagcggcttggatcgagacttgaggttggaccttttccgcgggctggcaaattgggcgatctttctcgatcacattcccaataacgtggtcgcctggatcacgatgaagaactacgggttcagcgacgccagccgacctgttcgttttcatctccggctacacggtcgcactta

SEQ ID NO: 135909 - DNA, 281 bp, Arabidopsis thaliana columbia
tgttacggaccggagaaaaataagtataattttgaaggaagatatgatttagtgaaatttgtgaagcttgcggctaaagctggtctctatgttcatttaagaattggtccttacgtctgtgctggatggaattacttctctaggttcaaatttggaggctgctgtatataaaacagaatctggatcatgtgctgcttttcttgcaaatgttgacacgaagtctgatgcaactgtgactttcaatggaaaatcatataacttgcctgcatggtcccgtaaca

SEQ ID NO: 135910 - DNA, 471 bp, Arabidopsis thaliana columbia
gtcaccggtgtgccgtcggcggtgaagtggcccaacgacgtgctgatcgacggtctcaaggtgtcgggcatcctcgccgagctcgcgcacggtccccagaattcggggatccggcgttctgtggtcgtcgggatcggcgtgaacaccggcctcgcggccaccgccttgcccgtcccgacggccacgtcgttgaatctcgtcaccggcgcgccggtggaccgttcacgcctggccggggccgtcctggcctcgatggcgtgggagttgtcgcgatggccgcacgacctcgatgcgctcgccgacgactaccgcgcggtgttgcacgacgctcgggacgcgttgttacgcgtcgatctccccgccagtcgcaggttgcttgacggggttacggcgaccgacgtccaaccaagacggggcggattcttgatcagcccccattcccggctccggcccgccgaatcgccggtccaa

SEQ ID NO: 135911 - DNA, 513 bp, Arabidopsis thaliana columbia
gttacggaccttatttgatatactcaaagtaattaaaaagagtgggagcggttgctccttgtcaacacaacagaaagtggggaggaaacatgaacaagccaataaaaaaagcttggctttgggggttgggcttgttgttcagcttggcggtcggtgaaacggtctttgcggaaaatcaattgcagagcatggagattgaggtggaactgcaagaggacgggtccggtgtggtgaccgagaaccggcagatgagaatggacgatggaaccgaactgtatatcgtccttgacgaactgcaggactcgcagttgctggacttttctgtgtctggttttgaagaattggaagaatgggactcggacgccatccccaggaagaaaaacctgggaaatacggcgttgatccgaaacccggcagcggattggatttggttgttggggaaatccgcgaaataccgaaacaacaacttatgaaattgacatacacccttgttcccacttgggtccccgttaa

SEQ ID NO: 135912 - DNA, 409 bp, Arabidopsis thaliana columbia
tgttacggaccaggtcttcactccgctctcacggaagaccacatcatcggtcaacttgatggcttaaccgtttatattagctgctcatagacaattaagcgcaatgcatccgatattcaaattattagaccctcatatgaggtacactttggagatcaatgccgtggcacgacagactttgattagtgcggacggtgtgatcgagtcgtgcttcactgctggtcaatacggtctagagattagttccgctgcgtataagaacaaatggcggtttgatatggaaggtctccctgctgatctcatccgaagggggatggctgttccagacccaacacaaccacatgggcttaaattacttgttgaagactacccatacgccaacgacggtctcttattatggtccgtaaca

SEQ ID NO: 135913 - DNA, 131 bp, Arabidopsis thaliana columbia
actatatgtccaccaagatcatcttcatgtttcctctttctacttgctccatagataaggagctttttctaccatatgtattaaaataaaatcctaataaaagatgatcaataataataaagactttgttt

SEQ ID NO: 135914 - DNA, 186 bp, Arabidopsis thaliana columbia
  unsure (1)..(186): unsure at all n locations
agctgttcctaatcaggctgtgcttgcgaagntggnganggttctaggtgttaaacttaggggtaaaattgggaaatgattaaacgatgtcgtttatcttgtattttgttgaccaatgtaaaaagtaaaaaaaaagtcttgttgttttgtttgataaatgaaaaaacaatatatatctttcatttc

SEQ ID NO: 135915 - DNA, 180 bp, Arabidopsis thaliana columbia
  unsure (1)..(180): unsure at all n locations
aggaaagcacgacacgttgatcaatatcaaatacggagtttatgcttcgttagttcagcttcatctaaccgcggcttcttgatcttaattatctttttgtccctttatttttattttatgtcaattatgccccgttatatntatnatngttgtgaatttctatnttggggaannttttgg

SEQ ID NO: 135916 - DNA, 184 bp, Arabidopsis thaliana columbia
  unsure (1)..(184): unsure at all n locations
gaagtttatctatgaagctgaagctcgagaaataaaccaggtgggtcacatgggggagcaactaatttnatcggttcctaactgtggagatggntncttttggagagctgatttnattgtaagctttggagtttggtgcattcaccgtgtccttnacttgtntcttcatngagagtcgggctga

SEQ ID NO: 135917 - DNA, 188 bp, Arabidopsis thaliana columbia
  unsure (1)..(188): unsure at all n locations
gaaaacttatgaggttttttttaacagtttaatcataagtactaacgngaccaaagagattggttcggtcttaacggataatcgccgttgggaccaaaacgctccaatacggtcagtgacgtcaccgccggtnatcaatgtcaggccacacttatcctcttctctcccatttccgggttcctcccacc

SEQ ID NO: 135918 - DNA, 380 bp, Arabidopsis thaliana columbia
cggccgctgcatgagcaagaagctggttatgtgcaacaatatagggttctgttgacgaatttccgccgggacatctaacgtcaatcttaggagaacatcgaccgggtgcatctgttcccaatgcatatctttttttttttttttttcaaacacaaatctcgtaactcttttgtacaccaaaatgaaagctatgttgcgatctaaacagagtttcgaaaaaagtatcaaacgataacataaatgtgtaaatatctatgcacactcgaaagttaacagagagaagaaccaaaccaaagtactgataattccagacacaagaactcagtcttttgagttaagctgatggagtgtggctctgactgttgatcaatccgtcccgg

SEQ ID NO: 135919 - DNA, 380 bp, Arabidopsis thaliana columbia
cacaagtatcgccggcagcaccgtgacggtgatgagaaatgtaacggcggcgaaagtaatgacgttaaagataaaaactacgagaaggatttattgatctcgtctgatcgatacttgacggagatattatcggagaaagtggcgacgcaaaaagatcggaggaaaggacgcgtcggcgtttggaggccgcacttagaaagcatatcggagatcataactgaagactgagaaaacggcatcgttttagtggatttcttgatagtaacaatcgctactttttttcaccttctttttttttaaactatcgtcagttgtgcatttcaatgaaaatattcaagaacaaaagattttaacttccgattcacaaaaaaaaaacccgg

SEQ ID NO: 135920 - DNA, 342 bp, Arabidopsis thaliana columbia
gggcaggaccattgtcaggttacagagtagctttgcttcctattgaaccgtggaccatcgcgaacttcgattactgctctttgggaggatattgagatccctgcaaatagcatcgttgaagccagagatctatgggagcaccagacattgaagcaaaagtttgtggggaacttgacagcaacagtggattctcatgcgtgtaagttgtatgttctcaaacctgttgcctgaaaatacatgtgtatagagagagttagtgtggctacgtcacgttgtattctccagttattctgtaaaaacaataagggttcgtctcaaattaaatctccacagatgttctcc

SEQ ID NO: 135921 - DNA, 338 bp, Arabidopsis thaliana columbia
  unsure (1)..(338): unsure at all n locations
taggtctcgcaccaaagaagancggagaagatancgcgaaagaaaccgcaaaggaattgagtggaacagtgagggagattctgggaacttgtgtgtctgttggttgtactgtggatgggaaagatcctaaagatattcaacaggagattcaagatggtgaagttgagattcctgagaactgaagaatttggaaatgatggtgtgtttgtttcctttgccttttgagattttagtttcttcttcttatgttttgtttagaacaacgacaagtcagttttggattgttattgctgcttttttatctaatctcaattttatgcttatgcttagtttctttc

SEQ ID NO: 135922 - DNA, 389 bp, Arabidopsis thaliana columbia
  unsure (1)..(389): unsure at all n locations
gaagctaggnaagcccctgttgacataccgccgtagattgnaagaaccgaggagctccggcgggaacggcggaagatggtttcttgagacggtgagttctagggtcaacctcaggagctccttctggtataacggcggagattgaacggagactacgacggcggttaaaatcttcttgaacagagcaaattcttcttcttctgcactgtttgtttataaataaacctggaagctcagttccatggtgaagtatgttgtgttcaaccatatgagctctgatggtgattctggtaacaggaaattcatgaactttgtgattcattgcatcaagaatagaagactagaagggggaggttaattagattatcttaaggtgtataaaaacccgg

SEQ ID NO: 135923 - DNA, 347 bp, Arabidopsis thaliana columbia
aagctcctctccaccatcaaggagggtacaccgacaagaacgaggacacccgccgtcactggggtggtggtatcatgggccagaaggccaacgaccgcatcgccaagaagcagaaggctctcgatgccgccatcaaggtctaagcttgtgtaactacagcttttgatgacttgacaggatcgtttacttcaccgaagcgctcggctccaaaaaagttttgtgggaacatcaatatgttcaaggacttgacgatctattgacggccaattttttagctttagatgggtgcgaaagagcccttgggcactttgatcctgttctgacaaaaaaagataatttttcctctt

SEQ ID NO: 135924 - DNA, 369 bp, Arabidopsis thaliana columbia
aaccagtccgtcaaggagagaagttgccagaggagctattacatctagagcttggaaacaagacaacattgagtgtagacaacaacatctctacaacagaggcgcctgatctataaaacctctggctttaatttatagtgaacttttttgaaggacaagacaagaaggtagataccaatatggaagaagaagctactccatcagtgcaatagttagaactctatcggttgttttggggatatgtaacaaaccccattatattttgtgttgtctctctttcagtgcttattatacagacctcaatgttgtcttttatgataccctttgttcttctggtttgcaaacatttgtttttaatcaaaaaaaaaa

SEQ ID NO: 135925 - DNA, 457 bp, Arabidopsis thaliana columbia
cgacacgttcgcgaagaagcgagaggtatcatcatctcccacctttttatcgccattgcatatggacaaggagtcaacggcgattcgagcattttgaagattcccagtcattataatcaaaatccgataataccaattctccaaacagagcatgacgcctgaagaagcagagagtttaaggaattcccaaagtccggttaaggcttcagaggataagccggtccaagtaagcggacaaccaccacaagtagagtaaactaacagaataagaacattgacccaccacgagatactaatcgtagctacagtccccacgactcctagtttaagcccgtccacgaacaaccaacacactaaaatatgaaccaccaatgcaaccgctgccgcatacgcagtcactcggtttttgagctggcactgaaggaaacgttgaaggggaaaagacaaagtgaaggcg

SEQ ID NO: 135926 - DNA, 582 bp, Arabidopsis thaliana columbia
  unsure (1)..(582): unsure at all n locations
tctgattcggtccatcgatctcaaaggctcaaagcttaatcgtttcctttcttcttattctagccatggctcagaccgttgtcctcaaagttggtatgtcatgccaaggctgcgttggtgccgtcaatagagttttaggcaaaatggaaggggttgagtcatttgacattgatatcaaggagcaaaaggtgacagtgaaaggtaatgttgagcctgaagcagttttccaaacagtttcaaagaccggaaagaagacttcttactggccagtggaggctgaagctgagccaaaagccgaggctgatcctaaggtcgnaaccgtgactgngactaaaaccgaggctgagactaagactgaggctaaggtttgnttgcaaaaagcttgatgttgaaccaaaangcggcagaaggcggngcctaagcnatcacaaggttaagnnttcctaccggtgnaaaggaagggtaatcttcctttcaatgntttntttaccctttgcttttgggggntggttnnagaatnttcccttaaaaccnatntcttatgnntgatccnttttacctttgnncaggttgnccctttgc

SEQ ID NO: 135927 - DNA, 406 bp, Arabidopsis thaliana columbia
  unsure (1)..(406): unsure at all n locations
gcaatcccgcgaatctttctnagggcttcgcttatatcgcagatcgaagttcttgtttccaatcgccgaccgtataatctnataataaagtaagatgtctgctactccggaagaagacaagaagcctgaccaaggagctcacatcaatctcaaagtcaagggacaggatggtaatgaagtcttctttaggatcaagagaagcactcagctcaaaaaactgatgaatgcttactgtgaccgtnagtctgtggntttcaactcaattgctttcttgtttgatgggtcgtcggcttncgtgccgngcaganttccaggttgagcttnnaaaattggagnttggggattnggtncggttcaaatggtttaanccagacctggtngggggngnctaaaaaatgggccttaa

SEQ ID NO: 135928 - DNA, 488 bp, Arabidopsis thaliana columbia
  unsure (1)..(488): unsure at all n locations
gagctgatgacactgaagaagttgtcaaggaaagactcaggatttacaacaaaatgactcaaccagtggaggaattctacaagaaacgcgggaagctgttggaatttgaattgcccggtggaatcccagagtcatgggcaaggctccttagggcattacaccttgaagacgataaacagtctgcaatagcctaatctctctctgcattttatgattgantcaaacaacttgtactacattctttgctcgagtaatcctcctcgtgcatatatgcttaagatagtcaataaaagagntacatgtcccactaatggttatttgatgcatatattatatagtgaaggttctttgtgnnttctggtccncctatagntaggttgaaaaacncttttgtcataacagagggtttnancttacaacgganttgtttatatatgcttncccaanggaattatggaattcantaanatccncctagttatctcggc

SEQ ID NO: 135929 - DNA, 210 bp, Arabidopsis thaliana columbia
  unsure (1)..(210): unsure at all n locations
ggggggtcgcttctcctgcatttcttgcttccaaatggcttccagaattncngattctttctncgccttcacgggcccacagcaatgttttcctagggttcctaagcttgcggcntctcctgctcgtntttctccnggtgtatatgctgtaaagccgattaacctnctgtaaaaaggacgaactcatcgaagtagaagatgtgtagcncc

SEQ ID NO: 135930 - DNA, 411 bp, Arabidopsis thaliana columbia
  unsure (1)..(411): unsure at all n locations
agaagagtcaagctagcgaaggtnagaatncaaagaaacaaatcgttgccatagagggtgcccatnttccanttttggaaagcgaagatgaagacgaagacggtttacctattcctaaaggaaaatcatctgaagtagagaatncgtcaggtgagaagatggttgtagataatnacgaacaaggtagtaacaagaaacggaaggccaaggctgctgagcaagatgatggacaagaaagtgcaaacaagagtaaaaagaagaaaantcagaaagagaagaagaaaggggaaantntcttaantgaggaagctggacaagttcagacgggaaatgttctgaagnagcaggatattagcccaaattttttcaancacaaaagctcangatgggactncaaacaattccntgngt

SEQ ID NO: 135931 - DNA, 540 bp, Arabidopsis thaliana columbia
  unsure (1)..(540): unsure at all n locations
actaattgtgttatcacccaaaagagaagagcaaacacaatggctttcgctttgaggttcttcacatgctttgttttgacagngttcatcgttgcatcagtggatgcagcaataacatgtggcacagtggcaagtagcttgagtccatgtctaggctacctatcaaagggtggggtggtgccacctccgtgctgtgcaggagtcaaaaagttgaacggtatggctcaaaccacacccgaccgccaacaagcatgcagatgcttacagtccgctgcaaaaggggttaatccaagtctagcctctggccttcctgggaagtgcggtgttagcatnccctatcccatctccacgngcaccaactgcgcancatcaagtgaagtggggatnacggcaatcatttgcctgaaggngttggttcggatncgnaaataagcgntntttaggttntanttcctggntttgttgccttatggttgaatctttntttgtatggtgatcttggggctaaatgtaaggtttgnaaatttggtncgncctttt

SEQ ID NO: 135932 - DNA, 330 bp, Arabidopsis thaliana columbia
  unsure (1)..(330): unsure at all n locations
ctaacaaacaaacaaaacacaaatcttggttcattttaaatctctccaagaaacaaaatggcagcttccatgaaatttctctgcattcttggtctgatcctcctcatcggaacagtcgttgacggtgcaggggagtgtggtagatcttcgccagacaatgaggcgatgaagctggctccatgtgctggtgcagctnaaggacgntaanttcggcgtgccagggggtttgcttgtnctcagatttaagggntttttntcaaaaaccctaaattgtnntttgggggccaattttttntttncgggttnaaagcccaagggcctnccgggntt

SEQ ID NO: 135933 - DNA, 277 bp, Arabidopsis thaliana columbia
  unsure (1)..(277): unsure at all n locations
ccagccgtaatagctgccactagaacaaccgaaacatcgaaaagcgactaacaaaatcgaagatagcaaattgctggacactgctgttgctatgtttctnggatttnacttgtgtgcatgtgtaagagatgagcaagcttcggttattagtttcctacttgctctttcttctttatnatcttatgaatcattcactgattgcttggaactaaagaataactaaaaacactaacttattattnctctaaaaataaaaattgaaataagtgaggtgggg

SEQ ID NO: 135934 - DNA, 437 bp, Arabidopsis thaliana columbia
  unsure (1)..(437): unsure at all n locations
ggcctctctgctagatttnaaaccagaggaatggggcttaccttccttccaggattcacacaactaaaacaacaaagctttcagggcaacgttatcctcaagctaacgatacttgactcgttaactttaattctttaagcctcttacgctatacgagaaagattattgcaaatnatagattctaattggggtaatttaaaacaatatatttatgtncgtaatttgttttcttgattcatgaatttgtaattgtaatccagaccgttaagtgtgactttggtgagnatgatattaggatgattgtggtgagtgtgggttacattcggaggtcatagggnttagntttttnccgggggttntccggtaaccagnaccttgaggggccaancttttttnagnccggntggcccaggttcnttaagcaaagncctttnctt

SEQ ID NO: 135935 - DNA, 497 bp, Arabidopsis thaliana columbia
  unsure (1)..(497): unsure at all n locations
ggtacttgtgtcactgtgctcaatctagtggacctaacattgggaaacccacctgtaaagccatgttgctcgctcatccaaggcttggctgaccttgaggccgcggtctgcctttgcactgcagtcaaggctagcattcttggaattgtcaatattaaccttcctatcaatctcagcgtactcctcaatgtttgtagtaggaatgctccaaagagtttccagtgcgcgtaagttgaatacctatgacatacctatgaaacaaacggatcataccgatgcttgaacatgttttcttacctacttgttgttgttctaagatgttttgtttttnctttcttttcttggntttgttaataatgaaccgnacggcggtntgatgcaaaaaaatggnaatnggggtttgtgtacaatcggcaaggtttnaaaacncccttactttggtggncccntngttttgttgnccccctccttggaacngggaattcaaaattnctaat

SEQ ID NO: 135936 - DNA, 261 bp, Arabidopsis thaliana columbia
  unsure (1)..(261): unsure at all n locations
ccttttgctaatcgtttattgataatcctccattaaagctctcacggaagctcccacgagaacaccttctttccaccacataaaccagagactttccctctcacgngaaatcagaaaacaaaacccatttnttntactttacagctcgtntctgttcttccctctgtgtatatatanagnctctgnttcttgaaccngtaacggctaagtntgaagaagaagaagnagaagatgatgatgagatttaccaagttggtttgg

SEQ ID NO: 135937 - DNA, 282 bp, Arabidopsis thaliana columbia
  unsure (1)..(282): unsure at all n locations
ggatcatgaagcagcaaatcagcaaactgtgaactcgaaagatgaagaagntgcaggacaatcaatgaagtcagacatatcagcagactattactttccctactcagcaaacgacgggaatgctgccatggaagctggtcgagatgcagagtcgatgagctcgtatctggggtttcttgctcaattgatgtcacccattnacaanctttcccnttttnaggccaatgntttacccnggnggtnttaaaggcaagncttaaccctggtcggggtcacaagntt

SEQ ID NO: 135938 - DNA, 579 bp, Arabidopsis thaliana columbia
  unsure (1)..(579): unsure at all n locations
gcatcaagaatgggtacaagtcatcattcatcgagatatcaaaccagctaatgttttaatcgacaatgaaatgaatgcgaggctaggggatttcggactggcgaaactgtatgatcagggattcgatcctgaaacatctaaagtagcgggaacattcggatatatcgcaccagagtttctaagaacaggaagagcaaccacaagcactgatgtttacgcctttgggttggtaatgcttgaagtagtgtgtggtagaaggataattgagagacgtgcagcagnaaatggaggatatctngtgggttggatcttagagctttttgggaaatngggaaattttcgatgcagcggnggaagtatncgtcagaccaaaccaggggnccagtttagcttttttttnagctaaggtgtnttntgttcccattaaagttcatccgtaagncccccttttaagtttgggaattngggttttaatngggtttncagttccccgtaacntntttnantttnaaggccttggaantttnngaatgccccngcccccatggggtccccccccttggggaaaacccgggcntt

SEQ ID NO: 135939 - DNA, 393 bp, Arabidopsis thaliana columbia
  unsure (1)..(393): unsure at all n locations
ctcctccttccttcttcaactctctctcacttctccagatatggttacatctccgacgaactcaacaatcaaattnntctgtagctatggcggnaaaatccnacctcgntatcccgacggtaaactccgttacaacggtggtcacaatcgnntcctcgacgttcctcgatccgtctcattttccgagttagcgtcgaagatggcggagatgtgcggcggagtcgncggatctataaccntaacgatccgatgtcagctttcgacggaagatctcgacgcgctcgtttcanttanttccgatgaagatcttagtggaatctaatcgaagagtaccgntatnaggtttactcaaaaatcttccgaatgagaaatcaagcgncattanttaaaatt

SEQ ID NO: 135940 - DNA, 361 bp, Arabidopsis thaliana columbia
  unsure (1)..(361): unsure at all n locations
ttgaaagctaaaaagagagcaangattaactttttatnctccgattcgcagatcaattagctgggttttaattccnttgtncgaaggactttaagaggttttccagatcgaaatcggaagagaagaagaagatgtttctnactagaactgagtatgacagaggagtgaacacttttnntccagaaggaaggctatttcaagtggaatatgccattnangctatcaagcttggttctactgcaattggagtaaagacaaaagaaggagttgtgcttgctgtcgagaagcgtatcacgtcgncattcctggaacccgagcagntgtggngaagnttattggaaatttatgnccatatttgttg

SEQ ID NO: 135941 - DNA, 276 bp, Arabidopsis thaliana columbia
  unsure (1)..(276): unsure at all n locations
ggagnaggatggattaggctggcgggggattaggtggggaagatccaccggagatagttgcccaagctttggaatgcttaaatgagaaacacatatacagagagtgtgatgaatcatggaggctaacgttaaacggagacctaaatattccnctggggaggacagaagagttctntnaaaggncccatgctttctcaggaaccacatttttggctttttgaattnnaatttnaagnaaatttattcaaccacttnacaagatttctttaancagag

SEQ ID NO: 135942 - DNA, 344 bp, Arabidopsis thaliana columbia
  unsure (1)..(344): unsure at all n locations
gcccactgngtccgtgangatcnaccctaaaaaaaaaaaaaaagagatggttctgctagagaagctttgggatgatgttgtggctggacctcagcntgaccgtggccttngccgcctccgtaagatcaccacccaacccattaatatccgagatataggagaagggngcagcagtaaggtggtgatgcataggtcgttgaccatgccggcggcagtaagccctggaactccaangactncaaccactccgacgacgccacgtaaggntaacgtttngaaggagngtcttttaatccggggaaagcaacccttggcccacttaggagcccatttgggntcccnaa

SEQ ID NO: 135943 - DNA, 469 bp, Arabidopsis thaliana columbia
  unsure (1)..(469): unsure at all n locations
gagaaagtnaggttatatcaatggaagaatttaaatagagtgaagnggagtatgaataaagctggactaattaagaaccgccccctcgcttggtacaagacaacgtttgatgggccgaatggagatgggcccgtgggctacacatgtcgagtatgggtaaaggagaaatttgggtgaatggtgaaagcattggtcgttattgggtctcgtttctcacccctgctggacaaccttctcaatctatatatcatattcctcgggcgttcttaaaaccatctggaaatttattggtggtatttnaagaggaaggtggtgatccccttgggntatctttgaatacaatatcgggttgttnggtncgggcaagctcaatctcaantctccccnaggttatttttttaaaaaaangggttttngggaaattngggggggnttttttaanccnaccantcccntttttttganangg

SEQ ID NO: 135944 - DNA, 292 bp, Arabidopsis thaliana columbia
  unsure (1)..(292): unsure at all n locations
tccgcaaaaagatgagacagctnnagaaggtggatgtggtcggaattntntgagcaagttttgcatcaatggggcaagacttccttnatatacctccaagattcttgataaanccntcggagagaacacagaatctccggtgacgttcctcgaatccttagttattggagantgggaagatcgtttccaaagaggtctttttcgctatgatgtcaccgcctgcnaaaccaaggttataccggggaagtacggtttcattgcncantgaattgaaggtcggcatctcaagaag

SEQ ID NO: 135945 - DNA, 382 bp, Arabidopsis thaliana columbia
  unsure (1)..(382): unsure at all n locations
ggcagtagangtncctaaaccaggtatttgaggcggttggagtagttgcngccgtctaangtcagctncaaaccacaatactacttcaggtttatntaataactccaagtggacattctcaagaaccagcagtgcagctcatncncaagtgtggttcaacatncttatgaganggtaaagaaagatcgcgagcaggcgaaanaaccncgagaggagaaaagangaatcccaaaagaaagagcacaactgattcgtctgcttctggtagttcgcttaaaaagaggaaaagtttgtttagaaactgatatcggttnctctagttggaagagaggtcacttaccgtgtgactggttaaaccggaaaaaacatngggaaagtttga

SEQ ID NO: 135946 - DNA, 552 bp, Arabidopsis thaliana columbia
  unsure (1)..(552): unsure at all n locations
gacgaagaagaagagcaatcgaagaaaagagggatttgtgtttgtttgttgttcttcgatngaaaatggtgaaatcgacgagtaaggatgctcaggatctatttcgatctcttcggtctgcttattctgctactccgactaatcttaagatcatcgacttgtatgtcgttttcgctgtcttcaccgctctgattcaggtggtttatatggctttggtgggatcatttccatttaactcgttcctatctggagttctctcttgtatcgggacagcagttcttgctgtttgcctccggattcaagtgaacaaagnaaacaaggaattcaaggatttagcacctgagagagcttttgctgattttnttccctgcaacttagtcctccatttggtgatcatcaacttcctcgntaagaggttnactctcctggctacaagttgctttcangcttaaatgacctggggtttaaggggcacttggatcaaaacnctagttngaaattttgtgttgcgagntcaacttatagggccnnccccaaacaggncncagatgc

SEQ ID NO: 135947 - DNA, 389 bp, Arabidopsis thaliana columbia
  unsure (1)..(389): unsure at all n locations
gcagatgtgtgcacgtaggactattgtgtgtacaagatcacgcaaatgataggccgagcgttgcaacggtgatttggatgctaagtagcgagaactcaaaccttccagagccaaagcaacctgcatttatacctagaaggggcacttcagaagttgaatcctcgggacaaagcgacccaagagcatcgatcaacaatgtgagcctcacaaaaataacaggacgttagctctgtaagtgagataaacctactgctaaagaattttgatgaaaaaatgtttaagttgtatatctgtatgtaagagtaatctataggttacggactaaaattcaggatctgggtcatgtccttgtatgnaggcacattaattttgggccatggtttttttgt

SEQ ID NO: 135948 - DNA, 503 bp, Arabidopsis thaliana columbia
  unsure (1)..(503): unsure at all n locations
agaaagttggtttggtgaattcatcagttgggtttggtcagaagaaacagatgattatgcctgtnatcaaagctcaacgcgttgttggtgatgatgttgatggatctaatggaagacgatcagccatggttttcttagcagctacactcttctccactgctgctgtttctgcttctgctaatgctggcgtcattgacgaatacctcgagaggagcaaaaccaacaaagaacttaatgataagaagagattggcaacaagtggagcaaactttgcgaganattcactgttcaattcggaagctgcaagttccctgagaatttcactggctgccaagatcttgccaagcaaaagaaagttccatttatctcagaagntattgctttggaatgcgaggcaaggacaagtacaagtgtggtncaatgttttctggaaatngtgagancttgtttgtttcacctatctatataatccccatgatncnacccnccnntcatgaagtctc

SEQ ID NO: 135949 - DNA, 402 bp, Arabidopsis thaliana columbia
  unsure (1)..(402): unsure at all n locations
gagattcaaatcaatggaagtccaatgacaaagaagattgaggttagctcgaaggagcatacctatgtgattggtttggaagatgaagaagagaacaagagtgtgatggttgaggttagaggacttgagatgcttgttggaaaggactttaacatgtcctggaaaatgggtatcaattaatttacatgtgagagttggtaaactattgaggagggagaataagattatttttaaaaaaaaggggtaatgnttttgtncttcctccatttccggattataaggaaggnaaaaaagganttagagggtttgggttttaggattgtngcccccggcccttttaattaaaaagatgcctttnggcctnaataaaaatttttaagccggaggaaggtntttccttcc

SEQ ID NO: 135950 - DNA, 404 bp, Arabidopsis thaliana columbia
  unsure (1)..(404): unsure at all n locations
cgctgnatcttcttaagaagcttctagaaaatnatggacttccattaatcagaagtagatcttcagagaacggaacaacaaaaacagcagacagtacgaggaagaaagtattgtctccatcctaccgtacaatgtgttactgtatattacatgaagaaaatgtgttgggttcaatattcagtatttgggacgaacttcggactgctgaatcatgggaacaagttgagcaaactgtttggagtctacttaacacctactaatttatggtttttttccggttaaaatggttcnttattttgtgttgttgttgtatctagcaaattgcaggnaaaataatttatggttcaccttgacacacaggacctatcattcattcagnaggttatataacgggnctaggtatt

SEQ ID NO: 135951 - DNA, 459 bp, Arabidopsis thaliana columbia
  unsure (1)..(459): unsure at all n locations
cnaganttgtataaatatatacaaacatctgaaagattgtaagcncttattcatatcaaagaaaaacaacagaagtaatatataaaaatncttgatacgcttattggagggattgtnggagggattgccggagcgattatcggaacggtggatgggttcgccagagggatcggaatatgccccgatagttaccagagctgcactcgtaccgactgcgaggagcacaaaaagaagctcccgaccaaccttagccgtaatggcggtgcagcagcagtnaaggctaaggagaacggccgccgtcgccgccagaaagacagggagtagaggcctctagnctncccaaatattctgacgggttcaaataagnaagtaacggttatgtactccccatataataaatgtgtaagatgtatcatgtatttttgttacggctttttaatgaaataaatgtccttgttt

SEQ ID NO: 135952 - DNA, 451 bp, Arabidopsis thaliana columbia
  unsure (1)..(451): unsure at all n locations
cccgaatagctcttcttgcttctttcttggtcacaaacaaaagacaatttgtcaatttgtgtgttttaggtgtagaaaaaggctagaaagctgtcattgttaagcttgtatagactcttttcttgccaatgaccattcgttttttttccccttacattttgtcctttttgtcgagcgaatcttcaatgttcctaactgaaaacggagtgggctgaaggaaatctcaacaacggctggaggcgatgtaacttgagctatcgaaaaaggaatngaaccttcngccggaaccctgntaaataataaataataaggggnaattngttggnnccntttngggaaattttccccanaaaaantttttttntngaaactttccaaaagggttttttcctnaatccnccggtttnaaaaggcccntttgggccaaaattngggtttggggtttaaaaat

SEQ ID NO: 135953 - DNA, 265 bp, Arabidopsis thaliana columbia
  unsure (1)..(265): unsure at all n locations
ataaaccataagtcctggggatcgttcagaataaaacggaaaatttaattttatttcaatggagccaatcactatctatcgatatatcgagatagatacttaatttataatttagaataaacctttttcntcattaattttcatagtngtaatttttttatatgaatttnccncgttcacnagctacaatcaaaaagttcataatacttttttttttgtatccccactcaatcttggttactttttttatcacacggccttgttt

SEQ ID NO: 135954 - DNA, 367 bp, Arabidopsis thaliana columbia
  unsure (1)..(367): unsure at all n locations
ccatcacatgtctatgcctccaccaccaccacaccaaggttgataataatcatcgcctcagtttcggaccaattcaactatatgtaaaccctttctttactggcaagtaatcccgaggattttccgttttagattcaatgaaacctaatagggagagagagaaagagaaagagagagggtgagagagagatcacaattaatattctatattgtcttgtctgcagagaatctcttatcttcggtttagagagagagagagcgtagaaattagtgccaatgtgtgtctggtttttagtgatgttatttcttgtttgtnttgcagaatctctgatgccgtgtgctttaatatttaccaaaactgtgctgt

SEQ ID NO: 135955 - DNA, 203 bp, Arabidopsis thaliana columbia
  unsure (1)..(203): unsure at all n locations
ctggatactggaaaaacagaacacaagctcgcntagggattaaaatgcccaaaanttacgtngtgcacctaggaaatagcaagganttgatggaagtagctgaagatagtnttgccaagngagttctccgtgagcacgtccgngantcttttggagtgcggaatgaaggcttactctttggcattattaatagtatgccatca

SEQ ID NO: 135956 - DNA, 422 bp, Arabidopsis thaliana columbia
  unsure (1)..(422): unsure at all n locations
ctctgctctttaattcttcctctgcaaattcattcaaaggatgactgatcaaccagcacaaaatggattgattcctccacccacttcagagccaagcaaggctgctgcctcagcagngacgaaaccaaagangaggntatgttgtgcttgccctgataccaagaagctgagagatgagtgcattgtcgngcatggtgaatcggcttgcactaaatggntcgaggctcataaaatttgtctccgagcagaaggtttcaacgtctgatactcntnnttttctnttnctaatacgtnatttgntggntcatcaaaaggnatgagcaccagaagnttggtcatcacccggtatggggttagggtttaaaacaagggtgatgnttcaattttggtacaaatcccattttgggcattgaaataaaaag

SEQ ID NO: 135957 - DNA, 208 bp, Arabidopsis thaliana columbia
  unsure (1)..(208): unsure at all n locations
ctcagaacctgaagatgaaggagttggatgttgaatctttatgccatgagtgtggtcttgagacatgtactgatcctgatgggttcactgttttacccgtgaagcagtcaacccttcgtagtncagaggncaagttcaaaggttatgntttgnttgggattnaacggnttaaagaatgtcgntttnaaccccttgcaatgttgtaaag

SEQ ID NO: 135958 - DNA, 359 bp, Arabidopsis thaliana columbia
  unsure (1)..(359): unsure at all n locations
ggttgtacttccatggaatctcctccngaaggntacagaagaaatgtcggcgtctgcctcangaattcttccaaaaagattttnactgcctcgnggttggatattcccagtgcttggcaaatgcctcagggtggaatcgacgaaggtgaagatccaagagttgcagtcatgngagagcttaaagaagagactggagttcactctgcttgagattctcgctgaggcacctcactggntaacctatganttcccctccctggattgtnaggggagaagcttaaagggtcccgangggggatccgattggganaggngtnaangcaacagaaaaatggttttccttcctgaaaatttacttg

SEQ ID NO: 135959 - DNA, 302 bp, Arabidopsis thaliana columbia
  unsure (1)..(302): unsure at all n locations
agccattataagagcaaccctagctcgtgatgtgtcagctgttatggagtataaaggacttaacctccaagaagcggttgattacgtcatcaagcatcgacttgacgaagggttcgctggactcattgctgtctcgaataaaggagaggtggtttgtggttttaactctaatgggatgttcaggggatgtgcaactgaggatggattcatggaggttgctatttgggagtnagaaatattttagattaagaaaatgtcttactagtatttaatcagtcatcgctctattaatttggttattc

SEQ ID NO: 135960 - DNA, 227 bp, Arabidopsis thaliana columbia
  unsure (1)..(227): unsure at all n locations
gaagctggttttggatcctctctctttctctcgagatcttaaggatcttttaaaactttagcttcaagtcttgggaaaaagatgaagaagctaaagatcctttaatttncttttctttttttgtaagaaaaaaatagtttcttgacatgaaattttgggagtatgagaagagaaaatgtaaatncctatgtgaattataatagtccatggnatgtttgagttatatt

SEQ ID NO: 135961 - DNA, 356 bp, Arabidopsis thaliana columbia
  unsure (1)..(356): unsure at all n locations
cgcagatntttggtaaaaagaataatcttatcctttgagaataatcaaaaatagaaagtnttcagttggaacatgaaaacgtggggtactttncccacaatcttggccattgagttcttagccattgcatttnttgagcaccagagaagtatggagaaagaccctgagaagaagaagtacccgggaggcgcatttnaccctcttggatactcgaaggaccccaagaagctcgaggaattgaaagttaaagagatcaagaacgggcggcttgcnctgtttggcggtttntaagggttctttttgcaaaantcgggtttnccccgggggccaggnccntttggggnacttttggnaac

SEQ ID NO: 135962 - DNA, 485 bp, Arabidopsis thaliana columbia
  unsure (1)..(485): unsure at all n locations
gtgtttatgagagctatcactaactggttatggacctccacttgctgaggtaactaatcttaacttggtaactaaatctacaaccctctttatgaaggtactgacattactactgtcctctgacagtctttaactcattccatttttgtnagtgtgtgttgaatctacaaaccttgtggctagataacctaatttggtgatgctccttaatcatttcatgaagaatcgagtgggacgaagagaaagatgatagacgccaaatattatgtgtttccatctttttcgttcttcatcaactaaaagatgatggctgattacagtcctagatgctctatatggcggctgaaggttgngttatttcntgggaatttaaagggtgngttaaanataagcttaaacagtttcgggggcctntncngnaaannaatgttaacngccccnctnaacaanaaggctttgnggggncccaatcaatgnatcnttgg

SEQ ID NO: 135963 - DNA, 305 bp, Arabidopsis thaliana columbia
  unsure (1)..(305): unsure at all n locations
aaagaaccttcttgtgacggatatgaacagcaccaacggtacattcatcgaagacaaacgtctaattcctggtgttgctgctcctgcctttcccggaacacgaatcacctttggagatacaaatctagcaattttccgtgttttcaagctccaagatagtgaagaatccatagagaaaccaactacagagtaacacaaaacccgagaattgcttatctttgcttgcaattaaccggtttttgttgaaattctaagttgttttacaacattgttgatttatatatatatgnacaatagctttttat

SEQ ID NO: 135964 - DNA, 257 bp, Arabidopsis thaliana columbia
  unsure (1)..(257): unsure at all n locations
ctcctcttcttctcctcctcgacctggaaatcaatcttncgccgccgagttcttctcnctgcggcggagaatcaattagcaatctccaggtttttcacttcaaaaccttnccttttattatcaaattttgtncctntttagctttaggntttgatatttctagaacccagnagaaactcttgcccataacatctctatatttattggtataganttaggtgagggaaagaggattggcttttnatcggaaaancccg

SEQ ID NO: 135965 - DNA, 416 bp, Arabidopsis thaliana columbia
  unsure (1)..(416): unsure at all n locations
gggaaatctggttcgagttagggtccaattgaaaagtttgaagctcnttttgactctctctctcttctagatctcgacaactctaacctcttcgatttggtggatcttgagaaattgattttagttcaaagcttctgatggctaaaaaggagagacctagacctgagaagttgtctgtgtatctttatatacctaatattngttgggtatatgagagttctcttgaactgtggttgcttttnctggtgtgtttctccaacaaaggcaactttttncctctgtccctttaatttctttccaagctttttggttgnnnatgncttgttgggatnggccttggggttgggcttnccgtaagaantncaaacccaaaggnntttcaaacaaattttnggngggctggttcccttggacaa

SEQ ID NO: 135966 - DNA, 416 bp, Arabidopsis thaliana columbia
  unsure (1)..(416): unsure at all n locations
gtgactctgcgaccacacatttctaaggagatagcggaatcgagcaaaccagcaaaagaactcatcgagcttaacccgactagcgaatacgcgccaggacttgaagatacactcatcttgacgatgaagggtattgctgctggtctacaaaacaccggttaagctacaaagagatggttaaacaaactttgaatctctctttctctctcaaagtctctcctttttttaacttcagatttgggaaataaagggttggattctgggttattttatgtatccaccggcaaaaatggttggttttcggngtacgggtactttcggggtccattggacanaaagctcctggttttttttcttcaaaggtttaattaaaacccgggcccaggggnatccttttcctgggttnantttncttt

SEQ ID NO: 135967 - DNA, 316 bp, Arabidopsis thaliana columbia
  unsure (1)..(316): unsure at all n locations
cnccggtggaggtggtagctacggaggtggcggcggtagacggaggntngangaggatacagcggcggcggcggcggttactcctcaagaggtggtggtggcggaagctacggtggtggaagacgtgagggtggaggaggatacggtggtggtgaaggaggaggttacggaggaagcggtggtggtggaggatggtaattcctttaattaggtttnggattaccaatgaatgttctctctctcgctttgttatgcttctacttngttttgtgtgttcncnatttttgntcctggtcntnctttanattttatgtaa

SEQ ID NO: 135968 - DNA, 372 bp, Arabidopsis thaliana columbia
  unsure (1)..(372): unsure at all n locations
agcaaatcacncctcacaccacagaaaaacaaataattgaagaaatgaagtcaatagtcttcttcttcctcctcctgctctttgccgtagcaacctccgataacgtgataaatggttggtataatctcacagccgtccatgacgatgaagtgatttggagttcttttgcggcgccaatgatgaaaggtggttcgtcgtacataacctatccggtcttgcgncctcagcaggcatgtaatccttgtagtggggccgttaaaatattccaagaaggaagnatttgtttttntctacaacncgattgcnaaacggttttcctaagggncnttgtaacatacccccntnanaaaanccccntatggttttnagttt

SEQ ID NO: 135969 - DNA, 472 bp, Arabidopsis thaliana columbia
  unsure (1)..(472): unsure at all n locations
ctctgcttcctgttcttggattctgcatcatatgcataattgggacgttacacacaataatctccagaaagacatcacaaggtcatcatcatggctccgaaaggtggagaaccgcattaatggattggaacgagccgcttgcttctgatggacatgattcgatgtctccagaatacagagtcgcttcaacgaatcaggaagctaccgctactgatgaaatgaatgaagcatatagcagagtagagctcgagtacaagagatttctattagaatgtggggtgggtgaatcttagactctggtctccttaaggctcctacaagtagttcttgagcaaatccatggctactccagagcttctaagggactttttgtttgggtgnttacttggggcactgcatgcatttaccntatnaaggctttgtaatttgtnnatntaaaaggggggggtaaatccngntttgnttttgggtt

SEQ ID NO: 135970 - DNA, 497 bp, Arabidopsis thaliana columbia
  unsure (1)..(497): unsure at all n locations
cgaagaagacgaacgcaaagatgcagattttcgtgaaaacgctaaccggcaagaccatcaccctcgaggtcgagagcagtgacaccatcgacaatgtcaaggccangatccaggacaaagaaggaattcctccggaccagcagaggttgatcttcgccggaaaacagcttgaagatggtcgtaccttggctgactacaacatccagaaagagtcgactttgcatcttgttctgaggcttaggggaggtatcattgagcctttcattgatgatgttgggctcgcnagtataaccaagacaaaatgatttgtcgcaagtgttatgctcgtcttcacccaagagctgtgaactgcaggnngaggagtgtgggcatagcaaccagnngagncaagnagaggtcaagtgatcttttggtcaccaaagttttnncgtatttngggttggttngggaaagatcncttttgtcttaaaaacccggttcaggaatttggttcgatt

SEQ ID NO: 135971 - DNA, 208 bp, Arabidopsis thaliana columbia
  unsure (1)..(208): unsure at all n locations
tcaacaacagngagatccctaatctttcgnaggangatatcgtcgagcgagactgtctcgtccatcgcgcttacatcgctctcggaagttaccagcttgtcatcagtnagatcgatgaagccgctgctactcctctacaggcagtnaaactcctngctatgtatctatcgagtccnnaaaacaaggaatcaaccatttcgagcttgag

SEQ ID NO: 135972 - DNA, 490 bp, Arabidopsis thaliana columbia
  unsure (1)..(490): unsure at all n locations
aaacaaaacacacatcaaaaacgattttacaagaaaaaaatatctgaaaaatgtcagagaccaacaagaatgccttccaagccggtcaggccgctggcaaagctgaggagaagagcaatgttctgctggacaaggccaaggatgctgctgctgcantgngagcttccgcgcaacaggcgggaaagagtatatcggatgcggcagtgggaggtgttaacttcgtgaaggacaagaccggcctgaacaagtagcgatccgagtcaactttngggaggttataatttnccctttcctaattaaattgttggggnttttccaaataaaaattttggggggncataaattgaattccccggacctcaatcggaccttggttgntggtttttaaggggttggaaangntttnaaaggtttcccnccccccctttagggtnnncctccgggtttgggcctttaaggnttanccaccaaaatnttggnttaaggcnct

SEQ ID NO: 135973 - DNA, 237 bp, Arabidopsis thaliana columbia
  unsure (1)..(237): unsure at all n locations
ttcgtngagcttaaccgacaaaatanggcaaccaagccggagagtgccaagaggaagagcatganccaaagctcganccaagtngttccttagtacacctctnacttctccataggatgctggtccaaccgattctnttcgtttaanacctttctggatcaaaacatctcttatcctgttttagtaccataccggaaatcattataactggataaagggttagttaaaantataaaa

SEQ ID NO: 135974 - DNA, 279 bp, Arabidopsis thaliana columbia
  unsure (1)..(279): unsure at all n locations
ccacttcgttcgactgcagatcgaacacgccagacaagcacaagcggcgtgggagaatgtnctacccgacctcgagaacctgccgtagagtgggtggaggaagacagggacgggacgagagaggaaggacaagagagagacagtcagccagtcagccagtcagtnagtcagtctnacacgaggaggagcaccaccgtggttgggtcattggcctctccgtgagantggttgcacagaccagtggattgatgttgtcgtgtagatcgtgtcattcgtgtt

SEQ ID NO: 135975 - DNA, 618 bp, Arabidopsis thaliana columbia
  unsure (1)..(618): unsure at all n locations
acaagatcaaggacgaagacattgtcacacttgttgatcagttccctggtcaatctatcgatttcttcggtgctttgagggcgagagtgtacgatgatgaagtgaggaagttcgttgagagccttggagttgagaagatcggaaagaggctggttaactcaagggaaggacctcccgtgttcgagcaacccgagatgacttatgagaagcttatggaatacggaaacatgcttgtnatggaacaagagaatgtcaagagagtccaacttgccgagacctacctcagccaggctgctttgggagacgcaaacgctgacgccatcggccgcggaactttctacggaaaaggagcccagcaagtaaacctgccagttcctgaagggtgtactgatcctgtggctgaaaactttgatccaacgggttagaagtancgntggacctgtgtntncaaatttttggcaatattatccngctnataaatttctggtttacncccattgccnttttnggtattttcncccttgggaaatttggttgnccttncccctttgccccttttttttttnaaggncaanatggnttaaanccnnaaaacccttntaaaaaaaaaaaaatttc

SEQ ID NO: 135976 - DNA, 234 bp, Arabidopsis thaliana columbia
  unsure (1)..(234): unsure at all n locations
gtcatggcagtgggtttggagccggaggagggattggnggtggagctggcggaggagttggcggtggaggtngaggtggaggtgggggcggcggaggcggtggtgctaatggtggaggcggtggaggaggcggtngcggaggaggtggtgtgggtggttgatccggacatggtggcggatttggtgctngagnaggactctgcggtngtnccgaaggagnactcggtngcggtt

SEQ ID NO: 135977 - DNA, 412 bp, Arabidopsis thaliana columbia
  unsure (1)..(412): unsure at all n locations
gaacccggaaagaagctccgtcgtctcccacatatcttcagccgtgttctagagctgcccttgaagtcagacgctgacgtggctgttgaagagagtcatgactgcttcaggttcgtcgcggaaacagacgggggaggaggaggaggtgtgagggcttacatggttgagattcatcctggtgtgaccaagattcttgtgagaaccaatggttcatcgtctcttggtttgtcgcttgatgagcttgagcttgacgtgtggcgtttcaggctaccggaatcaactaggcctgangtcgttancntgggattncgancggcgnattggggaattgattgtcaactgtgcctaanattnaagncaaatggtnagngantttnanagtccttttaccaggaatccaannggggttttg

SEQ ID NO: 135978 - DNA, 479 bp, Arabidopsis thaliana columbia
  unsure (1)..(479): unsure at all n locations
gttctttctccggagcagtttcgtattcttcgtcaaaaaggcactgaaaagccaggaactggagaatatgacaagtttttcgaggaaggaatcttcgattgcgtaggatgcaagactcctctttataaatcaaccacgaagttcgattccggatgtggctggccagctttctttgaaggactccctggtgccataaaccgaaccccctgatccagatggggagaaggacctgaggatcacttgtgctgcgtgcgattggacattttagggccatgttttcaaagggaggagggttacgggtaaatcccanccgntggaccggcaatttncggtaaacaagtgttttcggtccangtttttaaccccgggaaaaatctttccccctatnaatnttnnggggttatggatttgatcccgnccaaaanaaaaatntttnttaaatncagattttnggttngttaaaaattngcanncnatgg

SEQ ID NO: 135979 - DNA, 201 bp, Arabidopsis thaliana columbia
  unsure (1)..(201): unsure at all n locations
ctaattgtnacggcgatctttgtctcaancaacaacaacantcctnctccatcaaatccaccgntgaatcttccngctntgtatctcctccgtngtcatcatcatcggagatctcttctccgatcatccctcctctccttaaaaatccatcagtcaagctaggaggtaccggtgaaaaaggcggttgatttcggttgccga

SEQ ID NO: 135980 - DNA, 422 bp, Arabidopsis thaliana columbia
  unsure (1)..(422): unsure at all n locations
aggaaattgcaatacatatcagagcttgaaaggagcgttacttcattgcagactgaagtgtcagtgttatcgccaagagttgcgtttttggatcatcagcgattgcttctcaacgtcgacaatagtgctatcaagcaacgaatcgcagctttagcacaagataagattttcaaagacgctcatcaagaagcattgaagagagnaatagagagacttcgncaagtatatcatcancaaagcctcaagaagatggaggaataatgtctccgntccaatctccggnccgatatcaaaccggtccgttgaggaagggaccagnttcctcaatgtcttaaagcttgttcgggtccnctnaagntcctttcnttttcaatnggngggaaagnnttctttggcctttaaaaacccctttttnnggtcca

SEQ ID NO: 135981 - DNA, 467 bp, Arabidopsis thaliana columbia
  unsure (1)..(467): unsure at all n locations
cttaacaaaggttatgaagcttggggacctttgtntgggaaggtattttncgccttttgggtgattcttcatctttatccatncctcaaaggtcttatgggaagacaaaacagaacacctactattgtnatnctctggtctatctngcttgcttctgtgttttcacttgtttgggttcgtatcaatcctttcgtctccaaaaccgatacgacttccctttctctgaactgtcttttgatcgattgctaagagaagatacgttatgtttgtatttngaaagattgatcatatgtgttttggttgttttataaattnccatatggttgctttgagnccacaaggttaagtaatgtncntnatttnaggcaacaaaggcttggcggggttccgcaagttagggttctattggtttcaacatcaaccatgtttttaaaaaagcaaaattntntnaaagcntntccaaattt

SEQ ID NO: 135982 - DNA, 420 bp, Arabidopsis thaliana columbia
  unsure (1)..(420): unsure at all n locations
ggaaaaagatgctatctattccattatgcggcaataccgccgcgaggagtagagtgagtccatgcntcctaatttcntgactgaaaagtcttttggctcgatgcgcttaacaaaagggaactctctagattaagaatgnatttccttctccattaagccggaccggcgacgaataataaataggtacgtacccccaccccaggcagagttagtgagccgtgtaataggcgaccatttcgcgcggttnggggggcacttgagtaagccgccggggcccgaacttcggctttgaacccctatccaaattttttgggggccaatttcccttccttnggaacnttccaaaaaaaattgnggnttttttcccgaaattccgangtttnccttgtnncaaaccnattnacccaaaacntaatancc

SEQ ID NO: 135983 - DNA, 426 bp, Arabidopsis thaliana columbia
  unsure (1)..(426): unsure at all n locations
agaagaagaagtagagaatgaagcatgaaatgatgaacatcaagccaagatgcataaccatcttctttcttctttttgctttgcttcttggaaattatgtagttcaagcctcaagacctcgttctatcgaaaatacggtctcccttctcccacaagtacatctcctgaattcaaggaggaggcatatgatagggtcgacagcaccaacttgtacgtacaacgagtgcagaggatgcagatacaagtgcagagcagagcaagttccagtcgaaggaaatgaccctatcaacagtgcttatcattatagatgtgtttgtcatagntaatagttgttaaatctcttctctttttgccctttcattgcaatttttgtacggcttaattgcattttggttttgaatgagtgttttggncaaatttattatc

SEQ ID NO: 135984 - DNA, 480 bp, Arabidopsis thaliana columbia
  unsure (1)..(480): unsure at all n locations
ancaacaacaacatcaacaacaacaagacaggatacggtagagtcatccctgaaaggtatccgcagtatgtctatgacaacagaccgttccttagcggtccaatcatggcagcacaacctccaccacctcctcctcctcagacttacacgttcaatcctgctcctgcacatgggaacttctacgcgaactgctatcagtaccaggctcctcctcctcctccttactttcactagtgataaaaaaaggtgaatggtaaaatgtgactgtgactgtgactcccctttggtgttaacttgtggcagctctttttttaacncctcttccttaggttctctttccctttgatgttggttgnggtgtacgggatgggttttagtatttttaaaggttcaacccgttctcaaaacaataaaancataaanatnccnnangattttctcaattaagngttnatacctttaaatggnggtatttttttt

SEQ ID NO: 135985 - DNA, 543 bp, Arabidopsis thaliana columbia
  unsure (1)..(543): unsure at all n locations
gaaaaatctcgacagcttaaactttgatggaaggttatgtattatcggtttaatgggaggagccaatgcagaaataaaactaagtagtctgcttccaaagcgtctcactgtcttaggagctgcattaagaccaagaagccctgaaaacaaagcagttgttgtaagggaagtcgagaagaatgtctggccagcgatagaagcagggaaggtaaaaccagtgatttacaagtatttaccattgtcacaagcagcagaaggtcatagccttatggagagtagcaaccatattggtaagattctccttgagacttgattctctgcaaagggagnaatgttcagaggcaagagtcatggtcaataaatcaataaaatctggtcgnttctgttccataggtatctcttttacaagggtcctgtttgttgggcttttatggancnctggttttggccaaaaggcccttgtacctttggnccntttntgggtncaantaagncngttgtnncccaccatngntttcgngggngggtntgntttttntaggg

SEQ ID NO: 135986 - DNA, 482 bp, Arabidopsis thaliana columbia
  unsure (1)..(482): unsure at all n locations
ctnctcctccgtcgtctctgcagaatcactctctcgccggagtttttcacctgcagagctctcgattttttctctcgagcatcatcattttcgtcggatcaatcaccaagagatggcgtcgagaaactccgtcaccggattcgcgttgttcagttttgtattcgccgtcatcttatctctcgccggcgctcaatccctggctccagctcctgctcccaccagcgatggaacatgatagatcaagggatagcgtatttgctaatggtggtggcgttagtgctgacttacctaattcatcctcttgatgcttcttcttcctactncttctttctaatctntctctctcttttcttctgttttnnntttnatttctttgcaactnccttatttaggtttcttcaaatttggcccttgttttccttccaccttngtgggntaaaatttttcaaagnggttaatttaatcaacaanngttcttgggt

SEQ ID NO: 135987 - DNA, 487 bp, Arabidopsis thaliana columbia
  unsure (1)..(487): unsure at all n locations
gtcccgtaattncccgggtggcacccacgtgtccgttcctcttactctnctcatctctctcgcgtacgccgcaccgtagcgaccaattgaatccacgaggaaatctcagtaaatactatggcgaccaacgaacccgagcacgagcacagagacgaggaagaggccggagctaacgaggatgaggacaccggagctcaggtcgctccgatcgttaggcttgaggaggttgccgtcactaccggcgaggaagacgaagatnccgtccttgatctgaaatcgaagctttatcgattcgataaggatgcgaatcagtngaaggagagaggagctggtactgtgaagttcttaaagcataagaacactggggaagnttcgtctncgttatgaggcaatctnaaanctttgaagatcctgtgnctaatcacttcggntaaaatcgnggcatnattgttnaaggnacnangntttggnattaaaaattcattnt

SEQ ID NO: 135988 - DNA, 474 bp, Arabidopsis thaliana columbia
  unsure (1)..(474): unsure at all n locations
tccatgtcggggtactgcttgctcagattggagagttcgcctttnttcttctaagccgagcgtcaaacctacacgtaatcgaggggaaaatgtatctactccttttgggcacaactgctctaagtctcgtaacgactccgttgctattcaagttaataccgagtgcaatgaacctcggtgtcctgcttcgatggttcccttctnagaacagttctccgaacganagtttgcaggagaaagcatcattgatagaagtacataacagaaccaagtgatctctcttttgtacattgactgaagatttaagaagaaaaaacagattttaatccgatatactcaactaggaggcagaaaaaacattttgaaacttggccaaatnagntccaagactttgcttttttngnatttnctttaactcctttattttttgggaataancgnatatatttangnnttcanctnccctncttggtg

SEQ ID NO: 135989 - DNA, 296 bp, Arabidopsis thaliana columbia
  unsure (1)..(296): unsure at all n locations
tccgcgtgcnacttgcttgtttgtaattttttgtcttgttgctgcgatgattttntacgtnacgcctttcaagatcatagctcttgcgggtgggatgttctggatgaggcatcctaagttcagaagcaagatgccttctgctccaagnaacttcttcaggaaattaccntcaaaagcagattgtatgctttgaattgtaaaactncattgtggctttnaggtcttctctgctcgtaacttgtgtttcttttgattgtgtgtttgtctgcncngttttatnatttggtcctgnttgc

SEQ ID NO: 135990 - DNA, 207 bp, Arabidopsis thaliana columbia
  unsure (1)..(207): unsure at all n locations
caaacagaggaggaaactcagaagggaagccattttnctagtttttggtttctctcttccgaggcaaagtaaaaaaagaaaagaaacaggtcattttctaagtcaaatattggcttactatctataacagtgaatgtntcaccccacacagacacatatgatttgtaattatgcgaaaaaagactgaataatataatgtcggtgtcg

SEQ ID NO: 135991 - DNA, 470 bp, Arabidopsis thaliana columbia
  unsure (1)..(470): unsure at all n locations
cgaaaacctaaagaaagtagctgaaaaggcaaggaactcatttnccggcgtatcgacacagcctcccactcatttnatctgcccattacttaaggacgtgatgaacgagccgtgcgttgcagcagacggatacacatacgaccgtcatgcgatagaggagtggcttaaggagcacaacacatcgccgatgacggattcaccgttgcatagcaagaaccttttacccaattatactctttacacagccatcatggaatggaggtctacacgntagtagtaagccaaacttntgtagcgtttttttggntatataaacggcaagacgtttttgctttgtacttcttacttcacacatgctggattcaaaaattttaanccggaacggaanccttaatcatntttgtaacggnttttcggttccancccntaaatttggcctncaaataaggncncaaaaccntttgcccttt

SEQ ID NO: 135992 - DNA, 341 bp, Arabidopsis thaliana columbia
  unsure (1)..(341): unsure at all n locations
ggagatacaagccgggtcagggatagattcacagtcaacgatcggttcaatagaggatggagggttcagtacaatagagatggttgatatgagtataaaagaagttcctgaaggaaaattatgagagttagaaacagagccaaagcagattctttgaacatcaaaatcatctaagggtcagtccgattttccttgggtctattttttttgtatttnctactatatgctaagtgtatgtatctatgttatttatacataagacggatgttttttttttcgggctcggtcgaattgggggtggtggngaatagaactaagtaataactttnttaaggatatgt

SEQ ID NO: 135993 - DNA, 452 bp, Arabidopsis thaliana columbia
  unsure (1)..(452): unsure at all n locations
cttctttaaattaaaacacaaacactctcttctnttcataatcctcatctcatcatcactttgtcactaaatcagaatgaatccatccgagcagaatcacttgtccgtggaaaaaccntcacagacttcttcggggccgtacacaagtccaccaccgattggttatccgaccagagatgcgatggttggtgatcctccagccgcngcagtggagacaaagtccaagggcgatggtttttggaaaggatgttgtgctgccatatgctgctgttgtgtcctggatgcatgcttctnagacttcggaattaacgntttcatgcaaatnattgatgtaataaaagggtatttgatgctagttatggttanctgacttctntggtttngattatactctgtgggntgggtgtaacntgtttatgaaggaggtatatnnanatnaaanaannccggtg

SEQ ID NO: 135994 - DNA, 440 bp, Arabidopsis thaliana columbia
  unsure (1)..(440): unsure at all n locations
aaaacaacaacacaacaataagcaccaaaacctctttnnttctcttcatttgagtctcaaatcgaaaaatactaacaatggaggcaatgaagatgaagctttacgtggtggttttggtggcagtgatagcgttctctacagttcaccagacggttgcagcggttgacgctcccgcgcctagccctacctccgatgcttcctcattnatccctactttnttcgcctccgtagcggtgatggcctttggattctncttttaagaagtttcttctttgcttttnatgtttaaatgaatttaaagtaaaatcaactaattgatgatgtttaagtctggtcttgtttttnagtcctagttgatttcatgttgggtnatggtttgaaggncttnaaaccccccaataanggaacnncngttgaatttnactcattcggntntccat

SEQ ID NO: 135995 - DNA, 526 bp, Arabidopsis thaliana columbia
  unsure (1)..(526): unsure at all n locations
aatgtacagaacttctggctatatgtctttgggatggctttcaatgctgttgctatagtgatccaagattttaatgccgttgcaaataagggattctnccatggttactccttcatcacattactcatgattctnaaccatgctctcagtggcattgctgtgtcgatggtgatgaaatatgcagacaatatcgtgaaggtttattcgacatcagtggcgatgcttctcaccgcagttgtctctgtattcctcttcaattttcatctttccttagccttcttcttgggttcaacgggtcgtctctgtttcagtatatttacattccgcagggaagctacggtagtaaaggtcttcacaattacatctaccaggaaacaccattattctagtacagggtaaagcttttgaacggttngggttttgttttcgggaagggtatccnnattggcctccgnattgattttttttnccgncatgaaacctntatcncatttgncggncccaaatttncaggnggtcaattcgg

SEQ ID NO: 135996 - DNA, 466 bp, Arabidopsis thaliana columbia
  unsure (1)..(466): unsure at all n locations
aacacaacaataagcaccaaaacctctttnnttctcttcatttgagtctcaaatcgaaaaatactaacaatggaggcaatgaagatgaagctttacgtggtggttttggtggcagtgatagcgttctctacagttcaccagacggttgcagcggttgacgctcccgcgcctagccctacctccgatgcttcctcatttatccctactttcttcgcctccgtagcggtgatggcctttggattctccttttaagaagtttcttctttgcttttnatgnttaaatgaatttaaagtaaaatcaactaattgatgatggttaagtctggtcttgttttgagttctagttgatttcatgttgggtatggtttgatgcctttnaaccccccaattaanggatncgctggttgaaatttgncncaattcggatatccataataaanntaancaatantaattntattntttt

SEQ ID NO: 135997 - DNA, 513 bp, Arabidopsis thaliana columbia
  unsure (1)..(513): unsure at all n locations
ctctgacatggaccgccattatagaggcttatggatgcaatgaactcttcagggatgcaataaactgttttnagcaaatggtatcaagagggtttactcccaacaccttcacatttacagcagttttatctatttgcagtcaagccggatttnttgatgaagcttatcgcttctncaacttgatgctccggatgtacaatttgcagccatcagaagagcattattcactggtcattgaacttctcaatcggtgtggtcgtgttgaagaggcacaaagacttgcggtcatgagttcctcgtcatccctacagacctgacttgcagattcanacatcttctttgcttttnctcaaagcccncaaggnaagttgctcgaagngttattgnggaggtataatcctggtccccttggtttccaagnacctttgcatttaaaangggctggaaaaaccgaatttggggcccanantgnttnaattttgnncaaccttgnaaaaatctttcgnggncaaa

SEQ ID NO: 135998 - DNA, 348 bp, Arabidopsis thaliana columbia
  unsure (1)..(348): unsure at all n locations
ggttagggagttgatggatggagagaagggaaagaaaatgagagagaaggcggaagagtggcggcgtttggcgaatgaagcgacgcagcataagcatggttcttctaaattgaactttgagatgctcgttaataaggttcttttaggggagtagagactagtaaatatggatttcaagnaaaaaggggtttaagcacacaagagtagnccnttaaggggtttncttcacaaagnancctcttttattttcccaaatttaatttcctccatttacctccataattcaaattaaccattcttcctnattcatcaccaaacccnattaaaccattcntttttcaagttncc

SEQ ID NO: 135999 - DNA, 420 bp, Arabidopsis thaliana columbia
  unsure (1)..(420): unsure at all n locations
cgccaatgttttctttagatctagctaatatggcgacgattttntnctttctcgcttctaatcaccgtagagatcctcccgatctgcaaatccgatccgaattctcaacgaatttgtagatctgatctgtgattccatcgttgacgacggatcttcgcttacatcgtttgatctgtcgcagatctgccgttttctatagatctagatctggatcgtccttcgggggctttttcacaatgcaaagatcctgtgaattgtttcaaagttgagggcatcaatttctgggattnctnaggggccggatcctttttgcaagaacgggattttntggttttntttgnattggaaatttnagnattnaggggtttaggaannattttttttttgggtaagctaaaaagctttcccgnattttgnanc

SEQ ID NO: 136000 - DNA, 318 bp, Arabidopsis thaliana columbia
  unsure (1)..(318): unsure at all n locations
agatctnttccaattttttagaaaaaacatgtnttgctgtggtggaagctgtggttgtggatctncctgcaagtncggcaatggttgcgggaggttgcaaaaggtaccctgacttggagaacaccgccaccgagactnttgtcctcggtgttgctccggcggatgaactctcagtacggggctttcggcggagacttttcggttgccgagaatnatgccttcaaaatncgggntcttanttcaaagtgcaaaccctttgtacctgcaaaattaaaggaacttcataaaaccccttaaggcttnntaaaaaaccccnaa

SEQ ID NO: 136001 - DNA, 412 bp, Arabidopsis thaliana columbia
  unsure (1)..(412): unsure at all n locations
cctttcctctcctcctcaccccctctcccctctntntnaaaatgtntttccttactcgtngcctcttcgctgcccccactctctcccgtttaantcccatcacctccaccttcttccgccccctcaccacctctggtcctctcttcgctgatgagaccgactcctcctccacctctgccccttcctcctccaccaacaaggagtacggtacagtgaagtggttcgatgcttcgaagggcttcggcttcatcactcgtnagtcgggtgaggatttgttcgntnanttntgggcatcaaggggaggggtanaggacgttggagnaggggaaaaaggttggggtaggcgttggggaaggacanaagggnccgttgaattgaagttnaaaaggctagagtaaaagtagggggttgc

SEQ ID NO: 136002 - DNA, 373 bp, Arabidopsis thaliana columbia
  unsure (1)..(373): unsure at all n locations
ggagaggccgatggtttgatgaccaaggacgggcgttatatgcagcagangcagatagactaaggaactgggcagagaacaggacgaggttgtcgttaacagacgcgatggagatgtatacagagaatacttgggtctctgttttctctctttctgttgtttgcgctttcatcatcttacaaagcacaacacctagctcttttccaggcacataacaaacatcttcctcggatgtgttttaagaaaattgtaaacgtacatgttatgtataaaaaacatatatataacagaaccgatttgttcatgtaaacacttcttatagttgtaggatgtgtccgttgttgaaaacaaatgnaaaaataggttgttattt

SEQ ID NO: 136003 - DNA, 337 bp, Arabidopsis thaliana columbia
  unsure (1)..(337): unsure at all n locations
accggccggnttatnatggnatgaaaacacccggtccggttcaaatgtatcaccatcacactggtatggttgtccctggtgtagaagaacaacaacaatacagaaccgaaacggattcggatacgggtcgggcttcttagctgtttgaagaagaaatatgaaaaattatcacatccggggttttcgtctttccattggagtcgttcttattcgttactgtgtgaactgtgtattatttttgnttttacttttgtaaaattnattttngtgtgtaataatttnntattacaaaatataatggnncagtaaaacccnntaataataacattatantcaa

SEQ ID NO: 136004 - DNA, 446 bp, Arabidopsis thaliana columbia
  unsure (1)..(446): unsure at all n locations
agtcacgacccgaccaaacactcgttctctggtagcgattggacgcagaatccgacaagaaccaacgagaaagccactgacttgtaatgctttgtttggtctcggtgtgcctgagcttgctgtgattgctggcgtcgctgcgttgctttttggacctaagaaacttcctgagattggcaagagtattggcaaaaccgtcaagagctttcaacaggctgcaaaagagttcgagtctgagcttaagacagaacccgaagagtctgttgcagaatcatctcaggtagcaacggngtacaaaggaggaggggaaaaacttgnggtttnttcaaagnttcaaagggggatttttttaaggttgggngcttcnagtgttttcnttttccctgtnggcttcaacaatttttttntnnntnaggggttttngtcnaaaaaatttttccttnggg

SEQ ID NO: 136005 - DNA, 266 bp, Arabidopsis thaliana columbia
  unsure (1)..(266): unsure at all n locations
attcagaacacatcctggaaaactttcactcaagtcggaccataagaaggcttgtcttgaatcgccctggtttcgcgtccattctctttaagaaggccttgtctggaaaatgtcggtcgtgggcacaaggacactgntcaaagatactatctgctttcgtagagactgaagatgtccaagtccgngagatggntaaaacagagcttcaggtgtnggtgaatganggtactctgangatctcagcaacccangaaaccccgnntgat

SEQ ID NO: 136006 - DNA, 214 bp, Arabidopsis thaliana columbia
  unsure (1)..(214): unsure at all n locations
ggcagcagcttgtcgttgcccgccttgaacacctgcgtgctgtactcgccggtgggttgtaggcggatcgtcccgtcaccgttgtcctcgatgcgcagnccggtacgcacgccttcagaacgaacatcggtcttgacccagngcagntcnaggttgtcggtcancngncaagccgatcagggtgttgctgaactcacccatcagatagagcgng

SEQ ID NO: 136007 - DNA, 501 bp, Arabidopsis thaliana columbia
  unsure (1)..(501): unsure at all n locations
gagagaatgaatgattactataagaaagtgggagcggaaatnaggaaagctgatatagaggacaagaaagtagacaaggaaaggaggagggaaaagagaatgaaacagaagattaagaggaagagaggagccatggaggatgaagaagaagaagaagaagaagaccatgatggttctggatcatcagatgatgaaactggaagaaacagcaaaagagcaaagaaaatcgtctctgacaatgaagaaaatggaggaaaaatcaatacagattctctttccgtagctgatcttgaagaaatggctctcaaattcataacgcaattgataagatcttaattcgtgtagtttaattttaccatcaagttcttgttggaaaatttttgtngnttttgtttccacctaacgggttgcaccgtttgttaccggccttacttatnngggaaaagaanggttttncattttttgctttnaaaaaanaaaanatnnnnacngnntntntnt

SEQ ID NO: 136008 - DNA, 535 bp, Arabidopsis thaliana columbia
  unsure (1)..(535): unsure at all n locations
aagctatgcaacatggtgggctaaccagaggagatacgactgctccttaacccactcgaccggcccatacggtgagaacttgttctggggaagtggctcagactttacatcgactttcgcagtggagtcatggactgtggaggctaagtcctacaaccacatgaccaacacgtgtgaaggagatggtatgtgtggtcactacactcagatcgtgtggcgtgaaaccaggcgcctaggttgcgctagagttgtctgcgagaacggcgcaggagttttcatcacttgcaactacgnccctccgggtaactacgttggggagaagccttactaactttgtctaacacgttagttgtttnaaattaancgttggtggtttcttnaatcctatgttttaattcttcctgaactttngnttcttttaaaacttatcaaccnangggttttaaaggtttntgggngttnttaacatttgggggntnnaacttttccattttggggtnggcatgccccaaannaaattttnancggntttnaa

SEQ ID NO: 136009 - DNA, 432 bp, Arabidopsis thaliana columbia
  unsure (1)..(432): unsure at all n locations
caaactcatggcgactattccggttaacccgaaaccattcttgaacaacttgaccggcaagactgttatcgtcaagcttaaatggggaatggaatacaaaggttttctcgcctctgttgactcctacatgaacttgcagctgggaaacaccgaagaatatattgatggacaattgacagggaaccttggagagatcttgatcaggtgcaacaatgttttgtatgtccgtggtgtgccagaagatgaagagcttgaagacgctgatcaagactaacctgtattgagtacttagaaattgcaagtctgtgtgtttttaattttnngtattcctgtgagcacttttaatcttaggtgtgatgttggttgaatcttaagnggtttgntggtccatattccatacccttnaaaaacttaccaagnccctttttcttt

SEQ ID NO: 136010 - DNA, 321 bp, Arabidopsis thaliana columbia
  unsure (1)..(321): unsure at all n locations
tcaggcaatgcatttcgcgaggnttatcggttaaatacttgactgaagatggagtaatagattatatcagacaacatcaactatacactgagctcacatgacaaacgctgagaggattattatacttcatcagatcaaatattacaacacaactcatcaaataatggtgtgataaacagatcagatatatttnttgagtctctgtattttaaggttcttatttatcaactctttgtatcatattcatatgtacaacaaatgtgaagnaaaaaaaacacaaaagaggcgagagnaatgtggacctgatgatggnttacttct

SEQ ID NO: 136011 - DNA, 491 bp, Arabidopsis thaliana columbia
  unsure (1)..(491): unsure at all n locations
ggaatggcaaaattcgggcaaggcaccagcagttccacacatggtgaagtnnnaccatgagatcagagagagaggtttcaagatctttttgatctcttctcgtaaagagtatctcagatctgccaccgtcgnaaatcttatcgnagccggttaccacagctggtctaacctccntctgaggggagaagatgatgaaaagaagagtgtgagccaatacaaagcagatttgagggcatggcttacaagtcttgggtacagagtttggggagtgatgggtgcacaatggtacagcttctctggttgtccagttnccaagagaaccttcaagnntccctaacttcatctactatgtcgcctgatcaaaatctttanttacntaaccaaaaccattaaggtccaggggtttttcccggatccttnaggcttttttttttttccccccccccntttaaatttccngggttatnnaanccaaatttaaangggntttg

SEQ ID NO: 136012 - DNA, 202 bp, Arabidopsis thaliana columbia
ttcagttcctctcaagagtttctgatctgtaattattgaatgttaattagtggtgtaatacattaattatgctttaatctctccattgaccctcaatctccaaagagacaaatgtatagaataaatctcataacatacatgctttaggtttattgagacattgatctatgtttgctttaatttgattcgtctaattgtccct

SEQ ID NO: 136013 - DNA, 457 bp, Arabidopsis thaliana columbia
  unsure (1)..(457): unsure at all n locations
gtggttagagtccggagaatcaactccaggacncccggagaccttgcatctatacgaaaacctcttggaactcgggattgaacccatcataatctctgacagatggaaaaaattgtnagaagtcactgtcgagaatctcaaggctgttggtgtaacaaaatggaagcatctcatactcaagccaaacggatcgaagttgacgcaagtgggtgtacaagtcaaaggttaggaatagccttgtgaagaaagggtacaacatcgttgggaatatttggagaccaatgggctgatttggttgaggtactcctnggagggtttttaaagttcccaaatccactntnctnaggacccttcttnaattaaggatntttnttcaangggatttntcccccttgtatncccattncaaaatntttggggggtccggtnaacnttttaggccgttttgggnaccnct

SEQ ID NO: 136014 - DNA, 444 bp, Arabidopsis thaliana columbia
  unsure (1)..(444): unsure at all n locations
gggatactccgggagattgcaaactaccttgatgccaatatacccaacgttgagctcattgcaagtnctatcggtgttgtatcagcaatcatagacaatgttccactggttgcagcgactatggggatgtatgatctcacatcgttccctcaagattctgaattttggcagctcattgcattctgtgccggcactggtggtttgatgcttgtnattggttctnctgctggtgtagccttcatggggatggagaaagtcgatttcttttggtatttccgaaaggttagtggttttncttttnctggctatgctgctggnatcgcaagcttatctgggcccgttcaaaaatctncaatttcgggggtccccaaaaaactgngggnncaaatccccatttntnaacttgggncnaaaggggccccancaaanccnggaatttttccc

SEQ ID NO: 136015 - DNA, 486 bp, Arabidopsis thaliana columbia
  unsure (1)..(486): unsure at all n locations
ccactatgttatgcttgagaaatggtttggaatggaatcgatattaatagaaaaggaaagatgcaaaaagagagatttgagtgatcttttgacgtttgattcttgtttttgggctgaagttgaggattcgttgattgtaattaatcagttgaatacaactgtggggatgagagacgatgtgagagaggtattgactagaaaactcgtggagtttgagggatacgtgtgggagataatcacaaaacgtgaggtttcgccggagatattcttngaggaaagcagtttcatgaagtggtggaaagagtacaaaaagntcaaaggctttaattcttcaatacttgacccncgtttattgaaccaccccggaagtancggggagtntttggtaagtcnncantaattggggttaattttgggaatttntttnacaatttccagggtnannnagnggggggntttgtaatttttncnttncaaaccgggggt

SEQ ID NO: 136016 - DNA, 425 bp, Arabidopsis thaliana columbia
  unsure (1)..(425): unsure at all n locations
atcaaagttggccctcctccagctccttccggtggccttcctgggacagataactcagaccaagcaagagactttgcattggcattgaaagacaggttttacttacagccattgccaccaacagaagctgcagctagagccaaagaatctgcaaaggatatcataaatgtgaagccattgatcgacaggaaagcttggccatatgttcaaaacgatcttcgttccaaggcttcttatcttcggtatgatcttaacacaatcatttcctccaaacccaaggatgagaagaagtcactcaaggnttctnaaccanccaaggntttttggnttaccatcgggcaatcctgggntttattccggcgnaaggaaggaagnggtccctttcggaaggcnttnngaagnnccttttnncttngggcaaagnt

SEQ ID NO: 136017 - DNA, 313 bp, Arabidopsis thaliana columbia
  unsure (1)..(313): unsure at all n locations
gcgactgggatgtggatgcgcgcatncngtccaacctgatcacctcgctgatcgactacacctngctgcgcgtggatccncagagcacgtggtggcgctggccgaccnacgcatnctggaagcgccgttctgctaccnggccgggcacacgctggtggagttcaacgccgccgagcgnagaacttcgtgcgctatgtncgcaatgncggcttcgtcttcgtcgacgacttcaaccacgatatcgacggcctgttcgccacntcgttcgagtngcagattgggtcgcctgttttggtcccaaggcacttcagaa

SEQ ID NO: 136018 - DNA, 226 bp, Arabidopsis thaliana columbia
  unsure (1)..(226): unsure at all n locations
gnggtccaggctgatngcgaccggctcggcgttgncgccgtacacgatggccgggatcacaccagcntgacgcaggcggcggctcncacccttacgctgcagttcacnnttggtgaccttgatttcatgggtcttcgacattttcgactactcaggttgttgccgcgccttncggcgtggcggttgaagatgcttccgngaccagaagcacccggggtatgtcccc

SEQ ID NO: 136019 - DNA, 604 bp, Arabidopsis thaliana columbia
  unsure (1)..(604): unsure at all n locations
gttcgaagagctgaagatgctgagcttgatctggtgattctttcgccggatgcagatcctccggttgttagaatgatggattacagtaaatacagatatgagcagcaaaagaggaaaaaggaacagcagaagaaaagtattgatcattcttctctgcttaactggagataatgttgaaactataactactcgaatggacttgaaggagcttaaaatggggtgatttgagccattttcactatctcttttatctgtgtcgttgtgatgcttttgtttagaaaagcttcttctcaaaaggttttngtatttggtttcnccggtagttataacatcgatcagcatgattatcctgtacgcatgagagcagcccggaagttcttgcaagacgggtgacaaggttaaagtgattgtanacatgaaaggnccgngaaaacggggttcagaaatattgctatttngctccccaagancggtttcaagccttaaaataggggnctttggancttnnggggggcaaaaacnttcngggccaggaattttgnttantggccttngggccaaacaaagganggttttcngggaaaggtngaagnncccccccccc

SEQ ID NO: 136020 - DNA, 503 bp, Arabidopsis thaliana columbia
  unsure (1)..(503): unsure at all n locations
cnatgtgccacgtggcacaatggtgatggttaatgcgtgggctatacacagagatccagagctctggaacgaaccggagaagtttaaaccagagaggtttaatggcggagaaggtggaggaagaggagaagacgttcataagctgatgccgtttgggaatggacggagatcgtntcccggcgccggactagggcagaagatcgtnacattagcgttaggttcgttgatccaatgctttgactggcaaaaagtcaacggcgaanaatcgatatgacggagactccggggatggcaatgcgtaagaaaatacctctatctgctttgtgtcaatctcggcccattatgagtaagcttcaggcccatttaaaaggttaggtttgttttcttcttaaagttctttttagttttctgttttctatgcatgggggatgtgagattttcctccgtttgtgtaacgaagggtatttgtgtaatccggccaaatgaattcccatgnttttccc

SEQ ID NO: 136021 - DNA, 483 bp, Arabidopsis thaliana columbia
  unsure (1)..(483): unsure at all n locations
tccatttcctgattaaggcttcacatctctnagagagaaatgggtcagatccaatactccgagaaatacttcgatgacactttcgaatacaggcacgtcgttcttcctcctgaagtcgctaaacttcttccaaagaatcgtcttctctccgaaaacgaatggcgagcgataggagtgcagcaaagccgcggatgggtacattacgcggttcatcgacctgagccgcacataatgctattcaggaggcctcttaactatcagcagcagcaggagaatcaagctcagaacatgcttgttaagtgaatcattatcatcacctgagtaaggatgttatattgcaacaattctntgnggtattnggttatggtttcttggtaaacatgggtttgaatcctttgtgggttatngggtgatnttgtgnggggttgggttttttgganccaccttcctttnaannntnaggcttngnnccaanggnaactt

SEQ ID NO: 136022 - DNA, 241 bp, Arabidopsis thaliana columbia
  unsure (1)..(241): unsure at all n locations
gctctagactacttgcaaggaaaaacgtctannataaaagaaaatctaaacaaagcagactttaccgctatntggagaactctagcctcanagatagacaagttgttcttcaacagcatcttgatggcgaacgtnaagtttaccaatnatggagtcgaaaggttaaaagtagacatggaggttctatatggggttttcccggacgtggtgttttagaccccnaggntttctttcctnaaac

SEQ ID NO: 136023 - DNA, 222 bp, Arabidopsis thaliana columbia
  unsure (1)..(222): unsure at all n locations
ccgctggagacgtgagcgggtgcntggcgggggcggtgggtggcgtgcagcgaccttgagntgcccctcgntgngtgcntanctgctgcgcacngaacttccttcatccacgcatggcgtgatctaccgcatcanagcccgttgcggcatcggacatcgcccggcctgccgccatcgtcggcctacgtgcacgcatcccccagctgcacggcgttcaacgcg

SEQ ID NO: 136024 - DNA, 364 bp, Arabidopsis thaliana columbia
  unsure (1)..(364): unsure at all n locations
cgggccttccggtgtatcgatattcgacacgtgttatnatctgtnagggtttgtttcggtacgagtcccgaccgtgtcgttctatttnacggaaggtccggttttaacattaccggcgaggaatttnctaatgccggtggatgattcgggaacgtattgttttncgtttncggcgtctccgacgggtttntnaataatagggaacatacaacaagaagggattcaagtatctttcgacggagccaatggctttnttggttttggccccaacgtttgctagcggttaagatagagaaattacgattttggtttgcnagtaagtaaaaagcttttgtctaaaaaactatatatgnattngnctcnt

SEQ ID NO: 136025 - DNA, 262 bp, Arabidopsis thaliana columbia
  unsure (1)..(262): unsure at all n locations
aacgcccaacagcaccaaccgcgctcaggggaacaaacaatacccagattgcnaacacngcttttttactggccgcgattgcagatgtnatcgacgcgtcacctgacgcactgaatacgctgaatganctggccgcagcgntcggaaatnatccaaattttcctaccaccatgactaacgcgcttgcgggtaaacaaccgaagantgcgacantnacggcgctggcagggctttccacggcgaaaaataaattaccgtattt

SEQ ID NO: 136026 - DNA, 252 bp, Arabidopsis thaliana columbia
  unsure (1)..(252): unsure at all n locations
tgttccatcnttatggtttaatccaactntccaaaccgaactaacgaagctgtttccgcanaaagaaaccgtgtttcaccacttgggtcggnatctttttnaccctaaaaatcaagtttgggatatcgtcacnaagtactaccatgntcacttatccaaagcagatgngagactcgggattcaaattcgggtttttngcgatcaaggtggatacnaccaacacgtcatggaccaggtcatatcctgcacaca

SEQ ID NO: 136027 - DNA, 252 bp, Arabidopsis thaliana columbia
  unsure (1)..(252): unsure at all n locations
tgctncctttctatggagttgttcatantggctacttttgtnctgaaggatccaaccccaaccctgttggaagttcactcatgaaagcnatngtacactttnatgggttcaagcttcaagtgcaaganaggatgactcgacagatcgctgaaacgctatcgcctcttgtgngcggggatgtnattgttgtggcggaagntgggcatacttgtatgatctctagaggaattgtgaagttttgaagcagcaccg

SEQ ID NO: 136028 - DNA, 459 bp, Arabidopsis thaliana columbia
  unsure (1)..(459): unsure at all n locations
ggaagcttgcatattaaccgaattgatncctcactctcagatcgatatttgccttcaggttctacaagctgatggagtgttatgttctgtaatcaggaacaagatcagcttgnatcaatgccgcgactctagctctagcagatgctggaattccaatgcgtgatctcgctgtttcctgtagtgctggatatttaaacaggactcctcttcttgatctgaactatgttgaagncagtgctggaggagctgatgtaaccgtcggtattctacctaaattaggcaaagtgtcactcctttcagatggntgccaagttaccgatnggaacatttnaggcaagtgtttncaattggnttctnaagggttcaaaggnaaatttcagngnggatacggnggggtttttcaaggaaaccccnacaggtnggggttttccccggntgataaacttttgggtttnggna

SEQ ID NO: 136029 - DNA, 404 bp, Arabidopsis thaliana columbia
  unsure (1)..(404): unsure at all n locations
gggatatcgggttcaaagcgagttacgacgattctatctaactcgcccgagtttaactcggcttgtaactcagcatacgacgaatctntctctcttgcacagcatgctttcgccggagttcgtccttaccagctcgtntccgncgncggccacatccaccggaatctttccgctcttcgtttccctctaatcaccagatggctctcttctcctccgagtcaatccaaagtngcttaagnttttccgagtcaccgnttttggaggtaaggcggcggatgaggaggagattcttgggcaagaggagtttaaggaaatggggccngnnaaggttttttgggggaanccgntttttggggaaaacggggggaaaggcaaatngggggattncggnntttccctttaag

SEQ ID NO: 136030 - DNA, 506 bp, Arabidopsis thaliana columbia
  unsure (1)..(506): unsure at all n locations
ggtgttcagatcgccatatcagcatctaacactggtggtgcctgggacaacgccaagaaatacatcgaggctggtgtatcagagcacgcaaagagccttggaccaaagggttcagagccacacaaggcagctgtgattggagacacaattggagacccattgaaggatacttcaggaccttcattgaacatcctcatcaagctcatggctgttgagtctcttgtctttgctcccttcttcgccactcacggtggtatccttttcaagtacttctaaactcaatccgagggaagaagatgacgatgatgaagaagaagaagatgatgatggcgatcgattctaaacttttcttttttaccattcttattttcggttaccgtaggggtttaaaaaaccctttttttgttgatgaggtnatttaaggaccacccaangatgtttcttctntaactccctggcttncggtttcctttggnctgttagatttggaatcccccaggttcggg

SEQ ID NO: 136031 - DNA, 221 bp, Arabidopsis thaliana columbia
  unsure (1)..(221): unsure at all n locations
cggaatcggttctctgtttcatcaagggatgtatgtatgttgtagactcgtttttgcagtattcggtgaatcgtgggaaagtgatatnccttttggttgaggccatagatatatatctccnaggnactgtgatgttagtccttgggttgggnccttacggggtgttcaacagcaatctcggtacttcaaagnngnggacacaaggtattttttnccataag

SEQ ID NO: 136032 - DNA, 343 bp, Arabidopsis thaliana columbia
  unsure (1)..(343): unsure at all n locations
cacggctttaaagaagggaatgcaacggttgatgtattggacatgcgtttatttgttggccattcacatgctaattagaagatcgtactagaagcaaaaacaaattgagagagcttctaagtgtaaatagagagtccactaatgcggtccaatttttcaacgagaagaattaaattattctcgaaagtgtctcagatgattctttaaaagggggaaaaaaccactcaggaaaantttgngnaggggaatgcagttcctncaaaggggaatncctatggtattaaaaaaacctgaccgggttccatatttnttagnaccttttaattttggaaatttgnccttt

SEQ ID NO: 136033 - DNA, 462 bp, Arabidopsis thaliana columbia
  unsure (1)..(462): unsure at all n locations
tcttcccaagcatttggatgagaaggttgcattacttcacttgggcaagcttggagccaggcttacaaagctgtcaaaggaccaatctgactacgtcagcattccaattgagggaccatacaagcctcctcactacaggtactgagagagagagagagtcgacaaagcggttcaggttcggntctacttgtggtntttgtgttggggtgtggtgggagagtgggaccagtttgngntaattggncttctgatgaagttgacccaatatcangtnttaataaggggtattgggcnttttaaggttgttgcttgntttccnccatttttcaatggaaaccttaaattnaggttttgggtttaaggttncccncttgaattttaattttnggggtccnnttttagcggttgaccctttnaaacaaaattgggaccccaaaaaaagggggaacttntttttgggga

SEQ ID NO: 136034 - DNA, 286 bp, Arabidopsis thaliana columbia
  unsure (1)..(286): unsure at all n locations
ccttgaaatcgaaagatcaaaaaagcgacactgaaaatggaaaatcggtcagaaatgggtaaccggaggcagcagaatcttttcgtcatagcttctcccgacgagattgctaagatccatcgagccgaaacttccaaacaagccggagctatttgcnggagctaaggnccgccgccgttgccggccgtcggccattcggtttccacagtngcttncggtcgnannttcccgtgggntaaggcaaaccttaacttcantggttaaggacnnattaattttttaagtt

SEQ ID NO: 136035 - DNA, 326 bp, Arabidopsis thaliana columbia
  unsure (1)..(326): unsure at all n locations
cccatggaaaaaatatagtacgagaggtgaagacggctgagcagagggatatgatggtatcgctgatagacaagagaatggagccgtggtcgatggaaagtnttgaaaagtttgcggctttggcactgaggtgtagccacgactcaccagagatgaggccaggaatggcggaggtggtgaaggagctngagtcacttcttcaaggatncccccgatagggaggccaagagttggaattggcgtcatctttcgtcaanttcctgtcaaaaatcgncggtcggaattttnacaaagnggncccttttacgngttcttngnngnccctt

SEQ ID NO: 136036 - DNA, 497 bp, Arabidopsis thaliana columbia
  unsure (1)..(497): unsure at all n locations
tcctcatccactactctctctttcttcttcgccgtcttccgtcgtagaaactgataatgacgacgacaacgacctcactttcagtggttgcagagcgtgtgggaaagaagagaaagagagtgggtgtaatggtgacggacggattcaaggtggcattgcaactgtccccggtttcggttggtggccaattaaggcttacaggccttgtcccgcgtttnttgaggccggaggtagataccgccgcatagggcagagcatggacgaggttgcatttggtcgtggtgactctaaatcctccacttntgtagacaccagtgattcactactacggcagacaaagncaacaaagttctngcaaaagttcaaaccaagtgatatttngccccatttttcaaagtccangaagganttttttttgggaatgtgtaattgatgnttgggcctaanaaaattttggncccnnttttaaattttcggnccaatagtttngaacccnt

SEQ ID NO: 136037 - DNA, 261 bp, Arabidopsis thaliana columbia
  unsure (1)..(261): unsure at all n locations
aataagatacgactcaatagaaaaagcttcacggatcgaaaccatggcagccgaagtnatccttctnggtttctggccgagcatnttcggaatnaggacgatgatcgcnttanaggagaaaggagtnaagtatgantatagagaagaggatgtgatcaataacaagagtcccntgctactagagatgaatccgattcacaagacaatcccggttctcatccacaatggtaaaccggttcttgaatcccntatccaaatcca

SEQ ID NO: 136038 - DNA, 542 bp, Arabidopsis thaliana columbia
  unsure (1)..(542): unsure at all n locations
gcnaatntcccccaaacgggggggctgaccncnaaccccntntttccgggtagncccccccnccggccatgttgttgtaaaaaaatanggncntnaatgttatgntgccgcctncatgnaaatgcaccttaaccgagcaaggaatgtccncgacgaagcttanaaagccgtcancgagcttcagtgccgctagcagatggcctgtatgggcttcatttgctattgtacagggagaatactggacgagattgaagcgaatgattacaacaattttactaagagagcttatgtggggaaagtcaagaaaattgcagctttgccattggcttatgctaaatcagtactaaagacttcaagttcaagactatcgatatgagagcgagaggaaagtggaacaaaaacaacctaagagcgctttttgtgattaagnaaaaacttaggctcgaatttattatgttaactaatatatacatattaatggggaagnaaattcttataatgttacattatctttctgaatgtaaaaaagtattttttttttt

SEQ ID NO: 136039 - DNA, 465 bp, Arabidopsis thaliana columbia
  unsure (1)..(465): unsure at all n locations
atagattccctaggttttnacctcaggctttgcgcaggagcaaagattgagtcattgcgatttgcattctcgacaagggcaacatcagaagaaaacgcagagggacaaataagaaaactattattcccgaaaacgaaccagtcgacacaaccaaaaccaaaatgaacaagtcagagggaatgttgacgctgtagtaatcttctgtgaagctgcagagaacagttccatgaaccaaaatccaaacaagcaatgcatatgtttctggaacaaatatgaacaagttcttggagntctaagcaaaagagtaaggtcagtgncttcaagcaattttnccanttgattttttgancgctgtaatttcggngttaaataattngtttcaagtttnnggggtnccncttgncaaatttgggnatttnaggttccanccccttatttgggttttaagnttttggggtatcncct

SEQ ID NO: 136040 - DNA, 482 bp, Arabidopsis thaliana columbia
  unsure (1)..(482): unsure at all n locations
cttcttcaacaatggcggaaccaaagacaaaagttgcagaaatcagggaatggntcatcgaacataagcttcgtaccgttggttgcttatggctaagtggtatctctggttcaattgcttataattggtctaaacctgccatgaaaaccagtgtcagaatcatccacgctaggttgcatgctcaggcgctgacattagccgctctggctggagcagctgcagtggagtactatgatcacaaatctggagccactgatcgaatcccgaaatttctgaagcctgataacttaaataagggctaggaatctncgtaccatggctctgcctattctgttatttgtaggcatcttcgtatccaatggaggcttcatgntttgtaaggccttttgggtatttgaaattggctnatacccnttccngtnatcttnggnattttnttngnctttnaggttatntgnaannttcggggtnggnattttaag

SEQ ID NO: 136041 - DNA, 440 bp, Arabidopsis thaliana columbia
  unsure (1)..(440): unsure at all n locations
gctatgcaggttactgattgtagcatgaaaacgcatataatacaactaagtcggataccaatcacaagcagcttgactccgcaattgtagaaaaactgatcttcctcaagagaacagatttgtnccttttgactacactactcaccaagaacagagttgctaacacgggccttttccttccacgaatcccgaccttatcgttttcaaaccaagatcaaggtgagattcgcggatatcatctctctctttgctcttgtagtttctacgtttgttttgtataagatttcaggtaattcctctaaagtaagtaagctttagtttttnggtatacgnaagttttttcctaaatggggtttcttttgggctttgtgtaccatataaaggatngtagnngnaantgtntngcnctgtgganccaccggntttgngnctnttttccc

SEQ ID NO: 136042 - DNA, 278 bp, Arabidopsis thaliana columbia
  unsure (1)..(278): unsure at all n locations
tggaaaaaacattggctggctaacaatatcctcggcctttccttctgcattcagggaattnanatgctctctctcggntcattcaagactggtgccatccttttggcaggactattttcctatnanatcttctggggttcntttactccagtnatggntagtgttgccaaatccttcggtgctccaattaagcncttaattccctacgggtaatgctctaaaggcccnaattctatgcttgggccttgggganaatgtcattcccggggaatttccgg

SEQ ID NO: 136043 - DNA, 302 bp, Arabidopsis thaliana columbia
  unsure (1)..(302): unsure at all n locations
tatcgtccacccacttgttttgcttagtatcgtcgaccattacaatcgtntagccaaggacacgagcaagcncgtcgtcggcgttctgctcggaagtagctctcgtggtactgttgacgtcaccaacagctacgcagtgcctttnnaggaggatgacaaagacacaagcatatggtttnttgatcacaactaccacgagtcgattgtttcanatgttcaagagaattantnnctaagngngcatatttgtgggtttggtcagcacaggttcctaaatttttggggngattgatttgggattt

SEQ ID NO: 136044 - DNA, 350 bp, Arabidopsis thaliana columbia
  unsure (1)..(350): unsure at all n locations
actcagaaaacctgcagcttcctgtagacttnttnatttnnaagaggaaacatcatcttctcanatgcggcacttgcaccactgtnctcagattctnacttcagtccagaaatcatttagttcctgcagtaacacatgacataaatnctaataggaatagcaattcancatcagagtctcccatagacaaagctccctccaaacctgaaaagctgagatcctctntncaggatgaggagctacctgtggctagaggctctccgcttcaccgactaaanggggtattctactgtaagccaagtntttaaagtttcacagcgtccttccttcctatatagntctttgcttca

SEQ ID NO: 136045 - DNA, 379 bp, Arabidopsis thaliana columbia
  unsure (1)..(379): unsure at all n locations
ggtttatgngacggntttctactagggcatttacagtcctcggnactcgatttcccaaagancatcagtntggtcgctgtatgccctaagggaatggntccttctntnaggaggctttacgtccaaggaaaagaaattaacggtgctggaatcaacgccagttttgcagtccaccaggatgttgacggtagagccgccgatgttgcattgggatggtcagtagcacttggttctccgtttacttttgctactactcttgaacaggngtacaaggagtnacatccttttggagaaaagagggatttttcctttgggngcttgttcacgggaattcgnnggagtccctttntttagaaggttcaccngaaaattgggggtt

SEQ ID NO: 136046 - DNA, 261 bp, Arabidopsis thaliana columbia
  unsure (1)..(261): unsure at all n locations
gtcctccgcngcctcttttcaacgtcccagtggagggcttgggcaggggaagaaggagatagctaggtcgggtttaccgggtcaaattgtagatcanaagcggttagggggacctggntcggtgcctccaatgtgtagattgangtgtgggaaatgtnagcnttgtaaagcagttcacgttccgattcaaccaggtctgatnatgccactggagtattaccctgaagcttggcgntgcaagtttngaacaaactnttcatg

SEQ ID NO: 136047 - DNA, 205 bp, Arabidopsis thaliana columbia
  unsure (1)..(205): unsure at all n locations
aggaattagagagagaggaaggaaaaanggcgtcggggtgggggataacgggaaacaaagggaggtgttacgattnctggatggatttnagcgaatgtatgtctcattgcagagagcccaaagactntactcttctncgtnaagactacctcgagtgtcttcaccattccaaagagttccaacgnngaaacaggatatacaaaga

SEQ ID NO: 136048 - DNA, 228 bp, Arabidopsis thaliana columbia
  unsure (1)..(228): unsure at all n locations
ttgaggttnctttggaagggaaattggttcattcaagaaaaaagctgtaaganccttgcctggataataagtnctaggccaaaanctggtaatgctgttattggtaatggaattgatgatgtnctcaaggggttggtggaatggctttntnctcagttgangcaaccttctcatcctactcgtggtgttccaattgcaatcagctgcctgtggncacttgcttaagga

SEQ ID NO: 136049 - DNA, 277 bp, Arabidopsis thaliana columbia
  unsure (1)..(277): unsure at all n locations
agattcaaatagaaatntngcagccactcattacgaacatctggatacgcagcacaacctcganttacacaaaccacattnactacctcgcaaacagtcaaggaacccgcgaaattncgaatngttcccacgggttgacacctcggccacctcagctacataccaaccggttttnacaacctccgactcangtcactcatttaaggacgtccaacgnctggcacggcacgaggcgntcacccttacggacatcgttttcgatttagatcnttcaaag

SEQ ID NO: 136050 - DNA, 250 bp, Arabidopsis thaliana columbia
  unsure (1)..(250): unsure at all n locations
aacctagatcgtttccgtacttactttnagctattaaacatgccattcgaagcattgctcgctttcatagcagaacacgaccaaatgtttacacccacagagtattccaatctnntnanggtcaatgttcctggaagagatactccttcanatgctcaatccngcctttgggaaatnttttctcattaatgtcaaagccattcgcggnttacngtgattaaacggaagcttttctccagcagccaatttg

SEQ ID NO: 136051 - DNA, 316 bp, Arabidopsis thaliana columbia
  unsure (1)..(316): unsure at all n locations
cttgcaagcgtcnctctcgactgtaacacacatatnacaactngggtcatgggaacattcggctacatggctccggaatatgcatcangtggcaaattaaccgagaaatcagacgtattctcctttggggttgtnctactggagttaatcactggacgtaagcctgtggatgcatcccaacctctgggagatgagagccttgttgaatgggctcgtcctttgcttagtaatgccactgaanccgaagattttacaggctttagnaggttcccaaagctaggtagaaantnatgttgggttttnaaatnttttagna

SEQ ID NO: 136052 - DNA, 441 bp, Arabidopsis thaliana columbia
  unsure (1)..(441): unsure at all n locations
gagnaaatcaaactatgtaccggaaaaacatcggtacttctctggaaatgtttaaaccataacaacccaaaaaaaaaaaagagcaaaaggaaaaagctactgattaatactactacataagaatctaagaaacacagcaacggagacagagagtcaatcccaagactctctttaaatactacccattacaaaagacaaaggtaatatatgttttaatgctgcttgtgcttagtgttcatcttctacttcataatcttaagaaaagcatctcataaaaagccaatcttcaaactgttccaaactcattgccttctctctcccctccacaggtgaaggnaatccntgttaaaattccgggttaataggctttttttggggggnaggncatttttgttgccagtnngggngttcncgggntgggcccggtcncnnnancntgtt

SEQ ID NO: 136053 - DNA, 513 bp, Arabidopsis thaliana columbia
  unsure (1)..(513): unsure at all n locations
gaaaagaattaatcatacaactttatattacagttgaagccgtttaaattaggcctccgcatccactaggaagcatatatcgcaagagaccccaagagtgaaaacaaaaaaaaaaaaagtgaagaagaaaagacatagggcctgatacgggtaaacttgtcgactactgcacaaccaaaaaaaggttttttttcttctgattcttgatcaattaacatcgacgaccggctctgcagttaagagcacctgagtaagaggtcatggtgccgncgagtgaggatgatttggctgataaactcgaagctctggcatagttggctccagctcccagctncagaacgtgtgaaaaatgctccgnttnagnaaaagatctccttctgatctccaattccagtgttccatttnggtgctccctgtgnacttttttnttttgtaccnccttagcaaatgggttncttngggcaagaaacnggttnccncncctttttatngtgggccnccctnccncccntt

SEQ ID NO: 136054 - DNA, 517 bp, Arabidopsis thaliana columbia
  unsure (1)..(517): unsure at all n locations
ggcaaagacagggtatgagccggccaaagaaccaacaaaaagagcaagtnttaaagagtgaaacaatcacaagaatctcagaatcaaaaaaaaaaagagaggctacaaactcattgcagatagtcaatcatcagcttgcagctttctttccgccattgtagtaacccaaataccatctcgcaaacttcttgagacccgtctgaagatcggtggtgggtttgtagccgagctctctctgcgcagaactgatattagcatgagtgaactgcacatccccgttcctcggcaacttcataatgttcctcttggccttgactttgagaagtctctcaagaatggtgncaagntcagtcacttgnacggggcgaagtgttgccgngntttgaaacccgtaactnggccgaccgggtttttttccccactnccagngtntttttagcgtntcaaggccctnaaaacccttgnaaatgtnntaattaagtnaggcccttgcccggtcntggtgccctaaagttaa

SEQ ID NO: 136055 - DNA, 450 bp, Arabidopsis thaliana columbia
  unsure (1)..(450): unsure at all n locations
aatttaaaccgacggtgaacaatttaaatgcttgccgtcacaataaccaccgcaaaaacagtaaaataaataatttttcggtaacaaaaaaaaaaagacaaagagtatggtgatgtcaccatcatcaatcaaacatgattctaatgatgatgatcattcatcgctggaaccatcatgcggcaaaagtcatcgaagcaaacaaaaccgtcaccgtttccatcaaccgtcgctatcatacggatacactcttctaacgngnaccggtcatttcggtcanttccaaaaactctgtgtaanttcctncggcggtattttttcccgttacggnnccacggntnaaaaatttntgggancaccttttttnaaggtttctccggnttaaanaggggcttttanccgggggntnccacgggcaagggtttgaagntttttttaggggtggttaaaaac

SEQ ID NO: 136056 - DNA, 469 bp, Arabidopsis thaliana columbia
  unsure (1)..(469): unsure at all n locations
cctacgtaggtacgnacggttatcgnatnaagtcttgnatatcgnaattncgcgtgccgcctcgtttaaaagcgaaagaaaaaacaattacaccgaaggtaaattcacaaaagagcaagtggaaaacacaaatataagaaagggaaatgaaaactgcaagtgactgatttagatttgtacagagagatcacaacttcatttattcttgagaaatctggtttgatgtgtttagacgttggcagcacttctgaatgatccaagagacttagaacctgaagctctcagaacggattggtggtagaatgcagctatcgcagctccaatgaatggtccaacccaaaatatccagtggtcatcccatgggnttgccccttttttttaggttanggtnagctcccgaaaactcttttnccggggtaaatccncgtcncccggnaanatgggganttggcgccnaaattntcccttt

SEQ ID NO: 136057 - DNA, 405 bp, Arabidopsis thaliana columbia
  unsure (1)..(405): unsure at all n locations
aattcccgggtcgacccacgcgtccgaatagaaccattcangccttttatgaatcggnatcatacgccacataaggcatcaggaagtntctctccattntggtattccatcaaangggcgtcanttatattattgttatgtcatgttactcatattatggtaaggaattaattttgaagtaacaataactatttagtagcttgttgattagtcttgcatattatgattagggatattnacacctcaatacaaatggctggaaaaggngttacaaggagtgaatcgtncagagacgccatggcttatagtcttagtgcatagnccggttttccagtagctatgtgcatcattncaatgggaaggtgaacatttgagggtcatttacgnncaatnganttntcaaat

SEQ ID NO: 136058 - DNA, 541 bp, Arabidopsis thaliana columbia
  unsure (1)..(541): unsure at all n locations
cctacgaaggtccgaacggtcatcgnatnaagcttgnatatcggnttcgcgngccgcgaatnacagctgtgtagacgacagtagtacaacgtcagaatctctctccatctctactactccaaagccgacaacgacgacggagaagaaactctcttctccgccggcgacgtcgatgcgtctctacagaatgggaagcggcggaagcagcgtcgttttggattcagagaacggcgtcgagaccgagtcacgtaagcttccttcgtcgaaatataaaggcgttgtgcctcagcctaacggaagatggggagctcagatttacgagaagcatcagcgagtttggctcggtactttcaacgnggaagaagaagctncggttttcttacgncaatcgccgttgagnagatttccgcggncccgacggccgtcaactaancttcaaatctcaaagttgattngaaacgacgccgaatcggnttttttttaancgntnaattctaaaanctnagatccgtgganatttttaggaanacactttccgccg

SEQ ID NO: 136059 - DNA, 482 bp, Arabidopsis thaliana columbia
  unsure (1)..(482): unsure at all n locations
cctacgtaggtcgcacggtcatcgatnaagcttgcatatcggtcaaaaaaaaaaagacgatgtttctcagtttcgatcattcaattacaagaaatcaagaaccagccgtaaactcaagacttgacattgcagctactaatagacaagattaggctcaaactcggcgaaatcaacagagccagactcaacaggaggcatgagataagcagccaagatctcagaggctaaagaagtaaccaaaggaatcctcttgagggtcttgatgaaggaagcatcatctgtttctcctatagccagcagcttctcatagctcacaaccattctatccagtttcctctttgaactcaggggtctnaacatccagcaccgcagggnatatttttnccgtgggtncggttttcncggtgntggcatgnatttngaacncccttgngtttanccngnacccccggngaananggtnttttgggangttttggggg

SEQ ID NO: 136060 - DNA, 387 bp, Arabidopsis thaliana columbia
  unsure (1)..(387): unsure at all n locations
cgcgaatatttactctttcaatatctatattaagtttgttgtttatcccaggagatctctgaataaaaataagaatagataataatctggtttattccgccatcctgtccaatgaattactaagatttatttttcaatagaatcctctatattcatgggttccntngttcccatcgcttcttgattaatcattaggcccganttctacaatggngctcttatatgaaatcggnggccgcgaattcgcggcgcctttacgctnatttnatttctcgngaaaaaaaaaaaggaggcagaagaagattcttattttatctttacactgttcagnaatcttcggtggncggntaacttgcagangttctggttgtggctngtttttnttng

SEQ ID NO: 136061 - DNA, 552 bp, Arabidopsis thaliana columbia
  unsure (1)..(552): unsure at all n locations
gaaggttgcacggtcatcgcatcaagcttgcatcatcgcaattncgccggtcccgccaattgcaaaaggcactactacatgaagacaaagaatgaatcaaaaagctaaaaatcacaagctaaagaggtttcatcaagacccaacatctgttcgaacaccagaaccattgagacggaaggcatgtgatcgagccagctcaaccgcgtcctgaaccctaagcctggttccttgttgacccaccacagttnctgcaatcgttgcagccatatctcccattcctttcaagtcagagncacccctcaagataccgtataagatccctgaagcatatgcatcttcagcancacatgtatcaactggcacgnattggggacgggnggaatgtnggatggacctcttccttttttacttccaatattatngccccggtttgatttccntcgggtancaaggatnncaaaaccgggnccaaaaggttgggcttaantggtttntttnttcgcttggaaaattnggnnctttncntttttcggggaaaaggtgncaaaaacg

SEQ ID NO: 136062 - DNA, 490 bp, Arabidopsis thaliana columbia
  unsure (1)..(490): unsure at all n locations
aaatgtgttgatagggtaaagaagaagatgagtggtgaagttgttttagctgctagagtttatcgtgaccttctcaaagcagtggtgaaacatgttggtaaagaagatcacaagtctcatttcttagactttgttaagcaagaatttcgaaagaatgcaaactcagagaaaataaaccttgctcgaaattacacatatctnctcaatagcattcactctcacaaggntctgctgttctcatacaacattgcggttgatagaactgaagaaatgnaacgagtgcttaataaatctgcagccagtgtagggcttcgtcttcctgaagttacgggccttgatcatgcattcattccncttttggcctttccgggggggatnaggccgtatngtttcttccatttctgtggncanggccttttgggaaattttggntatattgggttggtaattaagcccatnggccttttcccttnaagncttaangtttnnc

SEQ ID NO: 136063 - DNA, 267 bp, Arabidopsis thaliana columbia
agctggatcatctgccctttagtctcaatcctaatactcaccaataaagaagaaaacattgggatacctctgggaaaacaagagagtcttctcaacaacatgtgttgttttctttctcttattcttaaacacttaataatacaaccctattcttattgtttgtctgttattttaaaatgttatgatttaataataataatcttgttatagggaacgacatgtacttttgataaattgcgcttttattcctgttaatgttaatttctg

SEQ ID NO: 136064 - DNA, 511 bp, Arabidopsis thaliana columbia
  unsure (1)..(511): unsure at all n locations
cagcaaattgtcaatgccgctaggaccgcaaaaatgactagactgaagcaagccaaggaagaagctgaaacagaggttgctgagcacaaaaccagtacagagcaggggttccagaggaaactcgaagcgacaagtggagattcaggtgcaaacgtgaagaggcttgagcaagagactgatgccaaaatcgagcaattgaagaacgaagctacgagaatttccaaagatgttgtggatatgcttctgaaaaatgtgaccacagtgaacaactgagtataatatctcaaggaaaccatcaactgtaaaatggtgtgatattttcagtggatacgttcattcctttctttatattgttttgtggatccagactcgtctgttgctattgattttgaaattgtggcttgaagcattgtattcatttctcagaagncgcttgggcttttnngtgttgtatnaaattgggccaaggggccnaaaaaaaaaanannnaaaaanggggccnnttggggct

SEQ ID NO: 136065 - DNA, 558 bp, Arabidopsis thaliana columbia
  unsure (1)..(558): unsure at all n locations
tangaaggtcgaacggtcatcgatgaagcttgtatatcgaattcgcggccgcctgnaatctgcgtgacaaaagcaacaaattacatatctctctctctgcgcgacttcgaagatcaacatccatggcgtcacaggtaaggtcagtaaaagttggcaatctctcttcaggagcaactgagcatgatattaaagagtttttctctttctctggtgaagttgaaagcatcgatatccaaagtaacgagcatagtgcttatgtcacatttaaagnaactcaaggagcagagactgctgtgctcttatctggagcgagtattgccgatcaatcagtcatcattgagttggctcccaactacagtccacccagcagnccctcatgctgaaacacagagcagcggtcagaatcttttgtccagangcagaagntttttttngcagntgttagcaaaggggttcattnttggggaagatcctttntggnaaagaaaaaanttttttttgggaanattggtttnccttaaccgcnccnnggngttncttnnttngccaaaaatcggc

SEQ ID NO: 136066 - DNA, 452 bp, Arabidopsis thaliana columbia
  unsure (1)..(452): unsure at all n locations
cttctccactgccttggggagagacttgcgaactgcaaagttgtcaggagtttacagtactgctgagctatttccttccacggaaggaattgtgaggaagacaatggagctgatggattacgagccggcggggtctaacaccaattggaatggtttcgtcgcctctcctcctcccgagtctccactttcataacttcagaaaatataaactcgtttaaagttttctctttcgaaacagaatggtttggcttcggataatactgcaataataacacaatatgtnaaaagtttaagntcctactatcctcaattgtgggaaanacncgntcaaatttgntaccaaattttggtttgatnatcaattgggnggnaaataacttttnggttaaanccnncccncaacatcaatttttgggggaatggnggtcccccttttnaaaangtttnccccc

SEQ ID NO: 136067 - DNA, 301 bp, Arabidopsis thaliana columbia
  unsure (1)..(301): unsure at all n locations
agccnattcagggaccgggccgggaattcccggggtgaacccacnggntccggtattttgnattttcccacntaattcaaaaaaatacgtttnaccgaacacacaaagaaaaacgtaattnccaaagctatggagaagaagttnttggatataactgggactgactcggctgagaaaaagcgagtcagagacgagtcattcgacgaagcggttcttgactcgccggaggtgaagaggttgagagatgatttnttcgatgtcctggatgnctcggntcctgaaccagtgngtcaagatctcg

SEQ ID NO: 136068 - DNA, 401 bp, Arabidopsis thaliana columbia
  unsure (1)..(401): unsure at all n locations
attctnctcggcctattgaagttggttatgacaggagtttcngtgatagttatcgacagagttggaaggagacctttacttctttgtggtgttagcggaatggtgatctcatngttcctcctgggatcctactacatgttttataaaaatgtaccagctgttgctgtagctgcattgctactgtatgtaggctgttaccagctgtcctttggccctattggttggctgatgatttcagagatatttcccttaaaattaagnggtagaggaatcaagtctagcagtgcttgtaaattttggngaaacggacttttgacattggttttttnaccgttaaaagnngcttttaggggctggnaaaaattnccttnncattggggggaaattnggnnggggccccc

SEQ ID NO: 136069 - DNA, 515 bp, Arabidopsis thaliana columbia
  unsure (1)..(515): unsure at all n locations
ggaatcatctgtaacttatgaaaatgacagaaacctcaaagagtcgtcctatgatgcaaggacatcatattacagaagcacagtactccctccacagaccgtatctcctaactgttacttccttncaaacaccatgaatcaagagaagcgcagtggtacagaagctgcatctcagccaaaaccgcagtttgtccccacccaatgcaactntgccaaaccagctgagctgaacccaaacccttatgtccaatcacaacacaaggtgggtattgatgctaagctgttgcatgcacaatcccaatatggtcctgctggagccgccgcggttgcagtagcagcacancggaacattggagctgttgggtatgggatgtcttaggatttaggacattgggcggtgttggcttatttnccagaaactcctcttgttataggcgtaatggaatgtaaggattattcggtcaggcctgntttgaanacatttgaggttgtaataaaaatggtcaggtttaccc

SEQ ID NO: 136070 - DNA, 457 bp, Arabidopsis thaliana columbia
  unsure (1)..(457): unsure at all n locations
ttgacattcaagtttcttaacattctccacaatatctcgaactttaagtgacaattcttccgtataatgttcaacattatcgataaaactcaccaatcgatcccgatacacatcgcataatcggtcctgacactcgatctcctccgtaagctctttaatcttcctttccttatcagcctacaaaaatagtaacacaaatctctctgcatcaatcatccaattcttgtaatatcaaagcaaaaagaccaaaaagatgcaaacttggaagacgtacaaaggaaaatcaagtaaccaagtcttgtaatagcaaattaaggcccaaagntgcaaaaaaanaaaaaaaaantgtaccataaacctcactttnttttaggaacccangtntttgtaatggcaatttaaggtgnccccangnngaatttttgngggggnncaangggnttncaagngttttant

SEQ ID NO: 136071 - DNA, 530 bp, Arabidopsis thaliana columbia
  unsure (1)..(530): unsure at all n locations
cctacgaaggtacgaacggtnatcgcatcaagcttgcatcatncgnaattacgcgcgccgctttagggttctgatttgacattagtgtaaagatttgttttttatccgaggggtgcgattgtntagtcaaaccagatcaaatgtcggcatcaacggtgtcgatcaccgctaatacggcggcangactagacggacgccgattcttgccggagagaaaaaatcaaactttgattaccctcaaagcgaatcgcttgcgaacggtggtgttggggaagccggtggtacgagtagagatctgagccgcggtgaagctacccttgatcgatctcagggacaagatttgggtcctgtgacgagaaggtctgtttccgctgcgacggggactaataccaccgctacggagcgccggacgcggaaggttgcgactcctaagnntnagaaagcccggtggaagncagtngtnaggnattttcnaangcctttngtncgnttttaaccattntttgggtaattnaattaacgggnanatt

SEQ ID NO: 136072 - DNA, 471 bp, Arabidopsis thaliana columbia
  unsure (1)..(471): unsure at all n locations
cctacgaaggtncgnacggtcatcgatnaagncttgcatcatcgnaattacgccgngccgcagatgcagtaagnagacctccgcctgatccagtggctgtgcttagagggcaccgtcactctgttatggatgtttccttncatccatcaaaatctctgcttttcactgggtatatattaattagtcgtctctctcacttgtgagaaattctcgagtcatttattgtttttatttatgatgatttggtgcaaaattgaagctttgtttctccagttcagctgatggagagttgaggatttgggatactattcagcaaccgtgcagttcttcttnctttggcctcatagtagagcaaatggggttttagctgtagcagctagtccctggtaaggagnggncangatttntcagggangagatggacctcttaagtgttgggtnttnaagatggggggctntnaagggcccctt

SEQ ID NO: 136073 - DNA, 513 bp, Arabidopsis thaliana columbia
  unsure (1)..(513): unsure at all n locations
cctacgaaggtncgcacggtcatcgcatnaagcttgnatcatncgnaattncgcgngccgctggtgtaactgcttgatatttggaccagctatgctgcaagaataatggctatatcagttattccgttcgtcattgtccagcttccgcagatgttgggctcaacctctggaagacaattgtccgtgttgattgctctaatcctttcagttcttatgttgatctcttactgtgtatatcaggtattccaaccatggatccaaaggagacggcttgcttttgcaaaacacaagcatgttatatcaggaatactaaggcacttgaaacaacatgctctgggaaggcttcttgatgatgaaggtcagcctgatgaacatgtcattcggaaggttgttttttgncaattgatgcaaacaatgacgggcacttgtcagcggnttganctaaagggngnttattcattggggncnanctttnngggtataggtttttacaaaggatgatnctnngggaaa

SEQ ID NO: 136074 - DNA, 550 bp, Arabidopsis thaliana columbia
  unsure (1)..(550): unsure at all n locations
cctacgaaggtncgnacggtcatcgatnaagtcttgnatatncgaaattacgccggccgcctcgncaggnaaccacctcgtcacccttctctcaaggtcaacgccaaggaacctttcaacgccgagcctccccgctcggccttagtctcatcttatgtcactcccgtcgaccttttctacaagcgaaatcatggtcccatccccattgttgatcaccttcaaagctactccgtcacccttactggattgatccagaacccgagaaagctctttatcaaagacatcaggtccctcccaaagtacaatgttactgctactcttcagtgtgccggtaacagaaggactgccatgagcaaagttaggaatgttagaggtgttggatgggatgtttctgntattggcaacggtgtcttgggtggggggaanttgccgtgttnttaagntttttggggtnccaaaagtggctggtttttccaatttngggggcagaaatttttnnttcgtaagtgttncncccntaaggggaaanttggggccctttnangggnaa

SEQ ID NO: 136075 - DNA, 503 bp, Arabidopsis thaliana columbia
  unsure (1)..(503): unsure at all n locations
aggtncgnacggttatcgtatnaagtcttgcatcatcgtaattacgccggtccgcctcattacgcatacgtggacaatataaatagtctgcaatgagaagtcgatatggacatgatactatatgaggtatttnaaccacacagttcctctagattcaaacatgaaagccaggaggataatcttgaggttgtttctttactaattccttcaaaccaagttcttgctcttctaggttcttcggtttaacatcatatacatcgttaaacaactctgtcaatggttgtttctcccacttctccgcagcctgaatcgcttgcagaagctgttttcttgcgttagatcttagcttggattcatcttcctcactccaccatccgttatctttngncccatttccgaaatctntttcancaggggttnctcggccattttcccagtactngngtttnatccggcggccctggtacttaggtggnatnaatntngntgtggnatnatgnccc

SEQ ID NO: 136076 - DNA, 457 bp, Arabidopsis thaliana columbia
  unsure (1)..(457): unsure at all n locations
acgaaggtncgnacggtcatcgnatgaagncttgcatcatcggccgtangnaatgccttgaggcattcggnatagcatcgcggngtgaagtgtcttgtcgttcagataagggaagttcggatgtggaagagcggaagatttgcattttgtctgaaagccgcatttntggagtagtgtgtcaacttcattctggacgaggaggtttatgtggttctcgatcattaatccaatgttggttacgtattgggacgcaacatcgtgtcttagcaatggttgttggatcgcgcataaacagttgatgaggaatatttttnagggtgtttcgttgttctgnggtggggatgggctgcctagagagtagagcatccgcctnanggttaactggcttnaagtcagaactttgttcctgcttcnttcctgggaantttgcccctccttccttttnanttatgccgcc

SEQ ID NO: 136077 - DNA, 506 bp, Arabidopsis thaliana columbia
  unsure (1)..(506): unsure at all n locations
acgtggtacgnacggtatacgnatnaagncttgcatcatcgnaattccgccggaccgcggnagnatgatgatcccgttcaccgcctccgtgtcttgagtgaatacttggatatgtttgaagcaagtccatctcccaatagttcaaagattaaatttcaaaagctattctctgagcctgtcagactggttgagaaatatcctgctggtcgagatggtgaccttaaaaagaagcatatgttgtgcgttaactggctattgtctgagaagcccttggacttgcaaactcaacttgcacttggcttcttggatcatcttatgctggggactcctgcttcaccactnngaaagatcttattgggaagcgggtttaggagaagctctttgtcagtaagtgggttgtnaagaccggacctcttnnaagccccaagttcgggaattttgntttnaaaggttgtttcccanagnggattgttccaaaaagggttnaaggggtnnttcattgggna

SEQ ID NO: 136078 - DNA, 543 bp, Arabidopsis thaliana columbia
  unsure (1)..(543): unsure at all n locations
agcttgcatatcgnaattacgcgngccgctgctgcttcaaactcatgttgataactcttttggtaatagctttgagtttaccaagaacaatatttatggtactcatgttcttttggaagcctgtaaagttacaggacagatcaggaggtttatccatgtgagtaccgatgaagtctatggagaaaccgatgaggatgctgctgtaggaaaccatgaagcttctcagctgttaccgacgaatccttactctgcaactaaggctggtgctgagatgcttgtaatggcttatggtagatcatatggattgcctgtnattacggctcgcggggacaatgtttatgggcctaaccagtttcctgaaaaaatgattcccaaggttcatcttgttggctatnagtgggaagccgtttccatccatggngatggtcctaatgnccggggtacttgnccttcgagncgttcctnnggctttaagggtttnttacaaggggaatnggcatntttaattngggnaaaaggganggggttccntttgtngggngc

SEQ ID NO: 136079 - DNA, 230 bp, Arabidopsis thaliana columbia
  unsure (1)..(230): unsure at all n locations
acgaaggtacgnacgggttatcgatnaagcttgnatcatcgnaattcgcgggccgcgaattaagaagaagaagaagaagaagaccaagctaaagaatggttgcttttttatcagcttggccttnggaaaactttggcaatctcaagtatcttctctacggtccattaagctgcacaagtagtntactcgtgggtctatgtaaggagggtatntcaaaangntccttttgg

SEQ ID NO: 136080 - DNA, 588 bp, Arabidopsis thaliana columbia
  unsure (1)..(588): unsure at all n locations
cctacgaaggtcgcacggtnatcgttnaagtcttgtatatcgtaattncgcgtgccgctccagttcctctctctgtctatctctctcctccttcaataatttctgcaaaccctaactttctcattcggcgctcaagtttctctccaccccttcgagatttggtgcgatgatgttgcgtgctgtttttaggagagcttccattagaggctcttcttctgcttcgggattgggaaaatcattgcaatcctctcgtgttgcagtgtctgctcaatttcattctgtttcagcaacagagacgttggtgcctcgtggaaaccatgctcatagcttccatcaccgttcttgtccagggtgtccagactgttcaaggnctattatcaaccggttaccaaggcacaagcccttgcaaanatggggtcaggncctttttaatctgataagtggggatgtngtggaagctnttgtgcacanatggggaatcaatnactgntggaccnttgccggcttttttnaagaacctngnggnagggngagntgttgggggntttaanaaattaaactgcaaggtnnatggtnttttttccccaa

SEQ ID NO: 136081 - DNA, 535 bp, Arabidopsis thaliana columbia
  unsure (1)..(535): unsure at all n locations
aggttcgnacggtcatcgnatnaagtcttgnatatcgtaattncgcgtgccgccttctttctcctttttctcttttacttcttcatcatcatcttcttcttcttcctcttcgatattcgtcagtgtgtgtattttggggaaaactttgtgagcaaagagcgagaaaatgagcggancggtaagaaaatcgcggatgtggctttcaaagcttcaaggactatcgattgggatggtatggctaaggtccttgtcacagatgaggctcgtagagagttctctaaccttcgtcgtgctttcgatgaggttaacacacagctccagaccaaatttagtcaggacctgaacctntagattgggnttactattaggaagggtattgggagcttggcaattttttgacaaagtccaaggaagcttnttncagcattgggnttccaaagnccggttggcaaaagttactccntgantaaaagccaangtttnaaggctttttgggnggccttaaanaagcnggcnanaatccctcaaggggctt

SEQ ID NO: 136082 - DNA, 531 bp, Arabidopsis thaliana columbia
  unsure (1)..(531): unsure at all n locations
atcgtaattacgcgtgccgctttaagagtagcagattagagaaagactcacaaactaaatgatgaaacaaactggtttttgttctgctgatttcttttgtttaatttcaagctccagatgtaagagcaagctctatttcctccagtgatcgacctttagtctcgacgacgtttcctgcaatgtagaggaccgcaaggacgcagactccagcaaaacccaagtagacactgctgattccgaatttagtcacaacgcttaagaagtatagtccgatcacaaagtttgatatccagtgcatgccgagagaaagagcgacgggcttttgctctgattcgggatgcaaatatctctggangaagaagagccgntaccgggccagcaccaagtgggattgccaggcatttggacagttccanaaacggaagggtccgaattggagcagngctttcnttttgagggcaaggggggtacagatttcaaaggcttccccaaggttnnagtnaagnntttcttccntttncctnncggngc

SEQ ID NO: 136083 - DNA, 361 bp, Arabidopsis thaliana columbia
  unsure (1)..(361): unsure at all n locations
tcctactcctttnagtacacctattcagggaccgggcctgaattcccggggcggcccactgtntcccgatgggcaaatggtttnataatgattggttccagtnattgtttaatgttgtatttacagctctncctgtaatcgtccttggnctgtttaaaaaggatgtaagtncatccntttngaaaagatatccagaactgtatagagagggaatacgtaactaattttcaaaatggggagttgtagcagtatgggctactnctccggtgtatcagtctctggtctgcaatctctccgtgaccacctcanctttggggtgctgtaaatccatcaggcaangtatttgggcctctgggntgnt

SEQ ID NO: 136084 - DNA, 607 bp, Arabidopsis thaliana columbia
  unsure (1)..(607): unsure at all n locations
cgganccggaaattacccgggntcgnacccacgtcgtccgtaaaagtaatctcaaaggaaagcgacaattttggaaaattcaacgataagctttataattttcctacttatgagtggatgtgtgaagagtagggaaaaagtacgaaaggaaaatatgagtgaggagaagaggaagcaacacttcgtgctagtacatggtgcgtgccacggcgcatggtgctggtacaaggttaagcctcttctcgaggctttgggccatcgtgtaaccgccttagacctagctgcttccggtatagacacaaccaggtcaatcactgacatttctacatgtgaacaatattctgagccattgatgcagctaatgacttcattgccgaatnatgagaaggttgtactcgttggtcatagctttggaggtttgagtttagccttagccatgggtaagtttnccgttaaaatctctgtctctggctttcgtggcttgatttcatgcccgcaccaacaattaccatcgttcngngggggaaaggttcaagnagcatncnccnnanggttggttggcntnggtcgnncatttgtcanaaatnccgntttcttttttttnnaa

SEQ ID NO: 136085 - DNA, 411 bp, Arabidopsis thaliana columbia
  unsure (1)..(411): unsure at all n locations
tccccgggtnaacccactgcgtccggntgaatttcaacatcgtccngatttcagccgagtttnaacgttaccgtnagatcacgtaacggtaacggtaaaatcggggtttactacgagaaagaaagctctgttgatgtgtattacaacgacgnngntataagtaacggtgttatgccggtnttttatcagccggcgaagaatgtaacggtcgttaagttggttttaagtggttcaaaaatacagttgactagtggtatgaggaaggagatgcgtaatgaggtgagtaagnaaacggtgccgtttaagttgaaggattaaagctccgggtgaagattaaaggtttggtnctggttaagaccgtgggcctatgnttnganaatggttgcctgnanatgtaaccgggtgggtaaa

SEQ ID NO: 136086 - DNA, 452 bp, Arabidopsis thaliana columbia
  unsure (1)..(452): unsure at all n locations
cgntaccggnaattccccggcgtgcgtacccacgccgtccgggtgcattgggtcaagagcagagaggcggagactcaagtctgtagctgagaagaagttgacattggaggtaccaaatccgtcttctgttgaagcagatcagatgcaatttnccggagtttcatcagatggaagatgcggtgataaagtggtgatgaagtggaatcccatgatgcttgatgttgcaagccctgtgtcttccggagcagctactgttgtctgctaaaaggattttgtaatnctcttcgaggatttatatatataatnnntttncttgtattttttcggctgattgtatttaaaaagtttcttaatgtttgagnaaancaaggataaagccatttttnaacctgttaaatnggnattttaaatgtnaaaagccttgttttgattgactaangggaaaggggang

SEQ ID NO: 136087 - DNA, 282 bp, Arabidopsis thaliana columbia
  unsure (1)..(282): unsure at all n locations
aagtctattgtttggctgtcttaaagcaagttaatnctgacttcagcatcatcggacgttcgtttttgtnctttttttttcccacaatcaacacaatttcntcttgtacatntnaaccaatncctaaatcagatgaaatttttcntttatgttagaaaatttcatgaccaacnacagaatcgtccacgatcgtaagagaaggatcttaggatggaaaaaatctaattgtaatgatacnaacggtttcacaggaccnaccgnttttagaaaaccgccatcggt

SEQ ID NO: 136088 - DNA, 509 bp, Arabidopsis thaliana columbia
  unsure (1)..(509): unsure at all n locations
antaccggcaattncccgggcncgtacccacgacgtccgcaacacactcatcgatgggctttgtaaaagcaggcgagtagaggacgcggctcagctcatggatcaaatgattatggaaggacagaaacctgacaagtacacatacaactcgcttttaacacatttctgcagaggaggtgacataaagaaagctgcggatatcgtgcaagccatgacctcaaatgggtgtgaaccagacattgtgacctatggaaccttgataagcggtttgtgtaaagctggtagagttgaagttgcaagtaagcttttgaggtcaattcagatgnaagggattaatttgacaccgcatgcttataatccggtgattcaaagggttgtttagnaaagaggaaaccaccagnagctataanttttgttttggggaatgcttnnncagattgaagctcccccagttnncagtttcctacanatncgttttccctgggctntgnantggggnnggccatncc

SEQ ID NO: 136089 - DNA, 360 bp, Arabidopsis thaliana columbia
  unsure (1)..(360): unsure at all n locations
ggcaacagcaaacattctggagtcatcatctcaggaagttggtgggaaaccctactattacttgtttgttttgacaagaacggctgatggagacgaaggtgggaagcatcagctgatcacagcaaccgtgaatggagggaagctttacatctgcaaagcacaagctggagacaagaggtggttcaagggagccaggaaatttttcgagagcgcancacttctttcagtgttgcttgagtgaaagcaacacaacgtaacantgctctgcttgctttntttcattngntttctngtaaaanttgggaattgnaacnggagctttttnngacctttcaagggtgtntnaacccttttggggna

SEQ ID NO: 136090 - DNA, 250 bp, Arabidopsis thaliana columbia
  unsure (1)..(250): unsure at all n locations
atgcaaacnatgatgctgacttagaagagtttatgggaaatgatggtgaagcaagtaaccgnagtagacgtctctttnccatttattttgatgttccaagagattgcttttncctcccttgtggtcattccgtctcctgtnatgaatgcgggacaacgntncaagaggctgattgggagttgtccaatatgtcgaaggnaaatgtaggaaagtgaagcgatctttncagtgtaaggtgntcaaatttaac

SEQ ID NO: 136091 - DNA, 418 bp, Arabidopsis thaliana columbia
  unsure (1)..(418): unsure at all n locations
cccacgcntccgcaactntacattctcacaccaaggntcctnaggctatcatacgggaagctgacattnttattgctgcatgcggacaagcccacatgattaagggcaactggataaagccaggggctgcagtaattnatgttggaactaatgcagtcagcgacccgagcaagaaatcaggataccggttggttggagatgttgatttcgcagaagcttcaaaagttgcaggtttcataactccggtccctggtggtgtaggcccaatgacagtggcaatgcttctcaggaacaccgtagacggtgccaagcgtgtcttttgggcggggtaaaaacaatctacctgtntttnnttaaggaancccaggttttccccccttcnaaaattggnctcntttgggggnngttttttccccna

SEQ ID NO: 136092 - DNA, 436 bp, Arabidopsis thaliana columbia
  unsure (1)..(436): unsure at all n locations
ggttatattcttngtcttcttaatctttcaagggttcttnacaagcaatgngagtttgaattctgacaattcacctgcaccaaataattcagctaataaccgtatggtctctgtncagttctacaatgagtttgctcctcgtgagagaatcgatcccagccctactacttctttcaggtataagagagtctcaggtgcagacaatgaagaaaacacaagagaagttaccagatgagtttcttctctttggattcttgtaaaatgtaaccaaaaacactacttatgttttggtttgtccgtaaattctngacatcactctattgtncctttganctgtttgtgttcacatgtttgcntctctgtaactctnctggnaaanattccttatggntgaatcnncncaatttttgggccctagnttcggggttagggttnt

SEQ ID NO: 136093 - DNA, 436 bp, Arabidopsis thaliana columbia
  unsure (1)..(436): unsure at all n locations
cccacgcgtccgcccacgcgtccgggtggatacaccatttctnacaactcaaccggtaacaaacccgatgtgatcttgatcggaactggatcagagctagagattgctgctcaagctgcagagaagttaagggaacaaggcaaaagtgtgagagttgtttcctttgtatgttgggagcttttcgacgagcaatcagatgcatacaaggaaagtgttttgccatctgatgtatcagctagagttagtatcgaagctggatcgacttttggatggggaaagatcgtcggaggaaaagggaaatccgattggaattgatacgttttgngcaagttcanccagcagggaagctttttaaaagngtttgggnttcnccnnttnangctnttggtttnanggagccaaggccncttttttaaaaanggntttttncagggcc

SEQ ID NO: 136094 - DNA, 359 bp, Arabidopsis thaliana columbia
  unsure (1)..(359): unsure at all n locations
gnnacgntgaaatccacagaggagattattgantctcctttgaagtcancnacagagaaaggnctgtntaaccatggtgatnctgtggtggctctgcaccgtattggagctgcttcggttatcaagatctgtgtggtgaagtgattttcctactaaatatcttgaatttaatncttggttaatgtttctngatgaaataatccaataaagaaccagggaataggttcctgaaagtnttttgtgtggggcatttctcctctttcttttgctgttttagcttataagattatgaatgcactaatgactctngctcatattattatagtttaattagccaataatancaattttaaaggcat

SEQ ID NO: 136095 - DNA, 406 bp, Arabidopsis thaliana columbia
  unsure (1)..(406): unsure at all n locations
gttctagatcgnaancggccggcctttttttttttttttttttaaaagaaaacttgaataatggggaaattttntngaatttnatgagcctagtaatgtgtgggaggngggggagaagcgtagatgtagacaggaggtgggggagattttnccggtggtggtggagagctgtaaaggtatggtggtggtggggatttcaccggagnaggtggggagtggtaataatatggagnaggaggagatttcacaggaggaggaggtgnatggtagtagtatggtggtggtggggattcaccggaggatgntggtgaatggtaagtaatatggttggtgtggntcttccccttcatngggaccgcctctcctccgttttttggggnttttattantngtataaaaccccttt

SEQ ID NO: 136096 - DNA, 445 bp, Arabidopsis thaliana columbia
  unsure (1)..(445): unsure at all n locations
gttccagacgaatgcctcgaaaagtttgcaactttagcgctgcgatnctgcagagaggagacagatgcgaggccttcaatggcagaagttgtaagagaactagaaatcatatgggaactgatgccggaatctcatgtagccaagacagcggatctctctgagacaatgactcatccatcatcgtcatcgaattcttcaatcatgaagcatcattatacatcgatggatgtctccggctctgacctcgtcagtggagttgctccctcagttgcacctagatagaaactttcttcggctcatacaccatacactgtttctttgattattcagtgtgattttnttgttgtnctttcctttgtacagggaaaatgnttttaaagcggtgtaacgggntnntntngcagccattttaaaagggcngncctttgggnngtntcngnncccg

SEQ ID NO: 136097 - DNA, 391 bp, Arabidopsis thaliana columbia
  unsure (1)..(391): unsure at all n locations
ccgggccggaagtnccggggtggcccactgcgtccgggagttggaacntgcatggtcantgcangccatcgtnaactttccagcagccgtgactcttgccagcaatgcggtgactctngttccggccccggtggagttggtggcttagactttggtaatttcggtggcagagccatgtntgctttcggattcaccaccggctccgacgttcgtcccggtgattggtactgcaccgtgggaaactncgggacacacaacttcgccagtngctccacctgcttcaaatgcggcactttcaaggacgagaccggcgctggaggcggaggtggtggcatngnnggtncggccatgttttanggcgncatttatgcggtctagagtccccggtaaa

SEQ ID NO: 136098 - DNA, 487 bp, Arabidopsis thaliana columbia
  unsure (1)..(487): unsure at all n locations
gtcgtttgcttttnatttggacgccacatgctcgatgaaattccccaaagggattgtnagtggtaattaacgtttttcctctttnccttttccgcggcagtcgaatttntggtttactcgtgggttgagaatcaggatgctgccccanaggttgaagaaggctataacggataatccaaagangcttgggaatttaattgacctcgtgaatctnccatctactctacggaactttgtnggtcaatctcagatttcccgtctgggttgtttcatgcgtgtntggtcctatatcaagaccaacaatcttcaggatcctaagaacaagaatgtggtgattttgtgatgagaagctcaagagcattttgcctcggggaagcagcgagtggantagtcgntcttcctnctcttatcaagttgcattttcccaaagacaaaagaggattctcaggaaattaactttncttcttnggggnggtttnnctgnngt

SEQ ID NO: 136099 - DNA, 351 bp, Arabidopsis thaliana columbia
  unsure (1)..(351): unsure at all n locations
accctacgnaggtacgtacggtcatcgcatnaagtcttgnatcatncgaattacgcgtgccgcttcagtttcacattacacattctcttgttcaaaatcattacactcgcaagctaaagtaatccgtttcaatattagcctatctcctcttagtatccatatcctgagttgtccattgggttgccgacgggaactggttcaggttccttgatctcaacaacaacgcagtccgacatcaagaaagtctttgcaaccgaagctgcgtgttccaagcaacatcttacaaccntttntttggntccgatgnttccntgnaggccattnaantccggggaactttccgggnttnaa

SEQ ID NO: 136100 - DNA, 282 bp, Arabidopsis thaliana columbia
  unsure (1)..(282): unsure at all n locations
ttacaatgagttttacacacaaatttaaattagacagacataaaaccacttcacagacaatcatttggtaaaattattcagacatgtaaaaaaaaaaagactttatggtaagaaaaaaacagaggactatactcttaacatattggaatgggagctccgttccactcgttgagacattccatcatcggntcaattgatttttacccttcacaaatcggccgtggnaancnttntnngnaccttttttttnccgggggggggggaantttttttttccngggc

SEQ ID NO: 136101 - DNA, 548 bp, Arabidopsis thaliana columbia
  unsure (1)..(548): unsure at all n locations
cctacgaaggtcgaacggtcatcgntcaagtcttgatcatcgnaattacgcgngccgcgccacttatcaaatcctaaatgtttatgagtatacaacattgtagtttacaaattatgaatgaatttgtaagtgtacaacatgccatacgtgttggcgatagtcaaaccgcagaacaagaagccaactcggtttctagattttgttcgataagcagatcgctggaaatcgctgatgctantctgtgtcgtttcaaaatcaaagaagtggcaatttttgcggattggtagttcaagacgattaccctactctcatcgtctaagtctatcctcagcttttcggtgttgcagttctctatgagctgacatagatgtctcaggattattcacttctactccgttcactttatcacttgtaggtctncgagacggtcgtatccngtgttgaaatcatccntaacancntggggggcattgcaaagtttttncccgcttttttgggaaanttttattnccgggggcaatntngggggggggttttccaccttccat

SEQ ID NO: 136102 - DNA, 540 bp, Arabidopsis thaliana columbia
  unsure (1)..(540): unsure at all n locations
ctacgnggtacgaacggtcatcgcatnaagtctntgnatcatcgnaattacgcgngccgcccgggnaactgcagaatatgattaaccaaaaccgctcagctagatttggctcgccgcaagctggctcagaggatcaagtttcatgtgccctttgggatcttattcaatttgtaggggagagagcccggagaaatacagttcttttgatggacagagataatgctgaagttttctacagcaaggtatctgaacttgaggaagtgttttactgtctgaacaggcaactagaatacataatcagagctgaccaaccactaggaactcaactgcagagagcctgcgaactctcaaatgcatgtgttacaattcttcagactgccttaggttncaaaaacgngcatcaaatgtggtatccncnctttgaaggtttaanacctttgnactctcagnctgttgtatgtaattggctttggtgattcggnccttatgcttcatctgttacttaggnttttgggttgnaatcttgntaanagnanttca

SEQ ID NO: 136103 - DNA, 516 bp, Arabidopsis thaliana columbia
  unsure (1)..(516): unsure at all n locations
cctncgtggttcgaacggtaatcgnatcaagtcttgcatcatcgcaattacgcggnccgcttttttctttctttcttttttctcattgttgattcttcttcatacgatttttgggtaagatatttcattattggttatggggttttcagtatttggtagttgcaggttaaagtttttgtttttcttcttcttcttgtggtttttttctctgttaagctcttttagaaatttacctaggatttgatgtcagtggtatctctctgtttattggtatttacaagaatacagagagaaagaagagattattattcangggttttgtnctgatttttgaaagtttctgtctttgaaactcactgattttnttaatattngggaattttttgaattcagatgttagtatgaggttttcacaagntatggntaatgagnatgagagccgntaagaggatgatcccccaagggtgtnattnnaatncncttcaagaggcanctntnnaagggtggtaggcaatt

SEQ ID NO: 136104 - DNA, 489 bp, Arabidopsis thaliana columbia
  unsure (1)..(489): unsure at all n locations
ttgtaaatatatttatcaaganttttttttgttgattcaaaaaaaagttgtgtagtaattcttggaatattaatgatacctagaaaaatagctatagacatttgtncgatgcaaaatttaaaaaaaaaaatggatttacgaattaatcgggtatttttccttttgaatgtctgccaaattttttttgatgactcaattattttagaatcataacgcagtttggtacaactattagttaagttttgtttttcttttgaaatttcttctatttgatttctgattgtcttttttctatcaatcaaatttttgattttnttttcgctaagtggaagaattttgtccactnccaagggnttnatttttgancaggtaggtncatgaatcaacctgnttaccttaataattggannccnttttaagggtccattnaatccaaatntttcnccccgggcccaaatnaatggnttagggttncggtttgaaaatccc

SEQ ID NO: 136105 - DNA, 531 bp, Arabidopsis thaliana columbia
  unsure (1)..(531): unsure at all n locations
catcatcgcaattccgcgtgccgcggtntttcgcccacaaagagtattttatatagaataaagaaacttgtgtgaaagctctttnatttgaccaaataagttgctaaaagcctttacattgggggatctggttttggtacaacaatagaagtcttcttttnctcaaatctctctgcgatcagatccgttgtgtatacttgcattgaccaatgggaggttgtatctctaagacttcgtggagcaatgaagagcctatgcatcgcccatgtcttgggatgggatgttgtgggagcaaaatggggaagagaggtttttnagacccgcatggtttcacttcataacctttggtttctataccgantcgggatccatttggggaatggaaaagntgcaggnanttcttgcatttcaactnaacnagggccgaatgggtnttatccaggccgcattattttttgggaagntttnattnccgaangtttncccttttcnggttgtttnntggcatgggccccntggcaccttnttccc

SEQ ID NO: 136106 - DNA, 516 bp, Arabidopsis thaliana columbia
  unsure (1)..(516): unsure at all n locations
tggttgcacggtntacgnttaagtcttgnatcatacgcaattncgccggnccgcccgaaacctgtgttttcccatcaccaagctttctctgaatcgccgccgtgtttacatttactgttgttaaggccgagagatagatagaaaaaaacatctgtgcgattttnccgcctctccctaaaatctttggagctccttcgtagttagccggaggtgaagtacaataaaagaaagaagaaagtccaagtgtctcttctcatctcttttctccagtagataatggaggggagattggctaatatgtggaggttgactgtnaacgaaagtaaattcgtggaaactgcgttgcaatctgagctcagagtagatggtcgtggcctttnatgattatccnaaagcttacctattaagttttggcaaaagaatatgggtanctccggaagttcaactttngtcaggctcatgtaatgggttnggtgctngccnagtngtncacccttacaaaggcagnccnatnna

SEQ ID NO: 136107 - DNA, 489 bp, Arabidopsis thaliana columbia
  unsure (1)..(489): unsure at all n locations
acctacgaaggtcgnacggtcatcgatnaagacttgnatcatcgnnattacgcgngccgcgacgtnaattagtaatattatccgtgaacgtattgagcaatataatagagaagtaacgattgtaaataccggtaccgtacttcaagtgggcgatggcatcgctcgtatttatggtcttgatgaagtaatggcaggtgaattagtagaatttgaggagggtactataggtattgcccttaatttagaatccaataatgttggtgttgtattaatgggtgacggtttgatgatccaagaaggaagttcagtcaaagctacgggaaaaattgctcagatacccggtgagtgaggcttattttggggcgtgttataaacgccttggctaaccctattgatggtccgnaggaagatttccncttnttnaatctcggttaatttgantcctcctgnccccagggnttntttccgagacgttctgnattntnggcc

SEQ ID NO: 136108 - DNA, 479 bp, Arabidopsis thaliana columbia
  unsure (1)..(479): unsure at all n locations
tcataaccactaataggattacctcgtgatttcaaaaaaaaaaaaataaaaaaaaaantagagcgacctgttgcaaaatattncattcaaagtctaancaaagtctatgttacgatgagtgggatattgatttnccctcctctncactacttncctctgccttgtctttctcctattgcattaccaaagagaaagcagagtgaaactaatctttccagccttctttactgagtctnctcggagcaagccctctagaggagaggctcggtgtgagtggtaacaccggagtatttcggctgtcccttcgtctncaaccaccattttcaatcgtcccaatnaatctnccccagttatttgtcccatccatnaattaaacnattttctttgggtaaggttttgtnaacnaattggggggtagngggttgggaattccanatntagggtttgggatttnngtggtttcccgggaattgtttttg

SEQ ID NO: 136109 - DNA, 524 bp, Arabidopsis thaliana columbia
  unsure (1)..(524): unsure at all n locations
tgaggttgtacatgaattcaggttttataagaagggagtttttacnagcaatacatgtggtaacactccaatggatgtaaaccatgcagtgttagcagttggttatggagttgaagacgacgtcccgtactggcttataaagaactcatggggaggtgaatggggagacaatggctacttcaagatggaaatgggaaagaacatgtgtggtgttgcaacatgttcatcgtatccggttgtagcctgaggctgatgtttaaacccgtttacaccttacaagggactgaggcttttggttacttgggatgaatggttgaattgttgtgaatttatatcactagggacttcggagtaaattggttttttaaaccntgtaatgggtatggttnccaaataataangggtgacnccccaatagnccgccggaaaaaggaaaccggttnccngntaatggccaaagggccctnntgccctgaacccgatgttaacccccgtnacctttcaaggggcctnggcctttnggt

SEQ ID NO: 136110 - DNA, 492 bp, Arabidopsis thaliana columbia
  unsure (1)..(492): unsure at all n locations
gcttcagaagaatgctttgcttgctcgcacattggttcgcaccaccattgctagatatcagacaaacaatgtggtcgatcctaggaccttgatattcaagaagaacatgtatgggaagcctgaggtagattggcagagttataagaactgtgatagcccaccattgcattttaacatctcccacacagattcattgatttcctgtggagtgactgtacatgttcctgttggtattgatcttgaagaaatggaaaggaagataaaacatgatgtcttagcattagcagaaagattttactcctgctgatgaagtgaagtttttggccagctataccagaccccggaagttcagcgaaagggagnttattaagntaatggnccccttaagggaagcattattgtgnnagcanttagggaaagggctttctctggggtgnnnccttttaattncctccncnnatncnaggncnaaggccggggncaaantggagg

SEQ ID NO: 136111 - DNA, 459 bp, Arabidopsis thaliana columbia
  unsure (1)..(459): unsure at all n locations
gggaaagtagccaacggagagtttttncaggtttacttgaaggagaatttaccgcaaaggctgcattattccgatagtnctcggattccaccgatcatcggaatggtgggagaaggtctaatggttaaacagaacagaacatacgttcaagaatgtnctggaactcatggatacgataatatgtcctttcctatgagatcaatctttgtnggatatggtccaaggtttaggagaggaataaaagtgccatcgttcgagaatgtncaggtctataatnctgttgcagagattctnggactccgaccagctccgaacaacggttctnctttgtttactcgtagtcttctcttgccattngggggaacatcacaagtaggnatgnagggtaaaacaataatnctaanggtttgtngcaagtatggggggtttcttttcggnntncattttnaaggttttagg

SEQ ID NO: 136112 - DNA, 349 bp, Arabidopsis thaliana columbia
  unsure (1)..(349): unsure at all n locations
gagaaaccagacaatggagangtgcaggatttgtctgaggntgcgtcatcaccatgatcatgattcttaaaaaccccaatgatctctctctgcccttttttgtggaagaggaggggaggtgaaaagtgtttctctttnctttttttttttggcttggagatggccatggctgaaaacaatataggatgaaaccagtgatgttgtcacaggtttctcttctgtttttgactctgttaataaattttaatcagacttatcagaggaaaaatagagtttgtgttgtgacactcactaagagctctttatgnatgacaaaaaaaaaaaatnnantngtgtgntgntatntnga

SEQ ID NO: 136113 - DNA, 429 bp, Arabidopsis thaliana columbia
  unsure (1)..(429): unsure at all n locations
ggtgcctcanctcactcagattatggaatggtcactctncttttgactgatggagttccaggacttcaggtttgtagagacaaatcgaaacaaccacacatttgggaagatgtccctggaattaaaggggcgtttatagtcaacattggtgatatgatggagagatggaccaatggattgtttcggtaaacttaaaccagtttacctagtcgtgagtncggttttnatgcgttcttcacatttcgtatttccttgtaatgggtttaggtctacattgcacagagtgatgccggtgggnaaaanaacggtactcggtagcttttgccttggtttctncctttccaanttnntnttcaaatttgataaaagttttagggtntttaaaagggaaaagttttttntnaggngggtttcttccttnggncccaa

SEQ ID NO: 136114 - DNA, 510 bp, Arabidopsis thaliana columbia
  unsure (1)..(510): unsure at all n locations
gcgggattacccgctgagtttaagcatatcaataagcggaggaaaagaaactaacaaggattcccttagtaacggcgagcgaaccgggaagagcccagcttgaaaatcggacgtcttcggcgttcgaattgtagtctggagaagcgtcctcagcgacggaccgggcctaagttccctggaaaggggcgccagagagggtgagagccccgtcgtgcccggaccctgtcgcaccacgaggcgctgtctacgagtcgggttgtttgggaatgcagccccaatcgggcggtaaattccgtccaaggctaaatatcttnatgtttnaagagagaaacacttatgtttgttttttcagtatttcagncagaatgaaatccttttttgtacttggtaaacntgtttgnactttacttctctctgggcaagaacggttccaacaaaatttggnaatnggaaaagtttccgngggaccggaattttgntaaatgntttnnataaattaaaaccnttntt

SEQ ID NO: 136115 - DNA, 441 bp, Arabidopsis thaliana columbia
  unsure (1)..(441): unsure at all n locations
atcaattgctgttgatggttcggatattttaactgctgctgtggaagcggcgaagaaagcctcggctagattagatgcgaaagaagtggcagcgaaagataaagctaagaaagaggaagagagaatcgcagagttgaagaaagtaagaggagaaaaatggttaccttctattgaaagggcaatgaaaaaggaaatgaagcgtatcaaacataccgcatggaagtctgcaatgtcgtgagctttcttcttttgaacttattatcaattttggagtctcattaattgaagaagaaacacagaacattcacncttggctacaaaacttttacctggaagaagnttatggaattatttatggtagngttgggnnggattttttgnccnnaanggagnggnggggagtncncccgganggggccncctggggcccttttcccnang

SEQ ID NO: 136116 - DNA, 542 bp, Arabidopsis thaliana columbia
  unsure (1)..(542): unsure at all n locations
cccaagtggggtagaccgatttaaaaggcaatttgctcatcttgaagaaaatcaaggtaaaccaggagcagcaggaggaggaagaagtactgcacttcacagacatcatgcttccttgccaagagagagagttcctgctccaaatggtgaaactgcagaagaaagcagtgatgttgagagaagagcagcagctgctgtggcttcaaccttggaatccgaggaagcagacaatggaggaggttacagtgctcgtaacctccattgaagagtgcaagcatccagcggttctaaatgcattggtgtcccaatcctaaaacttgacaaagagggtaccattagcctgaggnagnagattattgaacagttgcagagtttaccgnntaagttgcttccccttccacattcctttaaanggttnggaattttttcccttcccttccctttttccncgaagtttccnggngaaaaaatnggtccccctnnaccaatnntccccnggggngggttnntttggggattaaaagtttggggggttnnnacct

SEQ ID NO: 136117 - DNA, 577 bp, Arabidopsis thaliana columbia
  unsure (1)..(577): unsure at all n locations
caagaacagctcatatttttgccatggtgagagatgaaggagttggagaggtgaaaggagatattgtcaaatacagattaaccaaagcggacgaagagaatctgacaattgggttaaagcaagcactgaggatcctagtagcagcaggagcagcggaggtaggcacatacaggagcgacgggcagagaatgaagtgtgatggaatcaaacagaaagatctagaggcatttttagataccgtaaacgcgccacctggagttgtgtccatgagtaagcattggactcaatcctttacagcgcatcaaataggatgttgccgtatgggtgccacagaaaaggaaggagccattgattggaaaaggagagnacctggggaggcagaagatttgtatgcctgtgatgccaagtggttctgnctacagntccttgggggttaaancccatgatnaccggttcagtccactgnnttcctgnatatnccancaggatngccgngttaatgagaagngnagaagcctgggaaaccccaaagntcaaccttgtttccttttnccccatggtnaagaacacctccccc

SEQ ID NO: 136118 - DNA, 599 bp, Arabidopsis thaliana columbia
  unsure (1)..(599): unsure at all n locations
gtntctnnttnnttgnaccancaaggaccnggcctgnaatncctgggntacccacacngtcctggccagaacaaaaaaaatggtggagcaaaagagatacgctctgtttctagcgactttggactcagagttcgtgaagaaaacttacggaggataccacaacgtgttcgtgacgacgttcggagacgaaggagagcattgggactcctttagagtcgtcagcggagagtttcctgacgagaaagatctggagaaatacgatggcttcgttatcagcggaagctctcacgatgcctttgagaatgatgattggatccttaagctctgtgatattgtcaagaaaattgatgagatgaagaagaaaattcttggcatcctgctttggtcatcagatcatagccagggtaagggggaggaacagtccggaagagcaaagaaggggccagaacttaaacttggagacataaccaccgncangntgcggntacncctggaaagtactccggnaccggatncctgnagctagggtcancaatgccccaggccaaggttggggccccgaacgggaaaggggttngatcccanaaccccgggggggt

SEQ ID NO: 136119 - DNA, 520 bp, Arabidopsis thaliana columbia
  unsure (1)..(520): unsure at all n locations
aatttcttgaaaatncccgcctattcgtctttgaaacctattgcaaaattcatcaaaggattgacatgggggtacttgctgaaaaattgaatctgaactatgaggaggccgagagatggattgtgaacctaatccgcacctcaaagcttgatgccaagattgattctgagtcaggaactgtaatcatggagcctactcagcccaacgtgcatgagcagttgataaaccacaccaaaggcttatcaggacgaacatacaagttagtgaatcagctcttggaacacacacaggcgcaanaactcgctagtcaaaattttgctgtggaagcctttnccttgataaacccaccttcnggtgaccgggattattttccttttcctggccccgggtccccctttacctttgnaaaggtttttanggngtggcccattgaaangtgggnccncanttgggaattttccacccaancggatttggtcccccnnagnnttaanggtttgggggcccngaaatccgggct

SEQ ID NO: 136120 - DNA, 334 bp, Arabidopsis thaliana columbia
  unsure (1)..(334): unsure at all n locations
ctcaaatccttaaaaaagctccagcattcgaccgatgaaccgaaagaagaaatcggcgccaaaattagcgagattcggggagatatagtaatgaggttgatgggaatttcagccaacgttgcggatttacttatagcattggcagaaattcacccaaaccccttttgtaaccacaccattacacncggtataagcggtttagtttcagcttgggccggttggtataggaacnggccatcgtgagatgtaataaaatcaaatgtttgttgttttgaatgaacgtatcaaacgtgtaatgtaactcacttgaatatatgaaacatntctatttnac

SEQ ID NO: 136121 - DNA, 310 bp, Arabidopsis thaliana columbia
  unsure (1)..(310): unsure at all n locations
cccacagcagccaggcaagatgtcgtcggctcgttcnngcgatcacaaagctaaagcnggctcgatcctttggggagangcagattggtgcatcgcgttcggtggtatcgactcgaggaccggcgattcggtacntcagtnacgataaaggtcgtgtgctcagcgaagaggaacgcgcgaaagagagcatgtatatccagaaaattggagaagggagaagacttgggagaaaggaagaagnaacctcggagncaagnttaagntaagatgggtgaagaaaagggaagttgnccaaccaaggaaancctgg

SEQ ID NO: 136122 - DNA, 442 bp, Arabidopsis thaliana columbia
  unsure (1)..(442): unsure at all n locations
ggttataagagaagtgtacttgatattcggaaaaaaaaaaaaccaaaaacnaggtataatttgaggtaaatacaaaaacnaggtctaagttgaggtgaaaaaaaacttaagaaggtctagtataaagttatttgtaagtatgactttctctatttaatccaaaggtaggttaagattattcaaacntcaaaggcaaaaccaaatgagcttcgtgtggnccgctgcggtgtgggtcatagctgtagccgctgttgtgatnagcaaatggttataccgatggtcgaacccgaagtgcaatggcaagttaccaccgggatcaatggggttaccgatcatcggngagacatgcgacttctttgagccccatggattancgnnttncaccctttggcaagaagaggntgtnaaagnacgggcnattnttnggncaaatatttttcgg

SEQ ID NO: 136123 - DNA, 394 bp, Arabidopsis thaliana columbia
  unsure (1)..(394): unsure at all n locations
cgaaacatagacccaagangtggctattaacatggacccaacaacaccaagacaattcgacaacgtttacnacaaaaacttgcaacaagggaaaggattgttcacntcggatcaagtcttattcacggatcgtcggtcaaagccaaccgttgacttatgggctaataatggacagttgtttaatcaagcttttatnaactcgatgatcaagcttggtcgtgttggtgttaaaacngggtagtaatggtaatatccgtcgtgattgtggagcttttaaattgnntttaaatatanccggatnagatttggttaattggaattggggggataggatggggccagggggccccaaaaanccggggncncccaaattggaaaattggnaaaaancccc

SEQ ID NO: 136124 - DNA, 497 bp, Arabidopsis thaliana columbia
  unsure (1)..(497): unsure at all n locations
agacataaaaccacttcacagacaatcatttggtaaaattattcagacatgtaaaaaaaaaaagactttatggtaagaaaaaaacagaggactatactcttaacatattggaatgggagctccgttccactcgttgagacattccatcatcggatcaatgattttaccttcacaaatcgccgtgaaaaccttgtcgaactcttctccaggcgacgtcactttctctccggtcaaaagctctgttccaagctcttccctcacgaatctatacaatggatacgacctacattccttgatcctgttcgggatagccgatgttccgttatcggtaggntgntcttgctgnttccacttctttcgggaggaatggcttaagncccccccggaaggtcccatcttatggagnttgaaggcactggattcttcnaaccnnnccngtggttaagcanggggnnaaaaattggccaggtcngaataanggggnggtnggnaaagna

SEQ ID NO: 136125 - DNA, 228 bp, Arabidopsis thaliana columbia
  unsure (1)..(228): unsure at all n locations
ctttatatanactcaacagcaaggnacaacaaagatacaaacggtgaaaatttgtatattcaaaatttacatattccaaatcgaaaagtaaaaaaaaaaaccaaacanacaaaaggttctcctctcacagaagaangagacctcaaaaaaaatccgagaaaaganggggcgcacgngcgtggtcaanccgnaccagccanccaccgtagatctctcagataccatcgg

SEQ ID NO: 136126 - DNA, 547 bp, Arabidopsis thaliana columbia
  unsure (1)..(547): unsure at all n locations
cnnacgaaggtcgaacggtcatcgcatgaagtcttgnatatcggttttgggttcacacgacctattgcagcgaatgcttgtcaaaaagcttttgtaactaatcgtgtaggggattttggtttatnattaggaatttnaggtctttattggataactggcagttttgaatttcaggatttgttcgaaatattcaataatttaattttaaataatagagtaaatctcttattccttactttgtgtgcatttctattatttgtaggtcctattgctaaatccgcacaatttcctcttcatgtatggttacctgatgccatggagggccctactcccatttcggctcttatacatgctgctactatggtagcggcgggtatttttcttgtagctcgtcttcttcctcttttnatcgttatcccttccataanggatataanacctttngttaggnntattaccagtacctcttggggncncttagcccttntcaaaaggcatnaggngggnttgcctttctacaangctaactcggtatatgnggaggcnt

SEQ ID NO: 136127 - DNA, 435 bp, Arabidopsis thaliana columbia
  unsure (1)..(435): unsure at all n locations
cctacgnaggtacgnacggtnatcgcatnaagtcttgnatcatcgaattacgcggccgcgctcatttagagctggggtccctcgacatgctatcataaagaaggttgctaatgaggatatttccagtcttggagacttagtatctgtnctttcaaagctttctaggggtgctcgtgttccattggaatatatgtctcacactgatcgtcatcgcaagaagtctgtgttagtcacgattgatcatcatgaatggtacgctcctcctcagttgtatacccgtaatgacagttccggtttatgggatgcgaaacctgcaattgaacctgcttctgtttcaccatctattggtaataaatggctttcctataagccangntatttctntatgncatcacggtanggnaccccctccattgangngnaattnncgggggg

SEQ ID NO: 136128 - DNA, 516 bp, Arabidopsis thaliana columbia
  unsure (1)..(516): unsure at all n locations
ctttatctgcaacttgctaagagatcacaggaggttttgcttttatagtctttgagtatgtacatagaacaagatgtgtgtttttgaaaagaaaaaaaaaagtgtaataaatatgatcacatggtctatatgtataatggcactttgatctatgcttctactatgtttaggatggtgacaaaaagaaaaagacagctagtaatacctctttcacttttcaaaattaaaaaaaaaaaagagcatgaaactggataatctggagacagataatgacattaaaaagtacccatcctagttgcttcagggtgatctactggtcaatttgttagggtccggatgcttttacaaccggcctcccggggtatataatgngncaaatttcacncctgcncgtggtccgttggggntccnggaaggaatttgaaggncaccgtcacctggnggggcggngtttttgcaacccctggagccccacaagncccttcgggctccccgccgnctnttgnggggccgggc

SEQ ID NO: 136129 - DNA, 229 bp, Arabidopsis thaliana columbia
  unsure (1)..(229): unsure at all n locations
aaaacaaagggcttccagtaaaacatcggtctacaaactcccatcacctcacatgaatgagaattaagaaaaccataaaaaaaaaaaagttccaagttcaaaagaattttattncgaaanggccaattncagnccataaaaggggntgaccagatgactttccattccctaatnattcggatttggcttcttagcttaggcctttgcctngtggcngttcaagtngcca

SEQ ID NO: 136130 - DNA, 457 bp, Arabidopsis thaliana columbia
  unsure (1)..(457): unsure at all n locations
aaaatatataaaaaataataatattaataacaataataataatgataatgggagaaagaaatccctaaaaaaaaattgaaaatgggagaaagaaaaccaagaaggttttgtttcatctcctttcttcccataagcctttttcttgtattgttcccttctcttctctaaataaaaaaaaaaaaaactgttttttgtgaaaattaattgaccaaaaacaaagaaatcttctttcttctcttctcttctttgntaatcctggttacccctctaccaccaccacctgtaaaaaagaggnttttatctacccaccatagggnggcccagncnaggacatgggnatcctttgggtaaggccccccaattccngctgnggcccaagctgntcggggctgnatttgngccaaccaagnntnttggccaggatggnncntttccgggtcaaccgggatttgggngg

SEQ ID NO: 136131 - DNA, 501 bp, Arabidopsis thaliana columbia
  unsure (1)..(501): unsure at all n locations
ttttctttgataagattactctgttttctcattaaaaacaccgactcttcaagcctactaatttacacagcaatgtatcttttaacataaagaagatgacaacaattagctttcattagcataaacaaaatgaccctttctcacatatgaacagattttctcagagccaatgagacaaaaaaaaaaaaaaacctcaagcactgcctcattgttagctttcactagcaagatctttttctattttccncttatttgccagcataccagttctgaggacacttaggattcancaggtaaggtcgnctggggggatattcttggccggtggaggggtcagnccatggaggttcacaacctanggccttaggnggttctcccnggtgggctncaccttggggccttccaaagnttaccntccnncnngggacctttggaagaagggaattttccaanccaaaggggccttttaggccggnggggttantttgggaanccccnngg

SEQ ID NO: 136132 - DNA, 227 bp, Arabidopsis thaliana columbia
  unsure (1)..(227): unsure at all n locations
aaattcacaagttgcaaaaccaagatgggttcacatgtcaacccaatggcgattacagctttgactnaggtcattcgagtggcttantcatgggcntaaacatatactatctagtaagcagtttcatcaaactgcttatccacagtnatatgaagcttatnccccgtcgtcttctntggnattcttgggntcgaaggcattgctcnctatttagccgccatagctta

SEQ ID NO: 136133 - DNA, 313 bp, Arabidopsis thaliana columbia
  unsure (1)..(313): unsure at all n locations
ctcagtgaattggaagaggaggatgatgatgcgaagaggaagaatgagcagctctattgtattgtttgtagcaagangttcaaaagtgagangcagtggaaaaaccacgaacagtcgaagaagcataaagagaaagtngcggactgagagagtcattcactgattatnaagaggaaaatgaagaggaagagattnatggncccttggnctcacctgaaagtntagaggagctgcatgagaagcttcaggnggngttaaatatcgacaatnaagaaagagatgttaagaaggaagttgtaggtnaagctgatga

SEQ ID NO: 136134 - DNA, 311 bp, Arabidopsis thaliana columbia
  unsure (1)..(311): unsure at all n locations
ccttcccaaatccaattcatctacanaaaccagatctacaatttctcagattccgacaaccggaattagaaaactagttatctccgatccatagaaagatcaatagaaacagagcaaatcttttagaggctttggagatataagtggttttaggagggtgtatagatttnagacaaaaaggtatttatatagaagaaaaaaagactatttgnttgattatgtaactgaagcttctactaagccacgacgagagttcctgnccntacggtgtttccggcggtccnntcnctagggtcanacgannttcagcc

SEQ ID NO: 136135 - DNA, 456 bp, Arabidopsis thaliana columbia
  unsure (1)..(456): unsure at all n locations
caccggtcccggaaattncccggngtgcgnacccacgccgtccgggaagattgaatagtactttactcgggaagtagacactttctttcagaatattcttgatgatcatctcaagcctggaagagagagctctgatatcatcgatgtgatgattganatgatgaagaagcaagagaaagagggagactctttcaagttcaccactgatcatctcaaagggatgatctcggacatatttctagcaggagttggaacaagctccactacattgatatgggcgatgaccgagctgatcagaaacccgagagtnatgaaggaagttcangncgggattcggacaacacttggggncaagaaggnggggaatcnccaggtggangnttttaacccagctttcactnnctttnaagcncatggcnaaaagggtttttcaaggtttccatccnggatgttccc

SEQ ID NO: 136136 - DNA, 214 bp, Arabidopsis thaliana columbia
  unsure (1)..(214): unsure at all n locations
ttgaagagaatnctagtnggtgggtttnagaaggtgtatgaaatnggtcgtatatttagaaacgaaggcatttcaacacgtcacaatcctgaattcacgaccatcgagcgttgtttagatgtatgangcttattcggactaccagagcatgatggacatggcaganttaattgtnactcaatgttcaatggcagttaatgggangctaacaatt

SEQ ID NO: 136137 - DNA, 451 bp, Arabidopsis thaliana columbia
  unsure (1)..(451): unsure at all n locations
ccggtaccgggaattncccgggancgaacccacgncgtccggtaaatattctcgatccggatcttaagatcagcggatctggagacaagctggccaaatcttaatccaacatcctccaaccaaggtaccttcaatttnaagtttaaattctccgttattctctttatttgcatcatataacaaacctgacaccaaatatttatnacaatctcgaatcggcctttatttttnagcatggaaatagttgcctcatttncaaattgactgtnataatacattattcacaaagtacttctaccaaagtattcgtagggccttaaatngtctaatcggacggttccatggcagtttgtaatattctnccactttatctatctactgtngtttgnatggtttgtncttttcnttgtagnattctnattgggaggaattgtacccngtttantggtta

SEQ ID NO: 136138 - DNA, 236 bp, Arabidopsis thaliana columbia
  unsure (1)..(236): unsure at all n locations
aagctgttgaggccgtacgtggtgagtnagtatnaatggccaggtagacagcagcccaacanacccgcacctnanttggtcgagggtgaggctgagtgggaggtcgagcggntcgttgacaagaggatagagatgaagagtaggatggtcgatgaagtcatggaagagagaaagacacgtncggggagagtntcccgtccagtcaatgcagcagtnaagaaggtgaagaagctcgt

SEQ ID NO: 136139 - DNA, 207 bp, Arabidopsis thaliana columbia
  unsure (1)..(207): unsure at all n locations
atcgtntggncttacgcagagattctaacagcagctggagcttataacaaaagaccggacaatacacagctcagttntngaacagaccggtctggtctnattagtncttctccatgggtgananttccatatccattgcaatggggacgtccaagtttccatggaagtaatgcattcgcaatgatggcagctacttacgtggcgatt

SEQ ID NO: 136140 - DNA, 329 bp, Arabidopsis thaliana columbia
  unsure (1)..(329): unsure at all n locations
ctttcagcacttggagattcacaagtttgtnggatcaatccatttnaacnccgatccatgactacgactaggcggaaaaatacacattggtgtcatacttgtagacgaggaatccatcttcaaggagaaggcagaagagaaggagcttgcatttnctgtggtaacacctttnttgaaaggctatatgngaatgtngaactangcccttttnatttattcggattagcctacggagaagctcgtaaccgtcgcaacaacaggagntcggttataggggnncaactaagttttgangagttgtttaccgggtcccagcacttcaaggccgt

SEQ ID NO: 136141 - DNA, 228 bp, Arabidopsis thaliana columbia
  unsure (1)..(228): unsure at all n locations
attcctgatttcaaacacatnccaggaattaaggttagaataacgtgtactttnagattggatnctgaaccatatagcagtatatggggaagtgaaactnagaaaatcgatttanagaaagtngactcacctcctgcnattttggcgacggtnctcaaattctnatcttcagccccttatgggctctattccctcatgtcggcataccttttccttctcgggtgagcc

SEQ ID NO: 136142 - DNA, 363 bp, Arabidopsis thaliana columbia
  unsure (1)..(363): unsure at all n locations
attcctctnatattcanattctaacttctnaggaaaaccctaaagaaaattcntttttttttttgagaaatatgaagatacaatgtnatgtgtgtaagaaagcnccggccacgcttatatgtggtcctgatgaagctgctctctgcnctaaatgtnacgttnaggttcatgctgctaataaactcgctagcaaacaccaacgccttttnnttgactctctctcaactaaattccctccctgcgacatctgccttgtaagaatacctcctctnctctctttggtctctattcgtatctgcagagatctttatttgttttgagggnatcttttngattgacctggtcttggtaggttctttaagg

SEQ ID NO: 136143 - DNA, 330 bp, Arabidopsis thaliana columbia
  unsure (1)..(330): unsure at all n locations
gttatcactgggaagaagaagggtaagaaaggtagtaagaagggtacgcagcaggntgatgatgatgattttcctnataaggtttcggctgcggggntgaaagacgntnttcctgagatagctttttttgggaagaagaagtcgaaaggtaagaagggcggtggttctttnagctttgccttgcttgatgatgaagatnagaaggaggntaatgaatctaatngtgacaaagatnatganccngttataagttttacgggtaagaagcatgcgtctaagaagggtaaaaaaggcggtaattcatttcccgcttcaccttttnatgcactt

SEQ ID NO: 136144 - DNA, 341 bp, Arabidopsis thaliana columbia
  unsure (1)..(341): unsure at all n locations
actttccagatctagtttctttccggctatnatcttcacgttagggcttggnatagcaaggcaaagcaggagtnaggtggtccttctnctccggtgccggtgggtgtggaggttttnaggcgttgtagtggtggctctttctgggcggaaganagatttctntttaaatnactctagtttgtggacgccagaggagttactgtnaagtctctcctggtttatccgactggtggtcactgcaactacggcagaagacgnctaaggatcggtgggtttntggtgcgtnttttggtggnttattcggcttagcccgcgttccttttcaagcaaccatgttcttg

SEQ ID NO: 136145 - DNA, 233 bp, Arabidopsis thaliana columbia
  unsure (1)..(233): unsure at all n locations
ttcataatcttttnattgatcatcgaccaaccaaaaacaaaaaaaactcaaaaaatccaaaaaaatcagatctttgaaagctttttttttgtaacactcgaaaaatggntccgtcctgtgcaaactcagtgaacggnttctactcattnntaaacagatcaatggaaganctcgaaagantttatctttcaaacaatttcatgtccgtacacntcttacagagagntctctgt

SEQ ID NO: 136146 - DNA, 575 bp, Arabidopsis thaliana columbia
  unsure (1)..(575): unsure at all n locations
gttccatgcttggggtctggatacgcagcttggttattgtgctcaaggtgaccgaaagaaaaatgtcggtgttgttgatgcggagtacataattcattatggtcttccaacgctcggtgtggttgaaaccgcttcaagcgctttgcggaatgagacagactcgaaatcaacggaatcattagagtctcgtgaagtggataatagaccagaagtgaggatgaaatcatttgtggagatgaagagattcaaggaacgttggaagaaagctgtgagggatgatacatgttgggttgatcccgnattgaaatccgagcggtttaagtaaaccgaatcaaacccggattcttttccntgtttgagtgtgctttgtggtccattgtataccattaatttttggtacanaagattttnnttttacttcgngnaaaattagnggaattatggggttttantggnccccagtgtaggntttaacantttttgngccntttncaaaanggtttttttgccnagaaaaaattttgaaggtttaatnaatncntaatttcncgaggngttttgtcntaaaaaaaagc

SEQ ID NO: 136147 - DNA, 325 bp, Arabidopsis thaliana columbia
  unsure (1)..(325): unsure at all n locations
aaactcgagatcatggagccatgttgcagtgtcaaggataggattgggtacagtatggttactgatgctgagcaaaaaggatttatatcacctgggaagagtgttcttgtgggacctacaagtggaaacacgggtattggcctagcattcatcgctgcttcaaaggggctatagncttatcttgacaatgccagcatccntgagntatggaagaaggggtccttttaaggcattttgngcttagcttnntttacaaatncctcctaaagggattncntggggccggttcaaaaaggcttnagggggtctttaaaaaaancnnccc

SEQ ID NO: 136148 - DNA, 528 bp, Arabidopsis thaliana columbia
  unsure (1)..(528): unsure at all n locations
gcagcttgctatatccttgtaatnnccaaactagaaggtgttgctgtcagtcagtactgtgcatnacggctattgcaggcgacacttgatgagtccctctatgatcttnctggagagctagtgaggttcttactaagatctggaagagacattgagcaggcgccaacagaatcagattcattatcgcctaagcttctnggtttccttatttttggctccagccacaagaaatcatcactcgataagagctcctcgttcaaagagcaaagnnctcatgttgcttctgtaaagagcatacttgaaagtcatgccagttacttgatgtctggtaaagaactttcaaaggtttgttggcattcggcaaaggncaccccagtttgataattgtggnttttnttcaacgggnaagatatgggttgtgcgcngtgcagaattttgcngcaggnccttnaactggtttgggnaaaagcngcaaatggggtngctcaaaccgggtagntcagngtttttntgggccaaatgggccct

SEQ ID NO: 136149 - DNA, 363 bp, Arabidopsis thaliana columbia
  unsure (1)..(363): unsure at all n locations
cacagaaaaaaaccnagaaagctctagagacaaaaagagagagagagagagatggaaggtaaagaagaagatnttagagtcggagctaacaagtttccggagaggcaaccgatcggaacttcggctcanagtnacaaggactacaaggagccaccncctgcgccgttnttcgagcccggcgagctagcttnatggtccttctggagagctgggattgctgagtttatagctacgttttttttcctgtacatnactgttttaactgtnatgggtgtaaagaggtcacccggacatgtgtgcttccntcgggaattccaaggtatcggttggnctttnggtggtatgatctntcggttctnggat

SEQ ID NO: 136150 - DNA, 525 bp, Arabidopsis thaliana columbia
  unsure (1)..(525): unsure at all n locations
cgaagatggaatttgagttcgagagaagaaaggtcactaaagaggatataagagagctaatttctagggagatacttgagtaccaccctcagctgcttaaagatcatatgaacggggctgataaagccagttttctctacccaagtgctgttgatcaatttagaagacaatttgcgcatcttgaagaaaacagtggtaaaaccggccctgtggaacctctagaaaggaaacatgcctcttttcccagatcaacggtcatacactcaaccgcagtagcacgaggaggncaaccaaaacttnttgnttaccacaaacacattggacccctgaaacttcttaaaaacattccttttaaancatggaancatttcaaaggnccaccaaagggaaccctttnaggagcccaaccccangggncatttttttgggncccggtttgacccttttnggcaatngngngnttttcccngggttggatttngccccgggnnttttttcncggggncttatttcccctttttaaaa

SEQ ID NO: 136151 - DNA, 611 bp, Arabidopsis thaliana columbia
  unsure (1)..(611): unsure at all n locations
aaagtatcacccggtcaccggaaaattgattatttccgatgccaataggtgaccgtnagaatccgagtgtggagaagaagaagaacctcttcaggctatgtccgttttggcagaggagcagcaccacttcttcatcttcaacacagaatccaagccaaaactaccgtagccgccatggacatcggaatacagatatttccgccgtctctaagccttccttgactatgtnttccgtcgccagatcacttcttccagctcgccgtcgtctccgactagatccttccagttatctctatttcccttatgnacctggtaaacaagttcgcagcggaataaagnttaaggaccacttagcaaaatctcatactgcaatttaaagttccaaacaacgggancttaaggtgttgttaanatgggtcctcccgggggtgtttttggntccagggggagagtttttttggtacttgggtttaaagnttttggnnaatccnggggccaatgaaagnagcccgttgacccnnagggggaaggttaagtttaagggtttggncntaaagtaaaccngggtagggnttnccnntntttttntggaaaggccaattnatgggagt

SEQ ID NO: 136152 - DNA, 525 bp, Arabidopsis thaliana columbia
  unsure (1)..(525): unsure at all n locations
agcttaggattggctgatcaacaagaaaggaaataaggatttcccgggaaaggcacaagaagtgaattgccaccacctggaagtgtngaagtagtgtgtgcaaaggtgtgcacactacttnacgctatatccattttaatgtgcagtcttaggattattagatctaggaccatgttgttacacattgtcttgtagtagaacgctagaacataaacttcctttgaggataaaggaattgctaacacatgtatattctcggtggctaaagctttggagtaatagncacacttgngctaacttagnttaagntccattttttaaaggnttcaaaaatttnggattgccccatcataancttgaaacccaacccccacctaattgggtttttggggggtntttgcaattttcaatggaattttttgccccntttgggngntatttttgggnccccctaangggtcctnctnnataacaaattaaccccaanccagttggcccaccnctgggtaggggattcaaggnggg

SEQ ID NO: 136153 - DNA, 235 bp, Arabidopsis thaliana columbia
  unsure (1)..(235): unsure at all n locations
cctgacggagttcccggcttganaacagagaattttgggtttaaccaagcttccccattganagaaatgttcgaaactatnctcaatgaaaataatnccgcgcagatgggtagagggctattaggagacttctttncaacttcatctaatctgcctacnctaattagaatctttcccaaggacacacttctntggaagcttcaattgcttaagantgcttcagcgnctgcaaatt

SEQ ID NO: 136154 - DNA, 575 bp, Arabidopsis thaliana columbia
  unsure (1)..(575): unsure at all n locations
ggttattgactttctcattcagtgaagcttgaatcatggcctcgagaattgctaaagatgtgactgaattgattgggaacactccattggtgtatttgaacaatgttgctgaaggatgtgttggtcgtgttgctgctaagcttgagatgatggaaccgtgctctagcgtcaaagacaggattggttttagcatgatttctgatgcagaaaagaagggtcttatcaaaccaggagagagtgtgctgattgagccaacaagtggaaacactggagttgggttagcattcacggcagctgccaaaaggctacaaagcttattattacaatgccagctttctatgagtacctgngagnagnatcatttctcttagcttttgggagttnnngttggtttaactgacccngcttaagggcatgaaaaggngctatnccaaaaggcggaagngatttttgggggaacancccattggtncattcttcacagtttnngaccctgccanccttangncccctttngcttcgggccctngaattgaaggnctgtgnaaaacgtggtttttttggtgnntgggcct

SEQ ID NO: 136155 - DNA, 350 bp, Arabidopsis thaliana columbia
  unsure (1)..(350): unsure at all n locations
caacaacaaatcttaaacgttttactttgtgctgcactactcaacctcaatggccgcctcaacaatggctctntcctcccctgccttcgccggtaaggccgtcaagctttcccccgcggcatctgaagtccttggaagcggccgtgtgacaatnaggaagactgttgccaagccaaagggcccatcaggcagcccatggtacggntctgaccgtgtcaagtacttgggtccattctntggcgaatnaccgagctaccttaccggagagttccccggagactanggatgggncaccgccggnntttnagctgacccccgngacatttgncaagnaacccggganctagaag

SEQ ID NO: 136156 - DNA, 275 bp, Arabidopsis thaliana columbia
  unsure (1)..(275): unsure at all n locations
aaaaaagaaaacacaaaaacaaagattataatggnttcctcaaccatggctttntcctcccctgccttcgccggaaaggctgtgaagctgccgcatcagatgtcctcggaagcggccgtgtgaccatgaggaagactgtngccaagccaaagggtccatcaggcagcccatggtacggntctnaccgngtcaagtacttgggtncattntncggcgagnccccgagctaccttaccggtgagttnccccgtgactacggatgggacaacactggt

SEQ ID NO: 136157 - DNA, 525 bp, Arabidopsis thaliana columbia
  unsure (1)..(525): unsure at all n locations
gtcgaggggatgtgccttgcagtgtgccattctcagtccgacctttaaagttcgcgaattccaggttcatgagagcttccctttctcaatatcgcttgcttggaaaggagcagcgactgatgctcaaaatggaggcactgagaatcagcagagcactattgtttttccgaaaggaaatcctattcctagtgtcaaggctctaacattttatcgttctggaacattctctattgatgtgcagtacagtgatgtgaacgatttgcaagcacctcctaaaatcagcacatacacgattggtcccttccagtcatcaaaaggcgagagggcaaagctgaaagtggaaaagttagntttganccnccatgggaattggnctctgnttggatcnagcaaactcntttttgaaagagggagaanttttaaggtttcggtcnnaaaaangtncaatnnagggggganctncttanattgggccacttnccaaaggtttttcccggtggaagtcccggcttttnnggtgcccnc

SEQ ID NO: 136158 - DNA, 343 bp, Arabidopsis thaliana columbia
  unsure (1)..(343): unsure at all n locations
tcatttaaatcgggtgaagaaacgaggtggccactcggattcattagagagagctaaagcagcagtaagtcatttgcatacaagatatatagttnanatncaatccatggactccacagtttcagaaatcaatcgtcttagggatgancaactatacctaaagctcgttcaccttnttgaggcgatggggaagatgtgggaaatnatgcaaatacatcatcaaagncaagctnngatctcaaaggtgttgagatctntagatgtttcacaagcggtgnaagaaacaaatgatcatcatcacggacggancatncagctcttggcaagtggttcaagaatggca

SEQ ID NO: 136159 - DNA, 446 bp, Arabidopsis thaliana columbia
  unsure (1)..(446): unsure at all n locations
ctgcctctgtggaatactttccctatnactcaccaccctnncatcaacatcctctcccttctccagttccaccccctccttcccacatttccccnccaccacctccatttnntcctcctcatcacccaccaccaccacatttttttcctcctcatcagccaccgccatcaccatatcctcatcctcatccgccaccaccatcaccatatcctcatccccatcagccaccgnctccacctcangttcttccaccaccaccaccaacancagcaccggggcatcatgttatcattgtggttgttatntctnttggaagtttgtttttncttgcatttctngttgctggtcntttcttgtatctcaaggaaagaggaagttttcttcaaaggntgagatatcgggtttgtgacactaaaggtcaaggaaacatgntgaaggncccatgg

SEQ ID NO: 136160 - DNA, 353 bp, Arabidopsis thaliana columbia
  unsure (1)..(353): unsure at all n locations
accagcaagcaatgggtaattcatttcctggcatgncntcnatgggagtttccccagaccaactaccaatattagaaaaggagatggctaacctaaaactagaattacagaaagattcantnttgaggcagcaagancaacatcgtttagctgaagancaaactcgagtagcttctttaatgtcagaaaagcaggaactggaacagaaaatttcagttttatccagcagggnctcagtatcagagtctggtcaaaaagtattttcantggaagataaagnanaactcgagaagcagttgcatgatatggctgttgcacttgaaagattagntgngtagtaggnaaaaattcct

SEQ ID NO: 136161 - DNA, 400 bp, Arabidopsis thaliana columbia
  unsure (1)..(400): unsure at all n locations
gttatttagaattggcgatcgaatcaatctcactccctccctcccttaagtcttgttgaatctgctgaattgttttataaagagttactttggcaaaatggaaaatccggcgaagagagtnttgatgacatccaacggcgacgaggtgtcccgaaacatcgctttccatctagccaaacacggttgcaagttggtaatgatgggaaatnagggttccctaaggagcattgtagacaagattagagnttccnttgagggagccttccctgccgatgttatagcactcgacaagggnatcttnactctnaaggtgcttttcangccgntgtncnaaaggcatgggnaacttttccngncattttgatgctttttttaantcttatncctaccaaggaaaggt

SEQ ID NO: 136162 - DNA, 378 bp, Arabidopsis thaliana columbia
  unsure (1)..(378): unsure at all n locations
tnaagctatcaagacaaagggnggcaaaaccatgttggatacgacgatgattagtgggttccccaaagaatcagactttnnntcactctcgcaaaagaaagataatccacccgattcgccgagaagcaagaaacttgcaacgncagcaaacaagaagaagaacagaaagggtgggctttccatgttcttgactggtgctcttgatgatgtccctaaacctgttgttgctcctccaccaaggcctaagattganggtcctgtntggggtggggctaagatttctaaagggttatcttccctacgggatattcaagntggncaaagnaagccccggtnttatgnacccnttngggcttcttaaaattcagtccgggggtt

SEQ ID NO: 136163 - DNA, 325 bp, Arabidopsis thaliana columbia
  unsure (1)..(325): unsure at all n locations
ggtttaccctgcagccaccagtttccctcaagtcatcaccaccgttgtttctttcaatgcctccttgtgggaatccatcggacgggttgtgtcaaatnaggccagggccatgtacaacggtggagttnttngngcttacgtattggagcccaaacgttaacatattgagggacccacgttngggacgtggacaggaaactcccggtgaagatccagtagtagccngtaaatacgcagcgagctacgtcagagggttacagggaaacgnccntagccngttaaaagtagctnctttttncaaaaatttnacaagctttccgntctc

SEQ ID NO: 136164 - DNA, 528 bp, Arabidopsis thaliana columbia
  unsure (1)..(528): unsure at all n locations
acttgtattcttgtagaacatacgcagaggttgacgacgatgataacagtaggatttattcaacccaattctctcttctccttctcaactaaatccatcgacaagacacaaccttcacgaacgaaatgggtctcttcctcgtcctcttccttttcttctcactcttccgttgagacatttcatcgaacaggtaatgtgcaagtncttcagaaagatgttctctgtggcaacaatgaagaaattaggaagaagaataaaagggtattcttcttagacgttagccactttgctacgaaggaaacaaacccagttcgcaagcttttggtcactggatttcactctttttcctctcaagtcagcctcactgntccngtcatagctgttatcgntggngaagaaggtnaccacggcggagaggatttttgcctcatataaaggnnatagggatnaccaatncatgggggtccntaagggcncataagtttnttngtgaggtnttgnaatnaatttccnnttttgnangagggt

SEQ ID NO: 136165 - DNA, 493 bp, Arabidopsis thaliana columbia
  unsure (1)..(493): unsure at all n locations
atgaagaagactaatttcgtttcctctgcttccggtggcgatcccatgatcagattaacctttgtgcaggttctggagttggaaaaggaattagagataaagagaaagagattggagatgattaaacaaaagagattnaccctcaagtcagaagttaggttcttgagacgtagatacgagcacttgaagcaagatcaaactcttgaaaccnctccagagatgttgagattntcagaatccgggggtttagaggtcccaaggaaaccaagtggcgnaagaaagaagcagtctggtgtgagagcatctgtaccatgttttgatttgaaacctcnaggantacaattttcaatgnggaggaagcattggctaattattgttgcaaagttntngcctncggttaagaaagcggaaaaaggggcngnggtngcgatnttttttncatccccngttnattttcntgcccctaacggggggggggacacttttgggnctt

SEQ ID NO: 136166 - DNA, 375 bp, Arabidopsis thaliana columbia
  unsure (1)..(375): unsure at all n locations
gagaaaaaggntctnaggaacaatggctacgacaagacagatcttggagcagccacaatcgccatttattcaacgtatcaagagctcggggaacattagcatgantggcagtcctatgattgatgagaaagaagaggagctttcacagtctgcttttnctttgtttaaggcaaaggaagatgagattnanaggaggaagatggaggttaaggatagggtccagaaaaagcttggactcgctgaggaagctactagaagattagccgagattcgggaagagcttgaagctcttaccggtccantnnggaaagagntatccccgntaaggnaaagagtcggtgcctnttaaccgggnacctcaagcctttgggncag

SEQ ID NO: 136167 - DNA, 516 bp, Arabidopsis thaliana columbia
  unsure (1)..(516): unsure at all n locations
gcggaaacagagaatcatcaaatcaantccctaaaaattgatttttgaaatggagaagaacgcatcgacttcgtcnatgaaggacttgggtccgagtggtctagatctaaccagcgcctttttcaaaccgatccacaactccgatccttctctcccttcaaaccgacgtaccaaagtntccgtcgtcggagtcggaaacgtcggaatggccatagctcaaaccatcctcactcaagatctcgcagacgagatcgctctcgttgacgccaaacccgctaagcttcgtggcgaaatgcttgatctccaacanggcgctgctttcctccctcgaactaagatcaccgcttctnttgattacggagncaaccgctggatctgatctttgtaatcgncacttctggtgctagacagaatncaggggagtctnggctcaatttgnttcanaggacgtggtctcttccgnnaaatattccncnctcgtnaagtntcctatcnaatgnncatgttcaaaccgtg

SEQ ID NO: 136168 - DNA, 407 bp, Arabidopsis thaliana columbia
  unsure (1)..(407): unsure at all n locations
ttcctctttnntaaactattctacttctttccgtatccntnacagaatccgaagcttactccacaacaaagccgtgtnaaggctacaagccggataaattcacccacctccactttnacttccatgacgtcatctccggtgacaaacctaccgccgtcaaagttgcggaagccgccgaacaaactcctccaacgtcaattttggcgtgattatnatcgctgatgatccgttgaccgaagaccagacccgagctcaaaggaagtgggaagagctcaagggatgtacgcattgacagccatgaagnacataagcttcacaatgggctttaacttggnttttacgggggggngagtttantngnagcacccgtcgcggtntatggncgggattgagatattttcgaaggt

SEQ ID NO: 136169 - DNA, 400 bp, Arabidopsis thaliana columbia
  unsure (1)..(400): unsure at all n locations
atcctcaatctcagtctctctgttgactccgactgtnatataaaaccatacagataccttcagattcactacttcaaacctcaaagcaaccactgaatctcgactttnatcaattgagagagaaatgaacaccggcggtggccaatacacggattttccggcggtggaaactcacggaggacagttcataaggtacggtatcttcggtagtttattcgggntcacatctaaggtatcggtcctccgttnaaaccattnggnggtggaggcttatgggaatcgtttcccctgntgttggttncgggnccgaccggcctagttggcgttgagggaggnttggntaattccttttaaaaaatccanatgggttcctaaggganncgtttccnngggttcaaag

SEQ ID NO: 136170 - DNA, 464 bp, Arabidopsis thaliana columbia
  unsure (1)..(464): unsure at all n locations
aaaggctatggaaactgtaggcaaagagggagtgatcaccattcaagatggcaagaccttgtttaatgagctggaagttgttgagggtatgaagattgacaggggatacatctccccgtacttcataactaacccgaaaacacaaaaatgtgaactagaagatcctctcattcttatccacgagaagaaaatttccaatataaacgcaatggtgaaagtattnganctggccctcaagaagcaaaggccgctgctgatcgttgctgaggatgtggagagcgatgctcttgccaccctaattctggacaaacttcgtgctaatatcanggtctgtncttgtgaagggcccctggtttttngggngnacccggaagggccaattttanattgntcttggcttgcccttaacttgggggcccgggttatttacccgganggnnttngggnntnnnttttttggcaac

SEQ ID NO: 136171 - DNA, 525 bp, Arabidopsis thaliana columbia
  unsure (1)..(525): unsure at all n locations
catggaacagcaggaactcctcacatgttcgatcaagaagcttcaacgtctagacatcccgataagatacaaagacggcttgctcaaaaccgcgaggctgctaggaaaagtcgcttgcgcaagaaggcttatgttcagcaactggaaacaagcaggttgaagctaattcaattagagcaagaactcgatcgtgctagacaacagggattctatgtaggaaacggaatagatactaattctctcggtttttcggaaaccatgaatccagggattgctgcatttgaaatgggatatggacattgggttgaaggncagnacaggcagntatgtgaactaagnncagtttttcacgggcacattaccggtntcgngttcgtccgtagtcgaaacgccttaaacnttcttttgggtttccggtgaaacggttttttccaanncggtgttttttcggaattnagggtttgggnctttagnanccgntntttttngnttgggggttncccccnttttaaggttttccntttt

SEQ ID NO: 136172 - DNA, 585 bp, Arabidopsis thaliana columbia
  unsure (1)..(585): unsure at all n locations
tggccaagcctggagcctctcaagtntcactccaacaggctcttgactatgcctgcgggatcgcggattgctctcaactacagcaaggcggcaattgttattctcctatcagtcttcagagtcatgcctcatttgccttcaacagctattaccagaagantccttctccacaaagctgtgattttggcggtgcagcctcattagttaacaccaacccaagtgagtgagaaaaaacagaagatactctgtttctcttttnctttcttgttttcagttagatggctttgattgactttggtttggattgttgttccaaaacaaggcactgggttcttgtatataccagacaaggttcaatcggcaatcaacaccaatgaccagcagggnccaacaaacaccaanttccatnaacacaaacaggtgnaccnggcntnctggtnacataaacaccctttaattnccaccanggnggcgggggtaatcgggggaatnagggntttcttttaaaccctttttgnngnngnttaaaggcctattaggggtttttaacnaaaatggcccccctgattttttnaaggggtgggc

SEQ ID NO: 136173 - DNA, 445 bp, Arabidopsis thaliana columbia
  unsure (1)..(445): unsure at all n locations
ttcttcttcttcaacaaatcgagtcctttttctgataactcatttcgatttcagaaactcgccaagaactggatactctggcggaatcagagattaagaaccgagacgtggttctgaaactgtatgaagccctgagatctcgcgacgtcaaanctgtgcaccagatcttaaccccagatctggagtattggttccacggtcctccgccgcaccagtttttgatgcgcgtactcaccggagggtnntctccgtcttcttcctccttcgaattcgtaccnctctccgtcggtttccttcggatctacccgnaatcgngggaaggcttcgacggcggcgacaaanagatttttttggganccacggtttttgnctnttagcgaatngggttaattcaaaanaaggngnggggggtacttttaaaantttttttnaccngtaaaaaggg

SEQ ID NO: 136174 - DNA, 528 bp, Arabidopsis thaliana columbia
  unsure (1)..(528): unsure at all n locations
ccaaatcactgccatgggaaatagaactgtcatcgtcgataacaatacctggaacaacactcacattgctaccgttggacgtgccatgtcttcttatgaagatgatgcgtatgacatcatgaggtcacttgatgtgaactatgtattggtcgtctttggtggtgttactggttattcttcagatgttatcaacaagttcttgtggatggtgaggattggaggtggagtattcccagtgatcaaagaacctgattaccttgtgaatggtgaattccgtgtagacaaaggtgcatcaccgaagatgctgaactgtctcatgtacaagttattgctattacaaggttcgggtgagctgaccacagnataccgggcaagncancccggggtattgntaggngcaaaggaggagttnnaggttaggggnaccaaaggtnnncaaactttgaacacttntggagggaggttncancaacaatcccancttgggttaggtncggattttncangggttaaanccnccctncaaaa

SEQ ID NO: 136175 - DNA, 475 bp, Arabidopsis thaliana columbia
  unsure (1)..(475): unsure at all n locations
caacaccattgaaactcgctgattggtacaacatctcgggcgtgttcgatttcaagacaatcattagcactccaacaaccggaccggctcatattggtacatcggttatcgacgttgaacttcatgagttcgtcgaaatcgttttccaaaacgacgaaagatcaattcaatcttggcacatggacggtactagcgcctatgctgtcggatacgggtcagggacatggaacgtgaccatgaggaaacgttacaacttggttgatgctgttccaagacacacttttcaggtgtatcccgttatcgtggncaaccatattggtgtccgttggntaacaaagggaattttngggatctaagggtcacaaaatattggtcgnngntggtntttttggncaaaggnctcttatgntccgtgttttggaccgnntttggaagtccttttttccacttnaagnttgngcnnccttttaanngg

SEQ ID NO: 136176 - DNA, 550 bp, Arabidopsis thaliana columbia
  unsure (1)..(550): unsure at all n locations
tggcgttttacggctttgggaaggcgatgttatggattgctttgaagatcgtnatctctgtatcgaatctgcttgctgtccatgctacagattcgggaaaaacatgacaaggactggttttggttcttgctttcttcagggtgctgttcatatgattcttattgccggtttcttattcaatgttgttgcttttgctgtaactaagaggcactgctttctctatctggctattgctttcgttcttttgattggntcctacttgggtttcttccgtatgttgataagaaggaagtttaatattagaggtactgatagtttcttggacgnttttaatccaccatctcgnaatgcccattcctgtacattaacccaaggaatctaaaaactctgggggntggaccaatgttcaatgaatgggaanctggaattggncgaggggncanctntatngaaaggngggtattncnaaggaaaagncttttntcgngggtgaatncgcccccagtaatttcccaaaaatgcaacatttnancccaanaacaanaaaagg

SEQ ID NO: 136177 - DNA, 408 bp, Arabidopsis thaliana columbia
  unsure (1)..(408): unsure at all n locations
atgcacaagtagggacggttagagatgctgatttacgggtcaagattgttgaagagagagctcgtttcgatagtaacccaaaggatttccgtgacacttacaaaaccgagcaggncaagcttcaagaccagatttcaactgctagggcaaacctttcctcggttcagattgatagggaattgaaggtgaagatctctagagtttnttcagagctcaatgttgatgggttnagaggagacatagtgactaacagngcagcaaaagcacttncagctctcaaaggaaaagatcgagtaactccagattgatntttncaacccgttntcccctaacctgcttaaggcanccgtcttnnggnaaagatnccnctgggaatccttttgnattcaagggggttctagnttttcc

SEQ ID NO: 136178 - DNA, 339 bp, Arabidopsis thaliana columbia
  unsure (1)..(339): unsure at all n locations
atctgctacttgatagttctatctgcatatacacacatatccgtattattcaccatgcgcgtctnagcctgcaccgctttattgctcgcngctaccgncacggcagcaccacagtacgtagagtacagtnatgcattggtaggcgcagatnagtatcatgtactagcagacgaggctgtntacacactgtacggttgncggccatagtcnagtacgnnggatgttgggcgagtacgacggtggcaatttgttaagggctacgggtancggccgggttattgggggccccaagccttttnaggcggggttattcttaaccctaaggnggttgttgggccc

SEQ ID NO: 136179 - DNA, 599 bp, Arabidopsis thaliana columbia
  unsure (1)..(599): unsure at all n locations
acaaagctctatactgaggattggattggtctgaaaacattggatgctgccagaaaagttaagtttgtcagtgtccctggcgagcacctaagaatagcgcaagacgacgttgtaaaacacgtcgtgccttacctcaagaaccagcctgcgtctatgagtgaagatttggagatactgcatctatgattgagacttcattgttatgctctcttagaatcaaatttaaaagtgaagaactttagaggctcctttttcttaatcataaatccaaataatttcatcatgtacattattcaccagacaaagctatacagataagagtggataggtctgaaagctggatgctgccggagaagtcaagtttacgngtatctcgggtgagttgtgaacacgtttgtctctaccataattnaagtnggtccatgacctctttaatatttggncccgtccactgccattttttgtgncaggtnttaggggcaaaccaatnttatttcccaagnatnggggccattnaaacatttgnaaacggttttnaacattattntttgggccnccgnttttttggcacaatccccttgnngttnaggccnccatcc

SEQ ID NO: 136180 - DNA, 569 bp, Arabidopsis thaliana columbia
  unsure (1)..(569): unsure at all n locations
aangggggnaanggctanactnaccnagccgtnttggaaggcttaaaaccgngcgttccttaanccangncgctnctnnctaagcccggncnatggttncaaaccaaacccaaaaccagcaccgaagnaanaacccccgccactcncgnacccgtaanaaggttaatggtccaacgggaaggccaaggcctatgtgttttccgatcaaacaaagcatctttatgttcaagtgattgatgataccaagatgcacaccttagcttcagcttccactaagcagaaaccaatctctgaagagttcgactacacctctggaccaaccattgaggtagcgaagaaagttggggaagtgatagcaaaatcttgcttggagaaaggtatcacaaaggtagcctttgaccgtggtggttacccttaccatggacgtattgaggctcttgctgctgcagcacgtgaacacggtcttcagttttaaccgtcgttttctttccttgtttctttccgatgaacagcagtgtatgaatgtagagaacccattttccccaattgaaatgttgagatttttctat

SEQ ID NO: 136181 - DNA, 564 bp, Arabidopsis thaliana columbia
  unsure (1)..(564): unsure at all n locations
gaaattggccttgatgatatctcaacgccaaacgtgtacaaccaaaacagaacgaatcctgttcaacctcctcctccaccaccaccaccatcagttcctagcactgaagctcctgtgactgcaaatgatcccaatgattcacaatcaccaaaagcttacacatccgaggattacctcaagttcactgaagagcagctaaaagctttgtctcccgctgaaagccaaacagaggatcaaactcagactcaagaaccgccacaacccacaactgtacaaacacctaccggagaaagccagcccaatggtacagcgagagnaacaacagctgcatctcctccaaggcaagattgaaagcaccaaaatatgncttgtagtgttaaaaagcataaggctctctattactggggagnttcttgaggggattttttttgatnctgccaaaanggcgggggtttttaggtntnaggcattnttggaaaggtgtttggnaatctggnaattggctnggntttttggtnccattnggtntttctaaaggggattgggtttttgggaaagtttggg

SEQ ID NO: 136182 - DNA, 259 bp, Arabidopsis thaliana columbia
  unsure (1)..(259): unsure at all n locations
caacagtgccaaccaggacctgttgaaccagatcaatcagctgcggcagcaggtcaccagcctgcaggcctcgatcgagcagttgcagcacgacaacgcccagctcaagcagtccgcccaggaccagtacctggatctggacagccgcctgaaccggttggaaggggggaatgccgccccggncctgccgcccgttccggcgagcgcgccgaaggncgccccggccccggcaaaacccgcagcgggcgggcacttccga

SEQ ID NO: 136183 - DNA, 363 bp, Arabidopsis thaliana columbia
  unsure (1)..(363): unsure at all n locations
ttccacnactctgccaatccaccatagccaaaccttcatcatcaccaaaccctagcagcagcatcaacttcattgtntcatcatgccgcgtcacgcgttaccaaactntntgcgtcaaatgccttgcngcttttgcagacaaaatccgccgcaacggaaaccagttagctcaaaccgctttagccgttactctagtccgggttcagtccacggcaatctatgtagggaagctgnctaaagctnggngaatcaaaaggagngngtacttaggccgtgaaagggtttgttttttgaaaatcttttggagncgggttttaggggattgtttgggttcaanttggttnnggggagttttaaaggaaa

SEQ ID NO: 136184 - DNA, 334 bp, Arabidopsis thaliana columbia
  unsure (1)..(334): unsure at all n locations
catcaaccaaagtaagaagcgcacacacacaacatatttttttcacnacccaaagagatggcgacatcgggaacatatgtnacggaggttccattgnaaggttcggcggataaacactacaagcggtggagagatgagaaccacctcttccccgatgccatcggccaccacatccaaggtgtcactntccacgacggtgaatgggactctcatgaagccatcaagntttggaactatacatgcggtaaaattacatttattatngaatccaaagaatngtgctaccttaaatggnttgnaaccaanttatntacgnatatatttgcagnttggg

SEQ ID NO: 136185 - DNA, 267 bp, Arabidopsis thaliana columbia
  unsure (1)..(267): unsure at all n locations
aaattaaccgaagcaatagatagaaccaaaaaaaatactatcattagagaccgttggtttcttcttccctctttcttagcctctngtttctcatctccgagaaccaccaccgatgctcctccgtcttcttcgccggtgattttgtcttccgattgtnatcaatgagtcttcgtgtagtttcctccgttttntccggaatcaatcgaatccctaaccctcacgngnctcaaactcttttttnggntctaatnnctttcntctttcttt

SEQ ID NO: 136186 - DNA, 479 bp, Arabidopsis thaliana columbia
  unsure (1)..(479): unsure at all n locations
ttaccattcaccactcactttccacagctcgattgattatnaaacgacccacaagaaaagagaaaaaagtgagaaggcctaaaacataaggaccaaaaactattgtaaaaagaagaaacagacttaggaaccggacaacaagtctaatcaattcatctgttcttgccgccaaatggttgcncttcttttcagcaatttgtcgttcgatctcggcgatatcgtttagaactttnttaaccncctcgacgattgttttgaccaaatcattctggcggctgtcataacagagttcaaaagatctgtcagtggacaagcttatgtccctggacttaaccaaggnccaggggtcaaggaacaggngtatttccangttttcaacaaagggcccttnggnaaagggggccaaggtcccggccctgntttcgtnncgggggnaaagccanttttntttnggaccntnccggtttngggttttttcc

SEQ ID NO: 136187 - DNA, 550 bp, Arabidopsis thaliana columbia
  unsure (1)..(550): unsure at all n locations
agagtcagaacagaacaaaaacgtaagcaaaaaaaaataaaacagagcaaaatggccgtagttttacgtggaggcatcaccggaggatttnttcaccatcgtcgtgacgnttcatccgtcatcacaagaagaatctcatccgtcaaagccgcaggaggaggcatcaacccaacggtggctgttgaacgtgccacgtggctacctggactaaaccctcctccttatcttgatggaaatttagctggagattacgggtttnacccactcgggttaggagaggatccggaaagcttgaagtggtatgttcaagcagagcttgttcactctcgtttcgctatgctcggtgttgcaggaataccncttcacttgatctcctttcgggccacaagggattcggaatttacccggtttggnatnaaggntngngcttttnaaattttgattttcctagtncaaaaacttttaanaggttnancanttttnccttttgggggtttcttngcctaaanggtttttgggtttttttttccggggtcaaanncaanaangg

SEQ ID NO: 136188 - DNA, 253 bp, Arabidopsis thaliana columbia
  unsure (1)..(253): unsure at all n locations
tcagaatccggaacaagttaatgtgaatatacaatatatgttttttantnagattatatagtgagcgattgtaagaagccattaattacttgantcggaaggtttatttgtttgtaatttgtctctcggacnggttgattgggttaancttgtcaatgagtaaccctttgantctgtcgttttgtttggccggtcgaattatatagaantgtattatnggttataaaanggtatnagggttttgggagacttt

SEQ ID NO: 136189 - DNA, 310 bp, Arabidopsis thaliana columbia
  unsure (1)..(310): unsure at all n locations
attgtttttggtagcaaaattatccgttacatctcggtatcctgtgtgggtaagatcttnttgtnctgtcatttcgccttaaggaccagtaatactatcacacacagtgagtcagnaaaatccgattcaaatccaagctcgagacaggacctagcgagtttttgtcctgcaccttgaaggagaggacccgctggtggatgtaaatggtgcgganaacccgggaagcgacagatcattngatagagnagggcaggaangnaacnaccagtggatcttattagagctttttggngnnaccaaccacccattt

SEQ ID NO: 136190 - DNA, 375 bp, Arabidopsis thaliana columbia
  unsure (1)..(375): unsure at all n locations
tgaagggaaagaatttnaggttaaactgagggaaacgaaaccagggtttttntcaaacgacttaaaagaagctcttggtatncctgaaggcgctcctcccccatggctgattaacatgcagagatatggtccgcctccttcttacccacatctgaaaattcctggtttgaatgctcctattccaattggagctagctttggttttnatgctggcggctggggggaaacctccagtttacggatatgggcgtccattgtattggagatgnttttggtgtccagcaacaaggtcagcctactncgggggaggagncaatttgntaagngnaaacaantgggggtgattttanagggaagngggnagnaagaaggagg

SEQ ID NO: 136191 - DNA, 432 bp, Arabidopsis thaliana columbia
  unsure (1)..(432): unsure at all n locations
ggttcatcatggtggtgctggaacaacggctncgggtcttaaagcctcgtgcccaactacaatcgtgcctttntttggagaccaacctttttggggagaacgagtgcatgctagaggtgttggtccttcaccaatcccagtggatgaattctcacttcataagcttgaagatgccataaatttcatgctcgacgataaggtaaagagcagtgcagagacactagcaaaggcgatgaaggacgaggatggtgtggctggagccgtgaaggccttctttaaacatcttccaagtgcaaaacaggatatctcggatccgatcccagaacctttnctggatttntntnttttcaaggaaatncttttggctgttcgtaacttttttncnntcccctncagaannttcctcttttncncntttgtanttggtggccc

SEQ ID NO: 136192 - DNA, 396 bp, Arabidopsis thaliana columbia
  unsure (1)..(396): unsure at all n locations
tcaaataccatgatggctactctagccagtnttctgcagtcacagatgatgaaggaaaggattccagctccagcaagcatggaactgagaggataattcgaacagtatatgcccaaaataaggcaacaccaaagaaaagagaatctttggggaactctggttatggttcccagcggaaatctcttgatgataaccgtggtgtctccacatctacgnaaggttatgcaacaaaattgcaagagtctgaggagcgcaanggggagttgctggctnagattatnttngaggngcagcgtggtagagagctctcttgtgaacttgnaaggaatactcaccttnnaaatngctcttaaagctttngggaaagccnttttnggncggggaaaagggggcaat

SEQ ID NO: 136193 - DNA, 451 bp, Arabidopsis thaliana columbia
  unsure (1)..(451): unsure at all n locations
tgtaagtcggagactacgtaaacnacaganctgcgatgattttgggtgtaagaaaganttggggtctcgccgtctcggggaattttttttttgaattcgttcgttgttaacattgcaggtgcacaccaagcgttcgataaaatagccaagtnagcagtttcatgtttctncgggcacctactacttgtccgacttattagtatgangacttacatgctcccatactttgaaacttgttgtaaaggtattgcncttgcggcantctcggcaaagctagagcctgcaatggagtcctcatgttacaaagcaatccaggnttctggntcatgtcaatcctctctccagggacagggggactccatgngnagcaatnaacaaattnccctcaccaatgtcatcaaggtcatgctgngctgtgccgntggcaaaacctnttcctgtnccaatggag

SEQ ID NO: 136194 - DNA, 313 bp, Arabidopsis thaliana columbia
  unsure (1)..(313): unsure at all n locations
caggtcctcctngttttnaagaagaatctatgatataattaanttctcagtaagataccagggttcactnctatcttnccctaaactnttgtngcaggaataaaggattgtaactnctacttcatgtttccagagaagggccagaccaccacctcctgggctatgcgggggaacaaggtgatgtgcagaaaaattcatccagtttaaagaggtataatagttactcgtggagtaggttgacttgaggaagnnttggaggctccagggttggaggagaagcttttccttnaattttccgngggtctcctaaggg

SEQ ID NO: 136195 - DNA, 475 bp, Arabidopsis thaliana columbia
  unsure (1)..(475): unsure at all n locations
cacngtatcagggaccgggccggaagtncccgggtcggcccacngccgtccgggaacaacgaaaaactcntgatcaaaccntggtgagattgccaagaaacttggagtggtatgaaaaatttacgggatgttgatgaagttatacctntaantgcaaagtatggacatgggatagaggangtnaaagagtggatattatccaaacttcccttcgggccaccttattatccaaaggatattgtgagcgagcatccagagagattttttgtttcngagattgttagagagaaaatatttatgcagtaccgnaatgaagttccttatgcaatgtcaaggtgaacggtgctgagctaccaaaaactagncccagcttgccaaaaaagatttttattcaagtgggaaggnagtagtgggntaaaaatttcttcaggnggtccatccccnnttngggggaaaggtaaggggntttaacccc

SEQ ID NO: 136196 - DNA, 452 bp, Arabidopsis thaliana columbia
  unsure (1)..(452): unsure at all n locations
ctatactttgcagtcattcttcttcccgtattccttctcggatgctatcttnacaacgagaagcagctgagggttggccagtttcaggaattcaatacacataacctgcaagaacacatcactccactacaacaaagcaaagaagataaagacaagaagactgatcttgttccattagaattctgtgatgttttcacaggaaaatgggttcttgataacgtcacacatcctttatacaaagaagatgaatgtnagtttctatcagagtgggtggcttntacaagaaacggggagggccagactcttaaggtnccagaaatnggagnttggcaaacctcaaagnttgctnctttnnccaagggttcgnncagtnaagctgcttcttggaggaacctcagggngaaaggaactnattngtccattggggggttnaattncatttcattcagtgg

SEQ ID NO: 136197 - DNA, 215 bp, Arabidopsis thaliana columbia
  unsure (1)..(215): unsure at all n locations
ccctgtgacgagtgcttcaaccacgcggataaagagtctttggctgtagatnacgagcttttggtcttcgggagagagttgtttcagtttncnatttggaaatacagtttgaggtctcggtgttgggtcaaatncgaaggaatncatcgtcctcgctgcttgtttncatcgngaagcctcggtgggattnctatagttgcgggaggaactgatat

SEQ ID NO: 136198 - DNA, 390 bp, Arabidopsis thaliana columbia
  unsure (1)..(390): unsure at all n locations
ttccagaacagttctggtaatnncttctngtttgattatattggaagctttaaaacctctggcaatggaggctctgggtttntttcttacatcaagatcgcaagtacnggttctggaggtggagataacggagaagatgatgggaaacatttnccttatgtagtgattattgtcgtggtaacagttttnatcatcgctgttttnatctttgtggccttccggattcataagnggaagaaaatgnttttgggaggctcctcaagagaggttcaggaaggaaggtaaccttctttggnggancttatccggggatncccaattccgggtcggnttacaaaagancttcagtcaacggcggataaccttccccgggtaaaagttaggcaaaga

SEQ ID NO: 136199 - DNA, 256 bp, Arabidopsis thaliana columbia
  unsure (1)..(256): unsure at all n locations
attccttgcacacgaggagcatactgagctgtagtgcgtgacgatcctcttcgctctcacgntcgctgcctcagccttcgctttcattcctcctctcaccatcattcatctgcaccatcgtcgcctcgctgtcgacttgaactcaagggtcgctcttnctnatcccatcacttcatcangctttccccctcctggctncncctntgctccatccctgaacccttgnccttctntgcctcaccatccacctcgntct

SEQ ID NO: 136200 - DNA, 561 bp, Arabidopsis thaliana columbia
  unsure (1)..(561): unsure at all n locations
tgatgcctcaaaaagcgaaggccacaggcaaatattgactaaggaacttgaggcagtgggcttgcgactaaacaaaactcctccgcagatatactttaaaaagaaaaagactggtggaatctctttcaacactacagcacccttgactcacattgatgagaagctctgttatcaaatcctgcatgaatacaagattcacaatgctgaggtgctatttcgtgagaatgccacagtggatgactttattgatgtcattgaaggcaaccgcaagtatattaagtgtgtttatgtctacaacaaaatagatgttgttggnaattgatgntgtggntagnctatcccggcagccaaattccattgttattaagctgcaatcttaagcttaactttaggccaggnctactttgcaaaggnntgtgggacggnaattggggccttcttgagnggtttacttngaaggcngnaaggccanggcaanccagntttcgatnngcccttttgtcccncncatttgtccgaggtggctcacagttggaggcttttttaaccncnggccccang

SEQ ID NO: 136201 - DNA, 203 bp, Arabidopsis thaliana columbia
  unsure (1)..(203): unsure at all n locations
tatatttccagtgagcttgaaacatggcttcagtggctcctaaaatcgctaaagatgtaaccganctactagggnacactccattagtgtatctaaacaaagtagctaaagnttgtnntggtcatgttgctgctaagcttgagatgattgganccangtnctagcgtcaaagacaggtgcttccgaaaagtttaaaagctctg

SEQ ID NO: 136202 - DNA, 307 bp, Arabidopsis thaliana columbia
  unsure (1)..(307): unsure at all n locations
tgagtcgcctaaatgggataaagctgtaaaattnatattggtggatgtctctgaggnagagattgngctaaggaaacctcatttgggacttnttggagatgctaaaactgtgattggntnnttgaatagagagatcaaagncgatcctttttgtttagggaagtctaattcatgggtggaatcgatttcgaagaaggcgaaagagaatngtgagaagatggagatacagcttgctaaaggtgtngttcctttcaatntcttgacctcctaatgaggataaatcagagaccgctatttttggcctntg

SEQ ID NO: 136203 - DNA, 244 bp, Arabidopsis thaliana columbia
  unsure (1)..(244): unsure at all n locations
gaaggtgataaggagcatttgangtctgaaatgaacttngagaaaacatttgggcaatcatccatctttgtaacctcaactttgatggaaganggtggtgtncctccgtcatcaagtcctgcagtgctcctnanagaggcaatccatgtcataagctgcggttatnaagacaagactgagtggggaactgngctgggttggatctatggctctatcacagaggatattttgacgggnttcaaga

SEQ ID NO: 136204 - DNA, 209 bp, Arabidopsis thaliana columbia
  unsure (1)..(209): unsure at all n locations
cccgggcggcccgcnggntccaaagacggtggcaagtatgtggagtntctgttgtntgtaagtaagaaactggacagggaaggtgtagtgacaggtgttttctgtttcctgcaacttgccagcnatganctgcagcaagccctccatgttcaacgtttagctgagcgaacngcagtgaagagactaaaggntctagcatacataaaaag

SEQ ID NO: 136205 - DNA, 257 bp, Arabidopsis thaliana columbia
  unsure (1)..(257): unsure at all n locations
ctatggagatggctcaaggcttcagcatgtaaagcccaaaggcttcctccaggtccaccaagattncctatttngggtaaccntctncaattggggcctttacctcatcgggacttggcttctctatntgataagtacggcccacttgtctacctccggcttggaaaatgtagatgctatcacaacgancgatcccnataccatccgtgagattnctttttncggcaggaccgatgtttttnaatcgggaccctaaa

SEQ ID NO: 136206 - DNA, 291 bp, Arabidopsis thaliana columbia
  unsure (1)..(291): unsure at all n locations
ggcatttntnttgtagcgacaggaattgtgccaganctgcaacagcaatggcgacggaatcaattttcctcaagcctgtatctttcgcatggtttacgaaaaacccattgaatcaatttcataaaagangacaactttcctatcgaattcgtcgttttcgattcggtgtaattngctccaagtcatctgattatnaagatttccagagttatgcaagacctttgcgtctctnaccagcaggagaaagtgaaagtttttagagggnatncatctttcanctntgagcgaatc

SEQ ID NO: 136207 - DNA, 227 bp, Arabidopsis thaliana columbia
  unsure (1)..(227): unsure at all n locations
gccctctgcttcctcctcaccaacgcttccatctaccgcaccgttgtcgaattcgaagaagatgacgccagcaaccccgtaggtccaaganagagatgccagaaggagtttnagcaatcacaacacctaagagcttgcnaganatggatgagcaagcaaatnaggcaaggacgtggtggtggtccttccntcgacgntgagttcgatttcnagggnccccagcaggg

SEQ ID NO: 136208 - DNA, 454 bp, Arabidopsis thaliana columbia
  unsure (1)..(454): unsure at all n locations
agtgtggtgaacccgattaaggatggttccaagagagcggttctgaagaagaatccattgaagaaccttaatgtgatgttcaagttgaatccttatnctaagaccgcaaagagaatntntctgttggctgaagcttcaagggttaaggctaagaaggagaagctcgagaagaagaggaaagtcgtcactaaggaggaggcccaagcgatcaaagcagcaggcaaggcttggtatcagactatgatttcagacagtgactacaccgagttcgataacttcaccaagtggcttggcgctagtcagtaatgatgctctcgtcatcgcaaagtctcttatatcctaggcaaagattttggttttcntgatttatgttcttccgnttgtatttgggatttaacctggggnttttaatngttgtttgnngnttgggaaagnccgggtttttaaaggncct

SEQ ID NO: 136209 - DNA, 201 bp, Arabidopsis thaliana columbia
  unsure (1)..(201): unsure at all n locations
acttctgtctgttagtgaaaacaagaacccctaaattngtctggaaaggaagctttttnattgatgnntctctgtttactttgtagagcttcaaaaaactnctaaaggaatgantgtttctttnatttccaagagagttttggttcgttgactgagtttagttttggagatctagcaactgnaagctggttaaatacttaa

SEQ ID NO: 136210 - DNA, 243 bp, Arabidopsis thaliana columbia
  unsure (1)..(243): unsure at all n locations
tcgtagcagctcgattacgttcttaatcgttnctttattcaccgtcttaattaatccggcgatctcttctngcgccgcgtccttnatcaagctgcctcggtcttccatcgcttcanactgcgagagttggagattagccgctgagaccaacaatgttggaccctggaaggtgattccntcccaatgcgaaaactatattaaaaactncatcaanggggggccagtttggcaaagacntncggt

SEQ ID NO: 136211 - DNA, 276 bp, Arabidopsis thaliana columbia
  unsure (1)..(276): unsure at all n locations
ctttcatgttcggagagaaatctataaacaagatgggctttggaggagtaagaaatnccacaacaccatcgattatnagtgaagtaccatatgcagnagaagttgcatgtggtggctaccacacatgtntagttacaagaggtggggagctttacaccnggggctcaaacgnaaatgggtgccttggaacagattcaacgtatgtntcacactcccctgtgagagttganggtcctttncttgggagtctactgtatctnaggtatcttngtgggt

SEQ ID NO: 136212 - DNA, 261 bp, Arabidopsis thaliana columbia
  unsure (1)..(261): unsure at all n locations
tctttaaaagtcaagccgaggccaacgaagtttnaaaancttttgagcctcagaaggaagaagctaagccatgatttcncatgtaacacaaactctatatgtttgtatgcatgcagtggtcaattaccgtatgtntgtataaataaaagaggcatggtgcctaagtaagntacctagagagagctcaatagnangaaaccaaaggttcattaaatggttttnggttatgaggtgtttttttcgtggttgntntaaataata

SEQ ID NO: 136213 - DNA, 203 bp, Arabidopsis thaliana columbia
  unsure (1)..(203): unsure at all n locations
agtctgaatctnagtcaggctcatcatcttcttctagttcggatgaaagcgacagagaaaagaggaagcgaagaagangatcatgangactgttttgcttgctgtctccagactncagcaaatttctttgaaaattctcacatcttntttttgggtatttcaacttggaatnttccttgagaacctcacntnagcaaatcatc

SEQ ID NO: 136214 - DNA, 283 bp, Arabidopsis thaliana columbia
  unsure (1)..(283): unsure at all n locations
acatggcagtgaagccaatacccnaaaagttcacatacacaagagcttgcatattgaagggaagatncctcttttaataagcaatcgttttatgtngccatatagaagggatcacctatngctcaataggataaagccagcccctgattctnaagacgtgtcttctctgncgctgaacgaaaaaagtgtgttagttgtcagtnccaaaanttgctcagaaaatagcgctgaaacngggtgtccatgtccattgantttnatggttggaccaagggggaacctt

SEQ ID NO: 136215 - DNA, 305 bp, Arabidopsis thaliana columbia
  unsure (1)..(305): unsure at all n locations
actcaacctcaatggccgcctcaacaatggctctntcctcccctgccttcgccggtaagncgtcaagctttcccccgcggcatctnaagtccttggaagcggccgtgtgacaatnaggaagactgttgccaagccaaagggcccatcaggcagcccatggtacggntctaaccgtgtnaagtacttggntccattctttggcggatnaccgagctaccttaccggagagttccccggagacntacgggatgggacaaccgccggacttttnagctgacccccgagacattngnaaggaaaccgtg

SEQ ID NO: 136216 - DNA, 210 bp, Arabidopsis thaliana columbia
  unsure (1)..(210): unsure at all n locations
acaggttaactttaatnacttaaattnntttatgtttnatggttccgtggcgtttcataagaaagctagaaatagattatngggttgcaagtggttcattatttnaccccggctattgtaccnccttttaaccagcaggctatttgggcccagttttacgaggattacttttgcagctaataaatgtncgttctttccttgatttattgt

SEQ ID NO: 136217 - DNA, 279 bp, Arabidopsis thaliana columbia
  unsure (1)..(279): unsure at all n locations
caaangccgatggccgcctggnctggcaaacnaacacggctaacaaaggcgtcgtggggntcaaaattttggagaatggcaatatggtaatatatnattcaaatggaaaattcgtatggcaaagctttgactctccgacagacacgcttctngtcggacagtctttgaaactcaacggtcaaaacaagctcgtaagcagactttntccaccggtcaacgcaaacggaccgtacagtntcgtnatggaagccaagnagttagtcttgtactacacgncaa

SEQ ID NO: 136218 - DNA, 308 bp, Arabidopsis thaliana columbia
  unsure (1)..(308): unsure at all n locations
aggagatgctaacagcattagtnttggagctgggaccaatattnaggacaacgctcttntccacgttgctaagaccaacttaagtgggaaggtcttacctactgtaattggagacaatgtcaccattggtcatagtnctgttttacatggctgcactgtcgaggatgaggcctatattggtacaagtncaactttnttggatggagctcatgttgaaaaacatgccatggttgcttcaggagctcttgttaggcaggacactnganttccctctggngaggnttttgggaggnaacccanctaaattt

SEQ ID NO: 136219 - DNA, 249 bp, Arabidopsis thaliana columbia
  unsure (1)..(249): unsure at all n locations
cngggcggcccactgngtccgcagacaatgatgatttctaccaaaaaaaaaagattatatattattgtctttgttatcttgtatttgtgtgttcatctagttacttatgtatgtgtgtatgattgcttctaaacttcacagttatgtgttttttnctgtnctcttatatagtttcattggggtgtgtatttgtngttgtatgaattaataaataatatccttataacaaaaaaaaaaaaaaaaaaaaaa

SEQ ID NO: 136220 - DNA, 253 bp, Arabidopsis thaliana columbia
  unsure (1)..(253): unsure at all n locations
atccaaaagctctagagtctgctaaaggacgccagctgcnatttcttgcaaatattgatcctnttgatgttgctagaaatatcagtggactaaatccagaaactactctagtngtggtggtctcgaaaacgtttacancagctgaancaatgcttanngccagancattgagggnatggttaacagctgctcttggggcttcanctgttgcaaaacatatggttgctgtcagcactaatcttgcgttagtagg

SEQ ID NO: 136221 - DNA, 287 bp, Arabidopsis thaliana columbia
  unsure (1)..(287): unsure at all n locations
aatattcctcgnctctgcaatagctggatcatgcttaccttctgggtttgcttacgttgacgtttgcaatcacgnntncgaggtgttccgntccgngatcgagcaaaaatgtcctcgtnctttgtatccaagccctcctatcgaggtagatggagacttgctagacaaactcatggatgcaaaccatggaaatncctatatatccatactgtattatacctnacggtgcccgttttcacgtgcagttacgcccanagtttgatggttcnaaagttcaaatttttgct

SEQ ID NO: 136222 - DNA, 237 bp, Arabidopsis thaliana columbia
  unsure (1)..(237): unsure at all n locations
cgctgaggagaaagctgagaccgagcctttggagttccatccacttgattgatatgggtgttttgtnagtgtnattttttgttttgttgggattaaggtgaaccggatcttggttagcnattgacctctggttctngtnctttttttnctttgtnatgaacttttgtngtttcgtttaataatcaaaagttgtataanctaagtttgggattaccaccctattgagtattgagtgat

SEQ ID NO: 136223 - DNA, 300 bp, Arabidopsis thaliana columbia
  unsure (1)..(300): unsure at all n locations
cccaactagtgcacacaccaaatcagganccaaatccatttcntgtcaataatatacaccaaaaancaactcaggtgtactgnggcagatataatangcacagcctcaagtagatagatcatcattctggtttctcactnattnacatacaacctttgaaggaggntcttcaccagtcaccaacacgaccatatccantcaaaaccaaanccgagagccccaagaaacccatacaggttctttaggattacatgtttttgtccntaattatatcccctcaaattanaacttttttttctg

SEQ ID NO: 136224 - DNA, 268 bp, Arabidopsis thaliana columbia
  unsure (1)..(268): unsure at all n locations
tcaaactagacacaacanttaatgcattgagcagaagaagaagaagaagatttaagaagagaaagaaaacaaaaaacatggaagttaatggagaagaagagagaagaagtagaagagaagatgaagaaaaagangattnctactactntttcctcacctntccntgtcctntttgtaacaantttttccaagccatattgaggtgtctnggtcttgagtcatcatcaataccaccatctncatcatcatcatcaccatccttagtaga

SEQ ID NO: 136225 - DNA, 235 bp, Arabidopsis thaliana columbia
  unsure (1)..(235): unsure at all n locations
ctctcagcttcaccatcaccagttctccgtcggagtcaaangcaatnaacnttggtntcgtccgactcgtagaaccctaatttcgaaatcatcttgtttcaatctccctcaagaacccattctctncgaagctctnaaggagccaattgcatttttgggtgggatgtttnctggattgttaagacttgatctaaacgaagagccgctcaaggnttgggtnacgcgaacagtttaa

SEQ ID NO: 136226 - DNA, 337 bp, Arabidopsis thaliana columbia
  unsure (1)..(337): unsure at all n locations
aatggccgcctcaacaatggctctntcctcccctgccttcgccggtaaggccgtnaagctttcccccgcggnatctaaagtccttggaagcggccgtgtnacaatnaggaagactgttgccaagccaaagggcccatcaggnagcccatggtacggatctaaccgtgtnaagtacttggntccattctctggcgaatnaccgagctaccttaccggagagttccccggagactacggatggnacaccgccggactttaagcttgaccccgnggcattcgcaaggaaccgtgagcttgnagttatccncagcaggtggggcaatgttcggagccttgg

SEQ ID NO: 136227 - DNA, 304 bp, Arabidopsis thaliana columbia
  unsure (1)..(304): unsure at all n locations
acaaaatnagtcgatgactgacgacggcnactaaatcaacaccgcagtaggaagagaaagcnatggngttcgtttcgaggatacgtaggcagagtnattacaatacatatccatctncnattccaattgtaatcgataatggcgcttccnacttccntatcgggtgggcaggagaaactaagcctcgttttgttttccgcaatatcgtgcaaagaccacgcnacaaagctacaggtgaaacttttactattgttggcgcctggttccttccatgntnaagtactttaattgccctcgtctggcc

SEQ ID NO: 136228 - DNA, 231 bp, Arabidopsis thaliana columbia
  unsure (1)..(231): unsure at all n locations
aggaagcttccgagttcgaaaacgactacgtttcgtatggctgtnaattgtcgtcaccgtttnantcctaaactgaatccggagtatttcggaaacgcgattcaaagcgttcctacgtttncaactncggcagaggttttntnacgtgatcttaaatggtgngctgatcagcttaaccagagtgttncggctcatcaagacgggaggattcgtagcgttgtggcggattgg

SEQ ID NO: 136229 - DNA, 282 bp, Arabidopsis thaliana columbia
  unsure (1)..(282): unsure at all n locations
gatacatttggattcgaaaagagcagcctagaggatagacaaagagctgagaagaaaagcagagaagagaaaggccaaaantttccnccaaaatggtttnatgaaacanaagangtcactcctacaccatggggtgatctcgaagtttaccaattcantggaaagtactcggtgcaccgngccacagctgaaaactntgaggatacaaccgntgtgaagttgncccaattcaacccttggcaattccaagatctctntgcttaatcctttggtgccatttgt

SEQ ID NO: 136230 - DNA, 279 bp, Arabidopsis thaliana columbia
  unsure (1)..(279): unsure at all n locations
aacatgacgtttcagggggagatgaaaataaagaaaattaacaatgttgtggttacaataagagggagtgaagaagcggataggtatgtaatacttggnaaccatagagatgcatggncatatggngctgttgatccaaacantgganctnctnctttacttgacattagtcgacgatttgcncttttccttaaatctggttggagaccacgtaggaccattctcctntntagttgggatgcagaagaatttggaatnattggttcacctgattggatt

SEQ ID NO: 136231 - DNA, 202 bp, Arabidopsis thaliana columbia
  unsure (1)..(202): unsure at all n locations
gaaaggntgcacagtggttcaccatgangcgacaacacgctgtagcaactatggcagacagtctttactactctaaattccgagattactgcgggccaggtatagagancancaagaactgcatagctgatgaacactatctgccaacattntttcatatgcttnancccggtggcattgctaactggactgtaacacaant

SEQ ID NO: 136232 - DNA, 207 bp, Arabidopsis thaliana columbia
  unsure (1)..(207): unsure at all n locations
ctcgggaacagcacgacggtctccctaactcctttaagaaaccnttcaacaactgtccctnagttgggctcacttggtgcaatatacactttaagtntcacatgggctgagatccanaccttgantcctgcnatttaaaacccctacagnntaaccagcctgtttaggaatccaaaacagaaaaatgctgggaagcttttttaactt

SEQ ID NO: 136233 - DNA, 278 bp, Arabidopsis thaliana columbia
  unsure (1)..(278): unsure at all n locations
acgtgcccaatcatttntcctaatccnatctnactctgcacccacccatcaatggcctccanatctntnaatggcgattccaacattgtnaagccgaggaagattgcactggtcaccggaatcactggccaagatggatctnacctgaccgagttcctgctcganaaaggctacgaagttnacggcctcatccgacgatcctccaatttnaacactcagcgactcaaccatatctacgttgatccccacaacgtcaacaaagctctcatgaagctcca

SEQ ID NO: 136234 - DNA, 208 bp, Arabidopsis thaliana columbia
  unsure (1)..(208): unsure at all n locations
tgaaatctttcggggaattcnatttggatggattgttgaaggcttcacctgaggttcttgggaaagnaacagttgggtcgtcgtataaggcaagctttgngcatggnttagtggtggctgtaaaacggttaananatgttgtggtgcctgaaaaanagttcagagagagattgcatgttttgggatcaatgagtcatgccaatctngt

SEQ ID NO: 136235 - DNA, 257 bp, Arabidopsis thaliana columbia
  unsure (1)..(257): unsure at all n locations
accatattatcaggaacaaaatggtcagantcanctcgagtattcangatcataaactcatgtnaccaaacgnnctggccggcgataactccaggggaaaacttcaacggaggaggattcgagctcaaaccgggccaatccatcgtnttccacgcaccagtaggctggtcaggcagaatttggggacgaaccggttgtaaattcgnntcaaccggaaccggnacatgcggaaccggttcattgcggttcaactctaa

SEQ ID NO: 136236 - DNA, 429 bp, Arabidopsis thaliana columbia
  unsure (1)..(429): unsure at all n locations
agggaccgggccagaattnccngggcggcccactgcagtccggaantgntttggttccatcagtcggcgtgtttcctccgtcagtnttcgtnaccaatggcgagagcgtaccgactcatggagtagcggccggtttaggagctattgaaggagtagtgatggagattgtggtgacctttgctctggtctacacagtctacgccacagcggctgatccaaagaaaggttcactcgggaccattgctccaattgcnatcggtttaatcgttggtgccaacatcctcgcagcgggtcccctttagcggtggttccatgaacccggccaggtcatttggaccagctgtttgtanagtgggtgaatttntctanaagattatggnttctaacttgggtnggggnccactaagttngggtgggtgnaactttnnt

SEQ ID NO: 136237 - DNA, 211 bp, Arabidopsis thaliana columbia
  unsure (1)..(211): unsure at all n locations
ggatatttcaattcaattnagtcttcanataaaacgccaacacagttagagaaaaanaggttcgatttctatacaaagataccacaaaggaaagtncacaaatttncatagantagaccacaaacaaactctctttctctgctctcattcacataatangcagccgntcactttccggggacgaagttggtggcgaaggcccaagcgttgt

SEQ ID NO: 136238 - DNA, 207 bp, Arabidopsis thaliana columbia
  unsure (1)..(207): unsure at all n locations
gctccatcaagcggtggtggtggtnctgctgctgctgcccctgcggagaagaaagaagccaagaaggaagagaaagaagagtctnatgatgacatgggattcattctctncgagtaaggtttttttccccacggaaaggagtcgagatttnattttttntnctcttagtggttctggttttnccncctctttgtagttcggtgttat

SEQ ID NO: 136239 - DNA, 258 bp, Arabidopsis thaliana columbia
  unsure (1)..(258): unsure at all n locations
ggaacatgaagatttgaagaaagagagagagatggcacatagagaagcattccaagctttgtttggttttctttttgtaggtgacaaaagatgattgccctgtnatttnccatgatgatttcatctactctnaagaaaatggtattgtnaatnagagtagagtgacggntctaagtctgtctgaggttctcctntatggacctcagaaggaaactgnggaaatagggnaggcactgnttgagggaatctaaagaaggg

SEQ ID NO: 136240 - DNA, 210 bp, Arabidopsis thaliana columbia
  unsure (1)..(210): unsure at all n locations
cttattgtggaagattgcnggaggaaactaaagatgagctaggtnaggtgataaagantggntccctaaaagcaggagaagtccgaaaggttctntttcaaactttgagtaaccactgccgacaatcaagtgaaacagactcagaggatgnggaggncgncgatgcagatgatttataactcattccagtgaaaagttcacgtcaaatta

SEQ ID NO: 136241 - DNA, 237 bp, Arabidopsis thaliana columbia
  unsure (1)..(237): unsure at all n locations
gtnctcaaaagctgctacgcgttgttggggacccaacttatatctntaaatncccaagtaattaacggtgtaattacacgactatctttggctttaagtatatatatcttntttttaatgaacttnaatctctctctcgatatatcanctncggtcatagaactcaatggcgncacacgacttcgatttcactgatcccnatggaaataaagatagaaaaagtttgtactcaaacca

SEQ ID NO: 136242 - DNA, 237 bp, Arabidopsis thaliana columbia
  unsure (1)..(237): unsure at all n locations
aatnagtgtatgtntnacggaataccagattctggccagcnacagagcggggatataatcaacatcgatgtcacggtttacttggatggttaccatggagatacgtcgagaactttntnctgtggagaagttgacgaaggtttcaaacgacttgtgaaggttacggaagantgtttggagagaggtattgcagtttntaaagacggagcaagcttcaagaaaatcgggnaaagatca

SEQ ID NO: 136243 - DNA, 204 bp, Arabidopsis thaliana columbia
  unsure (1)..(204): unsure at all n locations
ttcnncgtcggcnatctcaaagcttctccttccatcaatggcttcccttgcaaataatccgtntccgcttctaacttctncttctccggcttaggtggtcctttaaacacctngacccctaagggcgtaggtttcnccccgccaatgtcctaacttttccgggtctaaacactttaggactctngatgacaacgttgaattcgc

SEQ ID NO: 136244 - DNA, 320 bp, Arabidopsis thaliana columbia
  unsure (1)..(320): unsure at all n locations
gggaccnggcctgaattcccagggcggcccactgcagccgggtcagatttgcatttgcgtagtgatcaaagaagcttcanatcttggggcaactgagctactttnaatcttgaagtatttttaatgcccatcaaaggaagcaattagcactatggctaaggtaagagaagaatgggagagtcaggctatgttggctattgaaaaggtgagcaacacagagctatcaaagaagtctaaagttgcagaagaggcttctatcttgtnaatgggttgcccatnacgggttttnaacctaaagggnttttncctnnataannttt

SEQ ID NO: 136245 - DNA, 258 bp, Arabidopsis thaliana columbia
  unsure (1)..(258): unsure at all n locations
cgaagcattcccgttggtacatggtgaccccaagtnccccaagattatatggccaccaaaggagctttgcccattgttttatctttnaagtaatcagaaaagcatagagtgggaccatgaacatgtctacaagtncttnaagaactactatgggcctaagctcgtatctntttacaaggaaaagagtgtcagcnggagcaaggaagagaccatntcagccactgangacttaacantggccaccaatgntctggttgt

SEQ ID NO: 136246 - DNA, 230 bp, Arabidopsis thaliana columbia
  unsure (1)..(230): unsure at all n locations
agcatagatgtctggctcttgtccgtnaacgtttgtttttncgacaacgtttgancggctctntnctgacaccatctngtttctntttaacggtggtggttggcttgtgtctggcttccgttggcttctacagtagcggtgggctagctaagtnctagaaattnaccatatagctctggtgtttctttaagcttttggccagattgtttttggttcaaaattatgctttc

SEQ ID NO: 136247 - DNA, 201 bp, Arabidopsis thaliana columbia
  unsure (1)..(201): unsure at all n locations
ggtagatggagttttnagtggtttggngtcaacactcctggttcttttgcngtncgggttatgtncgaaaggttcccttcgacattggtgagtctatccaatatggaaatattcattaaagntaataacacaaaggcatcagcaaacatcaaacgcctaaactggatagaaancaaaatcaccctgtcattggaattngca

SEQ ID NO: 136248 - DNA, 200 bp, Arabidopsis thaliana columbia
  unsure (1)..(200): unsure at all n locations
atgagtgcaagcncaantncttggagttaaaagcaaagaggaactataggttcattgtnttcaaaattnatgagaaggctcagcaagtnatgatagacaagcttgggaatccagaagaaacttacgaagatttcaccagatctnttcccgaggatgagtgccgatatgcttgtctatnactatgaatttcaccacccctg

SEQ ID NO: 136249 - DNA, 278 bp, Arabidopsis thaliana columbia
  unsure (1)..(278): unsure at all n locations
ccccgagctctgttcggaaagttgttgttcatctaagagctactggaggtgctcctatactcaaacaatctaagttcaagattccagggactgataaatttnccaaagtnattgantttnttagaagacagcttcattctnattcgttgtttgtntatgtnaatagtgctttntcgccaaaccctgatgaatcagtcattgancttnataataactttggatttnatggtaaaccggtggttaactatgcttgtcccatggcatgggggctaaaactg

SEQ ID NO: 136250 - DNA, 303 bp, Arabidopsis thaliana columbia
  unsure (1)..(303): unsure at all n locations
ggagataatggnagaagggaaggcctccactctggtttnaatcctcgtggtcgctcttagtttagtagccttcggcttctccatcgcngccgagcgccgccgcagcatcggnaaatctattcaagacccaataacaaacacaacgttntgcgtttataactctaatgtagccactggttatggagttggagctttcctttncctcctctctagtgaatcattgcttataagtgtnaccaaatgcatgttttttggangncccttangcccctggaagtaaccgtcctttggcctatnaancta

SEQ ID NO: 136251 - DNA, 302 bp, Arabidopsis thaliana columbia
  unsure (1)..(302): unsure at all n locations
atgagattntaaagaggggtaaaactncaaggnctgggggaagagggattnnncgtgggcgtggtcgtggacgtggtggtggtggaagaggagctggacctgctagaagaggtcctcttgctgtaaatnctcgtccatcatctttnaccattaacaagcctgtccgtagggtcaggagcttgcnatggcaaagcggtttgtttgaagatggcctaaganctgccggggcatcaggagttgaagttggaaccaggctccatgttacaaatctggaccagggtgtnacaaatnaaggtataagg

SEQ ID NO: 136252 - DNA, 209 bp, Arabidopsis thaliana columbia
  unsure (1)..(209): unsure at all n locations
cgacgatgccgagcagatacccaggagcagtaacacaagantgggaaccagtagtnntccacaaatnaaaacaaaagagccaagacctacgcnatccgaaagcggttaacgcagctntnagaaacggtgtcgcggttcaaacggttaagaaattcgatgccggttcgaacaaaaaggggnaatctacggcggttccggtgattaacacg

SEQ ID NO: 136253 - DNA, 285 bp, Arabidopsis thaliana columbia
  unsure (1)..(285): unsure at all n locations
gtgtgaagaaaatggcaccaaaggcagagaagaagccggcagagaagaaaccagtagaggagaaatcaaaagcngagaaagctcctgcagagaagaaaccaaaagcnggcaagaaactcccganggangccggtgccggcggcgataagangaagaagatgaagaagaagagtnttgagacgtacaagatctacatcttcanggttctgaaacangttcatccagntattggtatttcaggcaaagctatggggnttatgnacagtttcatcaacggcatctttg

SEQ ID NO: 136254 - DNA, 280 bp, Arabidopsis thaliana columbia
  unsure (1)..(280): unsure at all n locations
ccacaagagtggtgatctctgcagctaaagtttcanactctacaatgtatctntanngcttgaaagtncagtgttctgtcggaggatactgtttttttgaagggcaatcgcgtcatcatttgtncangtcgnggaaagatccatacgaggcgttgcttaacacattggaagagatcgtgcaggcgatgcagtagtcggtcctctctcnacantatcggattaggtcaagcacatattggttttaagtgagtggggncgtcggtaagtggttaaagtccac

SEQ ID NO: 136255 - DNA, 313 bp, Arabidopsis thaliana columbia
  unsure (1)..(313): unsure at all n locations
ctgcactactcaacctcaatggccgcctcaacaatggctctntcctcccctgcnttcgccggtaagncgtcaagctttcccccgcggcatctnaagtccttggaagcggccgtgtgacaatnaggaagactgttgccaagccaaagggcccatcaggcagcccatggtacggttctaaccgtntnaagtacttggntccattctttggcgaatnaccgagctaccttaccggagagttccccggagactacggatgggacaccgccggactttnagctgaccccgngacatttcgnaaggaacccgtgagctt

SEQ ID NO: 136256 - DNA, 375 bp, Arabidopsis thaliana columbia
  unsure (1)..(375): unsure at all n locations
atcaggcgcacgncgtggagattagttngcacgaagtgttccttggtnagtcagggtaatggtcacatggacacattgagattcgcntttntctactgggtctatgtctagctttcatgctctctgtagctttcaccagtggccaatcaatgttgcttgtncatgttggctttctcattgtnatcgcatctactctctttatcctcctcaattggtttcttgctcagacaggcttagtacaagtggaaacacaaatgcaggagctgaatttnttaccgaatgataaaaccaaatgatcatggtcacaccggtagaagcagacgcttgtntacagnacancagttancaacagntatattcaggcaaantatgngg

SEQ ID NO: 136257 - DNA, 384 bp, Arabidopsis thaliana columbia
  unsure (1)..(384): unsure at all n locations
ctgtgccggagtagtacattacacaaaccctttatcctcgaaagcttcctcctggttaggtttttatcaaacccttttagccaatcgggaaattaactaaagaagaagatatggtgaggggcaaaactcagatgaagagaatagagaatgcaacaagcagacaagtgactttntccaaaagaaggaatggtttgttgaagaaagcctttnagctctcagtgctttgtnatgctgaagtttctcttatcatcttctnctcctaaaggcaaactttattgaattccgcccagctcccaatatngcaagggtncccatnggntcggtnaatctngagggcaatnctaagggttccggntncaggcaccaannccggggttttcctta

SEQ ID NO: 136258 - DNA, 203 bp, Arabidopsis thaliana columbia
  unsure (1)..(203): unsure at all n locations
aaggtaaaacccacgacggagaaggcaaaanccacgacggtgagaagaaaaagagganggacaagagggagaagaaacatcatgatgatggtcaccacagcagcagcagtgacagcgncanggttaaggtgaggangtnaggnggttcgcttgattaaaacagatctggttctggctattattaattaaatgtngctgtatgt

SEQ ID NO: 136259 - DNA, 267 bp, Arabidopsis thaliana columbia
  unsure (1)..(267): unsure at all n locations
cttggttggtttttaancatctccctcttgtaactttctnaatccctcataattnnatgcggacgccatacgatcactcctttgggtcgggaactagttgaacatgaagagaacaaggaagggtcatccggtcatcaccacgnccatcttcgagtcttcgtnaggaaaagcaaaagcaagngcaagaaganggagggcaaatnagcagccactcgaacccntcttttctaaacccattttacctatgtatctactgttgtaagtttc

SEQ ID NO: 136260 - DNA, 275 bp, Arabidopsis thaliana columbia
  unsure (1)..(275): unsure at all n locations
ccaaatggctcgtaccaagcaaaccgcaaggaaatccaccgnaggaaaagccccaaggaaacaactngcaacaaaggcggcgaggaaatcanctccggcgaccggaggagtaaagangccacacagattccgtcctggaactnttgccctaagagaaatcaggaagtatcagangagcactgagcttctaatccgcaagcttccgttccagcgtttggttcgtnagatcgntcaggatttcaaaacagatctgngtttccagagcagngncgtcg

SEQ ID NO: 136261 - DNA, 229 bp, Arabidopsis thaliana columbia
  unsure (1)..(229): unsure at all n locations
agagccangtctccaagaacggagaccatctncncgtaaaaaantggaggcagaattnaggcagaaaatagaatctaaaacatccgagattgaaagancggctccaaatttaanagcncttgaccagtatgaggctatacaagagaaagaaaaacaagttagccaggagtttnaagcggccaggaaagaggagaagcaagtagcggatgcctttaatactgttaagcag

SEQ ID NO: 136262 - DNA, 207 bp, Arabidopsis thaliana columbia
  unsure (1)..(207): unsure at all n locations
cacagcgatcccgtcaaagtaatataccgagacattaaagcctcgaacatcttacttnatgcggactacaacgcaaaantttntnactttggactagctagagacggtccaatgggtgatttnagttatgtnagtacaagggtcatgggtacttatgggtacgccgcgcctgngtacatgtnaatcaaggtaaaaaatctatcacct

SEQ ID NO: 136263 - DNA, 227 bp, Arabidopsis thaliana columbia
  unsure (1)..(227): unsure at all n locations
gancatggaccttggnctgcngcttggtttggagaagctggtggagcctttaacagtggtggccgtcaggtttccaanacattcattaacagtttctggtacttagatcagctcggtatttngtcgaagcataacaccaaagtttacngcagacaagctttggtcggaggtttctacggtctgcttnaaaaggaaccggttgtcccnaatccagattaccncagccg

SEQ ID NO: 136264 - DNA, 287 bp, Arabidopsis thaliana columbia
  unsure (1)..(287): unsure at all n locations
ctttctggggacttgtttnagtttggnatttgtccgtttggcttaggttttagggttctntnattttaataacncggggttttgttgattcctgaagatttgggggatttaagggttgatgggttccacaatggaggatgaaaaaaatgcgtttaacattgtncgtaaggnagacattattggtgtctatcgaagcttgancgaatnccaagggcaagctggttcatctgtatcanatcctgcaatgagtgtgtacaaagnatatggttggccaaaaggagcagagg

SEQ ID NO: 136265 - DNA, 300 bp, Arabidopsis thaliana columbia
  unsure (1)..(300): unsure at all n locations
acttcttcaaccttcccatggaagagaagaagaatttttggcaacaacccgatgagatcgaagggtttagacaagtatttntggtttcanaagagcagaaactcgattggncagatatgtncttccttacaatgcaacctgttcgattacgcaagcntcacttgttccccaagtnacctctgcccttnaggtttgcntcaaatgtgtaaaaccattctnaataaatccacaagtnttctctgtttaaaacttggtttatggttctccagagntacacnaggcatgtattcgcctgaggtg

SEQ ID NO: 136266 - DNA, 205 bp, Arabidopsis thaliana columbia
  unsure (1)..(205): unsure at all n locations
tttccnaaagagtgatgagatttnaaaggtgaggcgcgacccggtgtagttnaaccgtctgtttttatgttgtcgagtggtgatacgtgttggacgatgtttgacaagggctttgggaactnccagaagcttccggaacttccttctnacatatgcttccnccnatggngataaagaatcgcttttccctgggaactcattttga

SEQ ID NO: 136267 - DNA, 291 bp, Arabidopsis thaliana columbia
  unsure (1)..(291): unsure at all n locations
atggaaaggggactctggttccnaacttgtactgcattggtgatgccaatggtaaattnatgcttgcacatgcagccagtgcccaaggaatttntntggtcgagcaagtcagcggcaganatcatgtncttaatcatcttagcatcccagctgcttgctttactcatcctgaaatnagcatggtgggattaacagagcctcaagcaaaagaaaaaggcgagaaggaaggatttaaagttagtgttgtcaagacaagtttcanggctaacacaangggcccnngctgaaaat

SEQ ID NO: 136268 - DNA, 236 bp, Arabidopsis thaliana columbia
  unsure (1)..(236): unsure at all n locations
tccgtctccgtctccgtctccgtctccgtctccgtctccgtctccgtctccgtctccgtctccgtctccgtctccgtctccgtctccgtctccgtctccgtctccgtctncgtctccgtctccgnatccatntctntntncggtaagtcactgaaagatggggngtgttagaaccaagacggtgaagaaatcttcangtcaagtcattgagaagtactactnttgcatgactcttg

SEQ ID NO: 136269 - DNA, 390 bp, Arabidopsis thaliana columbia
  unsure (1)..(390): unsure at all n locations
gcaaaaggagaagatgcaaaagaagtgatcgagagagagaatccaaaaatgaaagcagttatcattttggatggaacagttgttccggagatctttatttgctctcgtgtttacgtttgggtcaacgattgcggaatcgttgttcaaattcctatcatcggttaattatatttatttaaaatttgttatgcactctacaatataaacactataaataagcttttattcatattacagtgagtaatgacgagattgttatgatcatgtgctttctcataaataaaactgnaggttgtggtttgttttgtcagctctcagctgtgnttataatatattttngtaacctagggttaatggtttntccntggctatatttaatgtccaccttct

SEQ ID NO: 136270 - DNA, 334 bp, Arabidopsis thaliana columbia
  unsure (1)..(334): unsure at all n locations
tagaggttctgcatttagcggttgtttgtacggtggattctctgtcgacgaggccgacgatgaagcaagttgtaagacggttgaagcagctacaacctccgtcgtgttagcacctccctccgcagatttgattattattctttctttaaaaaaagttctctcagttgtaaacttgtatgtgtacgtagtagttgttagaagaagaaagagaggttgaatttcctatgggttctctcgagggtaaaaaggacatttntaaaggggaagccataggaaggttgatctctctcagtaagcagnaaaaccntaaaatgagnaagaattgtttttagct

SEQ ID NO: 136271 - DNA, 404 bp, Arabidopsis thaliana columbia
tgatgatatcgggacaaaaggcgggacaacttgctcttaaggctttggggctaccgaatgctattgacggaactctcgttggaaacctaagcccggagctggtcttagccgcagcagattcagctgaaaccgtagatgcttaaaatcaaaaggttttaacgttaagaaaagtttcccttgatccttcggatgttgaaggagtgcaataaaaggagtttaggtgtttaatatgtcttgaacttttctggtgtctttgtttctctcttctgaacttctgtgtaaaatatcgtatcccgttcattcgtaatgcgtatgttctcgttcttctccctcctttatggctctagtacaagcagctttctcgttgtcggtggcaatacaaaatctgtctaaattttgagggg

SEQ ID NO: 136272 - DNA, 290 bp, Arabidopsis thaliana columbia
  unsure (1)..(290): unsure at all n locations
gggaaatnacaggtgtcggcgccgggaatgtggtggttggaggaggagatttgccagataaagcgtgtaaggaggcgtcgctgttgctgacgaggcttgcnttggctagacaaagttcggacaacgtaagtttttgtggtggttgatctacgacgagacacgtagttgtatttgtntctctcgtaatgtttgtngttttttgtcctgagtcatcgacttttggncttttcctttnaaccttttttnctcttcggtgtaagacaacgaagggttttaaatttagcttgact

SEQ ID NO: 136273 - DNA, 288 bp, Arabidopsis thaliana columbia
tgtagagaacggccgtgctgctacggctagtttatctgcattttttagaaagaacttccaacaaagttcatccaaggctgggtaaaagcacaaattcataatggtttgcatgagattttgaaacggtttcatattactcctgttgtagctttgatagaatccttgtcgtctatgtgtctaatcaaaaatcaaaagctagtggcctattatctagtatcattagatatgtgaacagatgaacctcgtatctttaatacaaatggtagccatggtcagagctattgattc

SEQ ID NO: 136274 - DNA, 401 bp, Arabidopsis thaliana columbia
  unsure (1)..(401): unsure at all n locations
ctgcttaatcgtcaggttctctgggtaaatcataggttggcttttgtcatttcgtctgtgtcttaagtggattagttggtcgtaagacaagttatagagatgtgtttacgggtaaagatgaagcttaggttttgatgtaatcttcttcggtttttcaattctctgtatttctctatcttttnagtttatcaagtttaagttttatttggggtttcttcttcgttttgggtatctttctgtttntcctnaaggttccttcgnttttttncgngtcgtctagggntaaagtcaaagtaaaagngnatgtaattacctgggttagattgaatcnttaaggnctttcccannnaaaccgttttttacctaccaattncncctgtaccttcccctaacctttaaaa

SEQ ID NO: 136275 - DNA, 406 bp, Arabidopsis thaliana columbia
  unsure (1)..(406): unsure at all n locations
ctctatcctaccgccgacgtccgtnatcgccgaaatgactgaagcagagtccaagactgttgttcctgagtcagtgttgaagaagagaaagagggaggaagaatgggcacttgccaagaaacaggagcttgaggctgccaaaaagcagaatgctgangaagaggaaactcatatttaaccgggctaaacagtactccaaggagtaccaggagaaagaaagggaattaatccagctgaagcgtgaggcaaaactcaaggaggaggtgactaatatgattatataactttggtatccttcttcnttgntgttatacataaaatgctgttttttactcttttgtaattncattatcggnatttntttgggnnagccttatcaaataaattggtttgaccttgttttcct

SEQ ID NO: 136276 - DNA, 374 bp, Arabidopsis thaliana columbia
  unsure (1)..(374): unsure at all n locations
attaaatcaatgcataaggaggttgagaaaatnatgcaagaaactaggtcaacatctttccaagggagattnctgaaacacaatcttgattctnaagtcgttgatnctcttaaagatcttagagacaaattatcagaaaacgaaacaaagagatgacaaaaagatcaatccggaatatataancaattaacaaggcttggtctctccatgtaccttctgtcccaagtaagtaagctaatctgactttaagaaaacagaggctccagaggaaactagagagatagagagagagagagagagctcaaaggctttgttattgttgtattgtgtctganttctttttgactaatctatcggttcgttttctttggtcc

SEQ ID NO: 136277 - DNA, 510 bp, Arabidopsis thaliana columbia
  unsure (1)..(510): unsure at all n locations
gttttcttcccgccgaaacctcaccngaaattctctccggcatctcctaattcgtcaatcggagaatggatacatcaagtcctgctgcttttgtgaatggagctttgttgagaaggtacattggtcagaaagtgagagcagtgattcaagttatcagatcagatgttggatcagtgattggtaaatcgactgatgatcaacagattgttgttaaaggttctcctcaaccgcctttaactacttaccttgaggtaattggaattcctgagactgncaacactattcgtgctgaagtttggnccaactttggtgatagtttcgatgtgcaaaacttcaatgagctatgtaagcttgcaaatgggtgagtttaggcacttgttcatctaaatcacagggtattggtgatgnatttgggaagctttttncttggggttctttgggttgngcnttganatncccgggtgaccttaggattnaaatctccngttaaggaagttcngggttctggtt

SEQ ID NO: 136278 - DNA, 542 bp, Arabidopsis thaliana columbia
  unsure (1)..(542): unsure at all n locations
catattggaaatgctttgaaaggctttgaagggtttttntcttcctccaagagtactgctagtnctaaaaggtcaaggaagtttcagcctgaagacagagtcttctcattgtcctcagttacatcaccagctgctgaagaacttggtgttggaagagaagatggacgagctgaattagggccagggcgatccaagggtggtttgtcgacacagttagtttcccgacctagcttactttacctcgggaaagccgaagaaagggagaggacaatcaataatagcaagagaggcaaagagaagcagaccatctacagaaccagattatgaaggtgaaaggtgatcctgatatgaatatgtatggccatggttcactcatctaaggcatttcctgttttggtgccngaaaccagtaaggaaccaaatnattttttaacctttttttgtgcatccttggncaaaactnnattcttnctagnnatnctggggnttaatccncccgttttttatcncccttnttttnnagttgcagtggggnttttntc

SEQ ID NO: 136279 - DNA, 200 bp, Arabidopsis thaliana columbia
  unsure (1)..(200): unsure at all n locations
tacacctcttgaagctttggctgctganatatgtnagcctganagctccatgtncagcatgcctatttgttngcttgtggctcttattggagccaccgttggagggttgcttgctcggcagaggaaaggggagttacagaggttgaattgaccacctnnggccagtttaacgnagctttttagggggccaaggccaaaat

SEQ ID NO: 136280 - DNA, 377 bp, Arabidopsis thaliana columbia
  unsure (1)..(377): unsure at all n locations
cgacaagtacatcaatggagagattatcccgtgcacatacccaacataccaaccaaagcagcgcaataacactaagtatcaaagtaagagatacgaaagaaaaagagacggtcctccacctcctgaacagaggaaaccaagacaagaaccagcagcctctgattcctcttaaactataataagataatggagtgtttgcaagttttgatcttttggttagcacttagcttgttgaagtcgtgtgtaaaatcgtctagtaccaaatgatgatactgtatcatcacaccttgaacaatagctattgtnatgttagggtgaaattccaacttganccnttttttttnttttagggnaatnttcggttttgggttgggttt

SEQ ID NO: 136281 - DNA, 257 bp, Arabidopsis thaliana columbia
  unsure (1)..(257): unsure at all n locations
gcaacgacatcgcgtcggaatcacgcgcngcaatcgcnaaaacttacccggagttgcttgacctcgctgataacgggactntaattctcctccagaaacanagtttcggtcctgttccagcttggngcaaagagttcgttgagccggaagcnatttggcttgtgggcacttctaanatctggccggaatctgcttccatcgttnaacgngtcgtccgtactgtnaagcctgataatgtcgccgttaaactctgtcgt

SEQ ID NO: 136282 - DNA, 375 bp, Arabidopsis thaliana columbia
  unsure (1)..(375): unsure at all n locations
cagaagttcctgggtcagcccacagcgtccngccacagagtccagggtggtttcnggtggaggctatagaatgccggatcctcctttcctaccggatcantttccattganaaatggtcctaacganatgtttnatttccnaggatattnanaccttnatagagggattggtcaaagagaatatccacagcagtacggtgggcacttggaccccatgtaagctcctcctcctcctccaaatctaatggacaatgcattcccattgcaacaacgttatgcgcctcatttcggtcaaatgaatttaccagaggntgagctnttttnccacctnaagccttccattgtaaacctagnggggcataatcttttttaaat

SEQ ID NO: 136283 - DNA, 461 bp, Arabidopsis thaliana columbia
  unsure (1)..(461): unsure at all n locations
ccggtaattacccgggtgcgnacccacgncgtccggnccgcctaccttcctcctcctcatctccttctcctccgccgtagacacttcccgtctcttcctcaccgtcgtcaacaactgtcccttcaccgtctggccagccattcaacccaacgccggccaccccgtcctagagaaaggtggcttcgctctcccaactttcactcaccgctccttcaacgttccaaccacacactggtccggtcgcatctgggccagaacctggtgtgcccactacaacggaaaattctcctgcctcaccggagactgcggaaaccgcctggaatgcaacgggtctnggcggggcaccancagcttctttagntcagttcgaccttncaccaaggtggtcaacanggacttttttctnttangggggtttnttttggttganggttaaaaatgtttccgnttnnccgnaantt

SEQ ID NO: 136284 - DNA, 435 bp, Arabidopsis thaliana columbia
  unsure (1)..(435): unsure at all n locations
agggaccnggnctgaatttcctgggtngcccactgngtccgnaaatcgttagaaaccnccgtacagaaaaaagtccaacaaactttcaccaccattcccgccactctacgcctctatttccatgattgtttcgtcaatgggtgtgatgcatcagtgatgatagcgtcaacaaataataataaggcggagaaggatcatgaggaaaatttatcgttggccggagatggattcgacaccgtcattaaagctaaagaagctctcgatgccgtcccaaattgtcggtaacaaagtttccatggcggttgatatttctcacggttggncacttcgtgacggttgttnaatctttncgggggtggncccccaattacggncggtgggaantttgggaagggcttaaantgggcctttnnnttaaanaagggggttagcgtt

SEQ ID NO: 136285 - DNA, 264 bp, Arabidopsis thaliana columbia
  unsure (1)..(264): unsure at all n locations
ctgttgaaaactatgatttggaaatnactgattggttganctctcagttacagcaaatggtttctntttctggtgagcctgttcagcgcttagnagcttatatncttnaaggtctcgttgctaggttagcttcttcgggtagctccatctataaagcattgagatgcaaagacccaacgggccctgagnttctaactttatatccatatcttgnaatgaaggcctnccccttatttnaaaattcgggttatgaaactccctaat

SEQ ID NO: 136286 - DNA, 250 bp, Arabidopsis thaliana columbia
  unsure (1)..(250): unsure at all n locations
cccttaccgtcgcgtctngnatttaatcaacgcttctccgcgtttccggtgtctcgtctcgtccgtntggttactggttctcgacgaacgcggcgatgacgaatgttggagaggaagataagcaatcnattccttcaatcgaattgaaggagaatattganctcactgacaaagaacggaaaatttnnnatcggnttctnagtactctccgtaactgtaaccttgacaaacagcttcgtttcgccggtgg

SEQ ID NO: 136287 - DNA, 352 bp, Arabidopsis thaliana columbia
  unsure (1)..(352): unsure at all n locations
gccgnaagaaatctggatacgcggaaaatatgagagaagaaatcaaaaagcatattttaatttnatctttgaaaagaagattattgttttaagtctacaatggtgactctaaaaatggagatttgcatcgagttgttgaaattnaccgtagatttcgtcgccgccgttgcagaatcaatcgaagtagctttccgccatcgtcctccaccggtgattcaatattcttcagtgatgtatggtcgccggggttaattncaaccgcccgttcccctttcccctnggtngggtttctgtanggttaanaannatcccccccntttttngggnccctttgttttttttgttccaaanc

SEQ ID NO: 136288 - DNA, 262 bp, Arabidopsis thaliana columbia
  unsure (1)..(262): unsure at all n locations
tctntntnaagagtgaatgtaagtaatgtgtgatgttatttattataaagagagagagagggtaatggctaggcagtaggcaagaaaaaanacgncntacntttgctttttataccatcagttatggatgagattaggnatttttnctaagtattgttagttcaattggtaaaaattctaggtaaaagtttagatgttgccggttccgagtaatgtttggnatgaaactaatattatatgttggtggtttcgagtttagggg

SEQ ID NO: 136289 - DNA, 230 bp, Arabidopsis thaliana columbia
  unsure (1)..(230): unsure at all n locations
cctcctcctctgctgcgggtggtttntaaggtggagctcttcctnacacttccatcaaaccctcanatagatccaacggctataaagcccccgaggcccggntccctggaggnaggcctactcanaaatgggacgtatacnccttcggtgttgtgcttatggagcttctaaccgggaaatcgccggatgnttctccgttaagctcttccncgacggttacggtgggttgt

SEQ ID NO: 136290 - DNA, 205 bp, Arabidopsis thaliana columbia
  unsure (1)..(205): unsure at all n locations
gtaagtaatatacggcagacgattgtggaagtttttggcaacaatggtctaaganacaatnaaggggagcagggaagagaacgattaggtgaagccggtctttcgttacactatgctaatctaatacaacaaatcgataatatnncntctngaccatcgtnacttccttctaatgtaagggncacgttgtacaatgcattacccg

SEQ ID NO: 136291 - DNA, 439 bp, Arabidopsis thaliana columbia
  unsure (1)..(439): unsure at all n locations
agggaccnggcctgaantncccgggcagcccactgtgtccggacacacaaaaaaaaatggcatcaacctcactcctcaaggcttctccggtgttggacaaatccnaatgggtcaagggacaaagcgttctcttccgtnagccttcttccgcttctntcgtcctccgcaaccgtgccacctccctcaccgtccgtgccgcttcctcctacgccgatgagcttgtnaagacagcgaaaactattgcgtctcccggacgtggaatcttggcgatggacgagtcgaacgcnacttncgggaaacgtttggattcgatagggcttgaggaacactgagggcaaatcggtcaagcttttccgggacttttncttgggtctntngnanccggggctttgggccaagtanggtttccgggnggaatttttttttttnggggggcctt

SEQ ID NO: 136292 - DNA, 281 bp, Arabidopsis thaliana columbia
  unsure (1)..(281): unsure at all n locations
agcggctcatgctccagaggtttcaagaagagaacccgggattcgacttctcgcaagctcagttctcgggtaattgtccagatccaaggagcttcatgggcggtattcgttctgactaaataaataatagtcccactcttgttgctataatagtatgtccattataacaaactcaaaagtcaccatgacttaaacaaaatgtctcatgtctcataaataaaccccctgactctctgtttctataactcgtaatggcaatcatataaatngtctttcgtctc

SEQ ID NO: 136293 - DNA, 415 bp, Arabidopsis thaliana columbia
  unsure (1)..(415): unsure at all n locations
accagaaataacccgggttcgnacccacgtcgtccggtggtaagtagttaagnanggatatcaccggtnaacccaagagctcttaggaggttgagaacttcctgtgagagagcgaagaggactctttcttccactgctcagaccaccatcgagattgactctctatacgagggtatcgacttctactccaccatcacccgtgctagatttgaggagctcaacatggatctcttcaggaagtgtatggagccagttgagaagtgtcttcgtgatgctaagatggacaagagcactgttcatnatgttgnccttgttggtggttnctacccgtatccctaaggttcagcaatttgctncaggactttnttcaacgggnaaaanagctttncaaggcttttaancctgnatgaggnct

SEQ ID NO: 136294 - DNA, 355 bp, Arabidopsis thaliana columbia
  unsure (1)..(355): unsure at all n locations
agggaccgggccngaattncccgggnggcccactgcagtccgggaaactntcgaatcgactcantctcgtcagctcacctggtgcttgcattatcaaaactgcaggaaggatttggttgtnaagatggcatcgaagttgatacaagttcaatcaaaggcatgtnaggcttcaaagtttgtggctaagcatggaacttcctactacagacagctgttggagaagaacaagcagtatatccaggnacctgccacttttgagaagtgccaagagttttctaaggaagtttctcttacaacccgntttttnntagcatttncccgggacgngtatttnaaaccccttttggaagggaag

SEQ ID NO: 136295 - DNA, 382 bp, Arabidopsis thaliana columbia
  unsure (1)..(382): unsure at all n locations
gtaccggtacttccccgggntcgtacccacgnngttccggttnagttcggagcttagtggtgcacctcttgagactttgcatcaaacttgtgctgaagccaattcacatctttatcaggtaaaagcngttgctgaggaaatgggaattggtttcttaggaattggcttccagcccaaatgncgtcgggaggatatacccatcatgccaaaggggagatacgacattatgagaaactacatgccgaaagttggtacccttggtcttgatatgatgctccggaacgtgtactgttcaggttaacctggattttaagctcagaaagctgatatgatcaagnaagtttcgngcntggncntgctttncnaacctataggaaanggg

SEQ ID NO: 136296 - DNA, 452 bp, Arabidopsis thaliana columbia
  unsure (1)..(452): unsure at all n locations
gagcatgcaacggtaccatcgccgagtgctccttatccacggcggaggaagagttcgagatggactctgagatcaacaggcgtattttagcaacaacgaagatataagctacggtgcgctgaggagaaacacagttccttgctcacgacgcggcgcatcttactacaattgccgacgtggagctcaggctaatccttactctcgtggctgtagcgctattactcgttgcaggcgataatctctttctctatgtactttaaaatttttacnctcaaattctttttgttttgatttttatacaatttttcagattattatttgntttgatttggggttacnatggtttataactttgcaatngcaatataggttcatacagtccaatataagtttntatatggcnggnatttttttggggatttaacattnngggttannnnncaatgntttgt

SEQ ID NO: 136297 - DNA, 454 bp, Arabidopsis thaliana columbia
  unsure (1)..(454): unsure at all n locations
cggncccggnaattccccgggntcgnacccacgcgttccgggagctcatggcttatctgcattgatcagttcatgaaggacaaagtgaatnncagaactgatgaatatggtggntcattgcaaaaccgttgcaaatttnctctggaagtagtcgatgcagtggctaaggngatcgggccagaccgtgttggaatcaggctctctccgtttgcagactatatggaatccggagacactaatccagaagcattagggctgtacatggtggaatctctgaacaaatatggaatcctctactgtcatatgattgaacccagaatgaaaacagtgggggaaatagcagcggtgttctcacacactaattgccantagggggaagcctttaaaggggacttttcatctttcaangggggtttcacggggggannttggnttannggccnttgaaaaaggg

SEQ ID NO: 136298 - DNA, 316 bp, Arabidopsis thaliana columbia
  unsure (1)..(316): unsure at all n locations
ttgtgtgtctcttattgacgcttacaattacatcttctctagcccgcaaccctgtttccgtttcaggtgggtttgagaattctggattccaaaggagtttgttgatggtgaacgttgaggactacggtgacccatctgcaaatcctaagcacgaccccggcgttcctccgtcagcaaccggccaacgtgtcgtcggcagaggctgacgtaatgttttagttaacgcagaaggaaagaactcttcttgtttacantttcaagttttcttganttnaatctcaagtccannnggctttnnctnaaancggccctnnaa

SEQ ID NO: 136299 - DNA, 358 bp, Arabidopsis thaliana columbia
  unsure (1)..(358): unsure at all n locations
agaaactgctggtttcatctatttggtctgaaaagcctcctccagaggtttcagaacatgttcgatgataagcaaaagaatctgtgctcattgttgagtaaaccggagtttcagatgctgaatgatcatttggntcgatgggaccaggtgactgatgatagcccacatcgtcgttttcttcgtgatttggcaaattctccatcttctcaatgntcctgtttttgaaaanccctctgntttttntggaccccctggttttaataaaaggaattaaagcttngacccttcgttgtgtggnatcaggaaacctttggattntgatnctaatnccgccaattaggatnngggattaattttt

SEQ ID NO: 136300 - DNA, 388 bp, Arabidopsis thaliana columbia
  unsure (1)..(388): unsure at all n locations
accggcnccggnaattnccaangaacgacccacgncgtccgtgcaagtggctataacttcaccgtcatgcgaccatctgtgttctattcggtaaacnggctcgagattaagaagttgttcaaagtgcctaaaacagagaaagattcgaaatgggtcaaaaccaagcttcttcatatgcagaggaatggttatggtttgcatctgtggaataagtttagcaggaaatacgaaattgaacaaggaagtnccatgtggaaactggtttcagagcattgcataatctgtgaaattagttctgtatcatcatagtctattgtttgaatttgttccattaatcacacacactgtagataactttgttgtaaataaggagcaaaacccntcaggt

SEQ ID NO: 136301 - DNA, 240 bp, Arabidopsis thaliana columbia
  unsure (1)..(240): unsure at all n locations
agaagcaagggtttactcagcagccaggtttgtattgccatgatggttatgccaacgctcctttcatctgttgaaaacagaggttttattgaatgtttttnactacgtacgacacgttgattgaagtttctggtcggaaaaataagcctgttttttttttttttgctgtttgatggcatttatgtaattnacaagttatgtgtgttgtgttctgtgaaacactaaaattcttctngtttt

SEQ ID NO: 136302 - DNA, 202 bp, Arabidopsis thaliana columbia
  unsure (1)..(202): unsure at all n locations
ggctcggaagttgtctctgaccagagctgtgttctacatgattatncaatgtnttggagccatctntggtgccggagtcgtcaaaggnttccggccaacgcngtaccagactctnggtggtggtgctacaccgttgctcanggctacaccaaaaggttctggccttggtgctgaaataancgggacattcgtactcgtctac

SEQ ID NO: 136303 - DNA, 226 bp, Arabidopsis thaliana columbia
  unsure (1)..(226): unsure at all n locations
cggcacgantggaggttgctctaaagtttgagcataggagcagcaagggttgcaactatggtcctccacangagtggcaggtttacaacaccntgnggggtagccatggagtccctagagtacatttcaaaggcaggcaaggagactattatgtcatggttntggacatgcttgggcctagcttanggnatttatggaatacttcagggcaancnatgtcctcgta

SEQ ID NO: 136304 - DNA, 415 bp, Arabidopsis thaliana columbia
  unsure (1)..(415): unsure at all n locations
cggcacgagcatactctactagggttttaatgccaccaccacggtcaaggtttgcatcaacatctcgtcagtattcatctgtgaagaggaatgagataccttcctccagcaacacttcacatagaagaagccagtcttcacatgctgccactagttcgcatacaagtcagagtagcaacttgagttctaattctgatgctcacaaacccaagaggaagagaaggcctaagaagaagaagctacaggcgtgaacaaggtctctcccgccatgtctgagaaaacgaagaagctcgtaacacagttcatcaattcccaaaagcttcaacccattantanggccggncntaagctttanaacttncggttgggnttaangngganaanatgttgccntngaaacnaaagggnggggncc

SEQ ID NO: 136305 - DNA, 535 bp, Arabidopsis thaliana columbia
  unsure (1)..(535): unsure at all n locations
cggcacgagtctcgagtttttttttttttttttttagaaaggaaacagtaaaaaagatggcagtctcttttcctcgtcttccgaggtggttgtgtggtggtagtaacactaaagatagagagaagaaagagtcaattcctaaaggatcttcttcacttagtccttcactgaagaagactactactagtaagactggttcttcctcttcatcagtgaagaagaccaagagaggatggattggaagaggaggatcaggatcaggaggggaagaggataagattgggaatgtggtgtttcctgaacctgatgatccagagtggtcaattggttgggttgagccacatggaccaggttttaanctgaggatgatgattgtggtggccttgtggttttggtccccttacaagaaagttatgggtggnncaggaatcanttccgaatggctctcnccccggcgcccngatggganacnggacatggcgcnccangggaccaaaattgggattgggannaaaccagncccgtgntcagatta

SEQ ID NO: 136306 - DNA, 567 bp, Arabidopsis thaliana columbia
  unsure (1)..(567): unsure at all n locations
cggcacgagatcttttgggagaggagaaagaaaaagaaaatgggaagagcgagagtagaattgaagaggatagagaacaagatcaataggcaagtgacgtttgcaaagagaaggaatggtcttttgaagaaagcatacgagctttcagttctatgtgatgcagaagttgctctcatcatcttctcaaatagaggaaagctgtacgagttttgcagtagttcgagcatgcttcggacactggagaggtaccaaaagtgtaactatggagcaccagaacccaatgtgccttcaagagaggccttagcagttgaacttagtagccagcaggagtatctcaagcttaaggggcgttatgacgccttacaaagaacccaaaggatctgttggggagaagatcttggacccctaagtaccaaaggngcttgagtcacttgagagacagcttgattcttccctgaagncgatcagagccctcagggcacagttttgcttgaccagccaacgttttcngagtaaggacgttgctgcngnncaataaccnaagccaggtaccgtgggtcgtncccc

SEQ ID NO: 136307 - DNA, 522 bp, Arabidopsis thaliana columbia
  unsure (1)..(522): unsure at all n locations
cggcacgaggcgaaaatagaggccaatgttgtgatctacagcacagtcatagatagtctctgcaaatatagacatgaggatgatgcactcaacttgttcactgaaatggaaaacaaaggagttagaccaaatgttatcacctacagctccctcataagttgcctttgtaattacggaagatggagtgatgcttctcgactactcagtgatatgattgagaggaaaatcaatccaaatgtagtcactttcagcgcattgattgatgcatttgtgaagaaggggaagcttgtaaaggctgagaaattgtacgaggagatgatcaaaaggtccatagatcctaatattttcacttacaattcattgatcatgggttttgatgcncgatcgccttggtgaggccaagcagatgctgagtgatgnttaggaggatgtcaccaacgnggccctataancnntataatgntttgtnaggcagangtgcaaggnggacctcngnattnccaaggntggtgnnccagcctt

SEQ ID NO: 136308 - DNA, 562 bp, Arabidopsis thaliana columbia
  unsure (1)..(562): unsure at all n locations
cggcacgaggtaagctgctggtgaagcgtattgaggagagtgagagggtgatctgatgaacgggaaggaagagacgtatgcgtttgtgatacgcccggctttggctggtggcattggaccgttgtagctggctcgggttcttttgttggcaggaacagctgctggctttctcttctcggttttggtcttctctagctgatccaaccgtttcttgaggttctctggagggaactcttcctcgagtttgtactcttctatgcattttaaaaccgccttaagtgctgattgctccttgcgcgccacgagatgcgtactccgggccaatattgctagagtcctccatgataagaagctgctgacttctttgcgtccttagataagctttgagcaaangaacaggagggacttatccacaagccaactcataagtaaaatgaacagcatcaagnggtgtccctgctgatnaatcctcnatcaggcagnattgatcaccnaccaaagaacggaagctagggactgttagcacnnntcaaaaaagttttanaagaggnttcncttttta

SEQ ID NO: 136309 - DNA, 565 bp, Arabidopsis thaliana columbia
  unsure (1)..(565): unsure at all n locations
cggcacgaggagagagagagaaagatgggtagaggaaagatcgagataaagaggatagagaacgcaaacaacagagtggtgacgttctcaaagaggaggaatggattggtgaagaaggctaaagagatcacagttctttgtgatgcaaaagttgccctcataatctttgcaagtaatggtaagatgattgattactgttgtccttccatggatcttggtgctatgttggaccaataccagaagttatctggcaagaaactatgggatgctaagcatgagaaccttagcaatgagattgataggatcaagaaagagaatgattagcttacaactggagctcaggcattttgaagggagaagatatacagtctccccaacttggaaaatcntgattggctgtcgagcacgccattgaacctnggccccgacaaagtccgngaccnccagatggngatcctttttccnaagngggaatngngagatnttgcggngggcacgggactcctttccagtggaacacagggtggttngcagcncccaaggtttntnggntntgtggnctttc

SEQ ID NO: 136310 - DNA, 280 bp, Arabidopsis thaliana columbia
  unsure (1)..(280): unsure at all n locations
cggcacgagctcgtgcggngattaacctttatccccacaacgtttaacagtcgttaaaattatcatctcggcggcgattggttcacggtgcacgccaccactctcgcccattgcttcancttcgtcttcaccgtttgcggatcatcactggtttggtatacggtgtggtgaggactggtatcgccgtcggagagtgaagacgacgacgnttgttgatttggttaggaaacggcgtccgttggaagcttttnttgaaatgnnganagtnaaaggttcnnaa

SEQ ID NO: 136311 - DNA, 518 bp, Arabidopsis thaliana columbia
  unsure (1)..(518): unsure at all n locations
cggcacgagcgtgctgttcggtttaatccctacttgtggccatcgggtcagaagangacaaatgctgttggtaaagccttgtnctctaaagcaggggagctttgtgtgcctgtnggcttcatgtgcatgaagggnctagatcttcacattgcagaaattgaggaactttgcgcagaatttccaaagacaactgttttactagatcacgctggattctgcaaagtaccagaaaatggtgaggcaaagcttgcttattctcaactcatgaagctgtctagatttccacaggtatatgtgaaattcagtgctctattcaggatctcaagaaccggcttcccgtatcaggacctatcggcctctcctagctcaacttgtgtcccaattttggggcaaatcgtgtcaagtggggcatgacttcccatggnggtcctgaanggggtatnaagagccaagaagngngacatcatgcaaagagcacctgtantcgaatgntggtncgggaaccgagagcctccggc

SEQ ID NO: 136312 - DNA, 514 bp, Arabidopsis thaliana columbia
  unsure (1)..(514): unsure at all n locations
cggcacgaggagagagagagaactagtctcgagttttttttttttttttttattaagggcacccgttttnggngaatatattctcaaatattacataatacataatcaaatggtaggattaagaaggcctgtagaagaaagggttcttaggccaatctcaaagcccttcaaatgctgtttatatacattgttttgtctcttaaattcttanaaattcctcattacctcttttcacatcacgcaacatttcaccactagtccctttgggtctgtcctgccttcctcattaccttccaagggttgagctaacttgcggttctgcgatgacatcatttcttttttaagctgaatcagtagatcccccagggggaattccctcnccagttggaaagcatagggaagcgactcggatcaaccanccattcncaggntgacacagccangttanagnccngaacccccagaggggnnttccggnanccttcaaganagtcacgaagtttccncancgnat

SEQ ID NO: 136313 - DNA, 512 bp, Arabidopsis thaliana columbia
  unsure (1)..(512): unsure at all n locations
cggcacgagttttttttttttttgttacaacacaaacttaaaaataaaacataagcaatagagtacaaaccaatctcttatctttgtaatgactttttcaaccctagtaattactatatcttaattgttccctttatacagcctgaggaatcattganatatatgcatcattttacgacttttagtgacccggctcagtactctgtggctgagtnngaacagcctgaccagcataagcacaacacctgaagcagccaccgtagtagcctctgtagcagcaaccatagcgacaatatcctcctcctcggtttccatatcctccaacgggggtttccatatcctccatcacgggttctatatccaccaccacggttccatatcctcaccagggttcctccanacctcctccgggaacctccaaacctcctcctggaaaccggcaaatggtcggtggttanttngccttcatggttcggcgggnttncagggggctgggacacnanagnaagnng

SEQ ID NO: 136314 - DNA, 329 bp, Arabidopsis thaliana columbia
  unsure (1)..(329): unsure at all n locations
cggcacgagccgagcttgaagctattctactcactcatccatccgttgaagacgttgccgtcgtgccgtgagtatctanataaatatattgccctaangatttcttgaaactgatatattaaaacatgaaatgaaaaggttaccggacgaggaagccggggagattccggcggcttncgtgggtganaaatccgaaagcggcagnaaaaggaagnagacattctcaacttttgttgcagcaaatgtgggcncanttacaaagaaaggtcagagccgtccattttggnggnattcaaaccccaaaatccccncnctgggaaaaatcnttg

SEQ ID NO: 136315 - DNA, 499 bp, Arabidopsis thaliana columbia
  unsure (1)..(499): unsure at all n locations
cggcacgagctcgtgcgtngagaatgcaatacttcagggctacacaacaggactacagtgaagcagcaaattgggtaatacagttaatggcaaaaaatgggacagaaaaagatggtggattcacagaaacacaactccaagaactcagggagaaagagcctcgaaagaaagcgaatgcgccaaagaaatgctcttgcatcagcacttaggcttcagaggaagcttgtgaaaacagtcactggagaccatagatgagattagcgatggccgcaagaccgtttggtgggaaccgatggatccccagagaggagtgaggaccagactctacttacaatatatcatttttccatttcggtttccgatagtggtaaatctcaatgnntatcttattagccccttaggtaaatttcctactacttgtaaaatccaagnaatcttgaaagaaaaagtgtntttgtcccnaganaagananannatnntgnagnggnantgnggntt

SEQ ID NO: 136316 - DNA, 577 bp, Arabidopsis thaliana columbia
  unsure (1)..(577): unsure at all n locations
cggcacgagggcggttgcaatctctcacgccgtgattcttgaagaatctcagcttatgagagagaaactcgctgaacagaaccgagcgcttcaggttgcgagggagaacgcactgagagctaatcaagccaaggctgcgttcgagcagatgatgagcgatgcaatgaggtgtcctgtgcggtccattctcgggttgcttcctttgatacttcaggatgggaagttacccgagaaccagactgttatcgttgatgcaatgaggagaaccagcgagttacttgtacagcttgtaaacaatgccggagatataaacaatggggacaatccgcgctgcagagactcattnatttcaantttgcattcgggttgtggaaagagtcaanttncgtgggcgaaggtgtttatgccatggcnaatgggttttgggttcccaagctgaagttttntagnncattgcnggantaagncgtaggggtngtaaaaaggccttcaagcgatttgcaaangcttgggggcctanngancgaaggtcaaagggatnganctncggggtttccggaangggnncaangttaaa

SEQ ID NO: 136317 - DNA, 596 bp, Arabidopsis thaliana columbia
  unsure (1)..(596): unsure at all n locations
gnttttggatccnganttngtaccttgatccncagaacttttttntnctgccccnatggnttcccntcttttgggaccattctnaggcccctgggtttcganacnccgngatgttgaaaaagttccncaancttatgnccttccccnaaagntgttcttacgncgncgggtggattgaggagctttggcaccccaaagaacgagttgaagccagtgccgagagtggacagctccaggtgacgtgtgtggtgcaaccttcaaggttgacgctgagactaagagagagggtnccaaaatgcctagagtcgatagctcccaaaattgggccggtcatatctaaaccggaaatcatacacaaatcacaagctcagcatcttctccctcttgtcttgtcccctctctttcgttacatgtttgagttacattgagaaaataatttcaaaccacaatgttctaaacgcgtttatgtacatgtttgaggtgggatttggaaaggatgtcgagttttgtgaaactttggaattacgagactactagacttttgtttctctgtttacgtttcttaaatcaataaataaataagtttttatttcatc

SEQ ID NO: 136318 - DNA, 608 bp, Arabidopsis thaliana columbia
  unsure (1)..(608): unsure at all n locations
tnccntcgancccccgnggaanatcacggnactnttcncggaacccccctcncttaaaacncaccagtaagcntggggtccngggaaaangcggtgattncnctcccaccgccggaccagaatcagcaccagaggccgnaatcgntnacgccgtntaggaaccgggtcgggttacccggattcaagtgccggtncgntacgatgtttttgcggggttcatagntacccggagatccatggatgcagctacgatttcaaatcggccggacgtgaagagatcgcgaaagcgaatccgttggtgaaagcagcgaagcttcagaagatatgatcagagccgttcgatgcgttgacttttcctctcgtaagtcttcatttctacgcgtatgtgtgtcctccgtcccccgagaaatacggatggtgtcgatttgattgatctcagccgttggatcaaaaatggtttattattgtaaaagattgattatgtatttatcaaagggacacgtgtcacgtggttttaggatggaagncntttcgctttctctccttcattttattttctttttcctttcagaaagaaataagattattcgcgttggctttttcttttt

SEQ ID NO: 136319 - DNA, 407 bp, Arabidopsis thaliana columbia
ccaggaggtcaatgacatagctgttcatcttgcacttcacacattgccattcggaggagttggtgaaagtggaatgggtgcttaccatggtaaattctcatttgatgcttttagtcacaagaaggcggttctctacagaagccttttcggtgattcagccgtcaggtatccgccatactcgagaggaaagcttagattgttaaaagcccttgtcgacagcaatatattcgatttattcaaagtccttctcggtttagcttaaacggtaaaaagaccgaggacacttccctttgtaccttatttacttgttttatttttcaaacatggacttagttggttgatatgttttggtttggtgttgattctatgaatattgaagttgataaataaaagattttcggttgatt

SEQ ID NO: 136320 - DNA, 573 bp, Arabidopsis thaliana columbia
  unsure (1)..(573): unsure at all n locations
gnactttccagncagncgantntcgagaaaggggcnccccttttcgncggaaaccaagnattccccnngnccntnttgccttccgnatgtggttcanttcttgcaccccaaaggagctcaggttgagttcccaattccggggggttgaagaaggaancancagtnccgcctctcgtcattgtncgccgagttaaggcccgccgattgaggancatgaaagagatagccaagacagtgtagcaacaagtgtggcggagaaatggatacaagcaagctgtaataaactcaaggcagagtttgatctttactctagtgtaataaagaacatcgcttccactcccatcaaaccacaagacacaaagaccaaagtcgcggaagcaggaaacgaagaccatattaaactcttggaagccaaatgagaattagctcggaaggacacctctaatggacaaaaaaatatcttaagaactggaagctaacttggtttacttttcacgtttgaaaatgtaataaatatttttaaaatgagaacattttgttgaaatttaaaattttagtaatcaaatttttatt

SEQ ID NO: 136321 - DNA, 287 bp, Arabidopsis thaliana columbia
  unsure (1)..(287): unsure at all n locations
gcacgaggcaacaacagtacagtgcacgtaggtgcgttttgattggccttccatccactcggtggtcccgcaacaggtcgttgtgctggtggtctggccaatcaaaacgcncctaggcaacaacagtacagtgcacgtaggaacagaggattttgatctttgtgaatacgtttgtgtaattaaagtttgttaggtctattgacgtctctatcatcggcttttaagtgtttctatagaattgtaaacctttgaataatggagtcttttaagcataaaagtttgaactc

SEQ ID NO: 136322 - DNA, 531 bp, Arabidopsis thaliana columbia
  unsure (1)..(531): unsure at all n locations
tnaangatcgncccnnggggtttccccggantnnnnaaanncccaatgccctnngntnttantgggancccaanagggtcacccatccagtgtgggacagtgacgggcacactgggcacagtgcggngccctacttnaccaacagtgggccattgcccatcacaatgctgcgtgggagtcaagtcattgtaccaattggctcagaccacaccggaccgtaaacaagtatgtgagtgccttaaactagcgggtaaagaaatcaagggcctcaacaccgaccttgtggccgcacttcctaccacttgtggtgtttcaattccctaccccatcagttttagcaccaattgcgacagtatatcgactgccgtgtgaaagaggctagtgatcagatgtacgactaatcaaacttgccagcttttaacctaattaaataaaagtattctgcttatatttcccattttatgattttatcttcttatctatgtaaccacacgatttcatatgctaataatgacaacggatctttctctc

SEQ ID NO: 136323 - DNA, 581 bp, Arabidopsis thaliana columbia
  unsure (1)..(581): unsure at all n locations
aanncnaccggnacccttccgnnccccctnccacttccccgtgttgnncccgccatgnccttggnccagccntgggttgtcnnnccccagcaggctgtggccntaagtttggaaccaccancatccagggtgtccaggaccccaatcancatgancaaaacttcngttccaagggncggngttncaccagtttgctataagtgatattttgttcaagaccattagaggaacaacaattacaaaagatgttgttcagattatgtgtagcaaatcggtgccgtgccaaggagtaaacgttgttgacgtgaacttggactatgtaggcaagacaggaggagagaagaagtcgtcatcaggcggtttggtcggagctctttgcgataacgccaatgttatcttcggtggaaaacttagtttccctatgtgtcccaaataagctttttggtataaataatttaatattaaaaaaaaaaatcaaaagtttcacaaacattgttttgtttgtgagttagtttgggaatttatcaacaagaaataatcagtggaatatttgacttttgataatgttttttttcccgatt

SEQ ID NO: 136324 - DNA, 406 bp, Arabidopsis thaliana columbia
  unsure (1)..(406): unsure at all n locations
ggggagataaggctttttgtagcnccnnntttcaggcaagnccaatgggcncaagatgagaggnaagagaaagggtaaatcggcggcacccggcgaaagaacccggcggtgacagctcccgcgagagcgaaacccggcaaagggagagctgcagccnccgtgtaanccccnttttcatatacattttagctatatatatgtgtggtttgctatgtgtttgtatatgattatgntgggtaatacntatataaagcattaagcgttaattaaccgtgattaactgtgttaatcnccctcgtgttgtggtgaaattagatgattttcgngggttaaattttncaagttttgatctatttgaaatnaaatcaaatgtattatatatatgtaagacttgtgtttgttaagt

SEQ ID NO: 136325 - DNA, 577 bp, Arabidopsis thaliana columbia
  unsure (1)..(577): unsure at all n locations
gcccccncanactnctcgnnnggcncntnccttcttgggagnctggacatcacccccccatnccgttggaaagccnccagnctccggtgaancatgggnctgaaanctcnccccgaagggggatggataagtacncaggtgccagcagttatggtnccccgcatatagccggtccggagattgtgagaagggcatggcagaggtacaacttaagtcttggtcttggtctcaacaaagtggctggaaaggttttcagaattggacacctaggaaatgtgaatgagttgcaacttctcgggtgtcttgcgggagtggagatgatactgaaggatgttggatacccagttgtaatgggaagtggagttgcagctgcctctacttatcttcagcaccacattcctctcattccctctagaatctaatccatgtggtccttctctttctttctcttcctctcaatgtaaacaaactctcatgttttctcttttcttcatctatatttttactacattatctatgtttttatttgctatctccaacaaacttattgaacaaaagatcaaatatgtttattact

SEQ ID NO: 136326 - DNA, 302 bp, Arabidopsis thaliana columbia
aatggcatcgaatgaagctggaagggcattgccgaaattcggggaatgggatgtgaatgatccagcgacggcggatggattcacggtgatatttagcaaagccggtgaagataaaaagacgggacggagttcgacgaagacgaattcacagaggaaacaagatggtgataaaccagcggtcaagaaatggctctgtttcacttttgcttaatctttttttttttgtttgttgagtaagttttaatcctaagagaatttagctgtgagccttatgagccctttgacaacttttgtgttagaac

SEQ ID NO: 136327 - DNA, 550 bp, Arabidopsis thaliana columbia
  unsure (1)..(550): unsure at all n locations
gcccaaaccgncgccanacccnccagggccaccccaccctatgccccncnacccctgctgcnatttccgtcgccatccgntttnttccggccggnccccggccatccatggagaagnccnaccgtgccagaacttagggccataatgttggattctaccatcgaactctatggcccttatagtaaccctttgtcaaactncgcaggagtaggaacttgcgctacttgcatggtcgagattgtaaatggaaaggagcttctaaatccgcgaactgatattgagaaggagaaactcaaaaggaaaccaaaaaattggagactagcttgtcaaaccaacgtgggaaatccagattctaccggattggttgtcatacaacaattgccagagtggaaagctcatgagtggaacatccctaagaatatacctaatgacgatgatctcgaaacttctacttgaaaccatccattaatttgtcattgttgttagttgttactatatcataaaattgtaacgatctattttttatatatatggatcgataattagctat

SEQ ID NO: 136328 - DNA, 565 bp, Arabidopsis thaliana columbia
  unsure (1)..(565): unsure at all n locations
gccccantccctananacacccgggaactccggggaaaccgnttttcgntcgncacaatgcancncacatcatttcacggtttctccatcctcagcgccaaacctgnggaaatgctgcaagtcccttccccatccctcacctgcctccgtcttgccacagccagctcccatancggcgtctggcagaaccgggccggttcaaaggtctgactccagctgggtcatgacggtggagctaggncccgcaagctcctcccaagagactactagtaaagcttcacaagacgctattcttgctccgaccactgaagttgaaattggtggcagcagagaagaagtattggatgaggaagaaaaggttgctttgcaaatgatagaggagcttctcaatacaaactaaatcttatttgcttatatatatgtacctattttcattgctgatttacagccaaaataatcaattataccgtgtattttatagatgttttatattaaaaggttgttagctatatattgtttctctttttccacatttgtatctaataaagtattggtgtttgtaact

SEQ ID NO: 136329 - DNA, 565 bp, Arabidopsis thaliana columbia
  unsure (1)..(565): unsure at all n locations
gaatgtgggncggctcacccaactncncaggtccttggacncttttttccgntcgcccggttccccgttggnncttncncaggngagtttcagtgaccagtggaggngttcatggggaattagggaaaatggccaccgagttcttgagatcagcgattgactacttggagagccatcctganctcgcccaattagttcctgntgaagntaatacaatccttcagtcgcagcaaacttctgcatcgtcagtctaatcaaacagaccgcgtacgaaatggattncggatggggaaaagcttactacaagagagcttcacatttaaatgaagggaagggatttgtaactgggaacccagacgaagaagggagcatgatgctaaccatgtgcttgaagaagactcagcttagtaagtttcgaaagctattttatgagtttctcaatgtctccgcactgtgagacaatcagaagccttattttttacttttcacaagtcccacatcgttaacttaaaattgtatgtgagaaataagtagtattataaataaagaggccactagattaagc

SEQ ID NO: 136330 - DNA, 512 bp, Arabidopsis thaliana columbia
  unsure (1)..(512): unsure at all n locations
tgggnccngggggnaaacttgggggtnnccnaggnanctnctaaggggggncnagccaagnggttcccaaattggaggccattcccatggccttaaagctgtttngcagnngaacccaaaaacaaagncctgcggnttatagntcaaccattctgntggccaaccagnaagcaagcttctggagattgttggctggatttgaaacccagacaaaggaggatgagaggtttgaagcagacaaaagtcaggttttgagagaaatcgcagcccttgaacctcgagatcttgcttgaaccaactaatgcaattcatccttccttcccttttaaaacactcgaaaagacatttttgaagcatcttgttgtttttttacattaggtaaccaatcttcctctcactttctcaccacacacacacacacacacacacacacatacacatacgagatatctattcgatatatgtattcatatgtacactacttcactgtcgatgaaataaaatggtttgtc

SEQ ID NO: 136331 - DNA, 307 bp, Arabidopsis thaliana columbia
  unsure (1)..(307): unsure at all n locations
gcncgaggtcgtntggaatncaattggggatcagatncngcattgtttaaacccgaaagatggcttaaagatggagtctttcaaaatgcatcnccattcaagttcacagcttttcaggctggaccaaggatatgtttgggaaaggattcagcttatctgcaaatgaagatggcaatggcaatactttgcagattctataagtttcatttggtgccaaatcatcctgtcaagtatcggatgatgacgatcttatccatggctcatggcttgaaggttactgtatccagacgttcatagacacacacac

SEQ ID NO: 136332 - DNA, 315 bp, Arabidopsis thaliana columbia
  unsure (1)..(315): unsure at all n locations
gtaaattcacatgaaggagaanncaancantcctatgnctncatggttccggaggagagagttcacgncggtgggntagtaatgtctttacttggtggctccacttgatcgaaactgaaagccatttatggtaaaagtgtcncattctcngcaaaaacctgtgtaaagctgtaaaatgtgtgggaatctccgaatctgtttgtagccggttacgttatgctggatcaaaaactcaagatttgttggatattgttatgctggntaggtggtgaaaccacttcccggttgctaaatnaataaacgtttttgttttat

SEQ ID NO: 136333 - DNA, 461 bp, Arabidopsis thaliana columbia
  unsure (1)..(461): unsure at all n locations
cctttccnccacccctggggtttngggnactttngncccnaccgttnaaagcccttagnattcccccataaaatangcccgttcccaaaagtttgggaacccgcnccaagatttatggggaagttgngataagaaaagactcgtttgctactcgccttttgaaggcccttancggttcncggtacctgcatccccccttttggcttgtncggtgtcacagacaagtgagtgagaagtgagaacttactctcgagtctgactaatgaaaataaagtcaaaagtgtatngggagcgggaagcncagtgtgtcgggttttattttgggttcctgagaggccttagaacgtgattgcncgattttaaccatataatagtttgattactgtgaagttcatttcttgctaagtaatattttcttgtggaagtttagtttatttcacccaaaaaatgttttgcatncc

SEQ ID NO: 136334 - DNA, 429 bp, Arabidopsis thaliana columbia
  unsure (1)..(429): unsure at all n locations
cacaggaacntggtnctaaaatcanccgggttttccacaccccggtggaagntnccganncccggaatanncctgaaaggtgaaagntggaagagaacacanagaactcactgtgagtggatncgnncaaggagcgaaatcgggcagtttactncaacggttaggaantggaggccaccagagccatacaaggggaaaggagtcaagtattccgatgagatagttcggaggaaggaaggaaaagctggaaagaagaaatgatcttcatttttcattattatctacttacttatctcttcctttcaatgtttatgtgtatttgctcaaatttgtttagaaatgaagatgtttgtgttgggattcttgagtaagtttttaaaggaacccattaattgtttttgatgctctgacnaaaatttctttagtgct

SEQ ID NO: 136335 - DNA, 575 bp, Arabidopsis thaliana columbia
  unsure (1)..(575): unsure at all n locations
ccgtngcnnnnccccaagnnttgggtttnaggggttttcccnccggggtgnaaaggcctttgncatncccggnaaaccccngggggccntggcccaatgttccannagnnccccnctttggccattncaagccccgttctcgggccagngactatacccacnacattgctagcttcagggtttcacagcctccggtccctttggtgccacggctttcaccatcctttcgtggctctacaagaaacgtacagggagggacctaccaaaaattccaggattgacgccaccggctccggcgtctaacccagcaggttccggcgtctaatccagcagaatcggggaaatacgattaggcgtttcctaatttgggatgatgtatgaaggaacttgatcatactaaattactggggttccataaataaaaataaaaattgatctatcctctctttaataaaaatactagttacctccgaatatcattccattgatgtatatcgtgtgttacaaaaagtataataaaatgtaatcgtctttattgtatttttttaatgaagtaatatcattgagattgccat

SEQ ID NO: 136336 - DNA, 533 bp, Arabidopsis thaliana columbia
  unsure (1)..(533): unsure at all n locations
tttnncccccccccnnntttnnggnaatttggggggaaaaaantttcccccggggaaacnttttcccccgatttcccccaaanccggaaaattccccccccttaaggggacnaaaagtgggnncncccccccggtggcggccccntttaaaaactagggacccccccggggtttcaggaatccgccncgngncaacagtgaangtccccagttgaagaaagtctgtgtatgggtgttgctgttggtaacctttccatggaagagaagcagctcttccagaatgtgcagatgagtgttaacttcctcgtctcgctcttgaagaagaattggcaaaacgtaaggtgtttgtacttgaagagcaccatgggaccaccacaaagaatcttttgagctctctcttcttatccttcttccatctcagaattttgcattctgtttttgtttcagagatctgtgcttgttgggatatggtttggatttatattagcagttgttttttgttgacaatatattatgcaatattcgttttaatt

SEQ ID NO: 136337 - DNA, 268 bp, Arabidopsis thaliana columbia
gaccgctgcgacgtgctacactggtcttgccgtctggtgatcagtgctaagttctcttactggtgtatcatttgatatatttcccctttttctttttgtgtctctgaaactgcttagtgatgtgcagtttgctctgttagtccctctgtcactttcgcttctcatattctttgttgtgtagttctcctcataatgctctttcttccacagtctcgcaaaaaataaatagttaattacatttttaatacatgtacttgcatgaccggta

SEQ ID NO: 136338 - DNA, 429 bp, Arabidopsis thaliana columbia
  unsure (1)..(429): unsure at all n locations
gctacataaatancaggggatnttcgtacacacacattacacgaatctttaaagcatnaaaaagttcgtttgaatttnttactaagagaagaagaagctatgaatatattaacactggtcaccatcagaagcagcttgcaactgagaagcatactgtaaattccacaagatatcttcgaaggacggtcggcttaaagattcaggtgaaacacatttgttcatcagagttatcactcttatcagtgatccgtntcgacaagtggnttggtnctgtcggattcaacattcttctcctcccttcttcgctctccaangatgccagntcgnctcgtaggaaatgcttcttctcttgngggatncagatggtcccaaccgattgattgntnggaagaatcccngacgcgttgggtcggnccccggganttcccg

SEQ ID NO: 136339 - DNA, 667 bp, Arabidopsis thaliana columbia
  unsure (1)..(667): unsure at all n locations
acgangagagagatagatagatacacgagagagcacaaatgatacaatcaaattgtcagnttnacttggtcttacttgacagccaaggaaacaaaagaaatngaatgttgcagactgatgaatcctgagtttccgagtatataagttctttgtgtaactgaagaagccaaactcttagtgagcgttgngtgtgatcaagccctcgaatatgacgtagagatctctgttatcgcctccaaatatctcttcagctttcctaagtgtttcttctcttgtttgcttgtgggcgttaagatccttcacatttccaagaaatgcaccaaattgctcgtaagataatcggctcctgacttgtcgaaagaactctttttccatcaacccgagttctcgcagggtggggaaccaggctctgagattggaaatagaaggatcttagtattcaatcaaaacaatgccnctagtgggtaggngaacgaatacaagaatggngtccggaggagagataggtctcgaagtttggtttncggcggtnccagaaagnagataagatggtngggngaaccaggaggagtaacccccgnngggggttggggatacnaacggagantnagtgatactgggttngagancccnccgcggcaaangangttgtccannctcanaggtg

SEQ ID NO: 136340 - DNA, 401 bp, Arabidopsis thaliana columbia
  unsure (1)..(401): unsure at all n locations
taacacagatacagataaggaacatgtgacataacagcaaggggagagatcgccaccgncgtggcgtacgtagacgctggtcacggactgataagcattcacctttaaacacatatatcttacatagagtatatgatactcagnttattcttaatagattaggattntacacacatatataacactgatcttactaaacagtaagatatgatctctctgactctcccttgaatcagttaatcttcttccanctcgcaagnttctctttggcctnacgantgggaatggagtcttgggtttcttcctcaacgggacaaccgnnttnaaattccctacccggaaaccaacanaatcnttcgtagggaaggacaaaaagntnactttnggtngggggagggtcc

SEQ ID NO: 136341 - DNA, 525 bp, Arabidopsis thaliana columbia
  unsure (1)..(525): unsure at all n locations
catgccntaacactattacgtcaagaagaagaacanaagncaccacttactctgctacacacatactttctgtcctgtgacaatatanatggtttcaaacggattgtgttaattagataaacagtctcaaactctcagatcatccgaatgaaccacgacattgctcagatccacagagacatgtcctctgtccatgtaaaaggntctcatctctggcctcggatgtaggagaaatcccataatcatatgtcaattctgccataggagggatatgacgcatggcaaaggaaagcaatgtggataactgattcaccgcctccntcacgaataactggntgccanaaaaacgttaggagagcaactatggttcaatgaacccnagctacatcggcanattttcttnggcactngatttaggagtnggtgatgggangatttcacntcttccnggaacttcagnnggangggnctttcancttacaaagctcagggttcatacatccccttcacacgagtttaaaaaca

SEQ ID NO: 136342 - DNA, 507 bp, Arabidopsis thaliana columbia
  unsure (1)..(507): unsure at all n locations
attgccctctaacattgtgttgcccngggcgaaatgncaatcactgaaacattacagaaactgagagacgcaactaaaatatgtagtaccaaattattccaatatctctagagagcacaaagctagttccctcccttaataaaccctgagaatttatgcatgacttcaatagcattatcacattcaggtttcaacaaatgaaantnntnntcttctccttcactctccaccacttcaacctctcctttccaaccagacttctcaagcttaggcgggtnaccccaaccctggctcaacaacgnatctttctcagncancattaccagaancttaccacaacccancccnggacaaaatcccaccgactctgattggaccacgntggggcaacgggatcatcttgttcccatcctttgggtatttagggacttggncatcancccaaaacggncctcttatcttccacccnccaacgggggccaacctttccgggattcctncctcggc

SEQ ID NO: 136343 - DNA, 286 bp, Arabidopsis thaliana columbia
  unsure (1)..(286): unsure at all n locations
aggtggagatgagagactccaggaatagctacaaaaaatataacaatcancattcganaatgtctaacaatatnataacaagaagagacacattctcttgagacacgccttcgctgagtagagaagaccaaaacgagacaacanngctccgattccgaagatggaccaacaaaaaaagaacaatgtttagggtttnatatgaatattttnttaatganattaccgctgctctaagtcttctacaanatctgggaactgtgtagtagtagttagcgatctcccncat

SEQ ID NO: 136344 - DNA, 428 bp, Arabidopsis thaliana columbia
  unsure (1)..(428): unsure at all n locations
gtttcntcccgtgaaatntcgaatgccccattnanataaaatccaaggttcagcagcgtntcgcatattctcntcctacaaacagaaacaggaattttttacagttggggttaaaacttattaccatgaatgtgattgaaaaaaanaagtcttgtnattggacagaggatttgggttttgtttggtttagtaaggtgcaatgatagattctatgagttcttgaagaggagcgagttctttctngtcaatgagaacaaactcatgantgangaggatgaagtgtttgaagcaagtgtcgagatgagcttcctctntgagactaactattntctggaaatgagagtggtatatgtgtgngtaaactcggaatngccgtntaaagattgtctttcaccacttccttgaagtttggnggaaaagctgcacca

SEQ ID NO: 136345 - DNA, 592 bp, Arabidopsis thaliana columbia
  unsure (1)..(592): unsure at all n locations
tatcgaaacattgaaagtttcgatttatttcagatactgtatataacacactagatattacattaagcttcaatgtagttacaccaattaactggtgttaccagttacggatggcatttggttttgnggaatcggttgttcgntccttactcttcttgatgatgagaacaagttagcactgaagctggtatagaactgtcttccacttctagtagcattgttaataccatcgcaaagtgataagcttcctccaattgaaaacgatcttctcacgttttctactcttcctgagccacagtagtttgncaaatcactttgtgcccttggaagaaaaatgttatggtttcttctagatctggaactgtcttgtcttccacggaggtcattgctcgattcagaatctggttgatgattcgcctctgtttcttgatgagggggntcagtgataaggaagtacagggggcacgacataaaggacagtcttgtgagagagcaaccacgngtcggtggaaattagatgaaaggatggtncanttgggganagcttcaggatcgctctcanctcgntagagaagagaactcccccgattcg

SEQ ID NO: 136346 - DNA, 590 bp, Arabidopsis thaliana columbia
  unsure (1)..(590): unsure at all n locations
gacntnataagtacttcgtcttacattacaaatcttatttacacatgtaagtttnnccatctaagaaactaataataccacaaaccgtaatataacgtccatgtggtcacattctacacattacacaacagacatcatcagnagtccaatgcgacggtaaaaaccttttaaaagtaacggnggntacatatatattacagactttatttaactttttttaaacttattttttttcttttactcatacgacgcaatgacatcatcaagcatccacatatccacctcggaaacggactcatcaagctgactcggntgctccgccgtgttaccgnccagctcaaggaacgattccangctcgatatctgctgtttcagatcataatccggctcaaatccgtaactcaggttctgaaactcgnccccatttcaaatcctatacactccaccgggaaactcgggtgacttaactcgctctcactctgagagaaacggaggccctcttcgccggggtnatcggtgggncgnggggangaggnggggagtttntagngggggggtngggcagnctgnagntgggntggttcccaccc

SEQ ID NO: 136347 - DNA, 629 bp, Arabidopsis thaliana columbia
  unsure (1)..(629): unsure at all n locations
ggtcccgggcatacaatatattcaacggtggatcattacaagnacaccgattattcattaaatctctaagnaattcaaaaagaattcggtaaataactttcccaaaaaaacactaatatttgatgtaagcaacagaagaagtgttggcatctttgataagtgtaccaagcagaggagcaagcaaacatttcttgtctttctctttgtagaagtaacccaaacacttgcaatcacgatcgcacttggncttgcaatcgntcacagaagttgggccttgtccatcattaacataaggcccagtaaaatgctcaacaccgactatcttataataattgacagttttacccttgactccgctgcaaaactgcgtcgttataggtgggtgcgcattttatcactccatccgagttaatccttttgggtgtaggacacgcgttgcacatcccncgatcgcagtaaccgtaatcgccgcaaaacgacgggaagncacattgacggagaagtagtggngaagatgagaactctcttcccattggaatncgtgntgttggaatacgagtagcctngaatccnccagtnccantcttagttnaancctccctgnatgttcggcanttangccccccncg

SEQ ID NO: 136348 - DNA, 482 bp, Arabidopsis thaliana columbia
  unsure (1)..(482): unsure at all n locations
ccgcggtccgagcnaatnttatgtaaacaaagtgtcgaattataaaacaaaacagaanacaaaatggnnctctaagtttnacgtntctgggtattacaatgaagtntggttccagaatcactaagcacaagactaattgtctacgactcgcttgttcactgattaagcttctgtctcttgatcctctcaagtgcacccaatttctggggaggaccgtcttctccagcttcttcgccggcttcgtctctctttctagcaagtcctccaaaaacagagggagggacttctntctgagaggatctccacatggncatctccatcagactcatcatcactttcatcgggaagntcgatgtcttctccattccctgtcactggtttccccctcattctcaccgggactgtgaagatgactcctgcgnttacaaaacccaactcttctcccgccatctttngggtgggtctntgggnagnnnnggggg

SEQ ID NO: 136349 - DNA, 262 bp, Arabidopsis thaliana columbia
  unsure (1)..(262): unsure at all n locations
catacccacaaagcgggtttnatataattcatttatacacaagcataatccttaaacaaagcaaaaaacacatgacagtgaacacactgatcataccagaaaaaacacacaatctaatcacaagtggntggtantgtctcaaccattattcaagaggncatatttgtnncactttttcttggnacaagagttgtgantcagtagaaagggaacatcctcagcttagtcttcaaatcagcttgtggagtttgctgnctnctcg

SEQ ID NO: 136350 - DNA, 626 bp, Arabidopsis thaliana columbia
  unsure (1)..(626): unsure at all n locations
ccccccccccgncccggtttaatccttnanattaaatcgatgtaatacttgatacaatattggngtntacaantcgggatatggagaaaaatgaagatttgcagaanggnacgcatgcaaccagaaaaatctatcaagttatgatcaaattttatgtgatagacaaaaagaatggtaagatcccttgacagagcttcggtctctgtagtagtagagagatagaatcttcttgtgctcatacagagttgcaggttctttagactaacaagtgaaggaagatggtggaccatacagtgagggccagtatcgcgaccaagtaggtccaaagcatgagcactgagcattcgtcttgagcaacattgtacagctgtgtcatggtaccgatattcatggcaggcgggagggtganctgaagcatcaaaacatactgaaacaaanggntccagctggaagaatcccagatttggagctntttagtacaangcctatncccnataatttgggataggttttgtncccaacacaagattttccccaagttcaaccanccgttttnggcttgcccaagaacncaaaccctggnttgaaggttnccccctcgttttntanncaancaagggatttgg

SEQ ID NO: 136351 - DNA, 627 bp, Arabidopsis thaliana columbia
  unsure (1)..(627): unsure at all n locations
aataattctntgtngaagtgagatgtaataaaatnaaagtnttgntacaaattattangtgacacgaacgcctgagtaccgaagaatctctccaatgagttctcctttaccggaaccaacatnacggccacgaatctcgccgtctctaatgaacaagaaagttggaacttcgataacattcatgtccttgagaaactccatacaactatcgttctcgtcaccgttcattctagcgaatacgactgtctcggacattgaccgggacagtttcagcacggtcggatacactttaacgcaaggaccacaatgttttagaccaacgtcaagcacgatcagcttggctccagtgcgattctcgtcgatcagcttttttccacgtcaggtcggccgngcagntgcaccaccgcagagtgggttngtctccgtagttatngaacgtctccccattaantggtccgggtcaanacctcccttcctccnggtnttttctccaatgntcttattaaaaggtaaagtgaggaattttctcaatcttcnctctccgaaagagttctctngtcttgtcagcttcaccacccntganggagaagaaacgangnggtaagtcnggtcaantccccaangttc

SEQ ID NO: 136352 - DNA, 376 bp, Arabidopsis thaliana columbia
  unsure (1)..(376): unsure at all n locations
caacacaacggcatcanttttttttntgatngcgacactgcatacgcaagaaccagaggagtntgntctcagacgtctnccactgtgtgcctggtgaagcatccgggctcatacagnaaagtacatcggaccggtttcttccngagnacggagaaatagcaaaagcttcccactcaggnttaccaaaactgaaaacccggccctcgagcttcctgatagcggaagagccaaccactttcccagggttttcgtcttcccgnattggaacaaccgacaatcttccgggtgggttcttcccagtcgganacaggaacaggttttctccctaccttcaacaatgagntgggaccancgctaaaccgttntgggtaccatg

SEQ ID NO: 136353 - DNA, 621 bp, Arabidopsis thaliana columbia
  unsure (1)..(621): unsure at all n locations
gccatgaagttgcacgtttactctataataatacatccttgnaacgttttaagtatgttcagaaagatagatataaaaaagaaacataccaaaaataaggaagtaaaaaagtggctcaccaacctagtggtccaaacgagaaccgtcggtggtcttcgtcggcacagacgacggttgttgactttgctgtcccgccggtgaactaaatctcaacatctccatcggctgcatctgagtcgcggcctgcatgtgtgggaacccaccgatgtatctagcaaaccggtcggagatgatctggttttgnaccgggttttggcaaactaaaccgggattgttctgaattgcagactgatccataaccggaaatcgaggtaacttgtaccgggctctgtatctgacgtatgaactgctgaggtttgaactccgggggaacatcatcggaggcgaaggccgccgccgccgccattccactccccatccacatcaattggagnttgtantgaagntgattccaattatcttatggttccgncttaaatcggaggtttttcaagtttacttgaaggaggntttagttcttaaaaggctccatcnctcatggaccctctctccccccccncc

SEQ ID NO: 136354 - DNA, 229 bp, Arabidopsis thaliana columbia
  unsure (1)..(229): unsure at all n locations
ggcctcnatccatgtaagatgttattttncttacataatcctaataaaaatattttcccaaatttaggacgcatattatattacattcgaaggaagaaaagagttacaccagtcaaacccccacattagtaatggaaattttacatattgaaaaagaaagaacgaaagaaaaagaaacaaaagaaatttaaccganagattctnctactcgngntnggtnggttggngt

SEQ ID NO: 136355 - DNA, 464 bp, Arabidopsis thaliana columbia
  unsure (1)..(464): unsure at all n locations
aaagagatagtcataaangaacctacggttacctggtttaaaattatctctcataaccaggaaacttagaatctaccggngacacaagatcgaaccagaggnatactggtccagatagtccccggaatagcgaataatcatgttctgtttcttggcttgtcatattcacgagctctatcgcatcacggnacaagtaactcgcaaacgcttgtggtctctcttcatatacaacatctccggntaagcgataaagggataagaaagcgtaggcattaccagcaactccatcaggtaaacctaccttcttcancaaggcactcttccacactactnctcctgnttcaatggctgcttcgcggaaatccctntccnttgggaaacaactgagatgctttnngcaaagtaatgggcaangncggttgntccatgagcccattgnntagtttatccccggattcccntcg

SEQ ID NO: 136356 - DNA, 501 bp, Arabidopsis thaliana columbia
  unsure (1)..(501): unsure at all n locations
tttacaatgtcataaaaagaaattnctttcaaacgcttacatgcactatacaaactaataaatgactcaaactnaanaacaaaaactcatntntacaaaggcgaaagtatntgncgcctcgaataataaatcaaataatttattgattatgttgaaagagtgtttangnccacacggngacgaccgacattacggcgcagccaagcaaagccgccgngaagcacttgatctgaagtttgatgctaccttggagcattgnccccatgaactcggtagctagaaggtcgacgagggccatgtagatgagcattccggccgagcaagnatttaacagtccactcgtnatcaacgcgggtggacttgttatctctatagatactcgacaaatgcgattccanggaaagataccncaaggtgttggntccaggnggaaaaaagattgccatcaagaacttcttcacatttggtnaacttcttgcctggagggtngcagccaaccaa

SEQ ID NO: 136357 - DNA, 581 bp, Arabidopsis thaliana columbia
  unsure (1)..(581): unsure at all n locations
gtttcccctatncntatatatatatatatcgctagggatagaaagggaaattatttgttacatttcattacagcactatacatgcatgnaagaccctggaaacagaagttttacaagagctttatttcaaagacagagacagaaacttgaccttattcatgcatacgcaaacaaacgtaaatggtcatgacacaaaacatatatagagaagggaaacacactgtcnccnaacattaattatgcttatagtttggttttagttagattgtggggataaaaccngntgggaggatagcgactatgttgaggaggccggagacgatactgccgacgagatttaactgggaggatcagttgtccggtggaagggagggtggcgtcgcagctggagcgangggttgggacgacgatacgacaatccnntgaggagtgtgggaagggatatctttattccccnttggtaggaaaccgtgaatnntcccgcaatcnccgcanttggttctnctacgactctctttaggctnccacnctggagctggcccaccccattagcgaanccccgccngagnnccntgagaggg

SEQ ID NO: 136358 - DNA, 428 bp, Arabidopsis thaliana columbia
  unsure (1)..(428): unsure at all n locations
cataaataattagagggacgacctnatntttcgacatacaaagatatgtttctntttttttaggcattagacgttaaagcaccacttganattagaatacaacagagagaccacgtgcagncgacaatgtatacaanaaggcaggaagatcggaagttgatgcggcctgtgaccagcttgtcggcggtcacgcaccgctcagattccacgatctcaccaccagnaaccttcacagacacctttgtcccataactacttggacatctcttcttcttaagggcgcctgtggcggnaantagccaatttcccantccantggcaggaacaaacttgngcttttctcaacaaactttctgtacaattcgacggncttggggttcatcancaanagctccggnagatcttccctcccngggacgacaatgtag

SEQ ID NO: 136359 - DNA, 633 bp, Arabidopsis thaliana columbia
  unsure (1)..(633): unsure at all n locations
ccaggccctggtccgaaggaggattctccnagatcatntcanttgaagatcgtttagnaactntgactttctcgattacagaccctgtggaacttttcccctcagatgctgaggtatgagactcaagcagaggntggagagaactnccagctgatccaagatctgttccagcttcttctttaggtttaagactcgncatagcttcagatttcccatgctctggaagtacagnagctctttcttccantctctcctttgatttcncagctagacccttttcttcatcaagagagggntttgnagctgaaaattctttaccaggaatagctgtatttgaagaggcaaaatccatgctgacgatcccaggacttctcatcttttcattggagtttgaagcgtcggagctcttctcttncaggccaaaatccccatccaaaggatccatcaattccctggatattgagaaggcttcntgaaattgcttcaaatttcggcaaactgaacagacttatcaacagttcatccctccgggtgggaagaanttggcntttnttttaagagacccaacttgggggttttttagagtcttangcaacnagggttctnttntgaccngnggccancaagggggtc

SEQ ID NO: 136360 - DNA, 333 bp, Arabidopsis thaliana columbia
  unsure (1)..(333): unsure at all n locations
tagctatntatatcttatcaaaaatgataaccattgaaaatagtacttaagaagattaaaaaaccaaaagcaagaagagtcatagactcaaaaacataacaagacacaaagnacttaangtagnaaataaattacttgataacattttcttcttctggngtcttacaaaagacagtttttttctacacatttactcatcagccttctccactggagntgncacggaggcttccacggggggtttctcctcctctgcctctggcttcttctcttcctccacaancactggagcttcctctgtcttcttntcttctacttctacctctttcttcg

SEQ ID NO: 136361 - DNA, 250 bp, Arabidopsis thaliana columbia
  unsure (1)..(250): unsure at all n locations
gagggagggacaaaatgagattactncctctgantgactataagggttatcggtctcactgctcgagcaatgagatagttgatgaagctggtttaggtgcaaatatgggattattgactgangcaaggaaaactgttctnccancctcatgttgcattctgctcacgggggaagganacaaagancnacgttgtctactatctgcaacttggntcaggatcaagctcccaaattgntcttcaaaagttcc

SEQ ID NO: 136362 - DNA, 428 bp, Arabidopsis thaliana columbia
  unsure (1)..(428): unsure at all n locations
gaacaaaccatgaggaacaaaaaaaacaccaatcatgantcacctgtgaaaactntatttnacatgtaccttnggtgntatanccatgatcatgtttcagtagattgtggntcatnctcagtcggatgtgacacagcttcatgatgtagtatctgctcctctatcgggtgtatctcagctttcttcttcttctctttctggatcacttggcggggcatnacctctagtaaaaagctccctccgctccacacagncgcagaaatctttaggatctgaaagatcacatgaagtctatnagataggaagatcggtacggacaatgacatggttggcaccgtgaagatggccnggaataggatgttcatccatntacgattctgancccccagcaggaccgntcaagttgncacaccttcttgnttggcctt

SEQ ID NO: 136363 - DNA, 546 bp, Arabidopsis thaliana columbia
  unsure (1)..(546): unsure at all n locations
ttaatctcaactttcatcaaaccagaattacgtaacacaacttccaacgtccaaaacaaataaaacatgcacatgcaactataaaacaanacccaacaaactctaaattataaaacaaccgaacacaacacacacaccaacacacaaaagaagaatcaatgggagtctcggacatggaagtaattagggttcttgacgacgatatcgtacatgtaaacggagtngagtttggtgaaatctctaggcagggaaatgagatcaatggaggagcgtttgtggaattggaggagatctgtgtcgccgccgccaaagtatctctcccatccaagantctggaggatctgctcgagcgtcgagtaagatgagaccacttcttcngtgggtaattggacaacatttccttcggtctgtgtgtcggatcctgattggttagggtcnccacaagtcttatcactcnncctggaggaccncangctgnatgacttccctcccccctaggtgggnnttgaagagnnaanttnatnacgnggcggcgccgnatccgcc

SEQ ID NO: 136364 - DNA, 529 bp, Arabidopsis thaliana columbia
  unsure (1)..(529): unsure at all n locations
tcaccagcangtttttccactccttaataccttgagtagttttcatatattcactcttaagtgagcacacaaccgattgtgtacacccctctagtaattttagtgtactctaacaagaaaactgaaaaatgcagggggntagaagatcagcaaaaggaagtgaaacaatacaagtcagagaagagaaaatggctaatgagtcttggttacagagtctggggagtgatgggtgaccantggagtagctttggaggctgtcctcttcccaggagaaccnncaagctccctaactccatctnctatgtcgccattatttgtctatgttgttcaaagctttctccagtcttgtctcaaatggtgttggaatgncaatttacgctcttatcctctctgtacttggtactggtgtttgggtnttccccnnggaatgaagatgcagagncncaatcttnttgtctttggggggattaccccagcnacccaccacttgnggcctattataggtgttctcatcnanggttntnggtcg

SEQ ID NO: 136365 - DNA, 257 bp, Arabidopsis thaliana columbia
  unsure (1)..(257): unsure at all n locations
aacataggcattttagaaagaaaaaaaatcacacaataaaagattctaataaggtaatcgatatcctctactaagctcactcgtgatagtatcacgcaagccttccatggctctatcaccggnaggctcatatggaatgngctcancntttttttcatcagcggcattttctnctncancaccatgagtatgatattcttctgtcccgngncaatgnacaaaatcataatcttctcgatgtgaatcacgtatgaagg

SEQ ID NO: 136366 - DNA, 334 bp, Arabidopsis thaliana columbia
  unsure (1)..(334): unsure at all n locations
ccgggccgggaattncccgggtnaacccactggntccgntaatccgctgagaagaacntgtgcacccatcattggtccgactcgnatggaactctgctggaactttcgattgtaaatcaaggactggaggtccattcggaacaatnaggtttnacgctgagcaagctcatggagccaacagtggtatccacattgctcttaggttgttggaccccatcagggagcaattccntaccatcttttttnctgatttcnatcagcttgctggtgttgtgggccgttgaagttactggtggccctganattcctttccaccctggaagngagggcaaag

SEQ ID NO: 136367 - DNA, 390 bp, Arabidopsis thaliana columbia
  unsure (1)..(390): unsure at all n locations
agtgtttcggctcggtctagaacaagatcgcaagacttcaagatnccgtcgcacaagtcgttcatgattaagaagaaattggggaagaaaatgaggcaaaacaggcctattcctcactggattcgtcttcgtaccgacaacaccatcaggtacaatgctaagcgtaggcattggcgcagaaccaagcttggattctaagaggtttacttttgcttattgtgagagctttgttcttttgaaaaagactttgttttctttgtcagttttgattgttcacatttgtgtaagacgatctttaatcatttatgtttccaaagtttccattgaaagngtacttattgtagtaacattgagtttttcaattagtttaaaagatttggnaatgncctt

SEQ ID NO: 136368 - DNA, 422 bp, Arabidopsis thaliana columbia
  unsure (1)..(422): unsure at all n locations
ggacagnatcagggaccnggccngaantnccagggtggcccacngcgtccggaagactaaacattgaaaaatccaaagctcccattctaaaaatttgaaaatnaagaacgcttctntcaagctcccactcttgatcttnattttggtcatcacatctaatcttggagcagaagcaagaaagctgaccggagttgctgacgtaattnttgaaggtgaagccgcaagtccacagtacggtatcatcgatgagaatgacactttgaacaaatccccatcttgcaagagggacatcgactgtacttttnagtgtcgcaggggaggattctgcaacctaatccttcaaaaatgtgnaatgtttgtaataatatttacaatcgcattataatctaagtttttcaataaaaggtatntatcaattnttc

SEQ ID NO: 136369 - DNA, 353 bp, Arabidopsis thaliana columbia
  unsure (1)..(353): unsure at all n locations
atatggacgctcggaaatttttggtgggaaatgtggctcctattggntgtataccataccagaaatcgatcaatcaattgancgataaacagtgtgttgatttagcaaacaaactggctattcantacaatgctcgtntcaaagatctcttgacggtggaattgaaagatagtctcaaagacgcacacttcgtttatnccaacgtttatnatttattcatggacctcattgtcaacttcaaagcctacggggntttaggncgggcaagtnaggccgtgttccgaaacgagagggtggnttggcgggggntnttnccntttgggcccaaggtggggccttttttcgggccccgg

SEQ ID NO: 136370 - DNA, 289 bp, Arabidopsis thaliana columbia
  unsure (1)..(289): unsure at all n locations
ggactgaggttccganaaccggnaaaggnnngaagaaagctcttccgcaagatgttcctgcgtggagactcantcattatcgtcctcaggaaccccaagtgagagaagctcttcttatgataattctcgcttcttcttgtcaaatcctaattgttgcatcaacagtgagaanatgttttgattatgagctttaaatcnactagtgttgccttgnattttncacttgtctnctatctttgacttgaaacgcagncagtgaactttgnaattatcaaaagagaagttcttt

SEQ ID NO: 136371 - DNA, 475 bp, Arabidopsis thaliana columbia
  unsure (1)..(475): unsure at all n locations
agatgttgcatccagggaatctgcgattgtagatcttgaagagacggtagagagtctacgtaatgaagtggagaggaaaggagatgagatagagagtttgatggagaagatgagtaacatcgaggttaaactccgtttgtctaaccagaaactnagagtaaccnaacaagtnttgacagagaaagaaggagagttaaagagaatagaagctaagcatttagaggaacaagcattgctcgaggagaagatcgcaacaacccacgnaacatatcgaggtttgatcaaagagatatcagagagagtggattcaacaatactaaaccggttncaatccttgtnttgaaaaactttaagggggagcaccaaaaagctttcgggaaaacagttggttttagncgccgnagnntccttttttacgggcgannaagtttttttgntnnnnatttaggaaggggaaaancggggttnccgtagg

SEQ ID NO: 136372 - DNA, 362 bp, Arabidopsis thaliana columbia
  unsure (1)..(362): unsure at all n locations
gatcggtatcgacatcanccaagagctggtgaatgcnccatctggtgcggtcgcagtacccgnagcaaagaacanggtggtacaagctgaggcgaccggagctgnggncagtggaggtatagatagtgaccttcaagcaaggttggataaccttagaaaaatgtgaagcctttcctgnttctgnatcataatattactgaggctgatcacttttcaatttcaaaggnaaatgttgcaaacgntgtgttaacgttttgggggtgggcttgtaataaattcataatttgagccctatattataaaactnattattgntcaaacacttngtatataaacccaatttaaggggactnaggagattt

SEQ ID NO: 136373 - DNA, 500 bp, Arabidopsis thaliana columbia
  unsure (1)..(500): unsure at all n locations
cccaaagtttacatatggaatggccaagaaccaaatccttacatggggcatctagcttggggtgatgcttttgtggtgacagcagattcagtcagtctgataagcgaanttgtagcaccgggaaaccagtgtacgttgttggagccgatcactgtaaatggaagattgcagaattccaaaagtctttgagggagcgaggagttgtccgctcatttacaggtttcgaagatatgtcggaaagttggagttatccgccattgaatgacacagcagaggcagctacgagaatacggcgtgaattggctgcacgtggatggagtttacggtctttgaattaatatactcctccttttgctgtanccactttattttncggggattcaanatttttttcccaagnctggggaaacangangcctnaannnattcgggttttttttcaanaaaagaangantttnttttgnggtttccttttaaaaangggnnttttttccnttgg

SEQ ID NO: 136374 - DNA, 575 bp, Arabidopsis thaliana columbia
  unsure (1)..(575): unsure at all n locations
cccaaattctcttctctctatctctctcgcgtacgccgcaccgtagcgaccaattgaatccacgaggaaatctcagtaaatactatggcgaccaacgaacccgagcacgagcacagagacgaggaagaggccggagctaacgaggatgaggacaccggagctcaggtcgctccgatcgttaggcttgaggaggttgccgtcactaccggcgaggaagacgaagatgccgtccttgatctgaaatcgaagctttatcgattcgataaggatgcgaatcagtggaaggagagaggagctggtactgtgaagttcttaaagcataagaaccacttgggaagattcgtctcgttatgaggcaatctaaaacttttgaagatctgtgctaatcactttcgttaaatcgggcatgagttnttcaaggacacgttgggatnaaaaggcatgtntntgcacggtcgtnctttcctnatngtgnactcaaggttngctttnntgtatccntttgttcttttngattgaaaanattttcaaaattcaggagtcttgttnnnagnanaggcaantcctcntntnga

SEQ ID NO: 136375 - DNA, 500 bp, Arabidopsis thaliana columbia
  unsure (1)..(500): unsure at all n locations
accaattgctcccgaaggattcgtctctcctccgtatttcgacgaaggaagcgacgngacagaggaagagatcgctaccttttgaagagctctatggacctgcgtatagtggtgagagtatgcttgggaaagatatttatgtgatggactcaaagcataagaagagttcaggtattggtgggaagccaaagaaagataagattagagatgggtttgaagagagagttgtgcaagttaggagagtgactaaggttgttaaaggagggaagcaattgaagtttagagctatcgttgttgttggtgataaacaagggaatgttggtgttngttgtgctaaggcttaaagaagtttnttnctgcttgttcagaaatctgctattgatgctaaggngaaacattnttcaagttccnatgnccaagnattctacctttccccnacaggtccagagggtgnttatgggnccccaaggnnancttnnncccgtttaccagncctnttt

SEQ ID NO: 136376 - DNA, 283 bp, Arabidopsis thaliana columbia
  unsure (1)..(283): unsure at all n locations
gtacatcccaatcatcaaaccatgactattctgctcctattntngatgaaccagttcctcagagcaaatcccctgagcatgctttatncaccaaaccagtctatgnccaaactgaacaattgcctcctgctccatgggagactnaggngccccggaagtatccaccctcaatgtctgctagaaccancaagaggccagantncttccagcataatgttccacaacactcaagcagtgcctctgaatcntnatacggtgatcttttgggacaatcccggaatct

SEQ ID NO: 136377 - DNA, 525 bp, Arabidopsis thaliana columbia
  unsure (1)..(525): unsure at all n locations
gcttgggaccagagcagctattatcagacaccaaaccatccatctgcgtctcctgtttcatcctataattctgggagacaaacaccgaagaatcttgagaggaagtattcacggattgctgataactaccgttccattgatgaggttaccgctgctctttcacatgccggtttggagtcctcgaatctnattgttggtatagatgtcaccaagagcaacgagtggacaggggcgagatcatttggtaggaagagtctgcatttcattggaactactccaaacccttatcaacaagctatttccatcattgggaaagactttatcggtttttnatgagggataaatttgatcccctggtnatgggatttggaggatgctnccaactcatgntcaggatggntttcagtttnaatcccaatgntacaanatttttnaacggggttttaaggaggttnccaatggggttcagnnggggttgttnccccangttnggcttttaaggnccgcnannntttttgaccttta

SEQ ID NO: 136378 - DNA, 500 bp, Arabidopsis thaliana columbia
  unsure (1)..(500): unsure at all n locations
ggcttctacatgaaaatatggatttggcgagtaatattcacagaaagcatcaaagccctatagagtcaaaggntcctgaagcaggattagattgtaaagagagaatacaggcagactgttcaccagatagcggcggaaaagagactgatcctctgttaaacaaagaggttgtcatgaacgtaaatgacataggagactggccaaggaagtcgtgtataaaancgcactcagctttagcattcaggtcccgtcaaactatgtncttaatcgctacgttcgctgtctgttttgctgtctgtgcggttctctaccatccaaacaaaggtcacacagctttcagtgggcaatccgnattganntttggtccacaaaatttttggnntntaaggttcaacgggcagnngcctcttcatttancggggtgtnccatccaaaaaagccncggaggggggcttttaagggngttntncanccagggctttnggcccaaanaggttttt

SEQ ID NO: 136379 - DNA, 457 bp, Arabidopsis thaliana columbia
  unsure (1)..(457): unsure at all n locations
tgcatcgtcgtcttcctcacgcnatttggtaatccnattcgtcttcatctaattccctcccttccnagaataataatgtacccgcnacctccctcaagcatctacgctcctccaatgctggtnaattgctccggttgccggacgcctctccagctcccatccggcgcccganctattcgctgcgctctctgccaggctgtnactcatatcgccgaccctcgcaccgcccctcctccgcaaccttcctccgccccttctncgcctccccaaatccacgtggctcccggtcagctgcctcacccccatggcaggaagagggccgtnatctgtggcatctggtatcgtttcttttngncacgagctcaaaggctgcatcaacggcggcaagtgcatgngtaacttcttatnaacaaantnaattnntcccagattnattctatgcttaccggggagaact

SEQ ID NO: 136380 - DNA, 335 bp, Arabidopsis thaliana columbia
  unsure (1)..(335): unsure at all n locations
tgcccccnggaaanaccccttggaaaaattgtnaaccccncaacggttaagaagnaggttgaggaaagaagttnagccggnagnccggcggatncnacaacaaagaaagtncttaanctacaaaactttgcagaagcagccaactttgtgatggtanaattgctggtaattgcatagggactgttaatccaaaaaggtgcaacttgtacttactaccagagatgcaaacgtgccgcatagttatttatcttcgtgtcttttttataattgtaattatgttgcctttttcttcttaattatgtgtgttttattaaaatgtaaaagattttttgatt

SEQ ID NO: 136381 - DNA, 433 bp, Arabidopsis thaliana columbia
  unsure (1)..(433): unsure at all n locations
cattgtttctgctacttgtggtggaattgcctttgcttgtncgggtcaaccggtcattactgggtatctattggctggatctatcattggaccgggcgggttaagctttgttagtgaaatggtgcaggtcgaaacagtagctcagtttggtgttatctttctcctttttgctttaggattagaattttctgcagcgaanttcgtgtggttcgtgcagtagctattccaggngggcttcttcagataatttttgttcatgtgcttgaagtnggataacagccccgttatgtngcgggnaacctaccagaagggattattccgtaggcggcaatttctattcgatggcancaaccagcaagngggtttttaaaatttttaaattggaaggaatttcnctnaagggccnttnaatggnccngnaaccntttngggg

SEQ ID NO: 136382 - DNA, 525 bp, Arabidopsis thaliana columbia
  unsure (1)..(525): unsure at all n locations
aggtatttggctgagtttaagactggtcaagagaggaaagatgctgctgaacatactctcaccgcttacaaagctgctcaggatattgctaatgctgaattggctccaacgcatccnattcgtcttggtttggctttgaatttctctgtgttttactatgagattcttaattctccagatcgtgcttgtaatctcgctaagcaggcgtttgatgaagccattgctgagttagatactcttggagaggagtcatacaaggatagtaccttgatnatgcaagcttcttcggtgacaatcttactctctggacttcttgacaatgcaaggacggaaagcccggaagggnggattaaaaggaagcaggccagcancccaaaggcntnncttgaaggaccagangggngntcctaaaggtttttggggttcccttttttcaaggaattccttnaaggtnattgcaaatttaaaatnaanggttccccccntnggggtttgntttccnaaanctttcccttngcattnccc

SEQ ID NO: 136383 - DNA, 359 bp, Arabidopsis thaliana columbia
  unsure (1)..(359): unsure at all n locations
tctgtttctngctcaccatcgcctacacgctcggattcacatgcattggtttcacatccttgctctcgtnatcttcctcctcacccntctnatatacccactggtcgtaggaaggaaagctaccccgaagagtattctccttgtnaagatttcncccctcctccttctccttcagcaccaaaacacgccgtcccaagaggcatcacacgtactgaaagtgctccagtcagaataccagctccaactttccagtccaaagaaaacgttgtggcacctttctgctcatctnaagttgtcggggnaacgnttcngttgaaggcnttttnagaaanttggggtcccttgggnattttggggca

SEQ ID NO: 136384 - DNA, 450 bp, Arabidopsis thaliana columbia
  unsure (1)..(450): unsure at all n locations
ggctaaaccgattataactggtctatcagctcttatctacaaggctcaagatgcacatnatgatattnccaccactatgatgaccatgaaatctcacatccaagcacttgaagagcgtgcaaatgcagctactgttcagaccacaatatttgggcaattggttgctgaggcattaccaaagagcctccactgtttgangataaagctcacatctnattgggtaacagagccatctngccatgaactggcagatgagaacagaaactcacctagacttgtngncaacaaccnctaccacttctgcatcttctcggacaacgtgatttccacctcggttgtngttaattcaactgtctcggattgcttgntcatccaaaagnagnnttgtttttccccattagtggcgggattcggggtgggcttcaaaaggnttttnagggcctnggntnt

SEQ ID NO: 136385 - DNA, 481 bp, Arabidopsis thaliana columbia
  unsure (1)..(481): unsure at all n locations
aagccttttggatcnccctccaattaatatttccnagtttcttgtttatgttgttgagtgtggtttaagtttctnagttgtcacnacaccaaaatnattattgtttgtncagcaattgtaatgagagacagatacacagataggtccaggggttttggatttgtcacatacagcagtcacnccgaagctgaagcagccgtgtctgggatggatggaaaggaactgaatggtcgtagagtgagcgtgaaactctttggtattggtgatattgatgatgaatgacgatgatggtgctgacttgaaaggtggacacatctctatccaaaaataaaaaaacattcttgtaatgtattgtgtgcttttcatggtggtttgcaagtgnctgtttttggcctcctttcaaggggtttgtttccagggcctcctttnatttggatccccgggnatnatggccttaataaaggcgggtccntaacccttt

SEQ ID NO: 136386 - DNA, 406 bp, Arabidopsis thaliana columbia
  unsure (1)..(406): unsure at all n locations
ctgaaatnaggaggccattcgtagatgacccttacagtccganatttgaaagacctccaagtnacagtnagggaagacctcgtncttataaacctnttcctggntcaaagcgtccatatgctgcactggatgaccttcctccccgtaatgctgatgttnatgttcgtaattcaagaccccgtctggactatnatgttggcccatctnaatatggggaatcctacggggaccggattcctaggtctagtctaggatatggaagcagccgaaattntatgtcaaatcatgactcgcggggcccatacagcagtcgtcagggaatgggtttttgggaggagggttcttataggtggcagcnnttgtnggggggtttntactcgtnaagctatggtgggggcttttccca

SEQ ID NO: 136387 - DNA, 466 bp, Arabidopsis thaliana columbia
  unsure (1)..(466): unsure at all n locations
tgaaatcgggagagcaaccacatatactcaatatacaaccgccggaatgatgatcgacgatgagattgttcaccaagtcaacttcaaaccggatcttgtggttatattgtncaattctttgtaacaccaggagcttctatcatgtggctatctcatgagctcttaccaagaggactgggaagaatagaaatggtgccaacatcaattgtggaagagaccaaatgctttaaatgtatgtattgttgtnagttttatcgattaatgagtttggtctgaacttaaccatatccattaatgactgaatgtgtgtgtttggtctgaacttaaccaaattgattaatagatgaatgtgtgtgtttggcctganctcaaccatatnggctaatngntgnatgtaagtgtttggcctgaccttaacccttttnggtacanccggggaatgggtttnttttcatgggtttcanct

SEQ ID NO: 136388 - DNA, 425 bp, Arabidopsis thaliana columbia
  unsure (1)..(425): unsure at all n locations
ggctccagccgcttgtccttcctcctctagaattctctgttcctactcctctccttctccttctctctgtcccgccatttccacctctggtaaactcaaaaccctaactctctcttcctccttcctcccttcttactcattaaccaccacctccgcttctnaatccactcgtcgctccttcaccgtccgcgccgctcgtggaaagttcgagaggaagaagcctcatgtcaacatcggaaccatcggtcatgttgaccatggggaaactactttaancgcagctctaaccatgggtctcggttccattgggttccagcgtggtaaaaaagtacggcggggattnacggtttcgccggaagnaganaagcntcngggntttcaaatnaaaaatnggtattttttnggncggggntttnnanttngaa

SEQ ID NO: 136389 - DNA, 334 bp, Arabidopsis thaliana columbia
  unsure (1)..(334): unsure at all n locations
aactcaacatttagtggtcagaatatatnatgacgagggtgtacaagcatctaancttattggttgtncccaaatccggctttgtaaacttaaaccnggtaaagtgaaagangtctggttgaagctggtcaaagatttggagatccagagagatactaagaaccgtggagaggttcaccttgagctcctttacatcccttatggttcgggaaacggcattgtaaatccctttgtnacttcatcgatgacgtccttagagagggtgctcaagaatgntacaacagntgnaggaaatgcatcangccgtaaaagaaaagntgncattgtaagnggg

SEQ ID NO: 136390 - DNA, 337 bp, Arabidopsis thaliana columbia
  unsure (1)..(337): unsure at all n locations
aatgtaaggtattgatgatncgtctagagtctnacctagcaaaagttttncnagcngcttgtaaaggcgagctaagcggcatatnacttgattggtcaaaagattcagcaatggtggttgtaatggcaagcaatggttatcctggtgcttatnagaaaggntcaatcatcaaaaaccttgaagaagctgaaagagttgctcctggagtnaaggttttccatgcgggaacggatctagattctaaggggagtnttgtagcgactggtgggcgtgttcttggggtcacggcgnaaggtaaaancttggaagaggcgcgtnaaagagcgtactcggcagt

SEQ ID NO: 136391 - DNA, 290 bp, Arabidopsis thaliana columbia
  unsure (1)..(290): unsure at all n locations
agttaagttcccgaccaaaaccgagccggacatcagcgttgaaatcccttgcttgcnattgtnaaagcatgacgagatcccaagctttcttcacccttcgtntccgtatacagcttttggagatatcattttagaccagttaaagagattcgaaaaccacaagtttttctatctttnnatcgacacttttngcgaactagaaaaaggcatcatggaccacatgtnacaacttttntcctcaagncatcatcagtcctgtcggtccgtttttnaagatggntcaaaccttg

SEQ ID NO: 136392 - DNA, 350 bp, Arabidopsis thaliana columbia
  unsure (1)..(350): unsure at all n locations
cagaggatcagtctcagtnttgatttcaggtgataaatctntttnctttgacaatggcagaggaaatnagattctttnaactcaacaccggagcgaagataccatccgtcggtctaggaacgtggcaggccgatcctggtctcgtcggaaacgctgtcgacgctgctgtnaagattggttatcgtcacattgattgtnctcaaatctatggcaatgaaaaanagattggnttagtcctgaagaaattntttgatggtggagttgttaagcgtgaggaaatgttcatcacatccaaactatggtgtacttatcatgntcctcaagaagtgccttnggccttaaatagnnct

SEQ ID NO: 136393 - DNA, 381 bp, Arabidopsis thaliana columbia
  unsure (1)..(381): unsure at all n locations
gtaatcatgattacgtagataatcatagtgattatcgtattaatgatgatcttatggagtgtagtagtaaagaagggtttaagaggtgtaatggatcnttggaacgggttgatttaaacaaattacccgatccggaaacttcagatgacgattaggaaagcaaaaaatngnaacaaataatagnatcgatttgtttttcacttttcgntaaggttgtncttccttcaanccaaccaaaaaaaaagttgtacaaggtaggtttagngnattgtttgccctttataatgcgcgggggttgctaccatgcaccacctcctccatggagtttgtttgtgattacctaatttnatttattcctagngtaaatgataagtccnccct

SEQ ID NO: 136394 - DNA, 575 bp, Arabidopsis thaliana columbia
  unsure (1)..(575): unsure at all n locations
aaagcctatttgggggatcatcaaccttctatcatcaccatggatccttacaagtatcgtccttcaagcgcgtacaacgccccattctacaccacaaacggtggtgctccagtctccaacaacatctcttccctcaccatcggagaaagaggtccggttcttcttgaggattatcatttgatcgagaaggttgctaatttcaccagagagaggatccctgagagagtggttcatgctagaggaatcagtgctaagggtttctttgaagtcacccatgacatttcaaacctcacttgtgctgattttctcagagcccctggtgttcaaactccggttattgtccgtttctccaccgttgtccacgnacgtgccagtcctgaaancatgagggntattcgtggttttnctgtcaagttttacaccagagngggnaactttgatntttgttgggacaacantcccggtgttcttcanccgtgattggnttaagtnccggatgttnncacgggttnaacctacccgnaanaacatcnaggggcttgnggtttggctaangnccnttncttaggtttnaa

SEQ ID NO: 136395 - DNA, 307 bp, Arabidopsis thaliana columbia
  unsure (1)..(307): unsure at all n locations
ctgaagattgtncatagagacataaaagcgacaaatgtgcttcttgatctgtctctaaacgctaagatctctgantttggtctagctaaactcaacgatgacgagantacacatatcagcacaaggattncaggaacaataggttacatggctcctgagtatgcaatgagaggttacttgacagacaaggcagatgnttacagctttggtgttgactgtttagagattnntagtggaaagagcancacannttacagaccaaaggaagagtttgtttaccntctggattcggcatatgtnttgcaag

SEQ ID NO: 136396 - DNA, 535 bp, Arabidopsis thaliana columbia
  unsure (1)..(535): unsure at all n locations
ctctctctgtctctttctcaaaaatcatctgcaggaagtgaatcgtcaaaaccgagtttggaggatctgtcttgaggagtttttttttggttgagaaatggcttcgaaaaggatcttgaaagagctcaaggatctccagaaggatcctccaacttcctgcagtgctggcccagttgctgaagacatgtttcattggcaagctacaataatgggtccatctgatagtccttattcaggcggtgtctttctcgtaaccattcacttcccnccggattatcctttcaaaccaccaaaggtngcattcaggacaaaagtgttccaccctaatgtcaacagcaatggangcatttgccttgacattttngaaagaccaatgggggcctngacttaccatntcggnggtttnctttcgganatgtcatttttaacgggnccaaaccccgttgtccnttggtnccagggtttccanattnanaaacccgttgggaangtttggttntgngggnggnggcctagaattcaaggggaaantttg

SEQ ID NO: 136397 - DNA, 461 bp, Arabidopsis thaliana columbia
  unsure (1)..(461): unsure at all n locations
ttccnggttttccgttttgtacccacgcgtccgtccaagggaactgttgaagctgctaaatatcttagcaaggttgtcaaccgtcgtaatgtctacattaagattcctgctactgctccatgcattccttccatcagggatgtcattgcagctggaataagtgtcaatgtcacgcttatattctcaatcgccagatatgaagcagtgatcgatgcatatttggatggcctcgaggcgtctggacttgatgacctctcaagagttaccagtgttgcttccttctttgtcagtcgggtggatactntcatggacaagatgcttgagnaaaatttggacccctgaagccttagatctccgtgggaangcggcttttgnncaaggttccattngnttcaaagtttttcccgnnngaantttntttggncccaaattgggaanncttngttaaaaaaaaggtcccc

SEQ ID NO: 136398 - DNA, 475 bp, Arabidopsis thaliana columbia
  unsure (1)..(475): unsure at all n locations
gaaaaacagaaagcacttgaagcagagaaaagagaaaacgagaaaaggcttaaggaagagcaagaagcagtcactaagcaacttaggaagaacatggcttacaaagctaatccggtaccaagtttctaccaagagggtcctccaccgaaacaaccattgaaaaagtttccattgactcggcctaagtcaccaaaccttaaccgtagaaagagctgcagcgncacagttaacgcatcatatcaggaagtgaaggggaagcattgtgctcgacatcgtcacagtgtaggtggttgcaaggatgnagtcaaaacggacagtgtnccaaggcccccaaattggcagcagcaaaagntcaggttgggaaagtcccaaaanggggccccccaaagtntttngggggtccttgnaattttttantnggnggccntttttgggggnctttnttnnntttgngttggtttttttggggggttna

SEQ ID NO: 136399 - DNA, 282 bp, Arabidopsis thaliana columbia
  unsure (1)..(282): unsure at all n locations
aagcttggaagatcctaagcatgtnctttcnttnaggtacgaggagttgaagacggagcctcgtntgcaaatcaagagacttgcagagtncttagattgtccattcacaaaggaagaagaagatagtggaggtgtagacaagatcttggaactttttcctctaagaaaccttagcggtttggngatcaacaaaacaggaagcttgtcggaaggggtaagnttcaaagagtttttcccgtaaaaggggaaagttggtgattggaagtnnntatatgnctccta

SEQ ID NO: 136400 - DNA, 525 bp, Arabidopsis thaliana columbia
  unsure (1)..(525): unsure at all n locations
tgtgtgtgttgtaaagcagtggacagagacgacgatgagtacgatgaagccaagccggagcgacgaaatatccgacccggaacagcagatcaagaacgcgaaccagatcagagctgatttcgattccttggctcccaaacgacccactaaacccactcgaagcgaaccgggacttcctggatctttctctgcttccgacaaaatcaccgaccatcctgaagctgacaaattccaatctctccagtcacaaactcatggtaaagttctaggtgagggagattcatctgcagttcaagatgagttcctgggaacagagtattactcaaatctnaccgccattgntaaggaacatcacacggccggaagtggggtttataaatgtggtggagnaggcaacggtgagnatccgaggccgtancccccgcgaatngggncggngggaaaagcggtttcagaggaattnngcgcgnncgnttggttcttcncggggnangtttttntttgnttttngnttaancaaccggg

SEQ ID NO: 136401 - DNA, 604 bp, Arabidopsis thaliana columbia
  unsure (1)..(604): unsure at all n locations
aaagcaacaaaaatcagtattgccgtcacaactatcttctacatgctatgtggctcaatgggttatgccgcttttggagatgcagcaccgggaaacctcctcaccggttttggattctacaacccgttttggctccttgacatagctaacgccgccattgttgtccacctcgttggagcttaccaagtctttgctcagcccatctttgcctttattgaaaaatcagtcgcagagagatatccagacaatgacttcctcagcaaggaatttgaaatcagaatccccggatttaaggtctccttacaaagtaaacgttttcagggatggtttacaggagtggctttgtcggttacaaccacccgtgatatcgatgncttgatgccgttttttnaacgnccgtggttcgggnttccttagggggcgttaagggntttttggccccttgangggttatttcccgggnggggtgttttttaagcaagnggaaggtttgggaaatgggnncgngatnggtgtgtttnnangtccttaggggttncttnctttggancnccggggggnccccnggggttggcaaaacccccggggttatcnttncntaagg

SEQ ID NO: 136402 - DNA, 492 bp, Arabidopsis thaliana columbia
  unsure (1)..(492): unsure at all n locations
ctctgctttggggtggccttcggggtgctatgagtttaactgataggctaatccagtttttncacatggatgagtggcccttgctcaagagggctgtgggctttattggcatggtgctcgttttatggtcaccggttgtaattccattgcttccaacacttctccagaactggtctacaagtaatccttctagagtggcagaactagctagtgtagtcggtctctatgttgctgtattcattcttgtnatgctgtggggaaagagagtacggaagtacggaaacccattcaagcaatatgggcttgatttaaaggcatcaaacaaagaaaagattcangagtttttaaaggcctttncaagggggcatcacggtcgttctactattcanttcataaatgcaanatcaggngctncggttctttttnggccaccatatttncncatactttttgtgccntnagnggttanggggtttggnaantntnttctta

SEQ ID NO: 136403 - DNA, 341 bp, Arabidopsis thaliana columbia
  unsure (1)..(341): unsure at all n locations
aagtcgccctcgaatcaagattaaaacctcgtttagttctcaatttcagttctgtggatccgtgcgtnacctcaagttttttttttttttttccntctcgaaattcagaatcgtagaggtgttgaaagttgaaacctttttttnggtttncttggttaatgggtttctncaaacttnatcgataatnggatttgaatcaagggtttnagtgtnctnnctttgtgtattcgtttggcaatttgggataatgaatggtttgcaagangtttgtccgtcaagtgggtcggtgatgatcggactaccagctgaagaagacggaaacnccgcacattcgtcggagg

SEQ ID NO: 136404 - DNA, 326 bp, Arabidopsis thaliana columbia
  unsure (1)..(326): unsure at all n locations
ccctttnttcacaagctgcagagagatccntcgggtgagaaagttaagtncactaatnnttatgtcaaaaatctctccgngtccttgagtnatgaagagcttaacaaagtttttggagagttcggagtgactactagttgtgttatcatgagagatggtgaaggaaagtctaaaggctttggntttgtcaattttgagaattctgatgatgcagccagagctgttgacgctctaaatggaaagacctttgacgncaaggagtggtttgtttnggaaggcccaaaagangtcccgngaggggaaacctgnactcaaaccaaaagttt

SEQ ID NO: 136405 - DNA, 375 bp, Arabidopsis thaliana columbia
  unsure (1)..(375): unsure at all n locations
acaaatctaaaacgtttnactttgtnctgcactactcaacctcaatggccgcctcaacaatggctctctcctcccctgccttcgccggtaaggcgtcaagctttcccccgcggcatctnaagtccttggaagcggccgtgtgacaatnaggaagactgttgccaagccaaagggcccatcaggcagcccatggtacggntctnaccgtgtcaagtacttgggtccattctctggcgaatnaccgagctaccttaccggagagttccccggagactacggatgggacaacgncggacttttaagntgaccccgggacaattggaaggaanccgtgaacttagaaggtnttccncagnaaggtnggccantttttgg

SEQ ID NO: 136406 - DNA, 469 bp, Arabidopsis thaliana columbia
  unsure (1)..(469): unsure at all n locations
ttacgtacataaaactttacaagagtttttcacacctgaacgggttacacacttacaacaaacacacatcctctaaaacatggacgcatgtttaaactctctctnacaacatacaagaacaaacaaacaaaaaccaaaccaagattttaaaaccaatcgactggtcaagtagcaactaacttatttccaatccagaccaagaaattcgaatctgatccattttaagtggagaggatgttaagaagagagactctagcttgtatcattaccttgaacaatccttcaagtccctcttcaagctcttccatggntgnctctacaaccttcgggtctaanccaatggacattgnanccctctcagnttanttcttcactaatcctttncccctncttcttggtcctncccntggccatcatnanaaggggtttnccaaggttagggttnccnaggtttaagnccggggcaagg

SEQ ID NO: 136407 - DNA, 515 bp, Arabidopsis thaliana columbia
  unsure (1)..(515): unsure at all n locations
cttttttttttttttttttttttttttgagaaagagagattcattcacttgtttaaacaaatcacaatacaaaggagacaaagtaaaattacactaagggccaaagtttctgagttttcaaagaaacttaagccacacctttccacttcttccccacctacttacatggngaaaaagacaccaaacttttaccattacataactttaaccatccctaaaaactacccaagaaggcggntttgagtgagtgtgtntagaaagaaacaaggtgaattcacaagncaaggtaactcgagagacgggccactactacttggngcctagcttatgggcacttctggtttttaccagggcctccatagtaaaagtaatgncccaatcatcattgnttccggtttgancatcataacagttaggncttttcaggggntgtnccaagcccttngggccttnnggttttttncccttaacccctgattgtnctgangaactngtttgtaaagcttntcgggaat

SEQ ID NO: 136408 - DNA, 508 bp, Arabidopsis thaliana columbia
  unsure (1)..(508): unsure at all n locations
tgaggatgcttcttttggttttgtgttttctatggatcttgagtcagttgctgtccctgcttcacttgtttatgagatcgagcgtatacttaagcccggtggaactggggctatgcttgtcggtactactagtgggtctgactctaacgagttggttagatccgtttcgcctgtttcttcattgctgaagaactcaagtgttgttcatgttgcttcattgggtaaacaggttttggttgtattcaaaagagatggagaagatagtttccgcttggatcaaactcatcatgactttcctgctgattgctcgtctgttctcaacaaccggccatacattggattattggagcctcttctggatgaaaaacggtcggatttcgagagccgggttaattacttncctgagtcattnanctccttntaggagaggctgggtnaattganaccgggcagtggncatttaagnaanccgncctggtnttccatggacccgnttaaggaagttttc

SEQ ID NO: 136409 - DNA, 531 bp, Arabidopsis thaliana columbia
  unsure (1)..(531): unsure at all n locations
tcgaaaatatcagaaaacaaaaagaaaattgagatagaaaaacctcagaacactaacaaagttgttttaggtctcttaaccaaagagatcaaatccaaagtctccctcttcctcttcagattcttccttcttcttctcttcctcctttgtggctgcggcagcctcaccaccaccaccacctccagcagctgcacctcctccggcagcaaatcctccaccaccaccaccaccaatgaccaccacgaagacggcggaggtaggagagacaagagagaaagaagactgaacgccgccagattgaatcggcggngagagcagtcttnaacaaagctttgcgctggagatcgtagggtggaagaagcttgaaggnttcaagatcctccttcgtgtttgctttngggtccatttttccggctttgnnttttnacacggatgngaaactccattgccgcggagccgtttcttttacccttgaccgttgaggggttttaagnttttccgttgtggnccggttttttngggntnantngc

SEQ ID NO: 136410 - DNA, 588 bp, Arabidopsis thaliana columbia
  unsure (1)..(588): unsure at all n locations
tagagtttgcggttaagcatctgttcgaagcagagttcaagctttgcaacgatgtctttgagagacttggtttgaatgtttggatggattgcttttcaaagattgctgctcaggccggtatgctcgcgttccttcagtttgggaaaactgtgactgatagcaagaaagatccaatcaagcttctgaagctgttagatatctttacgtcgttgaacaaactgagagcagatttcaaccgcctctttggtggagcagcctgtattgagatccaaaacttcacaagggatctcatcaaaaggataatcgatggtncagcggaaatcttctgggagcttctggttcaggtagnggattcagnaacaaaccccgcctcctagcggttggtggtgttcctaggttaagtcaagtttttgtacctgnttacttcaaataaaacttatttgggggtnaagtcaangcaaccacttaccncagggtctgctnaanccataagggncttgggncnagaaaggtnccaggtnancancttattggttngggtttaaggnnttcaaaccnnttnccagacnttggttattgggtaaaggt

SEQ ID NO: 136411 - DNA, 522 bp, Arabidopsis thaliana columbia
  unsure (1)..(522): unsure at all n locations
tggcttgttgacagagctgttttaccgattgagaactctttaggtggaagcatccatagaaattatgatcttctgctgcgacacaatttgcatattgtaggcgaagtcaagctagctgttcggcactgtttgttggctaaccacggtgtaaatattgaagatttgagaagggtgcttagccatccacaggctcttgcccaatgtgaaaacacgttaaccaaattggggttggtcagagaagcagtagatgatactgctggcgctgcgacaaaattgcattcgnaaatttaaatgatgcagctgcagttgccagtgaaaaaagctgcaaaagntatattggtttgaccatagtcgctaaagntatccagggtgactgtgataatgttacaaggttctaatgctcgnagngacccntttatccctgggcctacagccntttaggcaagatnggtttcncgtagggnaggncctgggnnctttcaaagngcttctgtttttccntnggaannacccccnaagtgc

SEQ ID NO: 136412 - DNA, 527 bp, Arabidopsis thaliana columbia
  unsure (1)..(527): unsure at all n locations
tgcagatgagtactgctttacaacccgagaactttggactgttgtgtttccttcggaatcagagaaaatcatttcaacactaacacgaaaacctaatgaggttgttcatacacaagccaaagtcaacacagaccaagacctattgtataaatatgtatcaagaaacttactgtttgtggccaccgtttcaccaaaaggtgctggtgagattggctcagttacgccagaggagtcatcactcgtagtatacctcattgacaccatcacaggacggatactgcaccgtttgtcacatcaaggctgtcaagggccggttcatgcgggtgtttagtgaaaattgggttgtttaccactatttcaaatcttcgggctcacaagtacgngggtaccggtccgttgagntctntgnccagtcgngggcggggacaaaaatntgtgggactcattnntgggaaggccaattnanagacccntanttngnctttggccagggnttttaaagcnnagnatantnttgctagcttngc

SEQ ID NO: 136413 - DNA, 503 bp, Arabidopsis thaliana columbia
  unsure (1)..(503): unsure at all n locations
ctctattttgattttggaaagcttttggagctcaattatccattgaaacaaacaacacaatggaagtaacaccaaaacacaaaacaatctgtgaaattcattcatggtttatactttactactcaaagcaaagacgtttaccagaagcaaattgattccactctttcatcagaaaccctaaaatcactccaaatcctgaacgatcttgatacccatagaattagcagtaccaatgatggatttgcaaatcgattccaacggcatatactgacaaaacggatcccgtctgcttcaccttcggcgatctnggtacacggngtctcacccgataggggtcggtcancgnccaaattgaccccgggcggggtgctttccttttatccctcttnnggcggnctntttggttacttntggggcggncttaggctttnaggtngggcaacgnggtgggttcccttanccctacgggnnntttatnngtaatcccacaggggggggttntt

SEQ ID NO: 136414 - DNA, 589 bp, Arabidopsis thaliana columbia
  unsure (1)..(589): unsure at all n locations
gacacttcgtgcaaagctgaagccaaactctccattgctttcttactcttctcctcttcctcttttgagctctctaaatctgataagagcttgcttttctcttctgagagcctttgaacccttgaagtagcatcttgctccttcttcaaagcacgattcttctcctccttcacagtctcaagctcactcttcaacttctctacttctttttcattcttagatacttcttcttctacactgcccaaccgttgctctgatacctcaagatcctcctttngtttagcaactgtngtctccaatgtcacaattctctccttaagatcagtgatttcagtttccgtgtcatgcaatttatcattgcttccttcaaggctgttcaatcacaggattccaaaggtaccagnagcagncctttccaactnggttagggttcttctagntgttcccccaggtctttggntttgccctgccaccggtnngcaaagttngggnattaggttaggcatntttggaggttaagggnaanataaggtttnggnggcaancttttntttacccttgccaaaccttggggtaagtttttnanggc

SEQ ID NO: 136415 - DNA, 508 bp, Arabidopsis thaliana columbia
  unsure (1)..(508): unsure at all n locations
ttcactgatatcatcactagtaaacagctttttttctcatcaagtttgtttttttatttggtaaatgtgatcaaatcaattgcaactccataagaaaaagaagatacatagaggaaactctagatttgggagaatgatgtgacagtcttgaacccatgattttccggtaatggagcgtttccaggtcgaatcgatataatcgcctccagacctgcggcttttgcagctacggcttcttgataaacatctgtcacaaacattatctctgcaggatcatccactcccaatgtttcttttatctccttgtaacttctactttctttcttgtttccgattgtaggtgtcgnaaaagncaggtatatactttctcagntctccataggcctgtgttccaaagagaggtttttncgntaatnggctaccgctagnatntatgnaaaccttaaatncngangattccatttctctaaagnatctgnacancnnaaaaacaatnggtttcaggtaa

SEQ ID NO: 136416 - DNA, 552 bp, Arabidopsis thaliana columbia
  unsure (1)..(552): unsure at all n locations
tttcggtgcacctgcttcagccacttcaaacttgaactgagaaggatgggaaacgaatcatatgaagacgccatcgaagctctcaagaagcttctcattgagaaggatgatctgaaggatgtagctgcggccaaggtgaagaagatcacggcggagttcaggcagcctcgtcatcggacagcaaatcttttgatcccgtcgaacgaattaaggaaggcttcgtcaccttcaagaaggagaaatacgagaccaatcctgctttgtatggtgagctcgccaaaggtcaaagcccaaagtacatggtgtttgcttgttcggcctcacgagtgtgcccatcacacgtactagacttccatcctggggatgcttcgtggttcgtaatatcgcaatatggtnctccttttgcaaggtaaatatgcaggagtttgggccccattgatncggtgttttnaccctaaggnggaaacatttggtntagggacagtnatttggtgnataaagggtttngaatttcccttncgganaattncngctnatagggttggnaatttc

SEQ ID NO: 136417 - DNA, 494 bp, Arabidopsis thaliana columbia
  unsure (1)..(494): unsure at all n locations
tcggtcaacatttgctgctcattttagtgacaatctcaaaatgggacctcaaccagtgaaactagttaatgacaaactacaagatttgggacgtggaagctggataagcaaagctaatagagactcaataatagagaaaaataatgtgtggcggtcgctgccaagattaagcaagtgtaaggtcagtttaaagaacttttattctgagtctaaggatcctaaaggggatcgaagacccaatgaagcttatggtaagggaaagccaaatgaatcttccccttatttacttgtcgacgntgatgatggcggtgacggcaaagtcatttgggttatggaaactcccaggnatttggngtttaaaagcatcgccactacagngttcaagctncaggaaggtgntaaggtgttaatttggtgaagntgancccctgctcccatggtngtngggnagctttnnactccctaagggttccngaggttttntcccnnaagng

SEQ ID NO: 136418 - DNA, 547 bp, Arabidopsis thaliana columbia
  unsure (1)..(547): unsure at all n locations
cagaggattaaactatcttcatacacatgaccctcctgtgattcatagagatctcaagtgtgacaacatttttataaatgggaaccaaggagaagtcaagattggagatcttggtcttgctgcttgtttacaacactctcacgctgctcattgtgttggcacaccagagttcatggctcctgaagtttataaagaagaatataaccaattagtcgatatttactcgttcggtatgtgtgttttggaaatggtaacgtttgattacccgtatagtgagtgttctcaccctgctcagatttacaagagagttatatcggtaaggatccatccgtgtttaccgcgattataacatctcttatgttgagttttaagattgttaaagttatctttctcagggcaggaaccagatnggttaggcaaagtgnaggtccngaggttagagggntttcgagagtgtttgcncagtgnccttagctcntgctttnacctctngtgccntttcttgatcgtgaccggttnagcggtgggngnaaggcttngtagcgta

SEQ ID NO: 136419 - DNA, 551 bp, Arabidopsis thaliana columbia
  unsure (1)..(551): unsure at all n locations
catgtgaacgacaatgtgaatttacaacagaccgaccaaataaccaacaaccccacacaggtcttttactctaatttttctctttagttttttttttgtttgtttgacataacacagaaagaggcgtctttaaggcctccttttggtcatatataacttttcttatttattgataatcggaaaactctttttctttatcaataataaccttcttcctatgctccacacttttgagacttctgactctgtatatatatatnatcagaatttcacaatggncaacatcttccgctctctttgccaacaagatgctggcactcacttattagnttgganccagaaccagtcggacatggttttctttaacacctctttcattcncagaatgttcatcaccccgctgntggtcnattgnggctcantgtttttttcaggngggtgttttnaggggcatcttgttcangtgaaggcttggggctacttgtttttctgggtntaaaggnncnnntgggggnaaatggggttcgnaagccntttttacccnggggagg

SEQ ID NO: 136420 - DNA, 569 bp, Arabidopsis thaliana columbia
  unsure (1)..(569): unsure at all n locations
ggtgatcagtggctcgtgccaatcttgcgaatcttgtgaccaagatcttgaaaactactgtcctcaaatgtctttcacatacaatgcgattggntccgatggaaccaagaattacggtggctattcggagaacattgtggttgatcaacggtttgttttgcggtttccggagaatttaccgagcgattcgggtgcgccgttgctgtgtgctggaatcactgtgtatagtccaatgaagtattatggtatgactgaggcagggaagcatttaggggttgctggacttggtgggcttggtcatgttgctgttaagattggtaaagcttttggtttgaaagttactgtcattagttcttcttctacgnaagcaagaggaagccattnaatcantcttggtgntgattcgttcttgtcacaactgntccccagnaaataaggctgcaattngaccattggcctcattatcggtncggtatcagnagacangccctgatccgtgntcggtactaaagcaacggaagtcattcttnggtacctanagncttggggnccatntccntttctggngc

SEQ ID NO: 136421 - DNA, 531 bp, Arabidopsis thaliana columbia
  unsure (1)..(531): unsure at all n locations
agttttcattcatcaccaccatcacatacaaatatgttcatccaccatttacttttcaagagtatgaagacaactcagaagaagaagacctgaacgctagaagttttcaaagactggcaaacaggacaaacaccagtaaacacatcacaatctttacacaaactcaagtgcctacatggcacgagcaagaccgaaacattctttacgttacacaacttacatctcatcccagtacttggcatccccgggatgttcaagtaattgtaagaagctgcttcgtcatcaatctcactatccccaaacccttctttcatttgatgatgntcagcaacttctnctcctactgcatttgttgtcggttccatgtgacatcacttgttgcaaatttaccctttaagggattaaccncaggttcattgnttttgnnttgtaatgccagtnttgnggttccnctgccacttggttttcttttccncggggtcccggtctttttgtnaatggttnanttnatggnttctttgaggttttttt

SEQ ID NO: 136422 - DNA, 558 bp, Arabidopsis thaliana columbia
  unsure (1)..(558): unsure at all n locations
tttatcgcatgaagtcccaaaatgtagaacacaaatttcaactactacaatttatagtgaaagagaaaattggtctatggtagttgtttaaacaaaccagaaactttcatatcaataatacaagaaaaaagaaacagagggatttgattattggtccatggtagatgtttaaagtaaaaagacagaagaaacataaaatcaagtttaagcttgaggtttgtcccacttgagtggcttcacgacctcccaggtgaagtcagggtcgtctcttccgaaatgtccatacgctgccgttttctgaaaccttccatttcctcctctcttcaagtccaaggttgattgtcatcattcctggtctgaaatcgnaatgtctcttttaaggtcttcaggatctccttgtctggaatcaaccctnttccgtaagtgtcaacggnggcaggcaaatggttcgggactccattggggttgangcctggcaagnnccncgggccatncatnggcnccaaattttgtgttnctncggtgaagncntntttgctttgtgggttctagagactt

SEQ ID NO: 136423 - DNA, 401 bp, Arabidopsis thaliana columbia
  unsure (1)..(401): unsure at all n locations
aacggtggaggagaaccaccagaaaaatccatcaacgccggcggggtggnaggagaagaagaagaggagatgggtgttttgggatagaaggtggaggagattagattatgtgaaattctcagcttctttcactgttcattctcttgctctcttggctccgttttatttcacttggtcggctctttgggttacggttttgttttacancatcggtgggtccttggtatcaccgtctcttatcatcggaacttggntcaccggagnttcaaagtccctaaatggcttgaggaactcttaggcnatttgtgnccttcttcgntattcaaggggngatcccgattnnatttgggtgaggacanattcggttanccataaccaanttnacggggttnaanaaacgg

SEQ ID NO: 136424 - DNA, 563 bp, Arabidopsis thaliana columbia
  unsure (1)..(563): unsure at all n locations
gactcaatcatgagaaaaggtgggttcgtgctggcaagcntgntgagcttgagagggagagaagtttagtgtctgatgctgtttctttagagaggttagagagcaaaagcattaaacttgcgatgcttgctagtggtttaggagtggcgaacttggtaactcttagctcagcaaaagccgcagacttgaagatgattgtcttggatcaagccacttccatttacatcttggctgaaggaagccttggagattcggtcgggaacttcttgtattcagctaaccaacaggctaacgaagctgttcaagatcaactatcagcactcagtgtaacaagtttggcagtaatatttngggcaggccttgtgacaagtctgtctccatgtacacttagtgttttnccgttgacacttgggtaatatttggnccatttgggcttgcaaaagcagnggtcaggttnttgggnnncagttntttcganctgggntagaactaccttagccctcttnggaagaanttcttttccggaaacctttggcaattggcaagttcccgngntatccgta

SEQ ID NO: 136425 - DNA, 495 bp, Arabidopsis thaliana columbia
  unsure (1)..(495): unsure at all n locations
catatcgatttggagtgtgtaacaaatctagctacagttacctcaaataatcatgttatgggcaagcttgtctgcttgaatatgaaatattgtnccaatttgcgaggccttcctgacatggtcagtttagaatctctcaaagttctttatctgtcgggctgttcagagcttgagaaaattatgggtttcccgagaaacttgaaaaaactatatgttggtggaaccgccatacgagaattgccacagcttcccaacagtctagaattcctgaatgctcatggttgtaagcatctgaagtcaattaatttggattttgagcagcttcctaggnacttcatcttcagtaattgttntagntttcttccanagtgaccgctgagtcgtagnggaaaggtttttttnncaagtttngcagggcaaaaagggggccttttaaagccccgaggnntcatttttttccttggccccgganntnccctttgttaaaaggngatg

SEQ ID NO: 136426 - DNA, 524 bp, Arabidopsis thaliana columbia
  unsure (1)..(524): unsure at all n locations
ctgaatcttccatttagtccgtttggatttgaatatgtgttttgactcttatgcatacacatagtgtttgatagaattccccaactcaaccttttaacttttaagcaccattctgggtttcttcaaaatcttttcttttgcttatggaaggtacgaagcttgaatgttgtctttgaattgtgatcagggttgttttggcgccattgactagatcgagatcgtatggtaacattcctcagcctaatgccaaattatattacactcagagaacaacacctggtggtcttcttatttccgaatccctgtgtagtctccgagacatcattgggctatccgggatttacctgggntatggnacagaggccaagtggagggatggaagcccatcgnggatnnggttcaatttgaaaggnggtattttttttcccagattttgaatggnggnagggtttttnttaaggccnccaaattggggggnccngttcttttaanaaancnntttgtttnaaaaacatttttggggt

SEQ ID NO: 136427 - DNA, 293 bp, Arabidopsis thaliana columbia
  unsure (1)..(293): unsure at all n locations
aacatggcaatggtgtttgtacagattgtatacgcaggcatgccattgctctctaaagtagccatctntcaaggaaccaaccctnttntctttgttttntatagacaagccttcgcggctntngccttgtcccctttcgcattctnccttgaaagctccaagtcctctcctctatcgtttatcttgctgctcaaaatattctttatctccttatgcggactcacgctgagtctnaatctctactatgtggccatcgngaacaccaccggcacctntngtggcagcaccaccaa

SEQ ID NO: 136428 - DNA, 409 bp, Arabidopsis thaliana columbia
  unsure (1)..(409): unsure at all n locations
cgttaagcagctggagcagttgaaagcagaggagaagatattgaagaaacagaggaaagaagagaaggctaaagccaaagccatgaagaagatgactgaaatggactctgaatcatcttcttcgtctgaatcaagtgatagtgattgtnataaaggcaaagttgtggacatgagctctttaagaaacaaggctaaaccggttcttgagccgttacaaccagaagccacagtagcaacccttcctaggatccaagaggatgcaagtttttgcaaagaccaccagttnagcatttgcaagatttctcttncaaacattcncaatttttcccccttaattnggccatnntnggccaagcaattttaggcccgntanaaacgggttttaannggttnggnttnccccttnatt

SEQ ID NO: 136429 - DNA, 388 bp, Arabidopsis thaliana columbia
  unsure (1)..(388): unsure at all n locations
ctcttaatctatagtgcctcaaaaacttgaggnagttcattacaaacgcaccatggtttacttaaaatcatacatacataatgcaatacatgcatggtggtgattggttaatnnattgttttagtgaccgggctgagtctgaacagcttctccggcatacgagcagcatcttgagcagccgttgtaacctctgtagcagcagccgtggcggcagtaacttcccccacttccccctcctccttgtngnccaccgcctccttggtatcgtcctcctcctccttngtaccngtcctnctcctcctttggntttttcctcctcctccttggtaataacctccctcctcctttggnaantaacctccntcctccttgntaaataacncctcnt

SEQ ID NO: 136430 - DNA, 564 bp, Arabidopsis thaliana columbia
  unsure (1)..(564): unsure at all n locations
aagagtaatgatcttccattgaacaaacaaaaatcccacattggtaccatctttggataacgaatccaaaaagaaacagaaacgatcaaggcttttgcgggatatggttgacaacgagcacatactcttcagtccatggtaaggtgacgtgctaagtcagtgtgcagtgcatgacccgccttatatgcgactatgtgagccacggggagtcctccatttccgccccgtgaaacaagggagaggtcaccgattaggtcaagaatcttatgtcgacatgcttcatcatcaaaccgcagaggaggattcatccatccatgctcagcgctacaaactatggcgttatccagagnacctccctttaatgagccctgcttnaaggatacggtccacctcttcatngggcacagaaggttctttnntgntggggtatcccttttcaaanaagnctcatnggttgggtcccaggaaaccatttggngcttttgnngnnccttggggggnggtcccaagaatcnggcctttnggngggnatttaggncaaaaatgttttttaaaacnaagttt

SEQ ID NO: 136431 - DNA, 564 bp, Arabidopsis thaliana columbia
  unsure (1)..(564): unsure at all n locations
ttcttacataaacttgttaaaagaaaattcgaaaccaaaaaagcagcattccccatttttagcaaaaccttgtgtttccaagcttattatagcatttgagcagctgtgtttagcttctccgctagactcaactgtgtccttgttatgcttgataggtacaacagaagcaattggtcctggagactatcattcacgaggttatcgaagacttgtggaggtaacttgggaagggaggctactgcatctgcaatgaatcgtccaatgttgttgtctggagctatttgacctcccacggcactgtcaacatatttgtagncatccgttgattagagttaacagcctctccattgttaacctccattccttccaagtcatttgggnggtttgtcaacagatgttgnccttaaggacaatcgnatncggctnttttaggaatcaaccatggggggtcaacaggaatcttttgaaatttnaacgngttttnggnnaccnngtngggggtttagggcaaaagttnttggnccccccctttgaaacccgttcccagnngggnntnggttggtc

SEQ ID NO: 136432 - DNA, 581 bp, Arabidopsis thaliana columbia
  unsure (1)..(581): unsure at all n locations
aagcttgcatcatcgnaattacgcggnccgccgtgnatgaaactcctcccgtcaaggatctccccgtccatggatttcttcccgaatgcttgaatggtgaatttgtgagggttggtccaaaccccaagtttgatgctgtcgctggatatcactggtttgatggagatgggatgattcatggggtacgcatcaaagatgggaaagctacttatgtttctcgatatgttaagacatcacgtcttaagcaggaagagttcttcggagctgccaaattcatgaagattggtgaccttaaggggtttttcggattgctaatggtcaatgtccaacagctgagaacggagctcaaaatatttggncaacacttatgggaatggnactgccaatacagcactcgatatcaccatggaaacttctagcattncaggngcagttagccntcgnatcaaagttttggaggttggngcctcaaacntttggnaaatggttttgccaaggggttncccctcnttantgttacccaagtnncccgttcgggggaaatntttaatcggttttnntgccccttttnaaaaggtttt

SEQ ID NO: 136433 - DNA, 524 bp, Arabidopsis thaliana columbia
  unsure (1)..(524): unsure at all n locations
caacaaccccacacaggtcttttactctaatttttctctttagttttttttttgtttgtttgacataacacagaaagaggcgtctttaaggcctccttttggtcatatataactttnctnatttattgataatcggaaaactctttttctttatcaataataaccttcttcctatgctccacacttttgagacttctgactctgtatatatatatnatcagaatttcacaatggacaacatcttcctctctctttgccaacaagatgctggcactcacttattagcttgaaccagaaccagtcgnacatgtttctttaacacctctttcattcacagaatgttcatcanccgctgctgctctatngtgctcattgtttgtttcaggagtgtgattttcagggcatctgntacagntgcagtgctgggccactgtttctctcggttctaaacgtcctcatgcgggcaagtggggtncggactgncccttttaacctagggcaggnttcatggcggttnggaaagt

SEQ ID NO: 136434 - DNA, 584 bp, Arabidopsis thaliana columbia
  unsure (1)..(584): unsure at all n locations
cctacgaaggntcgaacggtnatcgnatcaagcttgnatatcgnaattncgcggccgccaagatttggtgttttaactatcagatccaaaggagcatacgcctctgccaatgaaatccgagtcttctagaagagatggtgttacggacttcgcggtcgatgctatatatatatgtaaaaagcttaatatggactggacacagaaattccataacaattatatacattttttttttttcactggaagattaattttcattgatgagtactaggtgaaatacaaggagtcgacgatcaatacatgatcccgaaaactaacccgaagataacaagatatcctaggaaactaagtccaagaaaatggggagcaaataacaacactacaaaaggaacaagtcaaaacactgncggctangaaagcaaacatcagagggnttaaaactcataactcaggatctgnaccaacatctttgcaattttcaatcccaaacggggacggttgattngtgnttgccattgggcgggaatcccggcccggttggggttttccttccaatgggtcctcaatnngggccaggtctccga

SEQ ID NO: 136435 - DNA, 535 bp, Arabidopsis thaliana columbia
  unsure (1)..(535): unsure at all n locations
acacacaagaaacgacaagtagcagagtagggatcaaaacacatgtacatgtacacacacctacatacacacatttatatgtatgcacatatcaagttgtgattgatcatcaaaccgacagacacatgttgggcaataaatatgacacaaacacagagatattgaagtttcctctcttttggtcacattacaagtttgtccacatcttactggtaaaatactgccctatatacccatcaagtatttaaaattacaacacacatatataggtgatagccacatacaatcataaaantacatataaaatcanggacccgtcatattgttgntcattgatgcttcttttttttttattattaattcaaggtctgttcttgcagnacttctccattgctctcggggnaagtccaactgnttcagnncccttcataatgggaaanggtttgaaggcttggcaaannatttccctgggcatggcacgggggtccggnaccntctttgcctgaggttggncancttggggttnngnggttng

SEQ ID NO: 136436 - DNA, 527 bp, Arabidopsis thaliana columbia
  unsure (1)..(527): unsure at all n locations
tgcaacatggaatctaattattgcaggttacatacaaaacggaaaaaaagacgaggccttggaactttttcgaaaaatgcagttttctcgcttcatgccaaattcagttaccattctaagtctcttaccagcgtgtgctaatcttcttggggcaaaaatggtaagagagatacacggttgcgtattgcggagaaatcttgatgctattcatgccgttaaaaacgctttaacagatacttatgctaagtcaggggatatagaatactcaagnaccatcttcctgggtatgggaacggaaggcatcataacttgggactcgctgattggaggntatgttttacatggtagctatggtccagctcttgctctttttaatcaaatgaaggcacaggggggttcgccgacaggggacgctttcgggattattctttcgacgggctattgggatntggcgaggaagaagtttctcagcattcgnatgtttccnattttcctncctganatgtctcntgntnttntttgcggtc

SEQ ID NO: 136437 - DNA, 555 bp, Arabidopsis thaliana columbia
  unsure (1)..(555): unsure at all n locations
ccatgtttactatagacaaaagttaaaaattctaatgttacttttattatgtaattacttttattatgtaaaacatttatatgacgaggtttggctctcctcagttctcataggcttggcttagcttttgcaaggaccaatttcaaaggaggccattgttttctaatcgaaagggtcaaagcgggggtcatgctcgcnagctgttaccatcccggtgcaaagacatgtcggacacatcacctttcctgcgccggaacaatttagacatctttttgtggtcgcgacctgcataagctggtttgtagctctaggtcttgtgatggggtcaatgctcaaacacacaccactagctgngcatcgtgcgcatggcaagtatccagtcccaaggaagtatttgcaccncttcttctcttcgtggttaacattgttanctcggttaggatcaagggttgaatnntccncgggcccgcagnaaaaggtgcncaattgggtntcctggttatttaagggngnngaggcncntaaatntcatagggtcncagcncctcgtcnttt

SEQ ID NO: 136438 - DNA, 542 bp, Arabidopsis thaliana columbia
  unsure (1)..(542): unsure at all n locations
ttcagcacaaaacaatgaactcgaagaagataagctatagtgagatcaaaacttctggagaatagtatccactaacacaaaaatagccaaacgaagaagatgattatgaacatatataaatgtgtatatgtatctctacatggctctctgattatncatgtatcaaaagcaagattgataaaatttgtgaaaagctttgttttgagattttttttaagatcgaatcgaatcaggactaacccatttccagtaatgtcgtttcacagttacagcattcccagcggcgagtgtttcaaccgaatctttcgtcgagtctcctccctcgtactctttttcctccgtacagaaatcttgctccggtaatcccttccaccgttgcattcacagagtgaagnggcgtaaccgcgccgggtaatcctgggtacggttagcgagttcctttcttnaanctcttctngtatnaagtnccggnaggatnttaattcnttgnccatgtntaccatgcatttaaggnagtccgggtcttntttttgnggaaattc

SEQ ID NO: 136439 - DNA, 515 bp, Arabidopsis thaliana columbia
  unsure (1)..(515): unsure at all n locations
gggaacctatccggaagctaccttacaatcgatcagacaatccttatgatgcagctgacaagtggcttctaaaagagaatctcccctttgcatatcggcagcaaattgttgaatttatattacaaaattctgggcagaaagacttcaactttaatccatcttttcgtgatcccttcaccggcgcaaatgcttatgtgcctgggcaagcatctcgtacagctgcaactccggcaaaacctttatacaagcacattccaaaaagaggtgtgctagttttcgatgctgctcaatatgacgggnttctgaaaaagatgacagagttcaatactacttttacgntctgacgnagtaaacaatgncaagtccctgncccgacctcgaggtatcngagtaggggaatcgtaatttctgagggcacatanantnccctttccatttnntgcatggnattntttgttttgnaagggtcagatggcccggaattntgttcngctcctgattggaggngnnngttg

SEQ ID NO: 136440 - DNA, 567 bp, Arabidopsis thaliana columbia
  unsure (1)..(567): unsure at all n locations
acgaaggtacgnacggtcatcgcatnaagtcttgcatcatcgcaattncgccggccgcgaanagcacgnaatcatgttgtatacaattatcatttattcttatttttgataatgttattggtttcatgaacctagcttctagtagggcataggtgggatactctgctcgtgcctgaagaagttctctggatcaaccttggttttaatcttcaccaatctgtcaaaattgcctttgaagtacttaggtccccagattttagcttcaatgaagttaacctttgcgttgttcttgttctgtccgaagtctagatctctgtagttcacatatgcttgtnttggattgcttgagacataaggcgccatgtaattgtatatctctttgatccagttgattttnctactcgatgtcttgtcattctctagncagttcgngtaaatagagaatcttgaagagggttccgtttctatgcggaatnggntncgcagattcaagggntttngncatataccaccgaaggnggccagttcagaaatnttgggttncntaancaanctttgatatncttt

SEQ ID NO: 136441 - DNA, 545 bp, Arabidopsis thaliana columbia
  unsure (1)..(545): unsure at all n locations
gcgtngcctgttgaagaatgagccggcgactcataggcagtggcttggttaagggaacccaccggagccgtagcgaaagagngtcttcatagggcaattgtcactgcttatggacccgaacctgggtgatctatctatgaccaggatgaagcttgggtgaaactaagtggaggtccgaaccgactgatgttgaaaaatcagcggatgagttgtggttaggggtgaaatgccactcgaacccagagctagctggttctccccgaaatgcgttgaggcgcanagtttgactggacatctaggggtaaagcactgtttcggtgcgggccgcgagagggtaccaaatcgaggcaaactctgaatactagatatgacctcaaaataactggggtcaaggtcggccagttngacggttgggggtaagcttnatcgtcgngaggggaanagcccgatcaccagttaggccctaaatnacccctcagtgtnaaggaggtggggtcanancancnggggtttccttgagagccccttaaaangtcgnattcttc

SEQ ID NO: 136442 - DNA, 514 bp, Arabidopsis thaliana columbia
  unsure (1)..(514): unsure at all n locations
ttaataaaaaaaaaagaaaaaaaaaagagtttcacgagtacacttttaacttaaaaacaacaagaaataaaaattttaaaagtgggctggtttattcctaatagagctaaacaaatggagattaattgattttagatttgtcagaagcgtaaacgtagagatctggntctgtctcgtagaagacaatatcaccagtgtcgctgacgtaatgntctttcttaatacttgcgaccaaactctccaccaagtggntcggtattgctcctgacgtctttggttctctgtagtatcttcccaacacatgtttagctgctttcgtggcgtcgaccaaagtgatagtgaagggattttntgggaaagagatgatgggtcacgtggagttncaatgtcgtgatgaaattnttgttaaaanggttncggaaatnctctatnaaatttgttggtaaaatcccnccccggngggaaacttccattncntttncncttnttccaanggaanntttttatcggggcc

SEQ ID NO: 136443 - DNA, 577 bp, Arabidopsis thaliana columbia
  unsure (1)..(577): unsure at all n locations
ggttgnacggtgattcgcatgaagacttgcatcatcgtaattacgccggccgctaccttacaagtatcgtccttcaagcgcgtacaacgccccatttacaccacaaacggtggtgctccagtctccaacaacatctcttccctcaccatcggagaaagaggtccggttcttcttgaggattatcatttgatcgagaaggttgctaatttcaccagagagaggatccctgagagagtggttcatgctagaggaatcagtgctaagggtttctttgaagtcacccatgacatttcaaacctcacttgtgctgattttntcagagcccctggtgttcaaactccggttattgtccgtttctccaccgttgtncacgnacgtgccagtcctgaaaccatgagggntattcgtggttttgctgtcaaggttttacancaggnnagggnaactttnnattctttgttgggnacaaaaattccggtggtcttcatccgtnnttggggttcagttccccggatnttgtncncgggttgaaacctancccgaaanaancatccangggccttggngnttctgggct

SEQ ID NO: 136444 - DNA, 504 bp, Arabidopsis thaliana columbia
  unsure (1)..(504): unsure at all n locations
tatagaaatagactaaaatcgatcggtgaatactgttttntttttcttggggatcaaaagtgatcaagtgcaaagaggagaaacatttcctcgggtgtccaacttcacattggagcaagangctttggatacatcttgttgagtttgatcgaccagtttaacgttttgcattgatattcctcgacatggaatgttcttgctgcatacaaatttcacagctatgggtcttgagctcgtcccttgtatgtttttgtacaacacattgctcacttgtaccgcggatttctgttcggggcatgcttcaacacgntcgcagtagtcctggttgatgattattgggtttgnaacgtttttcattatgatgtcttggatatgatgtctttgccattccatgncctccctgccaaggnttgnttntnacaccattagtggtcccnaaagngncgtttgttgcnacccattnaacaaaatgttccnggtntttnnnccaactccaatcnggtc

SEQ ID NO: 136445 - DNA, 537 bp, Arabidopsis thaliana columbia
  unsure (1)..(537): unsure at all n locations
ggggaacctccgggaataaaataaagaggaagcgtggacggccgaggaagattcggaaccctagcgaagagaatnaggttttggatttaactggtgaagcatctacgtatgtttttgtagataaaactagtagcaatttgggaatggtgagtagagttggtagttcaggaatctccctggattcaaattcagtgaagagaaagagaggtcgtcctccaaagaataaggaagagataatgaacctagagaagagagacagtgcaattntgaatatttctgcgtttgataaggaagagttagtagtgaacttggngaacagagaagggtacaattgtggatctctctgcattggctangtgtttcanagggtccatnccgaaggaggagctttanggaggntcaccgtttgggtttgaaaggcaaaagggaaggngttcttagggttcttttggancantttnaattggtgaattgggtgaatntnngggnanganganggaaagtttttaattcctttntaantttggggggtacctt

SEQ ID NO: 136446 - DNA, 569 bp, Arabidopsis thaliana columbia
  unsure (1)..(569): unsure at all n locations
aatttattcaaaactcttaaacctagaacgaacattcttggttacaaaacaaatatataaagaagaaaacaaattttcatacaaatcggtaactatatatttntgaaagaggaagaaggtgtggtgtgtgtgtagtagtagaagatgttgcgggagatttgcaaccccgattgcttctctctcccgacgttgaagattgcggcggttgtntcgccacaggagcgtaaactctattattagttgtatcgtgtgaaggtacccaaatgccttccatcaccataaactgccgttnttgtggattttcaccaccggtccttactaccggagtagctggtcttcttgtatgcaatcctatatttctataaaaatccaaggaaagtttgataaaaaattataggnctattgaatctatgttgtaggtggngaccatnaaaattgattattggttttgttaccccgtaaaatngctttttaacctttcggcaattaggttaaaccnatcggcccttcatnaaggnccntnaacctggctttggnggncnaccantttngnnccccnaagtttttta

SEQ ID NO: 136447 - DNA, 540 bp, Arabidopsis thaliana columbia
  unsure (1)..(540): unsure at all n locations
ggtgaaaccatagtacatcaactgaaataatgaaaccaacctctctaatcatcttattttccaatgttttggttttcaaacttctcaaagatgcgagggaaactaaaaaagacgatacttttaataaacataaaaagccttcttgttcttcttcttacattgcagattggaaaatcatctcagcgagttcctgtttagcagaagaaacctttggttctccaaactctttagctgtcttctcaagatactcaaaatcagcttttccttcttctatttgcttcccaagctcagagtcccaagttgcatatcgcttgcgtaccaattcacttagacttccctcctncaaaggattttttgactngcatttctcaaggtccacggnggccatttgtattcccatttccacctantattgagganatggagtaangtcttnccaccngnctggtacctatctctccggganggttnagggggcnaaggtttgtggccngccntggggggnatcccaccccctttttnntggcncccntnactnac

SEQ ID NO: 136448 - DNA, 450 bp, Arabidopsis thaliana columbia
  unsure (1)..(450): unsure at all n locations
actttaatatctgctagtgcgcaacttcagaagttgtacagctttaagtatcagatgatcaaagggcatggagatattccaaaaaaacattaattggataacatcaggactcaccctttgctataagantaagactatgtataacaatcaaacaagcctataaataacactagaaactagctttcatttttttttagtagaagcttttcttcaatttcctccanacccagcttgcaaaaatgggtttactgcctgcctttctttgccattttctgnttcttgcaccatcctaatnctagaaggnggtaaccttccaccaaantcatccntctttcaaatgtaantccgatgccaggtcggnccaggactatnatgtttaaaggggngnggtcaaggaatccacctggttaccagcttntagttgggtcctaaatnntttgtnngttgcct

SEQ ID NO: 136449 - DNA, 533 bp, Arabidopsis thaliana columbia
  unsure (1)..(533): unsure at all n locations
tagaaatacaactaatctgatttacagattcagtatacaaggtcgaaaatctaatgatacatatttaacaatggcatttgcttttnatcaatcgagacactatcgttgagggaaagtgttggatacatactttatatagcttcgtttgatcaaaacagagacatcattgttgtgagaaagtgttgtagccattgcaagaagttcttcaaaacccaatgcatcaaggtaatctaccaagagtacaaccatggtttctagactttttgtacttttcagtagacgttccatgaacaaagccacgagattggactctgcgtgtttactcgccaacatcgnaatggnctcaagagagccccggaagnccgagtctttttgatcttccagcattgacggtggttcaagctatgtttccggaagaggtcatttgngntgcaattcctntnaaacagaaaaatngnttctncttgcaacctaataccttntttcaaaaggggggnaaaaaactcncnnggtnttggnaaccntttgtncng

SEQ ID NO: 136450 - DNA, 489 bp, Arabidopsis thaliana columbia
  unsure (1)..(489): unsure at all n locations
tggataatgaaggaaaagaagctcatcgcaagtaaatgtataccattacaagtagcaattaaataagagtaaaacatttatatatgaagatgctgatcatnatgatgacgacgatgatgatgtttgtnatggtggtggtagcgatggtgatggtgatgtgttagttcatatagaatgancgggggaaattccaaactggagctcccaaagctcaaaggagccattaacaaagtcatagtagcctcccttcaaagcaagtnttcctttcacaactccttctctcacaaatggatatgtcaataaggttttctagtgacacattcactgcctccctttggcatcggccacattggncttcaaatnctgaantttnaactttcttncaaaactttttgacttttnctggtaaanagttttgncccatcccttttgaggcagnngggtntttccgncaaggggattgcatagcccttatcccccnnatgnact

SEQ ID NO: 136451 - DNA, 543 bp, Arabidopsis thaliana columbia
  unsure (1)..(543): unsure at all n locations
gcttgaaagaaaaaggtaagattcatgaagtgctgaggaactggcctgagaagaacatccaggtcattgttgtcactgatggggagcgcattttagggttaggagatcttggatgtcagggaatgggaatacctgttgggaaactttctctctacacagcccttggaggtgtccggccatctgcctgtctgcccgtaacaatcgatgttgggacaaacaacgaaaagctattgaacgatgagttctacatagggctccgccaaaggagagctacaggagaggaatactccgaacttatgcatganttcatgacagcagtcaagcagnactatggggggaagtcgttattcagtttgaagnctttgccaaccataatgcttttnatctgttagcttaggtatngncaacacatctttgttttcaattncggtattcagggacagcatcagtgtctttcctgggctatcgntgccctaagattttgggggccnttnaanccaaantccctttnctgggntggnggnttnctggntantgncntgc

SEQ ID NO: 136452 - DNA, 539 bp, Arabidopsis thaliana columbia
  unsure (1)..(539): unsure at all n locations
gataaggatattgaaggagcaagaaaagcaggtgaacttttcggttaccctcttatgatcaagagcaaacgattggcttatgatggacgtggaaatgcagttgccaacaaccaagatgagctttcttctgctgtaacggctcttggaggtttcagtcgtggtttgtatattgagaaatgggcaccttttgttaaggagttagctgttattgtggctagggggagagatggttctatggtttgtaatcccgttgttgaaaccattcacagggataacatatgccatatagttaaagcacctgcagatgtgccttggaagnttaacaaacttgccacccgatgttgcccaaaagggctgtcggttctttagaaaggtgctggtgtttttncagttganctgtccttgacagagggtagccanattcttctaaacgagttncacctggncncacacagtggcntcaacgtcgnttgctgtaaactcncagtttancacncttgcggntntggtggctcccttgggnccgcatanacccnnac

SEQ ID NO: 136453 - DNA, 515 bp, Arabidopsis thaliana columbia
  unsure (1)..(515): unsure at all n locations
ttttgtcgggactgctgcatatgttcctccagaagttctcaactcctctcccgcaactttcgggaatgatctttgggctctcggctgcactctctatcagatgctttcggggacttccccatttaaagatgcaagtgaatggctgattttccaaagaattatagccagagatataaagttcccaaatcatttttcagaagcagcaagagacctcatcgaccggttgctggataccgagccaagcagaaggccaggtgctggctcagaaggttatgttgctcttaagagacatcctttctttaatggagttgactggaaggatctaaggtcccagactcctccaaaactagcttccagatcctgcgtctcagacagcatctcccgagagggntgacacaaatggttctccatggacctgacaaaantttggnggttntttnggcnnacaagacggggggcanagtgtcctccnaaatttttgaataatcgggtncanaactggcttgcttaattgc

SEQ ID NO: 136454 - DNA, 513 bp, Arabidopsis thaliana columbia
  unsure (1)..(513): unsure at all n locations
catatgacattaactccacacatgcagataggtttcttgtttgtncttttacattgaagaatgtctacacatagattacatatagctttttagccaagatcagggacaatgaagtgttcctcatcatcatcatcatatctggtctcaaacctcggcttcttgtgtgaaacatttgacttcataggtttgtatgaatgaacatgacctaaatgcgaaacagaaagctcaggaacttcagctgcaggaagagccttgtcattaatctgatcaccgaagaatcccatgtctgaaaaccaatccaactcccctgccccaagatcaagctgtcctttcttgtcggtggattcaatatcagaggagtgaagaaatcgtcaacagccagggaagtggagtacagaagaagggttgttgttnttctggttgtggtttagcaggnatctnnttngccttcctgttgggttttggaggctcaggtgatctcccaattnctttcctnaananggtngggcangc

SEQ ID NO: 136455 - DNA, 596 bp, Arabidopsis thaliana columbia
  unsure (1)..(596): unsure at all n locations
tcattcgataagacttgatcatcgaattacgcggccgcagggcgtagtaagcgacgaaatgcttcggggagttgaaaataagcgtagatccggagattcccgaataggttaaccttttgaactgctgctgaatccatgggcaggcaagagacaacctggcgaactgaaacatcttagtagccagaggaaaagaaagcaaaagcgattcccgtagtagcggcgagcgaaatgggagcagcctaaaccgtgaaaacggggttgtgggagagcaaaaaaagcgtcgtgctgctaggcgaanggtggagtgccgcaccctagatggcgagagtccagtagccgaaagcatcactagcttatgctctgacccgagtagcatggggcacgtggaatcccgtgtgaattcagcaaggaccacctttcaaggctaaatactcctggntgcccnttagcgaagtagtaccgttagggangggnnacatatttcctattcatnatcctttggncttaaagtcttccnaaanttttttnaaacnnaaanttnctttnccaatantggcttcncttgaatttgtttancttggaagntnntttggnaa

SEQ ID NO: 136456 - DNA, 614 bp, Arabidopsis thaliana columbia
  unsure (1)..(614): unsure at all n locations
ctcgagattgactctctatacgagggtatcgacttctactccaccatcacccgtgctagatttgaggagctcaacatggatctcttggatgatacaaccatacatgaggatgtatatcctcataattcaacttattatggaacttgattaaaagagtaatttaagggaaagcaacattagaatttggagatgaaatcaaggataatttggagaatctcctgaggcttttcttggttaatgaagtgagccactccttncatgaccacaggctcttcaagcaaaggcacatcttccttaaactggggaccatgtatatattccttcacaccaggcatatagtagnccagatcaagctcccctatcacaaactttgtaggnacctgggttttgcttnccacccatggcccaacaactcattgttctgttgaagtacggaggaattnctggccagtgagcctttcttttaaanttgctncggagtaagaacattttcctcgttagcaancggngtgnattgttgctttggtccaaaaatttttncttcgggtantccggcnggggtttnaggagaggnttcatnctttntgtcaccctaannnagntntnattncaat

SEQ ID NO: 136457 - DNA, 576 bp, Arabidopsis thaliana columbia
  unsure (1)..(576): unsure at all n locations
angaaggtacgtacggtcatcgataagtcttgcatcatcgnaattcgccggccgccaattcaaggacgatattgattgtttaccccatccgacaaatggtggaacaacatggctgcatgaggatcgttctgtggagaaggattcagctgttgtttnaaaactgcgttcttgtggtgcaatcttacttggcaaggcaaatatgcatgagttaggcatggggaccaccgggaacaattcaaattacggaaccacaagaaacccgcatgatcctaaaaggtacacgggcggntcttcctcaggttcagcagctattgtagccgctggactatgttcagctgctctaggaacagatggtggaggttccgttcgcattccttcagcactttgtgggtataacggggncttnanaggccaaacatattggtccggacagnntatgncaggggtcattattgttaaggttggnacagtggnaataattgggtcnctttgcttaatctcttggnaggtgcctttntttggtgnattntcaatctttgggnttttaacctncctgnttgggnnaaatttgnaacc

SEQ ID NO: 136458 - DNA, 632 bp, Arabidopsis thaliana columbia
  unsure (1)..(632): unsure at all n locations
catagattttggtatcagagtaaccgaaatcgacagttacagagttcaaattacaaatcgtaaaataaacgacgcaaaactcagaccaaacaacatccatctacacaggcaggagtcatgtttatcaatgtatagaggaaaaaataagtcgttgtttaccttacacaaagctcaaatttggagtattctttagtcgatcttcttgctcccgaacactttcattttctctggtaaaatgccattgatgaacataaaaattgatgataccaacaaaaccttggaaacagcagttattatgacggaagatgatccggtggttgcaacaaagttatgnttagagagtaatcagaattgacctatggcaatgagagctgctttttnccattgaattgtttcagtaaccttctgttttgggntgatttttagctttcaagtgtgagaatgaactattgnccnctttannncctcctgaagtgggcaccaggggttgcctaancggtcctttgttttaagggccaaatgtnttttcaaganggtgnttnccttgangggttgctgnctttatccctnnggcccggaattttttcgtggnccaagnttgntttgncttgggttcaggcttntnttgcngc

SEQ ID NO: 136459 - DNA, 551 bp, Arabidopsis thaliana columbia
  unsure (1)..(551): unsure at all n locations
aatgtatgttgttctgaaccagtaatttggtaccccaaaaaaaagatgcaaaatctcataaattatacaagaatttcaatttctcttacaaaaagaataatcaacctggcttgctcagtttcgaagacaataataaagggtctagcgattgggaacaaacaccatttattgggacggacgactcagaggtgtgatccaaccgcagaagtaaaaaataaagatgcatttggacatatcatcacaccaaggcagtagaaactatgttcttcagttggtggtatcgcgactgtaaaacttgatcaagggttttcgcgggtataccggtgaagtaactcaccgggggaagattctgaggagagtccatgccaggtcgagtgacttggaangatgtttcggggaatcataagnttccctgagccacaaaacttcctcttggacttttccaagggccttanaggttttngganntncnntnnaggaanggggttttttttcaanccccgggtttanttggccttnannggcctttcnaantngnggatttggntcaa

SEQ ID NO: 136460 - DNA, 432 bp, Arabidopsis thaliana columbia
  unsure (1)..(432): unsure at all n locations
tcctcggcttcttttgtctgttattacagttattctccatcttccatatcggaaatggggaattggagatgaactattacaaagagagttgtccaaaagcggaagagataataagacaacaagtggagacgctttactacaaacacggtaacacagccgtatcttggctccgtaatctcttccatgactgtntcgtcaagtcgtgtnatgcgtcgctgctgctagagacagcgagaggtgttgaatctgagcaggaatcgatgaggagtttcggtattaggaacctttnaagtacggtaaggttatcaaagncgganctcgnggaagaggntccctccacagtctnnttgtctganaatttccggcnttttttcggganaccggtntttnaaattttaaaagggccaanattgggtttttaaangncaagga

SEQ ID NO: 136461 - DNA, 534 bp, Arabidopsis thaliana columbia
  unsure (1)..(534): unsure at all n locations
tgcaaggttaaaacacctttaccacacacaaaagtaacaaaaaaaaacaaaattcaataacctttctaagataatcgaagatgctatataaacaacattgaacttttcaaatgctaaattaaaaactgatgactacaactaaaacaacatgaattaccacaaccatgtagaagaaacctacatacaaagagtcttttgtttcccagaaatttgcttatttgttgatggatttggtaagaagaatctgacaagtgttgattaatagtctctcctggttttgtgtccatatggattttgtacagctgacatgtgaccaaaatacagtttcactctctgggtcgagcaagccataagggagcttagagctcgtagccgtgngnagtaatcgtgtattgcaagttggggcacgtcctgactgtctcgtgtnaaaccncttatnaactgtgnaatgtttgnggccnaaattntnnagcctgggggnaaaccttcgggnnnccaactttccntttccagggcattgcccntgnggtgnac

SEQ ID NO: 136462 - DNA, 476 bp, Arabidopsis thaliana columbia
  unsure (1)..(476): unsure at all n locations
gcgttnaattttttatattctgttttaaaatctgtgaaaggaaccatagcgtagaattacataaagtacaatcaatgtttctnatcatataatgtagcaaagttaatcttcgtcgctatcgttcccgaaaacggacgcgattgcnactttcggcttcttgatgctgcttgtgggttggctctttgatataatgccgcttttagaagagaagccaaacttcaatgtttttcgctgatcttggacagcaagtggtgcaaccgtggtcttagccggtgcagaaaccgggacattctctgggacttcttgctggctctgttgcatctgatgttgtttgcnggcatcagccattttagtcatctccctctntttgacgntgctgctctccgtttctttcctctnatnngngggccgttgctcccgggnaatttctttcatttcttttgaatcggtcctaatggnttnnaaccgnntnngnc

SEQ ID NO: 136463 - DNA, 504 bp, Arabidopsis thaliana columbia
  unsure (1)..(504): unsure at all n locations
aaaacaagaatcacgaatcgaatctagaatccaacaatatatattacaacataaaaatttganacacgcaaganttcatcaaattcaagcaggtgtagaggtccagaaaatgtccttgagagctggtctaagagcagtactgcagaagttgttgtactcaagcgtatctccatgatctttcttcacttccacgacaacaaacgacggagccaccgcgaatatctccgcttccaccgccaatttccctttccgaccattctgtttaccttcaatccttactctactctcactctttcctcacatcaaacttattcccaactctcgccgcttnnttccaaactcgnaatcacgntactcgctggcccgngacgtngngnatcttaatctctctttttttccnctttcttcttcttcttaanaacgggggcaaaataaaccctttcgntnacggggttntntgaaacggggttaacggtccggnttttcnttggctttntgacangg

SEQ ID NO: 136464 - DNA, 549 bp, Arabidopsis thaliana columbia
  unsure (1)..(549): unsure at all n locations
tgccttgcactctgtgacaagaagggaagtctgtgatcttgtgggcgatcgcnaggatgctgggttctttatcagcggtagtacagactgtctggttaaaatttgggatccaagtctgcgtggttctgaacttcgagcaactttgaaaggacatactggaaccgtgcgtgctataagctctgacagaggaaagatagtttcaggatcagatgatctatctgtnatcgtatgggacaaacagacaactcaacttctagaagaactgaaaggccatgattcacaggtaagttgtgtcaagntgctttcaggcgaacgtntcctcactgctgcacatgatggacagttaagnttgtgggccgttcggaccgntatgtgttttcaactgtttggccgatntctaggtncatntttcacctggattttgntggctccncaggaattttggtttctnctggcaaggggnnnggttaaaanttttgggnttcggtnttgggacnaaattccanaccttaaggggatcccaaatgggacggccaatttcgattggta

SEQ ID NO: 136465 - DNA, 479 bp, Arabidopsis thaliana columbia
  unsure (1)..(479): unsure at all n locations
cagaatacaaagcttaaaaattggtcgagtaacatagatgtcctcacatgactgcaccaagtcctatcacttgaacatagccataattccaaaacagagaagantaaaacataaaagcttaagccttgggggctactttctccttagccttttggagtttcaacactttcttcacaatcttttgctcttcgacaaggaatgcccgaatgatcctttccctgactgcagaaccagacaagactccaccgtatgctcggtttacagtcctcctgtttcttgataatcttgacctcttgtactcaagagggcctcaagtgagggattccttgaatacggtttgccagtaacaggncatttggggncactagctctntncntttgtgggtttgntaaacccaatttancttcctgggggnttttacngtnangggtcctggttncgangggggaaaccccnnaaaatttnncccaaacccntt

SEQ ID NO: 136466 - DNA, 527 bp, Arabidopsis thaliana columbia
  unsure (1)..(527): unsure at all n locations
caggaaccacataagctcaaaaccggttacacatatccggtttcagagacacagcaaacaaaaactttaagaaacgatgattatgcaagttctaaaattctaacaacttttccaatcaatacttttcaaagatttgaaactgaaatcaccatgtggaatcttcaatatcttcaatatcttcaaatccttttgtcctcacttggtaataattagacttaaagtgtgaatcttatatcgttgtatgagtgtaaaatgattaaaaattgttttggtatatatcaaaaatggaaaccaaaagncaacaataatcatctgggcgncttcaaacatcaaagcccacattggtcttgtttttcatctcttttgntccnataatttggnccaagctgccacggatgagcagggnagnttgggcagagggaaaagnggttttcttcaaggaggaagncncacggggttttntttaagggccttcnntttagggtaaaggccancccttttnagggttttnagnccnnggncnttaa

SEQ ID NO: 136467 - DNA, 516 bp, Arabidopsis thaliana columbia
  unsure (1)..(516): unsure at all n locations
tttccaactctcaccaaagccctaccgaatcaccaaccatcaccgacgtcttctccgcctccgcttacggcgatctccaccaacttaaacatttcgtcgaacataatggctcttccgtctcacttcccgacgataatggcttctacgctcttcaatgggcggcactcaacaattccctccacgttgctcaatatatcatccagcatggtggtgatgttaattcagctgataatatacaacagacaccattgcattgggcagctgttaaaggctccattgatgttgctgaccttttacttcaacatggagctcgtatttgaagctgttgatgtcaatggcttcagggagtnataaggttttgcatcagggttgtttgctgctgtgatcnatagggtttcanattttcttgcctttaacgncctnggtattgaagggggngtccggtnnnttggntggttcaatnggttnncagaanaggcccggtncatcntttttggggnggnttnaaaattgnaa

SEQ ID NO: 136468 - DNA, 555 bp, Arabidopsis thaliana columbia
  unsure (1)..(555): unsure at all n locations
cattatgttactctgaaactctcaactgcaaactacctcttgtggaagatccagttcgagacttggctcaacaatcaacgtttgcntggntttgttactggtgctaatccgtgtcctaatgctacgagatctatcagaaatggagatcaagttacagaagctacaaatcctgactttctcacatgggttcaaaatgaccagaaaatcatggggtggctccttggttcgttgtctgaagatgctctgcgttcagtctacgggttacacacatccagagaggtatgnttttctcttgctaagaagtacaaccgtgtctctgcctctaggaaaagtgacttgcaaacgtcgtttgaacccttgtctctnagaatgagaaatctatgcttgagtatctaaactgtgttaagcaaatcttgtgancagctaganctctattnggttgccttgtccagaaaaccgaaaagattttttgggggccntnaattggttnaggctggaatanattnttttggccacattngtnangggtnctaatgggnccnntccnatgncctt

SEQ ID NO: 136469 - DNA, 508 bp, Arabidopsis thaliana columbia
  unsure (1)..(508): unsure at all n locations
tgcaaccatggctatgcagtcttgtggaatccagacagatttaacctaaacttaggtttatgtccgagagaaaataggttaaaaattgtgttaatagaccaggcgattatgtgggatattatggncggttgttttaaagagagattacttctttcttaatgtattgatccgtattaggaacgttgtgagagtttatgttctgatgaacttatatcttcctcagatgccttttacctcaagacaagaaagccttataccatcactaaacanagagaganatggacagangcagagcatgagaagtttgtagnagcattganactctatggcagagcttggagacgaatcgnagaancatgntggaacaaaaactgcagttcagattcgaagccatgcncagaagtctttacctaaagggtgcccgcgattttggtgtagccctgagtccaattgantcccggctncnangccaaananaagccggttnatcttnccccngaaancttgg

SEQ ID NO: 136470 - DNA, 474 bp, Arabidopsis thaliana columbia
  unsure (1)..(474): unsure at all n locations
ttaaagcttgaaacttgtttcatccatggcggctcgtagagtgtcttctcttttatctcgatctttttcagcttcctctcccttactgtttcgttctcaagggagaaattgttacaatggagggatcttaaggagatttggaacctcttctgctgctgctgaggaaatcataaacccatctgttcaagtttctcacacacagctcctcatcaatgggaactttgttgactctgcttctggtaagacgtttccgactcttgatccgaggacaggcgaagtcattgctcatgtagctgaaggcgatgctgaagntatcaatcgngctgtgaaantgcaagacggncttttatgaagggcctggcctaaatnagtgttatgaaagncaangttttttnggtttcagatttgttggaaacnagcgaggctgggttttngggatngcatggaagcttccanaatctttcccagggtcna

SEQ ID NO: 136471 - DNA, 452 bp, Arabidopsis thaliana columbia
  unsure (1)..(452): unsure at all n locations
cgccacatccgtgttttagcctcacgacgaatcacgatgcaacgcagactcgtaaggttaaaaaaagagtatatctacaggaaaagcttggaaggtgatgagcgtaaggtctatgagcagaagcggctgataagagaagcccttcaagaaggaaagccgattcctactgagctccgaaacgtcgaagccaagcttcgacaagaaattgatcttgaagaccaaaacacagctgttccgcggagtcatatcgatgatgaatatgcaaatgctacggaagcagatcccaaagattttnttgacaacttctagggatccaagtgctccgtcatccggttcactaggganttgagtttttnttccaactctcagggataantcgtggangcaggcntttttgnggncnttgaactcnggtcccagnttnncnggngtantttgggnantggcccggg

SEQ ID NO: 136472 - DNA, 468 bp, Arabidopsis thaliana columbia
  unsure (1)..(468): unsure at all n locations
cgcttttgtaagtgaagaaaagaaggagtttctggtcgaagctgatgttgctgaagacaaaggagctagacatactatggaagatgtttgggtggttttgcctgacgcttctttggatttcccagggacactaaggtgtgcgcattttgcaatttatgatgggcatggaggtcgtttagctgcagagtttgctaagaagcatcttcaccttaacgttctttcagctgggttaccacctggatgtcaaagttgctaaaaaggccattcttgaaggtttccggaaaactgatgagttgctcctgcaaaaaagtgtttcaggaggatggcaaagttgggccacagcagtctgtgtctgggtacttgncaaaaaggtttttnttgccatatcggtgatgctaaggctgttttgnagntccnctanaccaacgaatttgggatcatncagagcaggaatccctcaaanaattt

SEQ ID NO: 136473 - DNA, 565 bp, Arabidopsis thaliana columbia
  unsure (1)..(565): unsure at all n locations
ccctacgaaggtacgaacggtcatcgatnaagtcttgcatatcgtaattcgccggccgcacacgtgtaatcagtgttaaggaatacaggagcggagaagagagatggattttgggagatggttggcgtcgagagtgaatgagcagatgatccttgtatagaacttggaggtgacgagtcttcccaaaatgtaagcttttgaatggaggacgatagtnagattaagcggcagggagagtgtatcaagatggaaagaaacaccaccgtagaggggaatctnatggccttgcaccaccgtcactacgttcgtttcgccatttctaccaaccgtgaacttgttcatctcaccggaggatagtaggaggttggagtagtaaaggagaagaggagnagcngtancgtggaccggcaaaagaaagtttnttggtnccggaaatatatcctnaccgtcggattaaggngnaacatntccctaggactccnttaagtcgtccctncctaaagtcaangccctaccagatncctttacaagactttgggggganggtttttnnnccccggntnaa

SEQ ID NO: 136474 - DNA, 518 bp, Arabidopsis thaliana columbia
  unsure (1)..(518): unsure at all n locations
acatcctacaaagaaaattataagaatgatctgtggagatttaaacgattattgatcatacatctgatagagcagtctctctccccattgttacctcctttagcttagaatcgctagagaagacgcagctggatgtgatagcatggcctggctcaaagacccatcctactgaaaatactctttcgcggtctttgccttgttggagtgagcaccacagctcttgcggaagaataaaagatcattttcttctctcacaatctcaatcaccttctcgccagtaacttgttgtatacaacccgaaatcagaggcgtgaaagctagtggtagcaagtagnactntncaaggacccggtaaccacttgaagctgcagtngtaggtgtagcagcaaagccggngntncggatggacagcctccaagttgtcggcatcttttgaacggnccgtacnctgnttacagnaaactttgcactntgaagncatnttgtggctttctaggtgcanctggannctncnggta

SEQ ID NO: 136475 - DNA, 511 bp, Arabidopsis thaliana columbia
  unsure (1)..(511): unsure at all n locations
ttcatctctccaattcgcttgctccgacgatatctccaccaatgtcgccgccgctgagcggttcgtctctctctcttcctccctccctctctctaattatcaatctctcccatcttcctcctccttcaaatttccatatgcgtataagcttctcgagcaatttattgtgatcacggacctttggaatcgaactattcaatttcaagctctgatatagattcccccgttcgaatccgatttcagtatctgagaatggaattgtttacattttacgnagattagtcagagaagctcacgntaaaggagctaatatcattcttattcaggaactttttgaaggntattacttctgtnaagcacaaagggaggcttcttaagngggccaagccttacaaggaccatccaccattgaaagggttcagaggtggaaaagnaattggggaggggtacccntaggtnnttngggggaatantnnncatacaancggtgnanattggntgtgnctactgg

SEQ ID NO: 136476 - DNA, 451 bp, Arabidopsis thaliana columbia
  unsure (1)..(451): unsure at all n locations
tgacaaatcaatttattttatacagcttttgttgttcttccttgagcaatagtgcacgtagaatcgtatcgcaaatgccatcgtagtgtacgatcagatgtccgccttgggggatttcgtggtagttgatcaaaggttgtttctgcagaatgcatctttgaagttgaaatggaacaactttgtcttccttaccatgccagatgtgaatatagctctttgtactgatgcttagatccgcgggttcgaagtcccattgcccgaaacaaaccataaaatcgtcccttagagtatcgaaaacatttctttccccgtagctntttccttagtaaggcatngggnaanccagttttnggtttgaggacttctatgtcgggggttgttaaaggagncccgnnttnttttaaggccnnnctagttnaaggggngggtttttaatgnnccccaatnnaaa

SEQ ID NO: 136477 - DNA, 523 bp, Arabidopsis thaliana columbia
  unsure (1)..(523): unsure at all n locations
tgatggtgctgctgttgtccagtaccttgtttggctcgacaatcagatgcaggagctctatggagcatctggatacttcttggaagcagaggcaagcaaaaagaaaccatcagaaacctctaagcttactgaagtgactgtnagcgataagctggaaagtcttcgagcttcaaaagagcattttagaggtttaagctttcctactatatcatcggttggttcaaacgctgctgttattcattattcaccagagccagaagnttgtgccgagatggaccccgacaaaatttacttatgtgattcaggagcacagtatctcgatgggacaactgatatanccccgaacggttcactttggnaaaaccttcagtcatgaaaagggattctatacttgcgggttttaaaggggcatgttgnnctnggaaattnctcggttccaangggacaaacgggttntacacttnnnntttttgctcgggcccccttttggaagnttggtttggtttngnatgggnctggntgc

SEQ ID NO: 136478 - DNA, 614 bp, Arabidopsis thaliana columbia
  unsure (1)..(614): unsure at all n locations
ttcgtacggtcatcnttaaagcttgaatcatacgtaattacgnggccgcccacagtatatatctagggtattcaagactggaatgtgaagtcagagtgatcggtcttaagacaagagagaactcaaagaattggaggctgtagagttggatctccagcaatcgcatctgcaaatactcctagatcctttcacgacccgctgtgacctcctcgtgtgaagcttgatattcaccagctttccggctatcattctccatgtcaagtcctctggacctaatggctgagcagggctcgaatataggaaatggcgagagtattgagcaagattattctgcaaccccttgacttggaagggcgtaagacttctcagatggtttacaagccanccntgggttgtatttgcaatcaacttggangggaaccaaggcaccagcaaacccttctttgtaaatcaaggtatttccttcaaaaaaggnaatttccaanctcgncaacttggcttttnaacaggggtttncaagcccacttggcaaattgggatttaaaccaaccnncgcttnaagnttngggntnncaccngnagggcancaancagggttaaangcnttcggggtt

SEQ ID NO: 136479 - DNA, 543 bp, Arabidopsis thaliana columbia
  unsure (1)..(543): unsure at all n locations
tgcttatttgcntcttattattatctttggctccaaaacttgaggctgagctcgcaacggtccaacatgctccaaaccccgatggctctatcagttttctggtgattggagattggggtaggcatggactctacaaccaatcccaagttgccctccagatggatatcaattttgtggtatcgacgggtgataacatctacgataacgggatgaaaagtatcgatgatcccgcctttcaactctcctttagtaatatctacacttctcctagcctgcaaaagcctttggtaccttgtattggggatcacgnctatagaggagatgttgagggcacaattgagtcctatcctcagatctatggggtagccgtttgggatttgcatgagatccttcaatcgnttgacggctgagatncgcaggggtctttctttngtcgncaanaactcccttttgnagntnnctanttccccagnccaaaggccaaanttcggttgggnggggntnccgnggaatcctcctaagcnntnttacgggttgggatgg

SEQ ID NO: 136480 - DNA, 584 bp, Arabidopsis thaliana columbia
  unsure (1)..(584): unsure at all n locations
aatccaagatgatacagtatttcatctacatcaaatccattttatttgaagaaacataagtctgangaagagagtaataacagcgcgaaggcgaaaatagaaaccgagcaaacacagaaggcacaaagagagagagagagagagagagagagcccacacctcagaaaataatgtctgaatccttctcagcaccaccaacaaggaagttacgagcagcgtttatcgaaatccctctctgcatagagatgtcttcaagaaccatttcctcagcaaactccttagcattagctgcctgtcgttcgacttccctcctctntgtatcccttgcagcttcttctacctttcactcgtttttgcagaaccaaaagccctaatctttcttcgncccaccttnctttcctttggcggaaaaacctcaactttnnggaccagaggttttcggaaatagccgnaatttnaggtttttcttggggttttaaaaacaaaatnggnctttggttttagggangttttggcctttttgggnanggtgganaaggttncgttttcgaagggggggancnnaanngcttnntntttccttt

SEQ ID NO: 136481 - DNA, 522 bp, Arabidopsis thaliana columbia
  unsure (1)..(522): unsure at all n locations
cgatgacacggttcagttccagcaaagaatctcgaaccgggccggtttgggagacgagacgtatctgccacgtggcataacttcaacgcccccgaagctaaatatgtcagaggcacgtgccgaagctgaagccgttatgtttggagccttagattccctcttcgagaaaaccggaattaaaccggccgaagtcggaatcttgatagtaaactgcagcttattcaatccgacgccgtctctatcagcgatgatcgtgaaccattacaagatgagagaagacatcaaaagttacaacctcggaggaatgggttgctccgccggattaatctcaatcgatctngctaacaatctcctcaaagcaacccctaattcttacgntgtcgtggtaagacggaaacatancctaactggtcttcggaataaccggnaatgtccttgaactnatttccgaatgggcggnttncgttttctttntaacgccgtaaanccggagnagnaaagnctcgtngnacgtgtttggta

SEQ ID NO: 136482 - DNA, 342 bp, Arabidopsis thaliana columbia
  unsure (1)..(342): unsure at all n locations
atttacgtacggatatcntttaagtcttntatcatncgttttacgcggccgnaagagattaacacacacaaaaaaaaatggcatcaacctcactcctcaaggcttctccggtgttggacaaatccgaatgggtcaagggacaaagcgttctnttccgtcagccttcttccgcttctgtcgtcctccgnaaccgtgccacctccctcaccgtccgtgccgcttccttctacgccgatgagcttgttaagacagcgaaaactattgcgtctcccggacgtggaatctttagcgatggnngagtcaaangngactttgngggnaaacgtttggnttcgatagggg

SEQ ID NO: 136483 - DNA, 482 bp, Arabidopsis thaliana columbia
  unsure (1)..(482): unsure at all n locations
actcgtgttattccgatgaagctggaaactatagatttatgaaagatgcaacattagcaccaaagttatctcacttcgactacataatcatcggaggaggaaccnctggatgtgcattagccgcaacgctctctcaaaacgcaaccgttctagtcctcgaacgcggaggttccccttacgacgatccagcggcaacagacatcggaaacttngcaaacacactcttgaacataactccaaactcatggtcgcagcttttcatctccgaagacgggcgttttcaactcacgcgctcgtgtactcggtggaggcacagtcataaacggaggnttctactcacgtgcggaagaagatttcgtggcggaagaggattgggnganaacgnggtcnagcggnttncgagtggntcgngangaagtggttttnaccnccggttanaaatggaattagnggttcggatnggtttttggaanttgtgtnct

SEQ ID NO: 136484 - DNA, 470 bp, Arabidopsis thaliana columbia
  unsure (1)..(470): unsure at all n locations
cgtgaaggaagctggtaagcatcatagagaagatgaaacctgggatcaaaaggcgagcaacctttcaagtaaagcaagtatgagtgataaacagatggntcttnttcgtcgaaagttcatggaagctaaacacttggtaacagatgataggcttcataggtccagtgagttacaagaagcactccaagttttaagttctaacaaagatttgttcgttaagtttctccagggntcaaattctttntttccacagcatctttctgactttcaaccagttcctcctcatccagatgctaagcgcattacggtattnaggccntcaaaggctgttggtgttcagaaangtttngctgnagatagtanggnnccaccttctttgaatcaggaaactggatggttccntgctgtcagcanctcgggtaggtgtttttnaggctantcctggaagnttttggtttaaggngattgtt

SEQ ID NO: 136485 - DNA, 527 bp, Arabidopsis thaliana columbia
  unsure (1)..(527): unsure at all n locations
cgttttcatggaggcaggtcgtctagcaacagagtacttggtttctcaaggtgttctaccacaaactgtgctttccagtaaatggcagaatggtaatttnaggaagcaagctggagagtttcanagttccaggtctcaagaagaagcccgaatggatgtttcagctccagctgcagagaaaaggaggtatattgatggctatagctcagctggatccaggaatagcttgaaaggaaggagatcccaccgttatgactcggattttgggaggagcggatcttggtcagagagaagtaaagcttttaagactgagactggtgacggctctgtgtctgggcatcaagaagagcagccgcttgcttgaagntatttcctagctcggttcagcggtcagcctcctggtgantttntgggaaattntnaggngcaggtgnttccnagnctnttttggcaaggacaatttcccgggtggggcnagcctnggcaaggtcctcggtccnggaanatttgtcangtttnatttttnt
